United States Patent Application Publication US 2014/0259212 A1 - sequence listing, part 30

SEQ ID NO: 100679 - DNA, 1540 bp, Arabidopsis thaliana
  CDS (134)..(1345)
acgaaaacaatggaaaaagcaacggagagacaaaggatactgcttcgtcatcttcaaccttcgtcatcttccgacgcctctctctctgcctcagcttgcttgtccaaagacagtgctgcatatcaatatggagatgatgttgtcattgtcgcgggcacaaaggactgcactttgcaaggcaaaacgtggcagcttcaaggatacatttccagacgagttgcttgcctctgtattgagagcattgatagagaaaactaatgtaaacccaagtgaagttggtgacattgtagtgggtactgttttgggaccaggatctcagagagccagtgaatgcaggatggctgcgttctatgctggtttccccgaaactgttcccatcagaaccgtgaacagacagtgttcatctgggcttcaggctgttgctgatgttgccgctgccataaaagctggtttttatgacattggtattggagctgggctggagtccatgacaactaatccaaggggatggaaaggatcagtcaacccaaatgtgaagaagtttgaacaagctcacaattgccttcttccaatgggtattacttcagaaaatgtagcacaccggtttaatgtttcaagggaggagcaggatcaagctgctgttgattctcacagaaaggctgcttctgctactgcttccggaaagtttaaggatgagataacccctgtaaaaaccaagattgttgacccaaagacaggtgatgagaaacccataacagtttctgtggatgatgggattcgacctaacacaaccctttccggacttgcaaagctgaagccagtgtttaaggaagacggaaccacaactgctgggaattctagccaattaagtgacggtgctggagctgttctccttatgaggagaaatgtcgcaatgcagaaaggccttcccattcttggtgtattcaggacattttctgcagttggtgtggacccagccatcatgggggttgggccagccgttgccattcctgctgcagtcaaggcagctggtttagaactcaatgacgtcgacttgtttgagattaacgaggcatttgcatctcagtttgtttattgtcggaacaagctcgggctagacgcggaaaagatcaatgtcaatggaggagccatagccattggacatcccttgggcgctacagcaggagccagatgcgttgcgacgctgctgcatgagatgaaacgacgtggtaaagactgtcgttttggcgtagtgtcaatgtgtataggttcgggaatgggagcagccgctgtgtttgagagaggaggcggtgtggatgagctctgtgatgtccggaaagtctaatgacaataaggccttttgaccaaggaccctagctaaggaccaaattagaacacagtactacaaataaacattatcacaaataaatgcgttctagatgaataaatcataacgatagtacaatacatgagggaaaacttcttgttattttttaactctcttttgttatatggttggaatatatacagatactctttg

SEQ ID NO: 100680 - protein, 403 aa, Arabidopsis thaliana
MMLSLSRAQRTALCKAKRGSFKDTFPDELLASVLRALIEKTNVNPSEVGDIVVGTVLGPGSQRASECRMAAFYAGFPETVPIRTVNRQCSSGLQAVADVAAAIKAGFYDIGIGAGLESMTTNPRGWKGSVNPNVKKFEQAHNCLLPMGITSENVAHRFNVSREEQDQAAVDSHRKAASATASGKFKDEITPVKTKIVDPKTGDEKPITVSVDDGIRPNTTLSGLAKLKPVFKEDGTTTAGNSSQLSDGAGAVLLMRRNVAMQKGLPILGVFRTFSAVGVDPAIMGVGPAVAIPAAVKAAGLELNDVDLFEINEAFASQFVYCRNKLGLDAEKINVNGGAIAIGHPLGATAGARCVATLLHEMKRRGKDCRFGVVSMCIGSGMGAAAVFERGGGVDELCDVRKV

SEQ ID NO: 100681 - DNA, 1374 bp, Arabidopsis thaliana; identical to SEQ ID NO: 93018
  CDS (13)..(1374)

SEQ ID NO: 100682 - protein, 453 aa, Arabidopsis thaliana
MERQKILLRHLNPVSSSNSSLKHEPSLLSPVNCVSEVSPMAAFGDDIVIVAAYRTAICKARRGGFKDTLPDDLLASVLKAVVERTSLDPSEVGDIVVGTVIAPGSQRAMECRVAAYFAGFPDSVPVRTVNRQCSSGLQAVADVAASIRAGYYDIGIGAGVESMSTDHIPGGGFHGSNPRAQDFPKARDCLLPMGITSENVAERFGVTREEQDMAAVESHKRAAAAIASGKLKDEIIPVATKIVDPETKAEKAIVVSVDDGVRPNSNMADLAKLKTVFKQNGSTTAGNASQISDGAGAVLLMKRSLAMKKGLPILGVFRSFAVTGVEPSVMGIGPAVAIPAATKLAGLNVSDIDLFEINEAFASQYVYSCKKLELDMEKVNVNGGAIAIGHPLGATGARCVATLLHEMKRRGKDCRFGVISMCIGTGMGAAAVFERGDSVDNLSNARVANGDSH

SEQ ID NO: 100683 - DNA, 1797 bp, Zea mays subsp. mays
  CDS (281)..(1666)
actagagggtcatggcatggggcatggatggactggtgcgtgtgatcctgatcttgccgagtgcaatcgagatccgtgccagcccgtccatactgcggtggcgtggcggtgacgtgccggcgcggcgcggcgcggcgccgataagaggtagagagaggaaaaaaaagaacaatcaattctccagaccctccccggcaaccgcgtccggccgtccgcttccgtttccttggataaccacgacgcccgccggcaagcgaaagcgaagcgagccaacccagccatggagaaggcgatcgatcggcagcgggtcctcctggcgcacctcctcccctccccctccgccgcctcctcgcagcctcaccttgcggcgtcggcgtgcgcggccggggacagcgccgcctaccagaggtcctcctccttcggggacgatgtcgtcgtcgtcgctgcctacaggacgccgatatgcaaggccaagcgaggaggcttcaaggacacctacccagaggacctcctcactgttgttctcaaggctgttctggacaacactagaatcaatccagctgacatcggtgacatcgtcgttgggacggtgctcggccctggttcccagcgtgcaaacgagtgcaggatggctgcgttgtttgctggcttccctgaaaccgtccctgttagaactgtcaaccgccagtgttcatctgggctacaggcagtagccgatgtcgcagctgctataaaggctggttactatgacatagggattggtgctggtttggaatccatgtccataaattccattgcttgggaaggacaagttaacccaaaaataagcgcattccagaaagcacaggattgtcttctgcccatgggaattacgtctgaaaatgttgcccatcgatatggtgtaaccaggcaagagcaagatcaggccgccgctgagtctcataggagagctgctgcagccacggcctctggaaaattcaaggatgagatcgtcccggtgccaacaaagatcgttgatcctaaaactggagaggagaaggaagttgtgatatcagttgatgatgggattaggccagggaccacagcatctggattggcgaaactgaaaccagtttttaaaaaggatggaactacaactgcaggcaattccagtcaagtgagtgatggtgctggagctgttcttctcatgaaaagatctgtggctctgaagaaagggctgcccattcttggtgttttcaggagctttgcggctgttggagtggatccagctgttatgggtgttggtcctgctgtggccattcctgctgctgtgaagtctgcaggccttgagattggcgacattgatctgtttgaactgaatgaggccttcgcctctcagtttgtctattgctgcaacaagttggggctggaccgttctaaagtaaatgtaaatggaggcgcgattgcccttggacaccctctgggtgcaacaggtgcccggtgtgtggctactcttctaaatgaaatgaagcgccggggcagagactgcagatttggtgttgtcaccatgtgtatcggatctggaatgggggcagcagctgtgttcgagcggggagacgcggtggatggactctccaacgtgagggacatgcaggcacataattttctgtctaaggatgcgaagtagaggcgcagaaaaaccatccatcctagagcagcataagcctgctgcatttgtaatatattcgaaatccgtatcttttttcttcacaagcactactctatatacgatgaataaaagggcgacaatacagtgtc

SEQ ID NO: 100684 - protein, 461 aa, Zea mays subsp. mays
MEKAIDRQRVLLAHLLPSPSAASSQPHLAASACAAGDSAAYQRSSSFGDDVVVVAAYRTPICKAKRGGFKDTYPEDLLTVVLKAVLDNTRINPADIGDIVVGTVLGPGSQRANECRMAALFAGFPETVPVRTVNRQCSSGLQAVADVAAAIKAGYYDIGIGAGLESMSINSIAWEGQVNPKISAFQKAQDCLLPMGITSENVAHRYGVTRQEQDQAAAESHRRAAAATASGKFKDEIVPVPTKIVDPKTGEEKEVVISVDDGIRPGTTASGLAKLKPVFKKDGTTTAGNSSQVSDGAGAVLLMKRSVALKKGLPILGVFRSFAAVGVDPAVMGVGPAVAIPAAVKSAGLEIGDIDLFELNEAFASQFVYCCNKLGLDRSKVNVNGGAIALGHPLGATGARCVATLLNEMKRRGRDCRFGVVTMCIGSGMGAAAVFERGDAVDGLSNVRDMQAHNFLSKDAK

SEQ ID NO: 100685 - DNA, 1515 bp, Arabidopsis thaliana
  CDS (95)..(1339)
gcatattgtctacttttagattttgatatctattggaactcttactagctcattcatccgtcggcctgtgaattgtgtttctgaagtttccccaatggctgcttttggagatgacattgtgattgtagcggcatatcgtaccgccatttgcaaagcgagacgtggaggtttcaaagacactcttcctgatgatcttcttgcttctgttcttaaggctgtagtggaaagaacatctttggatccaagtgaagttggtgatatcgttgttggtaccgtgatagcgcctggttctcagagagcaatggagtgtagagttgcagcttattttgctggttttcctgactccgtgccagttagaactgtcaatagacaatgctcatcaggactacaagcagttgctgatgttgctgcttccattagagctggttattacgacattggtattggtgctggagtggaatcaatgtcaactgatcatattcctggaggcggctttcatggctctaatccaagagcacaggatttcccaaaagcccgtgattgtttgcttccaatgggaattacttctgaaaacgttgcagaaaggttcggtgtcacaagagaagagcaagatatggctgcggtggagtctcacaaacgcgctgcagctgcaatcgcgtctggtaaactcaaggatgaaatcattcctgttgctactaagattgtggaccctgagactaaagcagagaaggcaatcgtcgtatctgttgatgacggtgtacgtccaaactcaaacatggcagatttggcaaagctgaagactgtctttaaacagaacggttccaccacagctggcaatgctagtcagatcagtgatggtgctggagcagtactgctaatgaagagaagtttggctatgaagaagggacttcccattcttggagtattcaggagttttgctgttactggtgtggaaccatctgtaatgggtattggtccagctgttgccattcccgctgcaactaagctcgcagggctcaccgtcagcgatattgatctattcgagatcaatgaggcatttgcatctcagtatgtgtactcttgcaagaagttagagctggatatggaaaaggtcaatgttaatggaggagccattgctattggccatcccctgggtgctacaggagctcgatgtgttgcgacattgttgcacgagatgaagcggagaggaaaagattgccgctttggagtaatctcaatgtgcataggcactggaatgggagctgcagctgtttttgagaggggagactctgttgataacttgtccaacgctcgtgtggctaacggggatagtcattagaacatcgaagagagcttgaataagtagaagtaatgatgcattgagtctaataaatatgatgctttagctctttcacattgctgaacaatgaaaacttttgtcattctgagtttaaaatcaactacttttctctgaacaaagtgttaaatctaaaaccaaaagttacatccttccgc

SEQ ID NO: 100686 - protein, 414 aa, Arabidopsis thaliana
MAAFGDDIVIVAAYRTAICKARRGGFKDTLPDDLLASVLKAVVERTSLDPSEVGDIVVGTVIAPGSQRAMECRVAAYFAGFPDSVPVRTVNRQCSSGLQAVADVAASIRAGYYDIGIGAGVESMSTDHIPGGGFHGSNPRAQDFPKARDCLLPMGITSENVAERFGVTREEQDMAAVESHKRAAAAIASGKLKDEIIPVATKIVDPETKAEKAIVVSVDDGVRPNSNMADLAKLKTVFKQNGSTTAGNASQISDGAGAVLLMKRSLAMKKGLPILGVFRSFAVTGVEPSVMGIGPAVAIPAATKLAGLTVSDIDLFEINEAFASQYVYSCKKLELDMEKVNVNGGAIAIGHPLGATGARCVATLLHEMKRRGKDCRFGVISMCIGTGMGAAAVFERGDSVDNLSNARVANGDSH

SEQ ID NO: 100687 - DNA, 1993 bp, Sorghum bicolor
  CDS (103)..(1494)
aatacttctccgaaacaaattctccggaacagcctcccccgcaacgacttccgcttccgcttccttggataaccacaccacctgccccgaccgccctcagccatggagaaggcgatcgatcggcagcgggtcctcctggcgcacctcctcccctccgcctccgcctccgcctcctccgcgcagcctcagcttgcggcgtcggcgtgcgcggccggggacagcgccgcctaccagaggacctcctccttcggggacgatgtcgtcgtcgtcgctgcgtaccggacgcccatatgcaaggccaagcgaggaggcttcaaggacacctacccagaggacctcctcactgttgttctcaaggctgttctggacaacactagaatcaatccagctgacattggtgacattgtggttggtacggtgcttggtcctggttcccagcgtgcaatcgagtgcaggacggctgcgttgtttgctggattccctgaaaccgttcctgttagaactgtcaaccgacaatgttcatctgggcttcaggcagtagccgacgtcgcggctgctataaaggctggttactatgacatagggattggtgctggtttggaatccatgtccataaattccatgggttgggaagggcaagttaacccaagaataactgaactccagaaagcacaggattgtcttctgcccatgggaattacttctgaaaatgtcgcccatcgatatggtgtaaccaggcaagagcaagaccaggctgctgctgagtctcataggagagctgctgcagccacggcctctggaaaattcaaggatgagatcgtccccgtgccaacaaagattgttgatcctaaaactggagaggagaagaaagttgtgatatcagttgatgatggggttaggccagggaccacagcatctggattggcaaaacttaaaccagtttttaaaaaggatgggactacaactgcaggcaattctagtcaagtgagtgatggtgctggagctgttcttctcatgaaaagatctgtggctctgaagaaaggacttcctattcttggtgttttcaggagctttgccgctgttggagtggatccagctgttatgggtgttggtcctgctgtggccattcctgctgcagtgaaatctgctggccttgagattggagacattgatctgtttgaactgaatgaggcctttgcctctcaatttgtttattgctgcaacaagttgggcctggaccgttccaaagtaaatgtaaacggaggcgcgattgcccttggacacccactgggtgcaacaggtgcccggtgtgtggctactcttctaaatgaaatgaagcgccggggcagagactgcagatttggcgttgtcaccatgtgtatcggatctggaatgggggcagcagctgtgttcgagcggggagatgctgtggatggactctccaacgtgagggacacccagacacaaaattttctgtcaagggatgcaaagtagaggtgcagaaaaatcatccatccgagagcaacataagcctgctacattagtactaatacgacatccgtatatttttttcttcacaaacactactctgtatacgacaaataaaagggcgtcatgcagtatcctcttgtagccacctaagatgcgaaatcagaaaagaaaagggccgggtgttgtagacagctcaatgttctgagcttgttctgttattgccttttgtctcagactgaacaaacagcaaaaatcttgctcgttgccttgtgtgtatttgaaccagaaggatgaagagcgcctttgtgcactgggctgattaaaatccccaatctgctgttgagacgcttgcttgctataccactgttgtctggcaatagtagttggccgcattttgtccagtgtgctggatggatgaactggtaaccgattcagcagtgtagcttatagttgtaggtgctgtttgttaagataggccatgcctgaaatggctccatcattt

SEQ ID NO: 100688 - protein, 463 aa, Sorghum bicolor
MEKAIDRQRVLLAHLLPSASASASSAQPQLAASACAAGDSAAYQRTSSFGDDVVVVAAYRTPICKAKRGGFKDTYPEDLLTVVLKAVLDNTRINPADIGDIVVGTVLGPGSQRAIECRTAALFAGFPETVPVRTVNRQCSSGLQAVADVAAAIKAGYYDIGIGAGLESMSINSMGWEGQVNPRITELQKAQDCLLPMGITSENVAHRYGVTRQEQDQAAAESHRRAAAATASGKFKDEIVPVPTKIVDPKTGEEKKVVISVDDGVRPGTTASGLAKLKPVFKKDGTTTAGNSSQVSDGAGAVLLMKRSVALKKGLPILGVFRSFAAVGVDPAVMGVGPAVAIPAAVKSAGLEIGDIDLFELNEAFASQFVYCCNKLGLDRSKVNVNGGAIALGHPLGATGARCVATLLNEMKRRGRDCRFGVVTMCIGSGMGAAAVFERGDAVDGLSNVRDTQTQNFLSRDAK

SEQ ID NO: 100689 - DNA, 1775 bp, Fragaria x ananassa
  CDS (37)..(1413)
cgctcctttgatttccttgtttcaattatcaagagtatggagaaagcgatcaacaggcagaaggttctcctcgaccatctccgaccttcttcttcttccgacgactcttctctctccgcgtcggtatgtgcggctggggatagcgctgcgtatgctaggaatcatgtctttggggacgatgtcgtcatcgttgcagcttttcgcactccactctgcaaggctaagcgtggcggcttcaagtatacttatgctgatgatctcctcgcacctgtcctcaaggccgtggttgagaaaaccaatctcaatcccaaggaagtcggggatattgttgtcggtaccgtcttggccccaggatctcagagagctagcgaatgcaggatggctgctttctatgctggcttccctgagactgtgccggttagaactgtgaacagacaatgttcgtctggcctccaagcagttgctgatgttgctgctgccattagagcagggttttatgatattggcattggtgctggtttggaatccatgactgcaaacccaatggcatgggaaggggatgttaatcctaaagtaaagatctttgaacaagcccagaattgccttcttcctatgggagtcacctcagaaaatgttgctcatcgttttggtgtttcaagacaggagcaagatcaggctgcagttgactctcatagaaaggcagctgctgctgctgctgctggtagatttaaagatgaaatcatccctgtggcaaccaagattgttgatccaaaatctggtgatgagaaacctgttacaatctctgttgatgatgggattcgaaacacaacattggcggacctagcaaagctgaagcctgtgtttaagaaagatgggaccaccactgctggtaattctagtcaagttagtgatggtgctggagctgttctcttgatgaagagaagtgttgccgaccaaaaaggattgccgattcttggtgtattcaggaattttgttgctgttggtgtggatcctgccatcatgggtgttggcccagctgctgcaattccagttgcagttaaggcagctggtttagagcttgatgatattgacctttttgagataaatgaggcttttgcatcccaatttgtgtattgccgtaacaagctgggacttgatccagaaaaaatcaatgttaacggaggtgcaatggccatcggccatccacttggtgcaacaggtgcccggtgtgttgccactcttttgcatgagatgaagcgtcgtggtaaagactgccgctatggagtgatctcaatgtgcataggcacagggatgggtgcagccgctgtttttgaaagaggagaccggaccgatgaactctgcaatgctcgcaaggttgaatcactcaacttcttatccaaggatgttcggtagtagagaatggttagtgacaggagctattccaatcaataatgtttggtggagtctgaaaatcatagtaaagcactggaataacgttgctaagtttttcgttgggtactaccttgtttattgggatggaatacacatgtagttggtttgttctcccagacctcccacttgttggcatattcatttttgtccaacctaaaaagttccattttataggacttcatctcaataacattgggtttgcgccactaaagcagtgcctaaaactgtaattgggtaattttggtatacctgtttgctacttttcttttctaagttaatcaagccctgcccacctcatataaaaaaaaaaaaaaaaaaaaaaa

SEQ ID NO: 100690 - protein, 458 aa, Fragaria x ananassa
MEKAINRQKVLLDHLRPSSSSDDSSLSASVCAAGDSAAYARNHVFGDDVVIVAAFRTPLCKAKRGGFKYTYADDLLAPVLKAVVEKTNLNPKEVGDIVVGTVLAPGSQRASECRMAAFYAGFPETVPVRTVNRQCSSGLQAVADVAAAIRAGFYDIGIGAGLESMTANPMAWEGDVNPKVKIFEQAQNCLLPMGVTSENVAHRFGVSRQEQDQAAVDSHRKAAAAAAAGRFKDEIIPVATKIVDPKSGDEKPVTISVDDGIRNTTLADLAKLKPVFKKDGTTTAGNSSQVSDGAGAVLLMKRSVADQKGLPILGVFRNFVAVGVDPAIMGVGPAAAIPVAVKAAGLELDDIDLFEINEAFASQFVYCRNKLGLDPEKINVNGGAMAIGHPLGATGARCVATLLHEMKRRGKDCRYGVISMCIGTGMGAAAVFERGDRTDELCNARKVESLNFLSKDVR

SEQ ID NO: 100691 - DNA, 1651 bp, Glycine max
  CDS (48)..(1439)
gcttcttctttctttttttcaatttccaaatcacgaaactcaagaagatggagaaagcgatcaacagacagaagattttgcttcatcatctcaacccttcatcatccacccaccccaacgaatcatcctccctccatgcttcagcatgtgtggcgggggatagcgctgcttatcaaaggacatcgacattcggggacgatgttgtgatcgtggctgcttatcggactgctcattgcaaagctaaacgaggtggtttcaaagacactcttcctgatgatccactggctcctgttttgaaggctgtaattgagaaaaccaatgtgaacccaagtgaagttggggatattgttgtaggtagtgtattggctcctggagctcaaagagctagtgaatgccgaatggctgcattttatgctggttttcccgaaactgtgcctgttaggaccgttaataggcaatgttcatctgggctccaggctgtcgctgatgtagctgctgctataagggctgggttctatgacattggtattggtgccggtttggaatctatgaccactaatccaatgggatgggatggatcagtgaatcctaaggtaaaaatgtttgaacaagcacaaaactgccttcttcctatgggaattacctctgaaaatgttgcacagcgctttggggtttcaaggaaggaacaagaccaggctgcagttgagtctcacaggcgagctgctgcagctactgctgctggtaaatttaaagatgaaattgtcccagttaccaccaagattgtggacccaaaaaccggtgaggagaaatctgtcaccatttctgttgatgatggaattcgacctggcacaacagtgtctgatctaggaagactcaaacctgtgttcaagaaagacggaagcaccactgctggtaattctagccaggtgaccgatggggcttcagctgttctgctgatgaaaagaagtgttgcattgcaaaaggggctacccattcttggtgtattcaggacttttgcagcagttggtgttgatcctgccatcatgggtgttggccctgctgctgcaattcctgttgctgttaaggctgcaggtctagagcttgatgatattgatctttttgaaataaatgaggcatttgcctcccagttcgtgtattgccgtaacaagctagggcttgatccagaaaagatcaatgttaatggaggtgcaatggcaattgggcatcctctgggttcaacaggtgctcgatgtgttgcaactctgttgcatgaaatgaagaaacgtggcagggactgtcgatttggagttatatctatgtgcataggtactggaatgggggcagctgctgtttttgagagtggtgattgtgctgatgagctatgcaatgcccggaaagtggatgaccttcttttatccaaggatgctcgcttgaaatagttacttcatactcactatatttggtcatcaaataagaaatcacaataaagtctttttctatggtagtgataatgtcaaccactcctcaagcgtttaatcctttctacttattagacttgcattaatttgtgatatattttggacaattgtaaacatacacttaatttttcttctatatctttttcactccaaaaaaaaaaaaaaaaaaaaaa

SEQ ID NO: 100692 - protein, 463 aa, Glycine max
MEKAINRQKILLHHLNPSSSTHPNESSSLHASACVAGDSAAYQRTSTFGDDVVIVAAYRTAHCKAKRGGFKDTLPDDPLAPVLKAVIEKTNVNPSEVGDIVVGSVLAPGAQRASECRMAAFYAGFPETVPVRTVNRQCSSGLQAVADVAAAIRAGFYDIGIGAGLESMTTNPMGWDGSVNPKVKMFEQAQNCLLPMGITSENVAQRFGVSRKEQDQAAVESHRRAAAATAAGKFKDEIVPVTTKIVDPKTGEEKSVTISVDDGIRPGTTVSDLGRLKPVFKKDGSTTAGNSSQVTDGASAVLLMKRSVALQKGLPILGVFRTFAAVGVDPAIMGVGPAAAIPVAVKAAGLELDDIDLFEINEAFASQFVYCRNKLGLDPEKINVNGGAMAIGHPLGSTGARCVATLLHEMKKRGRDCRFGVISMCIGTGMGAAAVFESGDCADELCNARKVDDLLLSKDARLK

SEQ ID NO: 100693 - DNA, 1659 bp, Zea mays
  CDS (75)..(1460)
agaacaaacccagttgaattttcccagaaagttttctcctttttttcttgaattaagcttaacagtgagaaaagatggagaaagccactgaaaggcagaagattctgattcgtcatctcaatccactttcttcttctccttctcttcctagcattaatgataataaacctactcttctctccgctgtgaactgtgctgctgagctttccccaatggctgccttcggagacgacgttgtgatcgttgcggcgtatcgcactgccatctgcaaagctaaacgtggagggttcaaagatactctcccagatgatcttcttgcttctgttctcaaggctgtggtggaaaggacgtctttggatccaagtgaagttggggatattgttgttggtaccgttatagctcctggctctcagagagccatggagtgtagagtagctgcttactttgctggctttcctgactctgtgccaatcagaactgtcaacagacaatgctcatcaggactacaagctgttgctgatgttgctgcttccatcagagctggatattacgacattggtattggtgctggagttgagtccatgtcgattgatcacactgctggaggtggctttcacacaacaaacccgagggcacaagagtttcgtggagctcgtgactgcttgcttccgatgggcataacttctgaaaacgtagcagaaagatactgtgtcacaagagaagatcaagacatggctgcggtggagtctcacaagcgtgcagcagctgcaaacgcgtctggtaaactaaaggatgagatagttcctgttgcgactaagattgttgaccctgatacaaaagcagagaagccaattgttgtttctgttgatgatggtgtacgtccaaactcaaacatggctgatcttgcaaagctgaagacagtctttaaacctaatggttcaaccacagcaggcaatgctagtcagattagtgatggtgctggagctgtactgctgatgaagaggagcttggcgatgaagaagggacttcccattcttggaatattcaggagctttgctgttactggtgtggatccagctgtaatgggtatcggtccagcttacgccattcccgctgcagccaaccttgcaggactcaaagttagcgatatcgatctatttgagatcaatgaggcatttgcatctcagtatgtgtactgttgcaagaagctagagctggatgtggaaaaggtcaatgttaatggaggggccattgctattggccatcctcttggtgctacaggagctcgatgtgttgcgacattgttgcatgagatgaaacggagagggaaagactgccgctttggagttatttcaatgtgcataggcactggtatgggagccgcagctgtgtttgagagaggagactctgttgatgacttgtccaatgcgcgtgtggagactaatgggagcggtcactagaacaaggttgaataaggacaagcaatgaaagcactaagtcaaataaaaaagtgtgaagcttaaacagctctttcacattgttgaacaatgaacaatttgtcattctgagtttaaaatgtatcaactagtaacttgtgagtgaacaaagagtcaaatctaaaaagcaaagttacatctttcaccgaaaaaaaaaaaaaaa

SEQ ID NO: 100694 - protein, 461 aa, Zea mays
MEKATERQKILIRHLNPLSSSPSLPSINDNKPTLLSAVNCAAELSPMAAFGDDVVIVAAYRTAICKAKRGGFKDTLPDDLLASVLKAVVERTSLDPSEVGDIVVGTVIAPGSQRAMECRVAAYFAGFPDSVPIRTVNRQCSSGLQAVADVAASIRAGYYDIGIGAGVESMSIDHTAGGGFHTTNPRAQEFRGARDCLLPMGITSENVAERYCVTREDQDMAAVESHKRAAAANASGKLKDEIVPVATKIVDPDTKAEKPIVVSVDDGVRPNSNMADLAKLKTVFKPNGSTTAGNASQISDGAGAVLLMKRSLAMKKGLPILGIFRSFAVTGVDPAVMGIGPAYAIPAAANLAGLKVSDIDLFEINEAFASQYVYCCKKLELDVEKVNVNGGAIAIGHPLGATGARCVATLLHEMKRRGKDCRFGVISMCIGTGMGAAAVFERGDSVDDLSNARVETNGSGH

SEQ ID NO: 100695 - DNA, 1239 bp, Arabidopsis thaliana; identical to SEQ ID NO: 92674
  CDS (1)..(1239)

SEQ ID NO: 100696 - protein, 412 aa, Arabidopsis thaliana; identical to SEQ ID NO: 92675

SEQ ID NO: 100697 - DNA, 1251 bp, Oryza sativa (japonica cultivar-group); identical to SEQ ID NO: 92676
  CDS (1)..(1251)

SEQ ID NO: 100698 - protein, 416 aa, Oryza sativa (japonica cultivar-group); identical to SEQ ID NO: 92677

SEQ ID NO: 100699 - DNA, 1347 bp, Oryza sativa (japonica cultivar-group); identical to SEQ ID NO: 92678
  CDS (1)..(1347)

SEQ ID NO: 100700 - protein, 448 aa, Oryza sativa (japonica cultivar-group); identical to SEQ ID NO: 92679

SEQ ID NO: 100701 - DNA, 1386 bp, Oryza sativa (japonica cultivar-group); identical to SEQ ID NO: 92680
  CDS (1)..(1386)

SEQ ID NO: 100702 - protein, 461 aa, Oryza sativa (japonica cultivar-group); identical to SEQ ID NO: 92681

SEQ ID NO: 100703 - DNA, 1131 bp, Bombyx mori
  CDS (1)..(1131)
atgggttctttccgagggagcttatctagtttatcagcatcagaattgggcgctgtcgctgttaacgcggcaatcgaaagagccggtattcctaaagaagaaataaaagaggtctacattggcaatgtttgttctgcaaatttgggccaagcacctgcaagacaagctgtaatatttgcaggtttgccaaaaagtaccatatgtacaactgtaaacaaagtatgtgcctctggcatgaaatctataatgttggcagcacaaggtctacaaactggagcccaagatataatacttgctggtgggatggaatctatgtcaaatgtacctttttatttgaagagaggtgaaacttcgtatggaggaatgcagttagttgatggaatagtgtttgatgggctcacagatgtgtacaacaaatttcacatgggaaattgtgctgaaaacacagcaaaaaaattacaaattactagacaagatcaagatgaatatgctgtcaatagttacaagagaagtgcagctgcttatgaagctaaagcttttgttgatgaacttgtacctgtacccgttccacagaaaagaggggctcctgtaatatttgctgaagatgaagagtataaaagagttaattttgaaaagtttacaaaattgtctacggtattccaaaaggaaaatggcactgttactgcaggcaatgcttcaacattaaatgatggagctgcagctttagtgttaatgacggctgatgccgctaaaagattaaatgtcaagccgattgcccgaattgttggatttgctgatggggaatgtgatcccattgacttcccgatagcaccagcggttgccattcctaaattattagagaagactggtgtcaggaaggaagatgttgcattgtgggagataaatgaagctttcagtgttgttgctgttgcaaatcaaaaattattaggattagatccatcaaaaattaatgtacatggtggagctgtcagtttgggtcatccaattggtatgtctggagctcgcattgttgtacatctgtgccatgctttaaaaaaaggagaaaagggagttgcttcaatttgtaatggcggaggtggtgcatcatctgtaatgattgaaaaaatgtaa

SEQ ID NO: 100704 - protein, 376 aa, Bombyx mori
MGSFRGSLSSLSASELGAVAVNAAIERAGIPKEEIKEVYIGNVCSANLGQAPARQAVIFAGLPKSTICTTVNKVCASGMKSIMLAAQGLQTGAQDIILAGGMESMSNVPFYLKRGETSYGGMQLVDGIVFDGLTDVYNKFHMGNCAENTAKKLQITRQDQDEYAVNSYKRSAAAYEAKAFVDELVPVPVPQKRGAPVIFAEDEEYKRVNFEKFTKLSTVFQKENGTVTAGNASTLNDGAAALVLMTADAAKRLNVKPIARIVGFADGECDPIDFPIAPAVAIPKLLEKTGVRKEDVALWEINEAFSVVAVANQKLLGLDPSKINVHGGAVSLGHPIGMSGARIVVHLCHALKKGEKGVASICNGGGGASSVMIEKM

SEQ ID NO: 100705 - DNA, 1191 bp, Archaeoglobus fulgidus DSM 4304
  CDS (1)..(1191): transl_table=11
gtggaagaagtgtatattgtagagtatgcaagaacgcccttttcgagaagcaggccgaagaagcccgaaagggacgtgttccacaagattagaggagacgagctaatggcgttggttctggaaaagctgcctgagagggcggggattgagaagaaggaagttgggaggattttactcggatgcgcctttccggtgtcggagaactggccttacggagggaagatggcgtcgctgctggcaaagtaccctcccgaaacctcagcaagccacgtggacatgcagtgcgggtcgtcccttgcaacaaccgcctacgcgtatctggaaattgcaagcggaaacgaggacatgatgatttccggcggttacgagcacatgacgagggtgccgatgggtgccgacaatccgcacgttgaccgccatccgaagttgctcacggaggagtacaaggactacagaatggacatcgggtttgtcatgggcttgactgcggaaacgctctttgagatggcgggctacctgaccaaagaggacctcgacaggtggtctctgaggagccaccagcttgctgccaaggccctcaaagatggttacttcaagggggagataatccccgttgaagccccgcaggctgatggtagtgtgataaccgtggattcggatcagtcaataaggccagacacatcccttgagcagatagcctctctgccaccagcctttaagcctggaggggtgattacagccggaaactcctctcctctcaacgctggagcttcaggcctgctgcttgcctctaaaaagaaggttcaggagcttggacttgagccaatcgccaaaatcatcggatacggcacagcgggagtgcctccttacataatgggagcagggccggttcctgcaagcagaaaggctctggaaaaaactggcttgaaggtgagcgacatagactactgggagattaacgaggcctttgcgatagtcccgctttacgccatccacgagctcggaattgagccggagagggtgaatatacatggtggtgcagttgccatcggtcatcctctggcagcgagcggtgcgaggctgattggcacgctggcaagaatccttcaggagaacaatggcgattacggcgtggcaaccgcctgcgtcggcggcggacagggcgcggcggttgtaattgagagagtttaa

SEQ ID NO: 100706 - protein, 396 aa, Archaeoglobus fulgidus DSM 4304
MEEVYIVEYARTPFSRSRPKKPERDVFHKIRGDELMALVLEKLPERAGIEKKEVGRILLGCAFPVSENWPYGGKMASLLAKYPPETSASHVDMQCGSSLATTAYAYLEIASGNEDMMISGGYEHMTRVPMGADNPHVDRHPKLLTEEYKDYRMDIGFVMGLTAETLFEMAGYLTKEDLDRWSLRSHQLAAKALKDGYFKGEIIPVEAPQADGSVITVDSDQSIRPDTSLEQIASLPPAFKPGGVITAGNSSPLNAGASGLLLASKKKVQELGLEPIAKIIGYGTAGVPPYIMGAGPVPASRKALEKTGLKVSDIDYWEINEAFAIVPLYAIHELGIEPERVNIHGGAVAIGHPLAASGARLIGTLARILQENNGDYGVATACVGGGQGAAVVIERV

SEQ ID NO: 100707 - DNA, 1245 bp, Archaeoglobus fulgidus DSM 4304
  CDS (1)..(1245): transl_table=11
atggaggaagtatatatagttgattttctgaggtctgcattctcgaggagcaggccaaagcagccggagaaggacgttttcaacaaaatagacatgcctgcagtggctgcgatgctgataaaggagatggtgaacaggacgggcatcgatccaaaggagattggcgacgtcatcacaggatgcacaatgcagatgaaggagaactggctttacggcggtaaggttgtccctcttctcgctgaactgcccgtagaagttcctgcgcacggcgttgagagggtctgcaactcctcaacgacagcagttcaccacggaacaatggaaatcatgctcggctactctgacatcgtaattgcatgcggtttcgagcacatgacccacttgccaatgcagatggacctcaacccgcacatcggcatctcacccactctgatgtcccgcacggatttgattcagaaatatgatttaatgacggccatgagcatgggtctcacagcggagaagctcttcgaggttgcgaaggacgagatgggatggacgaagagagatctggatgagtggggtgtcaggagccacaagcttgcagctcaggcagtcaaagagggctggttccttgagggagagggctacccgatgaagtggaagggagagattctccccattgaggtggagcaggcagacggaagcaagaaggtcatagacgttgaccagtcaataaggcctgacacaacgcttgagcaggtggagaagctcccaccagccttcaagccgggaggtgttatcactgccggaaactcctctccgctcaatgcaggtgctacagcacttatgctgatgagcaagaagaagatgaaggaatatggccttgagccgatggcaaaaatcgtttcaatgggctgggcttcaatcgacccgagcatcatgggcgcaagccccgttcccgcaagcctgaaggcattgcagaaggctgggcttgaggcgaaggacatagactactgggagataaacgaggccttttctgttgttccgctctacaccataaagaagctcggcctcgaccccgagagggtgaacatcaagggaggagcaattgccataggccacccgctcggagcgagcggtggaagagttctcggcaccctcgcaagaatcctcctcgttcaggaggccaagtacggctgtgccacgctctgtggtgcaggcggacagggtggagccaccatcatcgagaacccgtatatctaa

SEQ ID NO: 100708 - protein, 414 aa, Archaeoglobus fulgidus DSM 4304
MEEVYIVDFLRSAFSRSRPKQPEKDVFNKIDMPAVAAMLIKEMVNRTGIDPKEIGDVITGCTMQMKENWLYGGKVVPLLAELPVEVPAHGVERVCNSSTTAVHHGTMEIMLGYSDIVIACGFEHMTHLPMQMDLNPHIGISPTLMSRTDLIQKYDLMTAMSMGLTAEKLFEVAKDEMGWTKRDLDEWGVRSHKLAAQAVKEGWFLEGEGYPMKWKGEILPIEVEQADGSKKVIDVDQSIRPDTTLEQVEKLPPAFKPGGVITAGNSSPLNAGATALMLMSKKKMKEYGLEPMAKIVSMGWASIDPSIMGASPVPASLKALQKAGLEAKDIDYWEINEAFSVVPLYTIKKLGLDPERVNIKGGAIAIGHPLGASGGRVLGTLARILLVQEAKYGCATLCGAGGQGGATIIENPYI

SEQ ID NO: 100709 - DNA, 1206 bp, Mesorhizobium loti MAFF303099
  CDS (1)..(1206): transl_table=11
atggccgaggcctatatctgcgattacatccgcacgccgatcggccgcttcggcgggtcgctgtcctcggtccgatcagacgacctcggcgccattccgctgaaggctttggccgagcgcaatgccggtatcgactggcaggcggtggacgacgtcgtctatggctgcgccaaccaggccggcgaggacaaccgcaacgtggcgcgcatggcgctgctcctggctggcctgccgaaggaaatcccgggttcgaccgtcaatcgcctgtgcgggtccggcatggatgcgttgaccatcgcggcgcgcgccatcaaggccggcgaggcggaattgatgattgccggtggcgtcgaatcgatgagccgggcgcccttcgtcatgcccaaggccgacacggcgttttcgcgcaatgccgagatttacgacaccacgatcggctggcgcttcgtcaacccgctgatgaagaagcaatatggcgtcgattccatgccggaaaccggcgagaacgtcgccgaggattttgccgtgtctcgcgccgaccaggacgcctttgccgtgcgcagccaggacaaggctgtcgccgcgcaggccaatggcaggctggccaaggagatcacagcggtgacgatcccgcagcgcaagggcgatccggtggtggtctcgaaagacgaacatccacgcgccggcaccacggtcgaggcgctggccaagctgccgacgccgttccgccagggcggcacggtgaccgccggcaatgcctccggcgtcaatgacggggcggcggtgctgatcgttgcttccgaggctgcggtgaaaaaatatggcctgacgccgattgcccgcatcctcggtggtgcagccgccggtgtggcgccgcgcatcatgggtatcggcccggcgccggcgacgcagaaactgtgcgcgcggctcggcctgacgccgcaacagttcgatgtcatcgagctcaacgaagcctttgcctcgcaaggcatcgccgtgctgcgccagctcggcattgccgaggatgccgagcacatcaacccgaatggcggcgccatcgcgctcggccatccgctggggatgtcgggtgcgcgcatctccggcacggcggcgctggagctgcgtgagcgcggcggtcgctacgcgcttgcgacgatgtgcatcggcgtcggccagggcatcgccatcgcgctcgaacgggcctga

SEQ ID NO: 100710 - protein, 401 aa, Mesorhizobium loti MAFF303099
MAEAYICDYIRTPIGRFGGSLSSVRSDDLGAIPLKALAERNAGIDWQAVDDVVYGCANQAGEDNRNVARMALLLAGLPKEIPGSTVNRLCGSGMDALTIAARAIKAGEAELMIAGGVESMSRAPFVMPKADTAFSRNAEIYDTTIGWRFVNPLMKKQYGVDSMPETGENVAEDFAVSRADQDAFAVRSQDKAVAAQANGRLAKEITAVTIPQRKGDPVVVSKDEHPRAGTTVEALAKLPTPFRQGGTVTAGNASGVNDGAAVLIVASEAAVKKYGLTPIARILGGAAAGVAPRIMGIGPAPATQKLCARLGLTPQQFDVIELNEAFASQGIAVLRQLGIAEDAEHINPNGGAIALGHPLGMSGARISGTAALELRERGGRYALATMCIGVGQGIAIALERA

SEQ ID NO: 100711 - DNA, 1191 bp, Thermoplasma volcanium GSS1
  CDS (1)..(1191): transl_table=11
atggaaaacgaaaatgtctatttggttgactttaagcgcacagccttttcgcgctccaggcctaatgatccggagagggatgtctttaattccttaagaatggacgaagcaatggcaaaattgataaatatagtgatcgatgaaactggtataagaccggaagaaatcaatgatgtaatcacaggatgcgccctgcaacaggatgagaattggacttatggcggaaggcatccaattctactagccaacctccctgacaatgttcctggaatggcacttgacagagcatgctcttcatcattgaacgccataacaattggtgctatggagataatgaccggaaatgcagatatcgttatggctggcggatacgaacatatgacccacgtaccgatgagcaacagtccgtttctgaagccaaatgttaagctacttgtcaggccagaatatatgcactacgatatgaatacgggttattctatggggcttactgctgaaaaactcgcttcgctccaccacattggaagggaagaaatggatcagtatgcccttaggagccatcagctggcatctaaggccttggacgatggatacttcaaaggggagatcgttccaatggaagtcgagataggaggagagacaaagataatcgattcggatcagagtataaggaagaacacgtcgctagaggagatgcagaaacttagacctgcattcaaggacgatggtgtaattactgccgggaattcttccccgttaaatgcaggtgcatccttaacactgctcatgtcggagaagaaggtgaaagaatatggccttaaacctctctcgcgtatagtgtcattcggctgggctggagtagatcccagcataatgggtgaaggcccagtcccagctactcaaaaggcacttgccaaggcaggaatgaaagtagaggacatagattactgggagatcaatgaagccttcgcagtagtcgtcctaaatgcaatgaaggagctcggaatagaagaaaacaaggtaaacattcatggtgggggtatatcgataggccatccgcttggtgcaaccggagctaggatagccggaacgctgtctagaatattgaacgaaaagcaagctgagtatggagttgctacgctctgtgttggaggggggcaaggatactcggtgatttttgagaggtattaa

SEQ ID NO: 100712 - protein, 396 aa, Thermoplasma volcanium GSS1
MENENVYLVDFKRTAFSRSRPNDPERDVFNSLRMDEAMAKLINIVIDETGIRPEEINDVITGCALQQDENWTYGGRHPILLANLPDNVPGMALDRACSSSLNAITIGAMEIMTGNADIVMAGGYEHMTHVPMSNSPFLKPNVKLLVRPEYMHYDMNTGYSMGLTAEKLASLHHIGREEMDQYALRSHQLASKALDDGYFKGEIVPMEVEIGGETKIIDSDQSIRKNTSLEEMQKLRPAFKDDGVITAGNSSPLNAGASLTLLMSEKKVKEYGLKPLSRIVSFGWAGVDPSIMGEGPVPATQKALAKAGMKVEDIDYWEINEAFAVVVLNAMKELGIEENKVNIHGGGISIGHPLGATGARIAGTLSRILNEKQAEYGVATLCVGGGQGYSVIFERY

SEQ ID NO: 100713 - DNA, 1212 bp, Mycobacterium tuberculosis H37Rv
  CDS (1)..(1212): transl_table=11
atgtccgaagaagccttcatctacgaggccatccgcaccccgcgcggcaaacaaaagaacggatcgttgcacgaagtcaagccattgagcctggtcgtcggcctgatcgacgagctgcgcaagcgccatcccgacctcgacgagaacctgatcagcgacgtcatcttgggctgcgtctcaccggtgggcgaccagggcggcgacatcgcccgcgccgcagtgctggcatcgggcatgccggtcacctccggcggtgtgcagctcaaccggttctgcgcgtccggcctggaggccgtcaacaccgccgcgcagaaggtgcgttcgggctgggatgacctggtgctggccggcggcgtggagtcgatgagccgggtgccgatgggctccgacggcggcgctatgggcctggacccggcgaccaactacgacgtcatgttcgtcccgcagagcatcggcgccgacctgatcgccaccatcgagggcttctcccgcgaagacgtcgacgcctacgcgctacgcagccagcaaaaggccgccgaggcgtggtcgggcggctacttcgccaagtcggtggtgccggtgcgcgaccagaacggcctgctgatcctcgatcatgacgaacacatgcggccggacaccaccaaggagggtctggccaagctgaagccggccttcgaaggcctggccgcgctgggcggtttcgacgacgtggcgctgcagaagtaccactgggtggaaaagatcaaccacgtacacaccggcggcaacagctcggggatcgtcgacggtgccgcgctggtgatgatcggttccgcggccgccggcaagttgcagggcctgactccgcgggcgcgcatcgtcgccaccgccaccagcggcgccgacccggtgatcatgctcaccggccccaccccggccacccgcaaggtgctcgaccgcgccgggctgaccgtcgacgacatcgacctgttcgagctcaacgaggcgttcgcgtcggtggtgctgaagttccagaaggacctcaacattcccgacgagaagctcaacgtcaacggtggcgccatcgcgatgggccacccgctgggtgccaccggcgcgatgatcctgggcaccatggtcgacgaactggagcgccgcaacgcccgacgtgcactcatcacgctgtgcatcgggggcggcatgggtgtcgcgacgatcatcgagagggtttaa

SEQ ID NO: 100714 - protein, 403 aa, Mycobacterium tuberculosis H37Rv
MSEEAFIYEAIRTPRGKQKNGSLHEVKPLSLVVGLIDELRKRHPDLDENLISDVILGCVSPVGDQGGDIARAAVLASGMPVTSGGVQLNRFCASGLEAVNTAAQKVRSGWDDLVLAGGVESMSRVPMGSDGGAMGLDPATNYDVMFVPQSIGADLIATIEGFSREDVDAYALRSQQKAAEAWSGGYFAKSVVPVRDQNGLLILDHDEHMRPDTTKEGLAKLKPAFEGLAALGGFDDVALQKYHWVEKINHVHTGGNSSGIVDGAALVMIGSAAAGKLQGLTPRARIVATATSGADPVIMLTGPTPATRKVLDRAGLTVDDIDLFELNEAFASVVLKFQKDLNIPDEKLNVNGGAIAMGHPLGATGAMILGTMVDELERRNARRALITLCIGGGMGVATIIERV

SEQ ID NO: 100715 - DNA, 1179 bp, Rickettsia prowazekii str. Madrid E
  CDS (1)..(1179): transl_table=11
atgacaaaacaggtttatataacacatgccaaaaggactgcattcggatcatttatgggtagtcttagtacaattccagcaccaatgttagctgcttatttaatcaaggatatactgcaaaatagtaaaatcgagcctgctttagtaaatgaggtaatacttggacaagtaataacaggtggtagtggacagaatccagcaagacaaactctgatttatgccgatataccgcaagaagttccaggttatactattaataaagtatgtggctcaggtcttaaaagtatagcacttgcagcaaattcaattattacatgcgataatgaaatagttatagcaggtgggcaggaaaatatgtcgctcggtatgcacggtagttatatcagagcaggatctaaattcggcgatatcaaaatggttgatctcatgcaatatgatggtttaatagatgtattttcaggagtatttatgggtattactgccgaaaatatcgcgaagcagtttaatattagtcggcaagagcaggacgcattcgccttaagttctcacaagaaagctgctaaagcacaattatcaggaattctacaagatgaaatcttgcctatagaggtaacagtaaaaaaaaatactagtttgtttgatcatgatgaaacagtaagacataatacaagcattgaaattcttagtaaattacgccctgcttttgataaaaatggtgtagttacagctggtaactcttcctctattaatgacggtgcagcatgtgttctgcttgtttcagaaaaagctttgaagaaacataatttaacaccgttagcgcgtattgtttcttgggcttcagctggtgttgatccaagaattatgggtactgcacctgtacctgcatctaaaaaagcattaagtaaagcaggttggagcgttaatgatttggaagttatcgaggttaatgaggcatttgcagcacaaagtatttatgtaaaccgtgaaatgaaatgggatatagagaaggttaacataaatggtggagcaatagcaattggtcatccgattggcgcaagtggtggacgtcttcttataactttaatacacaacttacgaagagctaaggctaaaaaaggcttagtgactttatgtatcggtggtggtattggtatttctatgtgtgttgaagcagtttaa

SEQ ID NO: 100716 - protein, 392 aa, Rickettsia prowazekii str. Madrid E
MTKQVYITHAKRTAFGSFMGSLSTIPAPMLAAYLIKDILQNSKIEPALVNEVILGQVITGGSGQNPARQTLIYADIPQEVPGYTINKVCGSGLKSIALAANSIITCDNEIVIAGGQENMSLGMHGSYIRAGSKFGDIKMVDLMQYDGLIDVFSGVFMGITAENIAKQFNISRQEQDAFALSSHKKAAKAQLSGILQDEILPIEVTVKKNTSLFDHDETVRHNTSIEILSKLRPAFDKNGVVTAGNSSSINDGAACVLLVSEKALKKHNLTPLARIVSWASAGVDPRIMGTAPVPASKKALSKAGWSVNDLEVIEVNEAFAAQSIYVNREMKWDIEKVNINGGAIAIGHPIGASGGRLLITLIHNLRRAKAKKGLVTLCIGGGIGISMCVEAV

SEQ ID NO: 100717 - DNA, 1182 bp, Bacillus halodurans C-125
  CDS (1)..(1182): transl_table=11
ttgagagaagccgttatcgtcgctggtgcgcgaacaccagtgggaaaggcgaaaaatggaacgctcgccaatgttcggccagatgatttaggagcgttaaccgtaaaagaaacgttaaaacgagctggtgactttgatcccgctcgaatcgatgatgtcattattggctgcgctatgccagaagcagagcaaggcatgaatatggcacgaaacattgctgccctcgctggaatgcctcatactgttccggcaattacgatcaatcgttactgttcatcagggctgcaaagtatcgcctacggggcagaacgaattatgctcggccaaggggaagcgattgtcgccggtggagccgaatcgatgagcctcattccgatgggggggcatgtgatcgccccgaacccgacgcttgtggagaaccagcctgaatattacatgggaatgggacatacagccgaggaagtggccagtcgttttggagtctcacgagaagatcaggacgcctttgccgttgagagccataagcgagcggcaaaagcgattgaggaagggaaatttgcagacgaaatcgttccagttgatgtgacgcttcgtcacgtggatgacaaccataaacttgtagaaaaacatgtcacgttctccgtcgatgaaggagttaggcctgaaacgaacatggagaccctttctaccttgcgcccagcattccatgcaaaaggtacggtaacggctggaaatgcttcacaaatgagtgacggagcggccgctgtcttgcttatggatcgagaggttgctgaacgtgaaggcttaacaccagtcgtaaagtttcgttcatttgctgtggctggtgttgcgccagaaattatgggtgttggaccagtagaagcgattccgaaggctgttaaaatggcagggctcgatttatcggatattggtttatttgaattaaatgaagcgtttgcgtcgcaagccattcaagtgatccgtgggttaaatcttgatcatgacaaagtgaatgtcaatggtggagccattgctcttgggcacccactaggatgtacaggaacgaaactaacgctttcacttattcatgaaatgaaacgtcgcggcgaacagtttggcgttgtgacgatgtgtatcggcggcggtatgggcgctgctggtgtatttgaattaatcggttaa

SEQ ID NO: 100718 - protein, 393 aa, Bacillus halodurans C-125
MREAVIVAGARTPVGKAKNGTLANVRPDDLGALTVKETLKRAGDFDPARIDDVIIGCAMPEAEQGMNMARNIAALAGMPHTVPAITINRYCSSGLQSIAYGAERIMLGQGEAIVAGGAESMSLIPMGGHVIAPNPTLVENQPEYYMGMGHTAEEVASRFGVSREDQDAFAVESHKRAAKAIEEGKFADEIVPVDVTLRHVDDNHKLVEKHVTFSVDEGVRPETNMETLSTLRPAFHAKGTVTAGNASQMSDGAAAVLLMDREVAEREGLTPVVKFRSFAVAGVAPEIMGVGPVEAIPKAVKMAGLDLSDIGLFELNEAFASQAIQVIRGLNLDHDKVNVNGGAIALGHPLGCTGTKLTLSLIHEMKRRGEQFGVVTMCIGGGMGAAGVFELIG

SEQ ID NO: 100719 - DNA, 1140 bp, Lactococcus lactis subsp. lactis Il1403; identical to SEQ ID NO: 92686
  CDS (1)..(1140): transl_table=11

SEQ ID NO: 100720 - protein, 379 aa, Lactococcus lactis subsp. lactis Il1403; identical to SEQ ID NO: 92687

SEQ ID NO: 100721 - DNA, 1233 bp, Halobacterium sp. NRC-1
  CDS (1)..(1233): transl_table=11
atgcgggctgcgggatcgcggccagtaaaccgctggctggatgtcggccgttgtgggagctttaaggagcggggcgcgctcgcgtttggtatggcagccaccaccactccggtcatcgctgcggcctaccgcactccacagggaaaggacggcggcgtgtacgccgacacgcgcagcgaggacctctcggtgacggtcatcgaccacatcctcgcggagacggggttgaccggcgaccacatcgacgacctccagtggggggtcgcccagcagcgcaccgagcaggacaacaacgtcgcgcgcgtcatcgcgttgctctccgagctcggtgagaacgtgccggcggcgtcgatcaaccgctggtgtgcgtcctccatggaggccatcatgcgggccgcggacgcggtgcgggcgggccagcgggacgccgtcatcgcgggcggcgtcgagaacatgagccgggtgccgatggacggcgactcgtacgcccacctgcatccggggctgagcgagcagtacaacgtccccgagctcgagatggggatgaccgccgaggaggtcgccgagcgccacggcatcacacgcaccgagcaggacgagtacgccctccagagccagcggcgggcagccgaggcgaccgacgccgggcgcttcgacgacgagatcgtacccgtacagacggacagcggcctcgtcgaagaggacgaggggatccgcccggacaccacgctggaggcgctcggggagctccccacggtgttcaaaagcgacgggtcggtgacgcccgggaacgccagccagatctccgacggggcggcggcgacgctcgtgacgagcgaggcgttcgcgcgcgaccacggcctcgacgtgctggcgcgcgtcggcgaccacaacgtcgcgggcgtcaaccccgaagtgatggggatcgggccggtgccggccacccgcggcctgctcgaccgcaccggcgaggacatcgacgagttcgacctcgtggagttgaacgaggcgttcgcctcccagacgctctactcgcgggacgaactcggcatcgacaacgaccggttcaacgtcaacggcggcgcgatcgccgttggccacccgctcggtgccagcggtgcgcgcctcccggtcaccctgattcacgagatgaacaagcgcgacgccggcaaggcgctggcgacgctgtgtgtcggcttcggccagggcgcagcgatctccttcgagcgataa

SEQ ID NO: 100722 - protein, 410 aa, Halobacterium sp. NRC-1
MRAAGSRPVNRWLDVGRCGSFKERGALAFGMAATTTPVIAAAYRTPQGKDGGVYADTRSEDLSVTVIDHILAETGLTGDHIDDLQWGVAQQRTEQDNNVARVIALLSELGENVPAASINRWCASSMEAIMRAADAVRAGQRDAVIAGGVENMSRVPMDGDSYAHLHPGLSEQYNVPELEMGMTAEEVAERHGITRTEQDEYALQSQRRAAEATDAGRFDDEIVPVQTDSGLVEEDEGIRPDTTLEALGELPTVFKSDGSVTPGNASQISDGAAATLVTSEAFARDHGLDVLARVGDHNVAGVNPEVMGIGPVPATRGLLDRTGEDIDEFDLVELNEAFASQTLYSRDELGIDNDRFNVNGGAIAVGHPLGASGARLPVTLIHEMNKRDAGKALATLCVGFGQGAAISFER

SEQ ID NO: 100723 - DNA, 1200 bp, Deinococcus radiodurans R1
  CDS (1)..(1200): transl_table=11
atgtctgaaaaaattgtcatcgtggcggccaagcgcacgcccatcggcagcttcatgggaagcctgaaagacgtgtcggcggtcgacctcggcgtcacggcggcgggcgcagtcctgagcggcgtgagcgacgaagtgaaggccgacattgccgacgtcatcgtgggctgcgtgctccaggcgggccagggcatgaacgtggcgcggcaggtggggcgcggcgccgggctgcccgacgcggtgccgggacagaccatcaaccgcatgtgcggcagtggtttgcagtcggtggtgagcgccattcagggcctcaagtccggcgacggccagatttacctcgcgggcggcaccgagtccatgagccgcgcgccctacctgctccccaaggcccgtgaaggctaccggctggggcacggcgagattctcgacaccatcctgaccgacggcctgaccgacgtgttccacaactaccacatgggcacgaccgccgagaacctcgccgagaaatacggcatttcccgtgaggaccaggacgccttcgcgctcgaatcacaaaagcgcgccgccgccgccatcgaaggcggatacttcggcgacgaagtggtgccggtggaagtcccgacccgcaagggcccggtgaccttcgacaaggacgagcacccccgcgccacgtcgctcgaagcgctcgccaagctgcggcccgccttcaagaaggacggcggcaccgtcacggcaggcaacgccagcggcatcaacgacggcgcggcgatggtgctcgtcaccaccgagagctacgcgcaggaacgcgggctgcctatcctggccgaggtgaagggctactcgaacgtgggcgtggacccggccatcatgggtatcggcccggcctacgcggtgccgctggcggtcaagcgggcggggctgtcgatgagcgacgtggacctcttcgaactcaacgaagccttcgccgcgcagagcctcgccgtgctgcgcgacctggggcagcagggggccgaggtggaccccgcccacgtcaacctgaccggcggcgcgattgcgctgggccaccccatcggcgcgtcgggtgcccgcgtgctgaccacgctgattcaccagttgcgccgcaccggcaaggaaaccggcgtggcgagcctgtgcatcggcggcggcatggggattgcgctggtgttgcaggcccgctga

SEQ ID NO: 100724 - protein, 399 aa, Deinococcus radiodurans R1
MSEKIVIVAAKRTPIGSFMGSLKDVSAVDLGVTAAGAVLSGVSDEVKADIADVIVGCVLQAGQGMNVARQVGRGAGLPDAVPGQTINRMCGSGLQSVVSAIQGLKSGDGQIYLAGGTESMSRAPYLLPKAREGYRLGHGEILDTILTDGLTDVFHNYHMGTTAENLAEKYGISREDQDAFALESQKRAAAAIEGGYFGDEVVPVEVPTRKGPVTFDKDEHPRATSLEALAKLRPAFKKDGGTVTAGNASGINDGAAMVLVTTESYAQERGLPILAEVKGYSNVGVDPAIMGIGPAYAVPLAVKRAGLSMSDVDLFELNEAFAAQSLAVLRDLGQQGAEVDPAHVNLTGGAIALGHPIGASGARVLTTLIHQLRRTGKETGVASLCIGGGMGIALVLQAR

SEQ ID NO: 100725 - DNA, 1212 bp, Mycobacterium leprae TN
  CDS (1)..(1212): transl_table=11
atgtccgaagaagctttcatctatgaggccatccgcacccctcgcggtaagcagaagaacggatcgttgcacgaggtcaagccggtaagcctggtcgttgggctagtcgaggaattgcgtaagcgaaaccccgatctcgatgagaacctgatcagcgacgtcatcttgggatgcgtctcaccggtgggcgatcagggcggtgacattgcccgcgccacggtgctggccgctggcctgcctgtcaccgcaggcggggtgcagctcaaccggttctgcgcatcggggcttgaagccgttaacaccgccgcgcagaaggtgcgctctggctgggatgacctggttctggctggcggtgtggagtcgatgagccgggtgccgatgggatccgatggcggcgcgatgggcttggacccggcgactaactacgacgtcatgttcgtcccgcagggcattggtgccgacctgatcgccaccatcgagggcttctcgcgtgatgacgtcgacgtctatgcgttgcgcagccaggagaaggccgcggccgcgtggtcgggcggctacttcgccaagtcggtggttccggtgcgcgaccagaatggtctgttgatcctcgatcacgacgagcacatgcggcccgacacctccaaggagggcctggccaagctgaagcccgccttcgagggtcttgccgcgatgggtggtttcgacgacgtggccctgcagaaatatcactgggtggagaagatcaaccacgttcacaccggaggtaacagctccggcatcgtcgacggcgcggcactggtgatgattggcagcgaagctgttggcaagtcccagggcctgactccgcgggcgcgcatggtagccaccgctaccagtggggccgacccggtcatcatgctgaccggccccacccccgccacccgcaaggtgctcgaccgcgccgggttgactgttgatgacatcgacctgttcgagttaaacgaggcgtttgcgtcggtggttctgaaattccagaaagacctgaacattccggacgagaagctcaacgtcaacggcggtgctatcgcgatgggtcacccgctgggtgccaccggcgcgatgatcctcgggaccatggtcgacgaactggagcgctgcaacgcgcggcgtgcgctcgtcacgctatgtatcggcgccggcatgggtgttgccaccatcatcgagagggtttaa

SEQ ID NO: 100726 - protein, 403 aa, Mycobacterium leprae TN
MSEEAFIYEAIRTPRGKQKNGSLHEVKPVSLVVGLVEELRKRNPDLDENLISDVILGCVSPVGDQGGDIARATVLAAGLPVTAGGVQLNRFCASGLEAVNTAAQKVRSGWDDLVLAGGVESMSRVPMGSDGGAMGLDPATNYDVMFVPQGIGADLIATIEGFSRDDVDVYALRSQEKAAAAWSGGYFAKSVVPVRDQNGLLILDHDEHMRPDTSKEGLAKLKPAFEGLAAMGGFDDVALQKYHWVEKINHVHTGGNSSGIVDGAALVMIGSEAVGKSQGLTPRARMVATATSGADPVIMLTGPTPATRKVLDRAGLTVDDIDLFELNEAFASVVLKFQKDLNIPDEKLNVNGGAIAMGHPLGATGAMILGTMVDELERCNARRALVTLCIGAGMGVATIIERV

SEQ ID NO: 100727 - DNA, 1218 bp, Mycobacterium tuberculosis CDC1551
  CDS (1)..(1218): transl_table=11
atgccagaagctgtcatcgtctcgactgcccgctcgccgattggccgggccatgaaaggatcgctggtcggcatgcggcccgacgacctggccgtccagatggtgcgcgccgcgctcgacaaggttccggcactgaacccccatcagatcgacgacctcatgatgggctgtggcctgccaggcggtgagtccggtttcaacatcgcccgtgtcgtcgccgtcgcgctcggctatgacttcctgccgggcaccacggtcaaccggtactgttcgtcgtcgctgcagaccacccggatggccttccacgcgatcaaggccggtgagggcgacgcgttcatctccgcgggcgtggaaaccgtctcccggttcgccaagggaaactccgactcctggccggacaccaagaacccgctgttcgacggggctcaggaacgttcggccgcggcagccgccggcgccgacgaatggcacgatccccgcaccgatcagaagctgccggacatctatattgcgatgggccagaccgcggaaaacgtcgccatcatgaccggcatcagccgcgaagaacaggaccgctggggcgtgcgcagccagaaccgggccgaagaggcgatcaagaacgggttcttcgaacgagaaatcacgccggtcacccttccggacggcaccacggtcagcaccgacgacggcccgcgaccgggtaccacctacgaaaaggtcagcgagctcaagccggctttccggccgaatggcaccgtgaccgcggggaatgcctgtccgctcaacgacggggccgccgcggtggtgatcaccagcgacaccaaggccaaggaattaggcttgacaccgctggcgcgcattgtgtccaccggggtcagcgggctgtccccggagatcatgggcttagggccgatcgaggcgtccaagaaggcgctggaaagagccgggatggcgatcaccgacatcgacctggtcgagatcaacgaggccttcgcggtgcaggtcctgggctcggcgcgcgagctgggcatcgacgaggacaagctcaacatctcaggtggcgcgatcgccctaggtcacccgttcggtatgacgggcgcgcgcatcaccaccacgctgttgaacaacctgcagacctacgacaagacgttcggtctggaaaccatgtgtgtcggtggcggccagggcatggcgatggtgatcgagcgcctcgcgtga

SEQ ID NO: 100728 - protein, 405 aa, Mycobacterium tuberculosis CDC1551
MPEAVIVSTARSPIGRAMKGSLVGMRPDDLAVQMVRAALDKVPALNPHQIDDLMMGCGLPGGESGFNIARVVAVALGYDFLPGTTVNRYCSSSLQTTRMAFHAIKAGEGDAFISAGVETVSRFAKGNSDSWPDTKNPLFDGAQERSAAAAAGADEWHDPRTDQKLPDIYIAMGQTAENVAIMTGISREEQDRWGVRSQNRAEEAIKNGFFEREITPVTLPDGTTVSTDDGPRPGTTYEKVSELKPAFRPNGTVTAGNACPLNDGAAAVVITSDTKAKELGLTPLARIVSTGVSGLSPEIMGLGPIEASKKALERAGMAITDIDLVEINEAFAVQVLGSARELGIDEDKLNISGGAIALGHPFGMTGARITTTLLNNLQTYDKTFGLETMCVGGGQGMAMVIERLA

SEQ ID NO: 100729 - DNA, 1188 bp, Sulfolobus solfataricus P2
  CDS (1)..(1188): transl_table=11
atgttagaggatgtatatctggtagattatgcgagaacggcatttacgaggttttcacgcaaggactatcaaaaagatccattttacaatataagaccagaggaattagctggaatggtaataaataggttaatagagaaaaacggaattaaggcagaagaaatagacgaaataatcactggatgtgcgctccaagtaggcgaacaatgggctttcggaggtaggcatgaaattttcgcagcgagattaccatataacataccaactatggctgtggataggcaatgcgcttcatcattaactacagtttctataggagccatggaaatatcaactggtatggctgatatagtattagcgggtggagttgaaaaattatctagaacgccaatgtttgataatccacatattgaagttaacactaagtttctaactgatagtaaatatattgaatacgatttaactacaggatatgttatgggattaactgctgagaaattagctgaagaagctagaataaaaagggaggaaatggataggtggtctttaaggagtcatcaattagcatggaaagctatacaagaggggtatttcaaagacgagatcctacctattgaggtagaagttgaagggaagaaaactgtagtgaatgtagatcaatcggttagaccagacactagcatagaaaaattaggccaattgcctccagcctttaaacctaatggtacaataactgcaggaaattcagcacctttgaattctggagcttcttatgtacttctaatgtcaaaaaatgcattgaagaaatatggattaactccaatggcaaaaataaggagttttgggtttgctggagtacctccagcagtaatggggaagggaccagtaccggcttccaagaaggccttagaaaaggcaaatttaagtacaagaaaaatagacttatgggaaataaatgaggcatttgcagttgtagtattatatgctataaaacaattagaattggatgagagcacagtaaataagaagggaggtgctattgctatagggcatccactaggagccactggggctagactagtgggtaccttggctaggcaattaataatagaaggaaaggattacggtgttgcaacgctgtgtgttggtggaggtcaaggtggggcaatagttctagaaagagtttga

SEQ ID NO: 100730 - protein, 395 aa, Sulfolobus solfataricus P2
MLEDVYLVDYARTAFTRFSRKDYQKDPFYNIRPEELAGMVINRLIEKNGIKAEEIDEIITGCALQVGEQWAFGGRHEIFAARLPYNIPTMAVDRQCASSLTTVSIGAMEISTGMADIVLAGGVEKLSRTPMFDNPHIEVNTKFLTDSKYIEYDLTTGYVMGLTAEKLAEEARIKREEMDRWSLRSHQLAWKAIQEGYFKDEILPIEVEVEGKKTVVNVDQSVRPDTSIEKLGQLPPAFKPNGTITAGNSAPLNSGASYVLLMSKNALKKYGLTPMAKIRSFGFAGVPPAVMGKGPVPASKKALEKANLSTRKIDLWEINEAFAVVVLYAIKQLELDESTVNKKGGAIAIGHPLGATGARLVGTLARQLIIEGKDYGVATLCVGGGQGGAIVLERV

SEQ ID NO: 100731 - DNA, 1176 bp, Bacillus subtilis subsp. subtilis str. 168
  CDS (1)..(1176): transl_table=11
atgaaagaggcagtcattgtgtcaggtgcaagaacaccggttggaaaagcaaaaaaaggatcgttggccaccgttcgcccggatgatttgggagcgatttgtgtaaaagaaacgctgaaacgggcaggcggctacgaaggcaatattgatgacttgattatcggctgtgcaacacctgaagcggagcaggggcttaatatggcgagaaatatcggtgcgctcgcgggcctgccgtacacggttccggcgattacagttaaccgctattgctcttcaggccttcagtctattgcgtatgcagcagaaaaaattatgctgggcgcctacgatacagcgatcgccggcggagcagaatccatgtcgcaagttccgatgatggggcatgttacccgtccgaaccttgctttggcagaaaaggcaccggaatattatatgagcatggggcacacagccgagcaagtcgcgaaaaaatacggcgtctcccgtgaggatcaagacgcgtttgccgttcgcagccatcaaaacgccgctaaagcccttgcagaaggaaaatttaaagatgaaattgtacccgtcgaagtgacggtgacagaaatcggagaagaccataagcctatggaaaaacagtttgtgttttctcaggatgaaggtgttcgcccgcaaacgactgcagacatcttatcgacattgcgcccggccttttccgttgacgggacggtgactgcgggcaattcctcacaaacgagtgacggagcggcggctgtcatgctgatggaccgggaaaaagccgatgctcttggcctggcgccgcttgtgaaattccgctcctttgcggtaggcggcgtgccgccggaagtgatgggaatcggaccggtggaagcgattccgcgcgctttgaagcttgccggacttcagctgcaggacatcggcttgtttgaactgaatgaagcttttgcctcacaggccattcaagtaatcagggaattgggaattgatgaagaaaaagtgaatgtcaacgggggcgcaatcgcgcttggacacccgcttggctgtacgggcacaaagcttacactctcactcatccatgaaatgaaacggagaaacgagcaatttggagtcgtgaccatgtgtatcggcggcggaatgggagcggccggtgtatttgaattatgctaa

SEQ ID NO: 100732 - protein, 391 aa, Bacillus subtilis subsp. subtilis str. 168
MKEAVIVSGARTPVGKAKKGSLATVRPDDLGAICVKETLKRAGGYEGNIDDLIIGCATPEAEQGLNMARNIGALAGLPYTVPAITVNRYCSSGLQSIAYAAEKIMLGAYDTAIAGGAESMSQVPMMGHVTRPNLALAEKAPEYYMSMGHTAEQVAKKYGVSREDQDAFAVRSHQNAAKALAEGKFKDEIVPVEVTVTEIGEDHKPMEKQFVFSQDEGVRPQTTADILSTLRPAFSVDGTVTAGNSSQTSDGAAAVMLMDREKADALGLAPLVKFRSFAVGGVPPEVMGIGPVEAIPRALKLAGLQLQDIGLFELNEAFASQAIQVIRELGIDEEKVNVNGGAIALGHPLGCTGTKLTLSLIHEMKRRNEQFGVVTMCIGGGMGAAGVFELC

SEQ ID NO: 100733 - DNA, 1191 bp, Thermoplasma acidophilum DSM 1728
  CDS (1)..(1191): transl_table=11
atgaacagcgaaaaagtatatctcgttgacttcaaaaggacggcgttttccagatctaggccgaacgatccagagagggacgtgttcaactctatccggatggatgaagccatggcaaagctgataaacgtcgttatagatgagacaggaataaagccagaggagataaatgatgtgataacaggctgtgccctgcagatggacgagaactggacttatggtggaaggcaccctatactcctggcaaatcttccagaaaacgtccctggaatggcacttgacagggcatgctcttcctctcttaacgcaataaccatcggtgccatggagataatgacgggcaactccgatatagttatggcaggtggctacgaacacatgacgcacgttccaatgggaaacagcccattcttaaagcccaatataaagcttatggtgagaccggaatacatgcactgggacatgaatacgggatactccatgggtttgacggcggaaaaactggctgcactgagaggcatcactagagatgaaatggacagatactccctgagaagccatcagcttgcttcaaaggctttggacgatggatacttcaagggagagatcgtaccagttgaggttgagataaacggcgaggaaaaggttattgatactgaccagagcataaggaagaacacatcgctggaagacatgaagaagctgaaacctgcgttcaaggatgatggcgtaatcactgcgggaaattcctcgccactgaatgctggtgcatcgcttacgcttctgatgtcggagaagaaggtcaaggaatacggattgaaaccaatggcacgcatcgtttcctttggctgggcaggcgtcgatccttcaataatgggtgaaggcccagtacctgctacgaagaatgcactggcgaaggcaaagatggatgtgtcggatatagacctgtgggagataaacgaagctttcgccgttgtggtcctcaacgccatgaaggagcttggcattgaggaggatcgtgtcaacgttcatggcggggccattgcaataggccatcctcttggagccacaggtgcaaggatagctggtacgcttgcacgcataatgaatgagaagaagaaggattacggtgtggccacgctctgtgtgggaggaggccagggctattccgttgtgtttgagaggtattga

SEQ ID NO: 100734 - protein, 396 aa, Thermoplasma acidophilum DSM 1728
MNSEKVYLVDFKRTAFSRSRPNDPERDVFNSIRMDEAMAKLINVVIDETGIKPEEINDVITGCALQMDENWTYGGRHPILLANLPENVPGMALDRACSSSLNAITIGAMEIMTGNSDIVMAGGYEHMTHVPMGNSPFLKPNIKLMVRPEYMHWDMNTGYSMGLTAEKLAALRGITRDEMDRYSLRSHQLASKALDDGYFKGEIVPVEVEINGEEKVIDTDQSIRKNTSLEDMKKLKPAFKDDGVITAGNSSPLNAGASLTLLMSEKKVKEYGLKPMARIVSFGWAGVDPSIMGEGPVPATKNALAKAKMDVSDIDLWEINEAFAVVVLNAMKELGIEEDRVNVHGGAIAIGHPLGATGARIAGTLARIMNEKKKDYGVATLCVGGGQGYSVVFERY

SEQ ID NO: 100735 - DNA, 1200 bp, Caulobacter crescentus CB15
  CDS (1)..(1200): transl_table=11
atgaccgccgcctatatctgtgacgggatccgcaccccgatcggtcgctatggcgggtcgctctcaaaggtgcgcgccgacgatctggcggcgatcccgctgaaggccttggtcgcgcggaacccgagtctggacctggctgcgatcgacgagatcgtcctgggcagcgccaaccaggcgggcgaggacaaccgcaacgtcgcccgcatggccctgctgctggccggctatcccgtgtcggttccgggcgtgaccgtgaaccgcctctgcgcctcgggcctggaggccgtgggctacgccgcccgcgccatcgcctcgggccacaacgacctcgtcatcgccggcggcgtcgagagcatgagccgcgcgccgttcgtgatgggcaaggccgacagcgccttctcgcgcagcgccgagatcttcgacaccaccatcggctggcgcttcgtgaacccggccatgcgcaagctgtacggcgtcgactccatgcccgagacggccgagaacgtcgccacggactatggcgtcaaccgcgaagaccaagacgctttcgccttgcgtagccaagcccgcgccgccgccgcccaggccaacggcttcctggccggtgagatcacgccggtcgagatccccggcaaggcgggtccgacgatcgtcgaccgcgacgagcacccgcgcgagaccaccatggaggccctggccaagctgaagccgatcgtccgcgagggcggcacggtcacggccggcaacgcctcgggcgtcaatgacggcgcggtggccctcatcatcgcctccgaggacgcggtgaagcgccacggcctgacgccccgcgcccggatcaccggctacgccagcgccggggtcgagccgcgcgtgatggggatcgggccggttcccgccgtccgcaagctgatggccaagacgggtctcgccatcggcgacttcgacgtcgtcgagttgaacgaggccttcgccgcccaggggctggccgttctgcgccagctgggcctgcccgacgatggcgcgcatgtgaacgccaacggcggcgccatcgcgctgggccatccgctgggcgcgtccggcgcgcgcctggtcctcaccgccttgcgccagctagaagccatcggcggccagcgcggccttgccaccctctgcatcggcgtcggccagggcgcggccctggccttcgaacgcgtctag

SEQ ID NO: 100736 - protein, 399 aa, Caulobacter crescentus CB15
MTAAYICDGIRTPIGRYGGSLSKVRADDLAAIPLKALVARNPSLDLAAIDEIVLGSANQAGEDNRNVARMALLLAGYPVSVPGVTVNRLCASGLEAVGYAARAIASGHNDLVIAGGVESMSRAPFVMGKADSAFSRSAEIFDTTIGWRFVNPAMRKLYGVDSMPETAENVATDYGVNREDQDAFALRSQARAAAAQANGFLAGEITPVEIPGKAGPTIVDRDEHPRETTMEALAKLKPIVREGGTVTAGNASGVNDGAVALIIASEDAVKRHGLTPRARITGYASAGVEPRVMGIGPVPAVRKLMAKTGLAIGDFDVVELNEAFAAQGLAVLRQLGLPDDGAHVNANGGAIALGHPLGASGARLVLTALRQLEAIGGQRGLATLCIGVGQGAALAFERV

SEQ ID NO: 100737 - DNA, 1170 bp, Listeria monocytogenes EGD-e
  CDS (1)..(1170): transl_table=11
atgaaagaagtagttataatagatgcagttagaacaccaattggaaaattcggtggtagtttgaaagacatcagtgcagtagatcttggtgctaccgctctaaaaggtgttttagaaagagccaatattgctccagaacgtgtggatcaagtaatttttggtaatgtattacaagctggacttggccaaaatgtagctagacaaatcgctattaaagcaggaattccttataaagtacccggagtcacaatcaatgaagtgtgtggatctggcttaaaatcggttatgcttggcagacaagcaattcaactaggggaagctgacatcgtagcagtaggagggaccgaaaatatgtcccaagcaccacttttacttaatcccgagctagccggtgaagaaatcaatccaaaaaaactaagaaatagcatgttaattgatggtttaacagatgtttacggcgaatatcacatgggaattactgcagaaaatgttgcggaaaaattctccgtaacccgagaagaacaagatgaatttgctcataactctcaaatgaaggccgcaagtgcacaagaaaaaaaactttttgaagaagaaattattcctgtaaaacttccagacggttcattttttgaagccgatgaaacgattcgcgcgaattcaactctagaaaaattagctacgttgaaaagcgtattcaaagaaggtggaactgttacagccggtaatgcttccggtatcaatgatggagcttccgcaattattttaatgtcgaaagaaaaggcagtcgcggaaaacattccttatatcgcaacaatcaaagtaacctctgaggttggtgtcgatccagcacttatgggttacgcgccatactatgcagtaaatgaagctttaactaaaggtggatattctatcgatgaaattgatttattccatttaaacgaagcttttgcatcgcagtctgttgcagtggctcgtgatttgaaaattcccgaagagaaacttaatatttacggtggagcaattgcgctaggtcatccaatcggagcttccggcgcacgcattattgcctctttgttaaatgaattaaaacatgaaaacaagcatatcggggtagcttccttgtgcgttggtggtggtattggcattgcaattatccttgaaagagcatga

SEQ ID NO: 100738 - protein, 389 aa, Listeria monocytogenes EGD-e
MKEVVIIDAVRTPIGKFGGSLKDISAVDLGATALKGVLERANIAPERVDQVIFGNVLQAGLGQNVARQIAIKAGIPYKVPGVTINEVCGSGLKSVMLGRQAIQLGEADIVAVGGTENMSQAPLLLNPELAGEEINPKKLRNSMLIDGLTDVYGEYHMGITAENVAEKFSVTREEQDEFAHNSQMKAASAQEKKLFEEEIIPVKLPDGSFFEADETIRANSTLEKLATLKSVFKEGGTVTAGNASGINDGASAIILMSKEKAVAENIPYIATIKVTSEVGVDPALMGYAPYYAVNEALTKGGYSIDEIDLFHLNEAFASQSVAVARDLKIPEEKLNIYGGAIALGHPIGASGARIIASLLNELKHENKHIGVASLCVGGGIGIAIILERA

SEQ ID NO: 100739 - DNA, 1170 bp, Listeria innocua Clip11262; identical to SEQ ID NO: 92702
  CDS (1)..(1170): transl_table=11

SEQ ID NO: 100740 - protein, 389 aa, Listeria innocua Clip11262; identical to SEQ ID NO: 92703

SEQ ID NO: 100741 - DNA, 1410 bp, Drosophila melanogaster; identical to SEQ ID NO: 92704
  CDS (1)..(1410)

SEQ ID NO: 100742 - protein, 469 aa, Drosophila melanogaster; identical to SEQ ID NO: 92705

SEQ ID NO: 100743 - DNA, 1182 bp, Ralstonia solanacearum GMI1000
  CDS (1)..(1182): transl_table=11
atgaccgatgtagtgatcgtatcggcggtccgtaccgccgtgggcaagtttggcggttcgctggcgaaaatccccgcgccggagctgggtgcggccgtgatccgcgaagcgctgtcgcgcgccaaggtggcgccggatcaggtcagcgaagtcatcatgggccaggtgctgaccgcgggttcgggccagaacccggcgcgccaggcgttgatcaaggccggcctgcccgacatggtgccgggcatgaccatcaacaaggtgtgcggctcgggcctgaaggccgtgatgctggccgccaacgccatcgtcgccggggatgccgacatcgtcgtggccggcgggcaggagaacatgtccgccgcgccgcacgtgctgcccggctcgcgcgacggtttccgcatgggcgacaccaagctcatcgactcgatgatcgtggatgggctgtgggacgtctacaaccagtaccacatgggcatcaccgccgagaatgtcgccaagcagtacggcatcacgcgcgaggcccaggacgcattcgccgtggcttcgcagaacaaggcggaagccgcgcagaagtccggtcgcttcaatgacgagatcgttcccatcctgattccgcagcgcaagggcgacccgatcgccttcgcgcaggacgagttcgtccgccatggcgccacgctggaatcgatgacgggcctgaagccggcattcgacaaagccggcacggtgacggccgccaatgcctcgggcctcaacgacggcggcgccgccgtggtggtcatgtcggccgcccgcgccaaggaactgggtctgaccccgctggccaccatccgcgcctacgccaatgccggcgtggacccgaaggtgatgggcatgggcccggtgccggcttccaagcgctgcctgtcgcgcgccggctggtcggtgggcgacctggacctgatggagatcaacgaggcgtttgccgcccaggcgctggccgtgcaccagcagatgggctgggataccgccaaggtcaacgtcaacggcggcgcgattgccatcggtcaccccatcggcgcgtcgggctgccgcatcctggtgacgctgctgcacgagatgcagaagcgcgacgcgaagaagggcctggcctcgctgtgcatcggcggcggcatgggcgtggcgctggcggtcgagcgcccgtga

SEQ ID NO: 100744 - protein, 393 aa, Ralstonia solanacearum GMI1000
MTDVVIVSAVRTAVGKFGGSLAKIPAPELGAAVIREALSRAKVAPDQVSEVIMGQVLTAGSGQNPARQALIKAGLPDMVPGMTINKVCGSGLKAVMLAANAIVAGDADIVVAGGQENMSAAPHVLPGSRDGFRMGDTKLIDSMIVDGLWDVYNQYHMGITAENVAKQYGITREAQDAFAVASQNKAEAAQKSGRFNDEIVPILIPQRKGDPIAFAQDEFVRHGATLESMTGLKPAFDKAGTVTAANASGLNDGGAAVVVMSAARAKELGLTPLATIRAYANAGVDPKVMGMGPVPASKRCLSRAGWSVGDLDLMEINEAFAAQALAVHQQMGWDTAKVNVNGGAIAIGHPIGASGCRILVTLLHEMQKRDAKKGLASLCIGGGMGVALAVERP

SEQ ID NO: 100745 - DNA, 1203 bp, Ralstonia solanacearum GMI1000
  CDS (1)..(1203): transl_table=11
atgacggaagcctttatctgcgacgccatccgcacgcccatcggccgctacggcggcagcctgtccgccgtgcgcgcggacgacctcggcgcggtgcccctcaaggcgctgatggcgcgcaacccgcgggtcgactggtcggccattgacgacgtgatcttcggctgcgccaaccaggccggcgaggacaaccgcaacgtggcgcgcatgtcggcgctgctggccggactgcccgacagcgtgccgggctcgaccatcaaccgcctgtgcggctcgggcatggacgccaccggcaccgccgcgcgcgccatccgcgccggcgaaaccgcgctgatgatcgccggcggcgtggagagcatgagccgcgcgcccttcgtgatgggcaaggccgccagcgccttctcgcgcgacgccgccatgtacgacaccaccatcggctggcgcttcgtcaatccgctgatgcaggcgcagtacggcgtcgactcgatgcccgagaccgccgagaacgtcgccgccgactaccgggtcagccgcgaagaccaggatcgcttcgcgctgcgcagccaggccagcgccgcgcgcgcgcaggccgacggcacgctggcgcaggaaatcacgccggtgacgatcgcgcagaagaagggcgatccgatcgtcgtagaccgcgacgagcatccgcgcgcgaccaccctggaagcgctcgccaggctcaagggcgtggtgcgcccggccggcaccgtcacggccggcaatgcctcgggcgtgaacgacggcgcctgcgcgctgctgctcgccaacgaagaggccgccaagcgcttcggcctgacaccgcgcgcgcgcatcatcggcatggccaccgccggcgtgccgccgcgcgtgatgggcatcggcccggcgccggcctcgcagaaggtgctcgggcagcttggcctgacgatcgaccagatggatgtgatcgagctgaacgaagcgtttgccgcgcaaggcctggcggtgacgcgccagctcggcctggccgacgacgatgcgcgcgtcaacccgaacggcggggccatcgcgctgggccacccgctcggcatgagcggcgcgcgcctggtgaccacggcgatgtaccaactgcagcgcaccggcggccgctatgcgctgtgcacgatgtgcatcggcgtcggccagggcatcgcgctggtgatcgaacgcgtgtga

SEQ ID NO: 100746 - protein, 400 aa, Ralstonia solanacearum GMI1000
MTEAFICDAIRTPIGRYGGSLSAVRADDLGAVPLKALMARNPRVDWSAIDDVIFGCANQAGEDNRNVARMSALLAGLPDSVPGSTINRLCGSGMDATGTAARAIRAGETALMIAGGVESMSRAPFVMGKAASAFSRDAAMYDTTIGWRFVNPLMQAQYGVDSMPETAENVAADYRVSREDQDRFALRSQASAARAQADGTLAQEITPVTIAQKKGDPIVVDRDEHPRATTLEALARLKGVVRPAGTVTAGNASGVNDGACALLLANEEAAKRFGLTPRARIIGMATAGVPPRVMGIGPAPASQKVLGQLGLTIDQMDVIELNEAFAAQGLAVTRQLGLADDDARVNPNGGAIALGHPLGMSGARLVTTAMYQLQRTGGRYALCTMCIGVGQGIALVIERV

SEQ ID NO: 100747 - DNA, 1197 bp, Drosophila melanogaster; identical to SEQ ID NO: 92708
  CDS (1)..(1197)

SEQ ID NO: 100748 - protein, 398 aa, Drosophila melanogaster; identical to SEQ ID NO: 92709

SEQ ID NO: 100749 - DNA, 1182 bp, Agrobacterium tumefaciens str. C58
  CDS (1)..(1182): transl_table=11
atgaccctgccttcaatcgtgattgccagcgccgcgcgcaccgccgtcggctctttcaacggccacttcgccaacacgcccgcccacgaacttggtgccaccgtcattagtgcggtgctggaacgtgccggcgtcgcggccaatgaagtggatgaggtcattctcggccaggtgctcatggcaggcgaggggcaaaacccggcgcggcaggcagcaatgaaggccggcattccgcaggaggcaaccgccttcggcatcaatcagctctgcggctctggcttgcgcgccgtggcgctgggcatgcagcagatcgtgacgggggatgcggccatcatcattgccggcggccaggaatccatgtccatggcgccgcattgcgcccatctacggggcggcgtgaagatgggcgacttcaagatgatagacacgatgatgaaggacggtctgaccgacgccttttacggatacccgatgggcatcactgccgaaaacatcgctcgccaatggcagctttcccgcgatgagcaggaccagttcgcagtcgcatcgcagaacaaggccgaagccgcgcagaacgccggtcgcttcactgacgagatcgtggctttcacggtaaagggccgcaaggccgatatcgtcatcgatgcggacgaacatatccgtcatggcgcatcgctcgaaaccatggccaagctgcgtcccgccttcgacaaggaaggcacggtcacggccggtaacgcctccggcctgaatgacggcgcagccgccacgcttctcatgtcggaacagcaagcggcaaagcgcggcatcaaaccgctagcgcgcatagcctcctgggcaacggccggcgttgatccgcagatcatgggcaccggtcccatccccgcctcccgcaaggcgctggccaaggccggctggtcgatcaacgatattggccttgtcgaggccaacgaggcctttgccgcccaatcctgcgcggtcgtgcgcgagctgggccttaaccctgacatcgtcaacgttaatggcggagcgattgccatcggccatccgatcggcgcttccggcgctcgcgtcctgaacacgctgattttcgaaatgcgtcgccgcaacgtatcgaggggtctcgcaacgctctgcatcggcggcggcatgggtgtcgccatgtgcatcgaggcgctctaa

SEQ ID NO: 100750 - protein, 393 aa, Agrobacterium tumefaciens str. C58
MTLPSIVIASAARTAVGSFNGHFANTPAHELGATVISAVLERAGVAANEVDEVILGQVLMAGEGQNPARQAAMKAGIPQEATAFGINQLCGSGLRAVALGMQQIVTGDAAIIIAGGQESMSMAPHCAHLRGGVKMGDFKMIDTMMKDGLTDAFYGYPMGITAENIARQWQLSRDEQDQFAVASQNKAEAAQNAGRFTDEIVAFTVKGRKADIVIDADEHIRHGASLETMAKLRPAFDKEGTVTAGNASGLNDGAAATLLMSEQQAAKRGIKPLARIASWATAGVDPQIMGTGPIPASRKALAKAGWSINDIGLVEANEAFAAQSCAVVRELGLNPDIVNVNGGAIAIGHPIGASGARVLNTLIFEMRRRNVSRGLATLCIGGGMGVAMCIEAL

SEQ ID NO: 100751 - DNA, 1185 bp, Pyrobaculum aerophilum str. IM2; identical to SEQ ID NO: 92712
  CDS (1)..(1185): transl_table=11

SEQ ID NO: 100752 - protein, 394 aa, Pyrobaculum aerophilum str. IM2; identical to SEQ ID NO: 92713

SEQ ID NO: 100753 - DNA, 1179 bp, Clostridium perfringens str. 13
  CDS (1)..(1179): transl_table=11
atgagagaggtagttattgcaagtgcagtaagaacagcattaggttcatttggtggttcattaaaggatgttcctgctgtagatttaggagctttagttattaaagaagctttaaataaagctggtgtaaaaccagaatgtgttgatgaagttttaatgggaaatgtaattcaagctggattaggacaaaaccctgcaagacaagcagctgtaaaagctggtttaccagttgaaattccttcaatgacaataaataaagtttgtggttcaggtttaagatgtgttgctttagcagctcaaatgataaaagcaggagatgctgacgtaatagtagctggtggtatggaaaacatgtcacaaggaccatatgttttaagaactgcaagatttggtcaaagaatgggcgatggaaaaatggtcgatgctatggtcaatgatgctttaacagatgcatttaatggataccacatgggtataactgctgaaaatatagcagaacaatggggattaactagagaaatgcaagatgaatttgctgcaaattctcaaattaaagcagaagcagctataaaagctggaaaattcaaagatgaaatagttccagtagtaattccacaaagaaaaggtgatccaatagtatttgatactgatgaattccctagatttggaacaactgctgaaaaattagctaagttaagaccagcattcaaaaaagatggtacagttacagctggtaatgcatcaggtataaatgatggtgctgctgcattagttgttatgagtgctgaaaaagcaaaagaattaggagtaactccaatttgtaaaatagtttcttatggttcaaaaggattagatccttcaattatgggttatggaccattctatgctactaaaaaagctttagaaggaactggattaacagttgcagatcttgatttaatagaagcaaatgaagcttttgcagctcaaagtttagcagttgctaaagatttagaatttgatatgagtaaagttaacgtaaatggtggagctatagctttaggacatccagtaggagcttcaggggctagaatattagttacattacttcacgaaatgatgaaaagagatgctaagagaggtttagcaacactttgtataggtggaggaatgggaactgctttaatagtagaaagataa

SEQ ID NO: 100754 - protein, 392 aa, Clostridium perfringens str. 13
MREVVIASAVRTALGSFGGSLKDVPAVDLGALVIKEALNKAGVKPECVDEVLMGNVIQAGLGQNPARQAAVKAGLPVEIPSMTINKVCGSGLRCVALAAQMIKAGDADVIVAGGMENMSQGPYVLRTARFGQRMGDGKMVDAMVNDALTDAFNGYHMGITAENIAEQWGLTREMQDEFAANSQIKAEAAIKAGKFKDEIVPVVIPQRKGDPIVFDTDEFPRFGTTAEKLAKLRPAFKKDGTVTAGNASGINDGAAALVVMSAEKAKELGVTPICKIVSYGSKGLDPSIMGYGPFYATKKALEGTGLTVADLDLIEANEAFAAQSLAVAKDLEFDMSKVNVNGGAIALGHPVGASGARILVTLLHEMMKRDAKRGLATLCIGGGMGTALIVER

SEQ ID NO: 100755 - DNA, 1233 bp, Drosophila melanogaster; identical to SEQ ID NO: 92714
  CDS (1)..(1233)

SEQ ID NO: 100756 - protein, 410 aa, Drosophila melanogaster; identical to SEQ ID NO: 92715

SEQ ID NO: 100757 - DNA, 1176 bp, Encephalitozoon cuniculi GB-M1; identical to SEQ ID NO: 92716
  CDS (1)..(1176)

SEQ ID NO: 100758 - protein, 391 aa, Encephalitozoon cuniculi GB-M1; identical to SEQ ID NO: 92717

SEQ ID NO: 100759 - DNA, 1188 bp, Schizosaccharomyces pombe 972h-; identical to SEQ ID NO: 92718
  CDS (1)..(1188)

SEQ ID NO: 100760 - protein, 395 aa, Schizosaccharomyces pombe 972h-; identical to SEQ ID NO: 92719

SEQ ID NO: 100761 - DNA, 1188 bp, Streptococcus pyogenes MGAS8232
  CDS (1)..(1188): transl_table=11
atgaaaaacatagttatcgttgaagctttacgaactcctatcggagcttttggaggctcctttaaaagtgtctctgctgttgaacttggaacaactgtactgaaaaaaatccttgataaaacgcaagtaaagcctgaaatggttgatgaagtcatcctaggaaacgtccttcatgcaggattagggcaaaacgttgccagacagattgctattcactctggcatccctagtgataaaacagccttcacgcttgatatggtctgtggttcaggacttaaagcaatccaattagctacgcaaagcatcatgcttggtgacgctgatatcgttattgctggtggtgtcgaaaacatgtcacaggcagcctatgtgtcaactcagcaccgttttggacagcgacttggtaatagtcaattgattgatactcttgttcatgatggattgacagatgctttcaacaattatcatatgggtatcactgctgaaaacgttgctcagaaatatggcatctcaagagaagagcaagatcaatttgctttagaaagccaagaaaaagctgctaaggcattagaaaatcatcgttttgctgacgaaattgtccctgtctctgtgcctcaacgacgcaaagaccctttaattgttacaacagatgaatacccaaaagttgacacaagccttgaaaaattacagcaattacgtcctgccttcctccctaaagaaggaaccgttactgctgggaatgcctcaggaataaacgatggtgcagccttattgatgttaatgactgaagaaaaagctcttgaattagggttaacacctttagtcactattgaaagctatgctagtgcaggtgttgcacctgaactgatgggagctggaccaattcctgccactcaaaaagtccttaagaaagctggattaacaacttctgatttggacttagtggagtccaatgaagcatttgcagcacagtccttggcggttttaaaagatttaaagttaaacccagaaattgtgaatgttaatggaggagccatcgctttaggtcatcctattggtgccagtggcgctcgcattctagtcacattaatccacgaaatgaaaaaacgccaagtaaccagaggactagcaacactttgcattggtggaggacaaggaactgctgttatcgtgaaaaacaatacttag

SEQ ID NO: 100762 - protein, 395 aa, Streptococcus pyogenes MGAS8232
MKNIVIVEALRTPIGAFGGSFKSVSAVELGTTVLKKILDKTQVKPEMVDEVILGNVLHAGLGQNVARQIAIHSGIPSDKTAFTLDMVCGSGLKAIQLATQSIMLGDADIVIAGGVENMSQAAYVSTQHRFGQRLGNSQLIDTLVHDGLTDAFNNYHMGITAENVAQKYGISREEQDQFALESQEKAAKALENHRFADEIVPVSVPQRRKDPLIVTTDEYPKVDTSLEKLQQLRPAFLPKEGTVTAGNASGINDGAALLMLMTEEKALELGLTPLVTIESYASAGVAPELMGAGPIPATQKVLKKAGLTTSDLDLVESNEAFAAQSLAVLKDLKLNPEIVNVNGGAIALGHPIGASGARILVTLIHEMKKRQVTRGLATLCIGGGQGTAVIVKNNT

SEQ ID NO: 100763 - DNA, 1179 bp, Drosophila melanogaster; identical to SEQ ID NO: 92720
  CDS (1)..(1179)

SEQ ID NO: 100764 - protein, 392 aa, Drosophila melanogaster; identical to SEQ ID NO: 92721

SEQ ID NO: 100765 - DNA, 1170 bp, Streptomyces coelicolor A3(2)
  CDS (1)..(1170): transl_table=11
atgcgtgacgcagtcgtcgtggaagccgtacgcacccccatcggcaaggggaagccgaacggcgccctcgcccacgtccatcccgtggaactcctcgcgcacaccctgcgcaccctcgtcgagcggtccggggtggacccggcgctgatcgacgacgtcatcggcggcacggtggaccaggtcggcgaacaggcgatgaacaccacccgctacgccctgctctcggcgggcttccccgagtccgtccccgctaccaccgtggaccggcagtgcggctcctcccagcaggccgtccacttcgccgcgcagggcgtcatggccggggcgtacgacctcgtcgtcgcctgcggggtcgagtccatgagccgggtgccgatgtggtcgaacgtgccgcccggcgccgaccccttcggtcccggcgtcgccgcccgctacccgcaggggctcgtcccgcagggcatcagcgccgaactgatcgccgcgaagtggtcactgagccgggagcgcatggacgccttcgccgtctcctcgcaccagaaggccgccaccgcccacgccgccggccgcttcgacgccgagatcgcgccgctggacggggtgtcgcacgacgagtgcgtccgcccggacagcagcgtcgaggtcctcgccggactgcggcccgcctaccacgacccggccttcgccgaacggttcccgcagatcgggtggaacgtcaccgcgggcaacgccagcccggtcaacgacggtgcctcggccgtgctgatcacctcgggcgacaccgccgcccgcctcggactgcggcccctcgcgcggctgcacagcttcgccgtgaccggctccgacccgctgctcatgctcaccggcgtcgtcccggccaccgagaaggtgctgcgccgggcgtcgctctccctcggcgacatcgacctcttcgaggtcaacgaggccttcgcgagcgtcgtactggcctggcagcgggagaccggagccgacttggccaaggtcaacgtgcacggcggcgccatcgcgctcggccaccccctcggcgcgagcggcacccgtctgaccaccaccctcgtccacgccctgcacgaacgcggcgcccgctacggcctgcagaccatgtgcgaggcgggcggtctcgccaacgccatgatcctggaagcggtgtaa

SEQ ID NO: 100766 - protein, 389 aa, Streptomyces coelicolor A3(2)
MRDAVVVEAVRTPIGKGKPNGALAHVHPVELLAHTLRTLVERSGVDPALIDDVIGGTVDQVGEQAMNTTRYALLSAGFPESVPATTVDRQCGSSQQAVHFAAQGVMAGAYDLVVACGVESMSRVPMWSNVPPGADPFGPGVAARYPQGLVPQGISAELIAAKWSLSRERMDAFAVSSHQKAATAHAAGRFDAEIAPLDGVSHDECVRPDSSVEVLAGLRPAYHDPAFAERFPQIGWNVTAGNASPVNDGASAVLITSGDTAARLGLRPLARLHSFAVTGSDPLLMLTGVVPATEKVLRRASLSLGDIDLFEVNEAFASVVLAWQRETGADLAKVNVHGGAIALGHPLGASGTRLTTTLVHALHERGARYGLQTMCEAGGLANAMILEAV

SEQ ID NO: 100767 - DNA, 1188 bp, Streptomyces coelicolor A3(2)
  CDS (1)..(1188): transl_table=11
gtgcgtcccgtccacttcgcggccgcccgccgcaccccgatcggcaagctgcgcggcgcgctgtccaccgtgcggccggacgacctcgccgccgccgtgctccgcggcctggtcgccgacgtgcccgcgctggacccggcccgggtcgacgacgtgtactggggcgccgccaaccaggcgggcgaggacaaccgcaacgtcgcccgcatggccgcgctgctcgcgggcctgcccgagaccgtgcccggcgccaccgtcaaccggctgtgcgcctccggcctcgaagccgtcaccaccgccgcacgcaccatcgccgcgggcgaggccgacatcgtcctcgcgggcggctccgagtccatgagccgcgcccccttcgtgctgccccgccccgacgaggcgctgccgcaccgcatcgagaccgccgacacccggctcggctggcgcctggtcaacccggcgatgaaggacctgcacggcctgctcgccatgggggagacggccgaggaggtcgccgagcggtacggcgtcccgcgcgagcgtcaggacgcgttcgccctgcgcagccaccgcctggccgccgaggcccggaagaacggccgcttcgacgacgagatcctccccgtcgagcgccccgacggcgtggtcgtcgacaccgacgagtgcgtccgcgaggacacctccctggagaagctgggcagcctcaagcccgtcttccgccccggcggcacggtcaccgcgggcaacgcctccccgatgaacgacggcgccgcgggcctcctcctggtcagcgaggaggcgctgaacgacctcggcctggagtcgctgggccgctacgtcgcgggcggctcggccggcgtccaccccgacgtcatgggcatcggcccggtccccgccacccgcaaggtgctggcccgggcgggctggggcatcggcgacatcaccgaggccgagttcaacgaggcgttcgccgcccaggccctcgcctgcgtcgaccaactcggcatcgaccccgacctggtcaacccgaccggcggcgccatcgcgctgggccacccgctcggctgctcgggcgcccgcatcctcaccaccctgctccaccgcatgcgccgtacgggggccggccgcgggctggccacgatgtgcgtcggcgtggggcagggcagcgcggtcctcgtcgaacgtcactag

SEQ ID NO: 100768 - protein, 395 aa, Streptomyces coelicolor A3(2)
MRPVHFAAARRTPIGKLRGALSTVRPDDLAAAVLRGLVADVPALDPARVDDVYWGAANQAGEDNRNVARMAALLAGLPETVPGATVNRLCASGLEAVTTAARTIAAGEADIVLAGGSESMSRAPFVLPRPDEALPHRIETADTRLGWRLVNPAMKDLHGLLAMGETAEEVAERYGVPRERQDAFALRSHRLAAEARKNGRFDDEILPVERPDGVVVDTDECVREDTSLEKLGSLKPVFRPGGTVTAGNASPMNDGAAGLLLVSEEALNDLGLESLGRYVAGGSAGVHPDVMGIGPVPATRKVLARAGWGIGDITEAEFNEAFAAQALACVDQLGIDPDLVNPTGGAIALGHPLGCSGARILTTLLHRMRRTGAGRGLATMCVGVGQGSAVLVERH

SEQ ID NO: 100769 - DNA, 1206 bp, Xanthomonas axonopodis pv. citri str. 306
  CDS (1)..(1206): transl_table=11
atgagcaaacagattcaagaagcctacatcgtcgccgccacacgtacgccggtaggcaaggcgccgaagggcgtgttccgcaacacccgccccgacgacatgctggcgcacgtgctgcgcgccgtggtcgcgcaggcgccgggcatcgatacctcgcgcatcgacgacgccatcatcggctgcgcgatgcccgaaggcgagcaaggcatgaacgtggcgcgcattggcgtgctgctggcgggcctgcccaattcggtggccggtcagaccatcaaccgcttctgttcgtccggcatccaggccatcgccatggcggccgatcagattcgtctgggcaatgccgacctgatgctggccggcggcactgagtcgatgtcgatggtgccgatgatgggcaacaaggtggcgatgtcgccaagcgtgttcgccgacgaccatgtggccattgcgtacggcatgggcatcactgccgagaaggtcgcagaagagtggaaggtgtcgcgcgaagaccaggatgcgttcgcgctggcctcgcaccagaaagcgatcgcggcgattgcggccggcgagttccgcgacgaaatcagcccgtacgaaatccactcgcaccagcccgacttggccggcaacgtcatcaccttgcgcaagaagctggtcgatacggacgaaggtccgcgtccggacagctcgctcgagggcctggccaagctgcgcccggtgttccgcaacggccagttcggcggcagcgtcaccgccggcaattcgtcgcagatgagcgatggtgccggcgcggtgctgctggcctccgagcaggcgatcagggattacggcctgactccgctggcccgcttcgtcagcttctcggtcgctggcgtgcgcccggaagtcatgggtatcggaccgatcgccgccattcccaaggcgctcaagcaggccggcctgaccaaggaccagctggactggatcgagctcaacgaagccttcgcggcacaggcgttggcggtcatccgcgacagcgagctggatccatccaaggtcaacccactgggcggcgcaatcgcccttggccacccgctgggcgccaccggcgcgatccgtgcggccacgctggtgcatggcctgcgccgtcgtcagcagaagtacggcatggtcaccatgtgcatcgggaccggcatgggcgctgcgggcatcatcgaagcgctgtaa

SEQ ID NO: 100770 - protein, 401 aa, Xanthomonas axonopodis pv. citri str. 306
MSKQIQEAYIVAATRTPVGKAPKGVFRNTRPDDMLAHVLRAVVAQAPGIDTSRIDDAIIGCAMPEGEQGMNVARIGVLLAGLPNSVAGQTINRFCSSGIQAIAMAADQIRLGNADLMLAGGTESMSMVPMMGNKVAMSPSVFADDHVAIAYGMGITAEKVAEEWKVSREDQDAFALASHQKAIAAIAAGEFRDEISPYEIHSHQPDLAGNVITLRKKLVDTDEGPRPDSSLEGLAKLRPVFRNGQFGGSVTAGNSSQMSDGAGAVLLASEQAIRDYGLTPLARFVSFSVAGVRPEVMGIGPIAAIPKALKQAGLTKDQLDWIELNEAFAAQALAVIRDSELDPSKVNPLGGAIALGHPLGATGAIRAATLVHGLRRRQQKYGMVTMCIGTGMGAAGIIEAL

SEQ ID NO: 100771 - DNA, 1176 bp, Oceanobacillus iheyensis HTE831
  CDS (1)..(1176): transl_table=11
gtgaaggaagcagttattgttgctggtgcgagaacaccagtaggaaaagcaaataaaggttcactagcaaatgttcgtccagatgatttagctgcattaacaataaaagaaacattaaagcgcgctggaaattacgatgggaatatagatgatgtcattatcggatgtgcaactccggaagcagaacaaggaatgaacatggcaagaaatgtggcgggacttgcaggactgaaaaatgatgttcccggaattacaataaatcgctattgctcttcagggttacaaagtattgcttacggtgctgaaagaattatggttggtgcaagtgatgcgattattgctggtggagcagagtcaatgagtatgttgcctatgggagggcatgtacttaagccgaatcctaaacttgtagaaagtgctccaggttattacatgggtatggggcacacagcagaagaagtagcaaatcgatttaacatttcgagagaggatcaagatgcttttgcagtacaaagtcatcaacgagcagccaaagcactggaagaaggcaagtttgacgatgaaattgttcctgttgaagtaagtcaacgacttgttggtcagaataataaagtagaagagaaaagtttcatttttgatcaggatgaaggggtacgtgcaggaacaacttctgaaattttaagtaaattacgacctgcttttcatgtgaagggatctgtaactgcagggaatgcttcacaaatgagtgatggagctgcttcagtactattaatggaaagaggaaaagcagaagcggagggtctaactccactattgaagtttcgatcttttgcagttgctggtgtagaacctgaaattatgggagtaggaccagtggaagccattccaaaagccttgaaaatagctggactagaattatctgatattgggttgtttgaattaaacgaagcttttgcttcccaatctttacgtgtaattcaagctttagatttaaatatggataaagtgaatgtaaatggtggagcaattgccttgggtcatcctttgggctgtacaggaacgaagcttacattatcattaatgcatgaaatgaaacgaagaaatgaacagtttggtgttgttacgatgtgtattggcggtggtatgggtgctgctggggtatttgaattactttaa

SEQ ID NO: 100772 - protein, 391 aa, Oceanobacillus iheyensis HTE831
MKEAVIVAGARTPVGKANKGSLANVRPDDLAALTIKETLKRAGNYDGNIDDVIIGCATPEAEQGMNMARNVAGLAGLKNDVPGITINRYCSSGLQSIAYGAERIMVGASDAIIAGGAESMSMLPMGGHVLKPNPKLVESAPGYYMGMGHTAEEVANRFNISREDQDAFAVQSHQRAAKALEEGKFDDEIVPVEVSQRLVGQNNKVEEKSFIFDQDEGVRAGTTSEILSKLRPAFHVKGSVTAGNASQMSDGAASVLLMERGKAEAEGLTPLLKFRSFAVAGVEPEIMGVGPVEAIPKALKIAGLELSDIGLFELNEAFASQSLRVIQALDLNMDKVNVNGGAIALGHPLGCTGTKLTLSLMHEMKRRNEQFGVVTMCIGGGMGAAGVFELL

SEQ ID NO: 100773 - DNA, 1185 bp, Oceanobacillus iheyensis HTE831
  CDS (1)..(1185): transl_table=11
atgaaagaagtagtgattgttagtgctgtccggactgctacaggaagttttatggggcttttaagtgatatacctgcgacaaaacttggtagtattgtaatgaaagaagcacttcaccgtgcaaatgttaaaccagaagaagtagaagatgtgatctttggtaatgtattacaagctgggcttggtcaagggacagctagacaagcagcaatacaagcaggtattcctgaatatgttcctgctactacgattaataaattatgtgggtcagggttaaaaagtgttcatctcgctgcacaagctatacaaactggagacgccgacatcgttttagcaggtggaatggagaatatgagccaagctccttatcttttagagaaagggagacaaggctttcgcatgggtgatggaaaagtagtagatagtatgataaaagatggtctttggtgtgcaattaatgatgttcatatgggaatcactgcagaaaatatagctgataaatatcaaataagtcgaaaagaacaggataaatttgcagcatggagccaacaaaaaacagaaaaagctatcgagcaaggagctttttctgatgaaattgtacctgttaaaattcgaaaatcaaaaagtgaagaattcatctttaataaagatgaatttcctaggagtggggtaacagtagaaaaactagctaatttacgccctgcttttaaaaaggatggaacagtaacggctgggaattcatctggaataaatgatggtgcagctgcactcgtattaatgagtaaggaaaaggcgaatgcgttaaatattaaaccaatggctacattacgcggaaatgctactgcgggagtagattctaatttcatgggaattggtccagttccagcaactaataaagcattgaaaaaagcgaatatttctattcaagaaattggattaatcgaagctaatgaagcatttgcatcgcaagcattagctgttcaaaaagaactgaatattaatcctgacattttaaatattcatggtggagcaatttctctaggtcatccaattggtgcaagtggagcacgtattcttgttacgttgctacatgcgatgaaaatgcagagcacacaatttggtttagcaacgctttgtattggtggtggaatgggcgctgctagtatcgtagaattggaaaagtag

SEQ ID NO: 100774 - protein, 394 aa, Oceanobacillus iheyensis HTE831
MKEVVIVSAVRTATGSFMGLLSDIPATKLGSIVMKEALHRANVKPEEVEDVIFGNVLQAGLGQGTARQAAIQAGIPEYVPATTINKLCGSGLKSVHLAAQAIQTGDADIVLAGGMENMSQAPYLLEKGRQGFRMGDGKVVDSMIKDGLWCAINDVHMGITAENIADKYQISRKEQDKFAAWSQQKTEKAIEQGAFSDEIVPVKIRKSKSEEFIFNKDEFPRSGVTVEKLANLRPAFKKDGTVTAGNSSGINDGAAALVLMSKEKANALNIKPMATLRGNATAGVDSNFMGIGPVPATNKALKKANISIQEIGLIEANEAFASQALAVQKELNINPDILNIHGGAISLGHPIGASGARILVTLLHAMKMQSTQFGLATLCIGGGMGAASIVELEK

SEQ ID NO: 100775 - DNA, 1185 bp, Brucella suis 1330
  CDS (1)..(1185): transl_table=11
atgtccgatccgaaatccatcgtcatcgccagtgcagcgcgcaccgcggtgggtgcctttaatggcgcctttgccaatgttcctgctcatgaactgggtgcagtggccatcaaggctgctctggagcgtgctggtgtcgatgcggcggatgtcgatgaggttattctggggcaggtgctgacggcaggcgaagggcagaatcccgcccgtcaggccgccatgggggccggttgcccgaaggaaaccaccgcttttgccatcaaccagctctgcggttccggcctgcgggcggttgcgctcgggatgcagcagattgtttccggcgatgcgaagattatcgtggcgggcgggcaggaatccatgtccatggcgccgcattgtgcctatctgcgctccggcgtgaagatgggcgatttcaagatgatcgacaccatgctgaaagacggcctgaccgatgctttccatggctatcacatgggcatcaccgctgaaaatattgcgcgccaatggcagttgagccgcagcgagcaggacgagttcgcactcgcctcgcagcacaaagccgaggccgcgcagaaggcaggccgcttcgatgaggagatcgtgcctttcaccgtcaaggcccgcaagggggatgttgtggtttcggcagatgaatatatccgtccgggcacgacgatggaggtgctggccaagctgaagccggcttttgacaaggaaggcacggtgacggcgggcaatgcatccggcatcaatgacggtgccgcagcggttgtgctgatggatgctggcgaggcagccaggcgtggcgtgaagcctctggcgcgcatcgtatcctgggcgacggctggcgttgatccgtcgatcatgggaaccgggccgattcccgcaacgcggaaggcgctggaaaaggcaggctggagcgttggcgaccttgatcttgttgaggccaatgaggcctttgcagcgcagtcatgcgcggtggtgcgcgatctgggtctcaatcctgaaatcgtcaatgtcaatggcggcgcaatcgccatcggccatccgatcggcgcctccggcgcccgcgtgctgacgacgctgctctacgaaatggagcgtcgcgatgccaagcgtggtctggcgacgctttgtatcggcggcggcatgggcgtggccctttgtgtcgagcgggattga

SEQ ID NO: 100776 - protein, 394 aa, Brucella suis 1330
MSDPKSIVIASAARTAVGAFNGAFANVPAHELGAVAIKAALERAGVDAADVDEVILGQVLTAGEGQNPARQAAMGAGCPKETTAFAINQLCGSGLRAVALGMQQIVSGDAKIIVAGGQESMSMAPHCAYLRSGVKMGDFKMIDTMLKDGLTDAFHGYHMGITAENIARQWQLSRSEQDEFALASQHKAEAAQKAGRFDEEIVPFTVKARKGDVVVSADEYIRPGTTMEVLAKLKPAFDKEGTVTAGNASGINDGAAAVVLMDAGEAARRGVKPLARIVSWATAGVDPSIMGTGPIPATRKALEKAGWSVGDLDLVEANEAFAAQSCAVVRDLGLNPEIVNVNGGAIAIGHPIGASGARVLTTLLYEMERRDAKRGLATLCIGGGMGVALCVERD

SEQ ID NO: 100777 - DNA, 1206 bp, Corynebacterium efficiens YS-314; identical to SEQ ID NO: 92732
  CDS (1)..(1206): transl_table=11

SEQ ID NO: 100778 - protein, 401 aa, Corynebacterium efficiens YS-314; identical to SEQ ID NO: 92733

SEQ ID NO: 100779 - DNA, 1209 bp, Vibrio vulnificus CMCP6
  CDS (1)..(1209): transl_table=11
atggaaaaagtatttattgttgcggccaaacgtaccccgattggcgcttttggcggctcgttgaaaacggtagcagctggagaattggcatctgttgccatcaaaggtgcaattgaacaagccaaagtggatgcttcactgattgatgaagtgatcgtgggtaatgtggtgagtgctgcgcaaggtatgggcattggccgtcaagccgcaatcctagcaggtattccagcagaagttccggcttacaccctcaatatggtgtgtggcagtggcatgaaaaccgtcatggatggcgtttctcatattcgcagtggcgacgcaaaagtggtggttgctgctggtgtcgaagtgatgtcacaaatcccatttacagtacctgcaaacgttcgtgatggcaacaagatgggccatatggcactgcaagatttgctgattgctgatggtttgactgatgttttcaatcaataccatatgggcgttacagcagaaaatgtcgcgaaagaagtgggcattactcgtgatcagcaagatgaatatgcattggcgagtcaacagaaagcagtagcggcgatagaagctggcaaatttaaagacgaaattgtgcccgttgaagtgaccgtacgtcgccaaacagtgacgtttgataccgatgaatatccaaaagccaacgcaacgcttgaagcgctaaaagggttacgccctgcctttgataaagaaggcacggtcactgcgggcaatgcttctggcattaatgatggggcgagtgccgtcattctggcatccgagcaagcagtgaaagaatacggtttgcaacctatcgcagaagtggtgagttacgcacagtctggccttgacccaaaaatcatgggcttaggtcctgttgaggcggttagcaaagcgcttgaaaaagcacaactgaatacagcagacattgatgtgtatgagttgaatgaagcctttgccgcacaagcactaggcgtgattcatcagcttgccgataaacaccaagtgccagtgacatcgattcaagacaaagcgaacccgaatggtggtgcaatcgcgttagggcatccactaggtgcgtcgggtaaccgaattctcgtgacgttaattcatgagcttcaaaaacaaaacggtcagtatggcgttgcgtcactatgtgttggtggcggtatgggaacggcagtgattgtgaaagcagttaagtaa

SEQ ID NO: 100780 - protein, 402 aa, Vibrio vulnificus CMCP6
MEKVFIVAAKRTPIGAFGGSLKTVAAGELASVAIKGAIEQAKVDASLIDEVIVGNVVSAAQGMGIGRQAAILAGIPAEVPAYTLNMVCGSGMKTVMDGVSHIRSGDAKVVVAAGVEVMSQIPFTVPANVRDGNKMGHMALQDLLIADGLTDVFNQYHMGVTAENVAKEVGITRDQQDEYALASQQKAVAAIEAGKFKDEIVPVEVTVRRQTVTFDTDEYPKANATLEALKGLRPAFDKEGTVTAGNASGINDGASAVILASEQAVKEYGLQPIAEVVSYAQSGLDPKIMGLGPVEAVSKALEKAQLNTADIDVYELNEAFAAQALGVIHQLADKHQVPVTSIQDKANPNGGAIALGHPLGASGNRILVTLIHELQKQNGQYGVASLCVGGGMGTAVIVKAVK

SEQ ID NO: 100781 - DNA, 1173 bp, Bradyrhizobium japonicum USDA 110
  CDS (1)..(1173): transl_table=11
atgacggatgtggtaattgtctccgcggcgcggacgccagtcggttccttcaacggggcgttcggcgcgctgtccgcacacgagctcggagctgtcgcaatcaaaggcgccctggatcgcgcgaaggtctcgcccgaggatgtcgatgaagtcatcctggggcaggtgctatccggtggtgaggggcagaaccccgcgcggcaggccgcgatggcggccggcattccgcaggagaaaacggcatggggcatgaaccagctctgcggctcgggcctgcggtcggtcgcgcttgggctgcagcagatcgccaatggtgatgccaggatcatcgtcgccggcggcatggagtccatgtcgatggcgccgcatctgtcgcatctgcggaacggcaccaagatgggcgacgtcaagttcgtcgactccatgctgaaggacggccttatggacgccttccgcggctatcacatgggcgtcacggcagagaacatcgcggccagatggcagatcacccgcgaggagcaggatgcgttcgcgaccagctcgcagaacaaggccgaggatgcgcagaagggcggccggttcaaggatgagatcgttccggtcaccgtcaagaccaggaagggcgacgtcgtcgtcgaccaggatgaatatatccgccccggcacgacgcaggagtcgctggccaagctgaagcccgctttcaacaaggaaggttcggtgacggcgggcaacgcttcgggcctcaacgacggcgcggccgctctggtgttgatgagcgcggacgaagccagcaagcgcggcctggcgcctcttgccaggatcgtctcgtgggccacggccggcgtcgatccggcggtgatgggttcggggccgattccggcctcgcgcaaggcgctggaaaaggctggctggagggtcaaagatctcgacctcgtcgaggccaacgaagcctttgcggcccaggccatcgccgtcaacaaggacatgggctgggatccgtcgatcgtgaacgtgaacggcggcgccatcgccatcggccatccgatcggtgcatccggcgcccgcgtgctgacgacgctgctgttcgagatgcagaagcggggtgcgaagaaggggcttgccacgttgtgcatcggcggcggcatgggtgtcgccctaacggtcgaacgctag

SEQ ID NO: 100782 - protein, 390 aa, Bradyrhizobium japonicum USDA 110
MTDVVIVSAARTPVGSFNGAFGALSAHELGAVAIKGALDRAKVSPEDVDEVILGQVLSGGEGQNPARQAAMAAGIPQEKTAWGMNQLCGSGLRSVALGLQQIANGDARIIVAGGMESMSMAPHLSHLRNGTKMGDVKFVDSMLKDGLMDAFRGYHMGVTAENIAARWQITREEQDAFATSSQNKAEDAQKGGRFKDEIVPVTVKTRKGDVVVDQDEYIRPGTTQESLAKLKPAFNKEGSVTAGNASGLNDGAAALVLMSADEASKRGLAPLARIVSWATAGVDPAVMGSGPIPASRKALEKAGWRVKDLDLVEANEAFAAQAIAVNKDMGWDPSIVNVNGGAIAIGHPIGASGARVLTTLLFEMQKRGAKKGLATLCIGGGMGVALTVER

SEQ ID NO: 100783 - DNA, 1176 bp, Clostridium tetani E88
  CDS (1)..(1176): transl_table=11
atgaaagaagttgttattgttagtgcagttagaactgccatgggtaaatttggaggaactttaaaagatgtacctgcagttgaattaggtgctacagttattaaagaagcaataaacagagcgggaattaaacctgaaattatagacgaagttataatgggaaatgttatccaagcaggacttggacaaagtccaggaagacaagcagctgtaaaagctggaatacctgttgaagtaccagcatttactttaaataaggtttgcggatcaggattaagagcagttgggctagcagctcaaatgataaaagctggagatgctgatgtagtaatagctggtggaatggaaaacatgtctgcagcaccatatgttttaccaaacgctagatggggacaaagaatgtttgatggtaaaatggtagatactatggtaaaggatggtttatgggaatcattcaatgattatcatatgggaatgacagcagaaaacatagcagagaaatgggaattaacaagagaaatgcaagatgagtttgcatgtgcttcacaaaataaagctgaaaaagctattaaagaaggaaagtttaaagacgaaatcgttccagtagttataaaaactagaaaaggtgaagttgtatttgatacagatgagttcccaagatttggtgctactgtagaatcattagcaaagttaaaaccagcatttaaaaaagatggaacagttacagcaggaaatgcatcaggtataaatgatggtgcagctgcgttagttataatgagtgcagaaaaagctgaagaactaggattaaaaccattagctaagatagcttcctatggttcaaaaggattagacccagcttatatgggatatggaccagtaggtgcaacaaaagttgctcttgaaaaagctggatggaaagtagaagacttagatttaatcgaagctaatgaagcttttgcgtcacaaagtttagctgttgctaaagatctaggatttgatatggaaaaagtaaatgttaatggtggagctatagcacttggacatccagtgggatgctctggagcaagaatattagttacattactacatgaaatgcaaagaagagattctaaaaaaggtttagctactctttgcataggtggaggaatgggaacagctcttcttgtagaaagataa

SEQ ID NO: 100784 - protein, 391 aa, Clostridium tetani E88
MKEVVIVSAVRTAMGKFGGTLKDVPAVELGATVIKEAINRAGIKPEIIDEVIMGNVIQAGLGQSPGRQAAVKAGIPVEVPAFTLNKVCGSGLRAVGLAAQMIKAGDADVVIAGGMENMSAAPYVLPNARWGQRMFDGKMVDTMVKDGLWESFNDYHMGMTAENIAEKWELTREMQDEFACASQNKAEKAIKEGKFKDEIVPVVIKTRKGEVVFDTDEFPRFGATVESLAKLKPAFKKDGTVTAGNASGINDGAAALVIMSAEKAEELGLKPLAKIASYGSKGLDPAYMGYGPVGATKVALEKAGWKVEDLDLIEANEAFASQSLAVAKDLGFDMEKVNVNGGAIALGHPVGCSGARILVTLLHEMQRRDSKKGLATLCIGGGMGTALLVER

SEQ ID NO: 100785 - DNA, 1188 bp, Streptomyces avermitilis MA-4680
  CDS (1)..(1188): transl_table=11
gtgcgtcccgtccacttcgcggcagctcgccgcacccccatcggcaagctgcgcggcgccctgtccgtcgtgcggcccgacgacctcgcggcgacggtgatacgcggtctgatcgccgacctgcccgggctcgacccggcccgtatcgacgacgtgtactggggcgcggccaaccaggccggcgaggacaaccgcaatgtcgcccgcatggccgccctcctcgccgggctgcccgagtcggtgcccggcgccacggtcaaccggctctgtgcctccggtctggaggcggtgaccacggccgcccgcacgatcgccgccggcgaggccgacatcgtgctcgcgggcggctccgagtccatgagccgcgcccccttcgtgctgccccgcccggacgaggccctgccgcaccgcatcgagaccgtcgacacccggctcggctggcgcctggtcaacccggccatgaaggaactgcacggcctgctctccatgggtgagaccgccgaggaggtcgccgaacggtacgcggtcccgcgcgaacgccaggacgagttcgcgctgcgcagtcaccggcgcgccgcggacgcccgcaagaacgggtacttcgacgacgagctgctgcccgtcacccggcccgacggcgtggtcgtcgccgacgacgagtgcgtacgcgaggacacctcgtacgagaagctgtcccgtctcaagccggtgttccgccagggcggcaccgtcaccgccggcaatgcctcgccgatgaacgacggagcggccggactcctcctcgtcagcgaggaggccctgaacgagctgggtctggagtccctgggacagtacgtcgccggcgcctcggccggtgtccatcccgacgtcatgggtatcggccccgtgcccgcgaccgagaaggccctggctcgcgtcggctggacgatcggcgacatcgaagaggccgagttcaacgaggcgttcgccgcccaggccctcgcctgcgtggaccgcctcggcatcgacccggagctcgtcaaccccaccggcggcgccatcgccctcggtcacccgctcggctgctcgggcgcccgcatcctcaccacgctgctccaccgcatgcgccgcaccggcgcggcccgcggcctggccacgatgtgcgtcggggtcgggcagggcagtgcgatcctcgtcgaacgccactga

SEQ ID NO: 100786 - protein, 395 aa, Streptomyces avermitilis MA-4680
MRPVHFAAARRTPIGKLRGALSVVRPDDLAATVIRGLIADLPGLDPARIDDVYWGAANQAGEDNRNVARMAALLAGLPESVPGATVNRLCASGLEAVTTAARTIAAGEADIVLAGGSESMSRAPFVLPRPDEALPHRIETVDTRLGWRLVNPAMKELHGLLSMGETAEEVAERYAVPRERQDEFALRSHRRAADARKNGYFDDELLPVTRPDGVVVADDECVREDTSYEKLSRLKPVFRQGGTVTAGNASPMNDGAAGLLLVSEEALNELGLESLGQYVAGASAGVHPDVMGIGPVPATEKALARVGWTIGDIEEAEFNEAFAAQALACVDRLGIDPELVNPTGGAIALGHPLGCSGARILTTLLHRMRRTGAARGLATMCVGVGQGSAILVERH

SEQ ID NO: 100787 - DNA, 1224 bp, Streptomyces avermitilis MA-4680
  CDS (1)..(1224): transl_table=11
gtgatgcccgaagccgtgatcgtctcgaccgcccgctcccccatcggccgcgctttcaagggctccctcaaggacctgcgcccggacgacctgaccgccacgatcatccaggccgccctcgccaaggtccccgagctggaccccaaggacatcgacgacctgatgctcggctgtggcctccccggcggtgagcagggccacaacctcggccgcatcgtcgccgtgcagatgggcatggaccacctcccgggctgcaccatcacccgttactgttcctcctcgctccagacgtcccgcatggccctgcacgccatcaaggccggcgagggcgacgtcttcatctccgcgggcgtcgaggcggtgtcccgcagcgtcaagggcaactccgacagcctgcccgacacccacaaccccctcttcgccgaggccgaggcccgcaccgccgccgtcgccgagagcgcgggcgcgtcctggcacgacccgcgcgaggacggtctgatcccggacgcgtacatctcgatgggccagaccgccgagaacctcgcccgcatcaagggcgtcacccgtcaggacatggacgagttcggcgtccgctcccagaacctcgccgaggaagccatcaagaacggcttctgggagcgcgagatcacgccggtcacgacccccgacggcacggtcgtcagcaaggacgacggcccgcgcgccggcgtcaccctggagggcgtgcagggcctcaagccggtcttccgccccgacggcctcgtcacggccggcaactgctgccccctcaacgacggcgccgccgccctcgtgatcatgtcggacacgaaggcccgcgagctcggtctcaccccgctcgcccgcatcgtctccaccggcgtcaccggcctctccccggagatcatgggcctcggcccggtcgaggcgtccaagcaggcgctccggcgcgcgggcctgaccatcgacgacatcgacctggtcgagatcaacgaggccttcgccgcccaggtgatcccgtcctaccgcgacctcggcatcgacctggacaagctgaacgtcaacggcggcgcgatcgccgtcggccaccccttcggcatgaccggcgcccgcatcaccggcacgctcatcaattccctccagttccacgacaagcagttcggtctggagacgatgtgcgtcggcggcggccagggcatggcgatggtcatcgagcgcctcagctga

SEQ ID NO: 100788 - protein, 407 aa, Streptomyces avermitilis MA-4680
MMPEAVIVSTARSPIGRAFKGSLKDLRPDDLTATIIQAALAKVPELDPKDIDDLMLGCGLPGGEQGHNLGRIVAVQMGMDHLPGCTITRYCSSSLQTSRMALHAIKAGEGDVFISAGVEAVSRSVKGNSDSLPDTHNPLFAEAEARTAAVAESAGASWHDPREDGLIPDAYISMGQTAENLARIKGVTRQDMDEFGVRSQNLAEEAIKNGFWEREITPVTTPDGTVVSKDDGPRAGVTLEGVQGLKPVFRPDGLVTAGNCCPLNDGAAALVIMSDTKARELGLTPLARIVSTGVTGLSPEIMGLGPVEASKQALRRAGLTIDDIDLVEINEAFAAQVIPSYRDLGIDLDKLNVNGGAIAVGHPFGMTGARITGTLINSLQFHDKQFGLETMCVGGGQGMAMVIERLS

SEQ ID NO: 100789 - DNA, 1173 bp, Bacillus cereus ATCC 14579
  CDS (1)..(1173): transl_table=11
atgagagaagctgtcattgttgcgggagcaagaacaccaattggaaaggcaaagaggggttcattaaaaacagttcgtcctgacgatctaggggcgttagtagtaaaggaaacgttaaagcgtgcgaattatgaaggaccaatcgatgatttaattttcggttgtgcgatgccagaagcagagcaaggtttaaatatggctcgtaatatcggcggattagcaggactttcttacgatgttccagctattacgattaaccgttactgttcttcaggtttacaaagtatcgcttacggagcagagcgtattatgcttggtcactctgaagctgtattatcaggcggagcagaatcaatgagtttagttccaatgatgggacacgttgttcgtccgaatagtcgccttgtagaagcggctccagaatattatatgggtatgggacatacagcagagcaagttgctgtgaaatatggaatttctcgtgaagagcaagatgcatttgcagtaagaagtcatcaacgtgctgcgaaagcattagctgcaggaaactttgctgatgaaacagtacctgtagatgtgacgttacgctcggttggatcaaacaataaactgcaagaagaaacaatcactttcgcacaagacgaaggtgtaagagcagagacgacgctagacattttagggaaattacgtccagcatttaacgttcgcggttctgtaacagctggtaattcttcacaaatgagtgacggtgcagcatctgtactattaatggatcgcgaaaaagcagtgagcgatggcatgaagccacttgcgaaattccgttcatttgcagtagctggcgtaccaccagaagtaatgggaatcggcccaatcgctgcaattccaaaagcgctaaaactagctggcttagagctatctgatattggcttatttgaactaaatgaagcattcgcttctcaatcaattcaagttattcgtgaacttggtttagatgaagaaaaagtaaacgtaaacggtggtgcaatcgcacttggacatccacttggctgtacaggggcaaaactaacactatctcttattcacgaaatgaaacgccgcaacgaacaattcggtatcgtaacaatgtgtatcggcggcggaatgggagcagcgggagtatttgaattactttaa

SEQ ID NO: 100790 - protein, 390 aa, Bacillus cereus ATCC 14579
MREAVIVAGARTPIGKAKRGSLKTVRPDDLGALVVKETLKRANYEGPIDDLIFGCAMPEAEQGLNMARNIGGLAGLSYDVPAITINRYCSSGLQSIAYGAERIMLGHSEAVLSGGAESMSLVPMMGHVVRPNSRLVEAAPEYYMGMGHTAEQVAVKYGISREEQDAFAVRSHQRAAKALAAGNFADETVPVDVTLRSVGSNNKLQEETITFAQDEGVRAETTLDILGKLRPAFNVRGSVTAGNSSQMSDGAASVLLMDREKAVSDGMKPLAKFRSFAVAGVPPEVMGIGPIAAIPKALKLAGLELSDIGLFELNEAFASQSIQVIRELGLDEEKVNVNGGAIALGHPLGCTGAKLTLSLIHEMKRRNEQFGIVTMCIGGGMGAAGVFELL

SEQ ID NO: 100791 - DNA, 1203 bp, Nitrosomonas europaea ATCC 19718
  CDS (1)..(1203): transl_table=11
atgaccagacaggtgcaggatgcttatatcgtagccgctacacgttcaccagtaggcaaagcgccacgaggtatgttcaagaatgtgcggccggatgatttgctggtgcatgtgctgcaggcagtgttgaaacagtgtgagggactcgatcccgcggcaatcgaggatgtgatcgtcggttgtgccatgccggaagcggagcaggggatcaatgttgctcgcgtggcgttgctgctggctggtctgccggtcagtgtgccgggtgtgacgatcaaccggttttgtgcttctggtctgcaggcagttgcgatggcggccgaccggatccggctgggagaagcggatgtcattattgccggcgggaccgaaagcatgagtatggtgccgatgatgggtaacaaggtcgcgatgaatccggcgctgttcaaaccaggcagtgagcaggtagccattgcctacggcatgggcattactgcggagaaagtggcggaacagtggaaagtcagccgggaggaacaggatgcatttgccctggaaagccatcaccgcgcgattcgcgccatcgagcaaggtgaattcagagacgagatttcaccttatcctgttcaggaaaaccggccggatctgaatacgcatgaaatccaaaatacagctattgtccgggataccgacgagggcccgcgggcagataccagtgcggaagcgcttgctcgattacgcccggtatttgccgcccagggatctgtaaccgccggtaacagctcacagatgtcggatggagctggtgcagtgatggtggtgagcgaggcagcattgcagcgcttcaatctgacgccgatcgggcgattcattggttatacagtggcgggtgtgccgccggaaatcatgggagtaggtcctgtcaaggcgattcccaaagtgctggaacagaccgggatccaacaggatgcactcgactggatcgaattgaacgaggcgtttgctgcccaaagtctcgcagtaatcaacgatctcggattggatcgggcgaaagtcaatccgctgggaggggcgatcgcactggggcatccgctgggcgcaaccggtgccattcgggtggccactctgcttagtggtttacgacgtcacaaactcaaatatggcatggtcaccatgtgcatcggcggcgggatgggagctgccggtgtgtttgaagccctgtaa

SEQ ID NO: 100792 - protein, 400 aa, Nitrosomonas europaea ATCC 19718
MTRQVQDAYIVAATRSPVGKAPRGMFKNVRPDDLLVHVLQAVLKQCEGLDPAAIEDVIVGCAMPEAEQGINVARVALLLAGLPVSVPGVTINRFCASGLQAVAMAADRIRLGEADVIIAGGTESMSMVPMMGNKVAMNPALFKPGSEQVAIAYGMGITAEKVAEQWKVSREEQDAFALESHHRAIRAIEQGEFRDEISPYPVQENRPDLNTHEIQNTAIVRDTDEGPRADTSAEALARLRPVFAAQGSVTAGNSSQMSDGAGAVMVVSEAALQRFNLTPIGRFIGYTVAGVPPEIMGVGPVKAIPKVLEQTGIQQDALDWIELNEAFAAQSLAVINDLGLDRAKVNPLGGAIALGHPLGATGAIRVATLLSGLRRHKLKYGMVTMCIGGGMGAAGVFEAL

SEQ ID NO: 100793 - DNA, 1197 bp, Arabidopsis thaliana; identical to SEQ ID NO: 92742
  CDS (1)..(1197)

SEQ ID NO: 100794 - protein, 398 aa, Arabidopsis thaliana; identical to SEQ ID NO: 92743

SEQ ID NO: 100795 - DNA, 1245 bp, Arabidopsis thaliana; identical to SEQ ID NO: 92744
  CDS (1)..(1245)

SEQ ID NO: 100796 - protein, 414 aa, Arabidopsis thaliana; identical to SEQ ID NO: 92745

SEQ ID NO: 100797 - DNA, 1206 bp, Bordetella pertussis Tohama I
  CDS (1)..(1206): transl_table=11
atggctgtgcaagcctttatctgtgatgcgattcgcacccctttcggccgctacggcggtgcgctgtcttccgtgcgggccgacgatctggccgccgtgccgatcaaggccctgatggcgcgcaaccccggcgtacgttgggaagaactggacgatgtgctgtacggctgcgccaaccaggcgggcgaggacaaccgcaacgtcgcccgcatggcggccttgctggccggactgccgatcgaggtgccgggcgcgaccatcaaccgcctgtgcggttcggggctggacgccgtcggctcggccgcgcgcgcgatcgccgccggccagaccagcctgatgctggcgggcggggtcgagagcatgagccgcgccccgttcgtgatgggcaaggccgacagcgccttttcgcgcaacgccgccatctacgacaccaccatcggctggcgcttcgtcaacaaactgatgaaggcccagtacggcgtggattccatgccggagacggccgagaacgtggccgatgatttcaagatcagccgcgccgaccaggacaaattcgcgctggccagccagcagaaggcgctgcgcgcgcagcagtcgggctttttcgacgccgagatcacgccggtgtccatcgctcagaagaagggcgatcccgtggtggtgtccaaggacgagcacccgcgcgataccagtctggaagcgctggccaagctcaagggcgtggtgcgcgagggcggttcggtgaccgccggcaacgcttcgggcgtcaacgatggcgcggccgcgctgttgctggccgacgagaaggcggccgccagccatgggctgacgccgcgcgctcgcgtggtcggcatggtcactgccggcgtggcgccgcgcatcatgggcatgggcccggcgcccgccacgcgcaaggtgctggcgcagaccggcctgtcgctggcgcagatggacgtcatcgagctgaacgaagccttcgcggcgcagggcctggccgtgatgcgcgacctcggcatcgccgatgacgacgcccgggtcaacatcaacggcggcgccatcgcgctgggccatccgctgggcgcctccggcgcgcgcctggtgacgaccgccatcaaccagctgcagcgcggcggcggccgctacgcgctgtgcacgatgtgcatcggcgtggggcagggcatcgcgctgatcatcgagcgcgtctga

SEQ ID NO: 100798 - protein, 401 aa, Bordetella pertussis Tohama I
MAVQAFICDAIRTPFGRYGGALSSVRADDLAAVPIKALMARNPGVRWEELDDVLYGCANQAGEDNRNVARMAALLAGLPIEVPGATINRLCGSGLDAVGSAARAIAAGQTSLMLAGGVESMSRAPFVMGKADSAFSRNAAIYDTTIGWRFVNKLMKAQYGVDSMPETAENVADDFKISRADQDKFALASQQKALRAQQSGFFDAEITPVSIAQKKGDPVVVSKDEHPRDTSLEALAKLKGVVREGGSVTAGNASGVNDGAAALLLADEKAAASHGLTPRARVVGMVTAGVAPRIMGMGPAPATRKVLAQTGLSLAQMDVIELNEAFAAQGLAVMRDLGIADDDARVNINGGAIALGHPLGASGARLVTTAINQLQRGGGRYALCTMCIGVGQGIALIIERV

SEQ ID NO: 100799 - DNA, 1206 bp, Bordetella parapertussis 12822
  CDS (1)..(1206): transl_table=11
atgactgtgcaagcctttatctgtgatgcgattcgcacccctttcggccgctacggcggtgcgctgtcttccgtgcgggccgacgatctggccgccgtgccgatcaaggccctgatggcgcgcaaccccggcgtacgttgggaagaactggacgatgtgctgtacggctgcgccaaccaggcgggcgaggacaaccgcaacgtcgcccgcatggcggccttgctggccggactgccgatcgaggtgccgggcgcgaccatcaaccgcctgtgcggttcggggctggacgccgtcggctcggccgcgcgcgcgatcgccgccggccaggccagcctgatgctggcgggcggggtggagagcatgagccgcgccccgttcgtgatgggcaaggccgacagcgccttttcgcgcaacgccgccatctacgacaccaccatcggctggcgcttcgtcaacaaactgatgaaggcccagtacggcgtggattccatgccggagacggccgagaacgtggccgatgatttcaagatcagccgcgccgaccaggacaaattcgcgctggccagccagcagaaggcgctgcgcgcgcagcagtcgggctttttcgacgccgagatcacgccggtgtccatcgctcagaagaagggcgatcccgtggtggtgtccaaggacgagcacccgcgcgataccagcctggaagcgctggccaagctcaggggcgtggtgcgcgagggcggttcggtgaccgccggcaacgcttcgggcgtcaacgatggcgcggccgcgctgttgctggccgacgagaaggcggccgccagccatgggctgacgccgcgcgctcgcgtggtcggcatggccactgccggcgtggcgccgcgcatcatgggcatgggcccggcgcccgccacgcgcaaggtgctggcgcagaccggcctgtcgctggcgcagatggacgtcatcgagctgaacgaagccttcgcggcgcagggcctggccgtgatgcgcgacctcggcatcgccgatgacgacgcccgggtcaacatcaacggcggcgccatcgcgctgggccatccgctgggcgcctccggcgcgcgcctggtgacgaccgccatcaaccagctgcagcgcggcggcggccgctacgcgctgtgcacgatgtgcatcggcgtggggcagggcatcgcgctgatcatcgagcgcgtctga

SEQ ID NO: 100800 - protein, 401 aa, Bordetella parapertussis 12822
MTVQAFICDAIRTPFGRYGGALSSVRADDLAAVPIKALMARNPGVRWEELDDVLYGCANQAGEDNRNVARMAALLAGLPIEVPGATINRLCGSGLDAVGSAARAIAAGQASLMLAGGVESMSRAPFVMGKADSAFSRNAAIYDTTIGWRFVNKLMKAQYGVDSMPETAENVADDFKISRADQDKFALASQQKALRAQQSGFFDAEITPVSIAQKKGDPVVVSKDEHPRDTSLEALAKLRGVVREGGSVTAGNASGVNDGAAALLLADEKAAASHGLTPRARVVGMATAGVAPRIMGMGPAPATRKVLAQTGLSLAQMDVIELNEAFAAQGLAVMRDLGIADDDARVNINGGAIALGHPLGASGARLVTTAINQLQRGGGRYALCTMCIGVGQGIALIIERV

SEQ ID NO: 100801 - DNA, 1200 bp, Bordetella bronchiseptica RB50
  CDS (1)..(1200): transl_table=11
atgagcaaacagattcaggacgcctacatcgtcgccgcgacccgcctgccggtgggcaagcgcaatggcgcctacgccaccacgcgccccgacgacatgctggccgcggtgctgcgggccgtgctggcgcaggtgcccgcgctgctgcccgagcgcatcgacgacgtgatcaccggctgcgccatgccggaggccgaacagggcatgaacgtctcgcgcatcggcctgctgcttgccggcctgccgcaaagcgtggccggcgtcaccgtcaaccgcttctgcgcctcgggcctgcaggcggtggccgatgccgccaaccgcatccggctgggcatggccgacgtgatgataggcgccggcaccgaatcgatgagcgccatgccgcagatcatgggcaacaaggtggcgatgaaccccgccgtcttcgcgcacgaggaaaacctcggcatggcgttcggcatggggctgaccggcgaaaaagtcgccgagcaatggaaagtctcgcgcgaggaccaggatgccttttcgctgtcctcgcaccagaaggcctgcgccgccatcgccgccggccacttcaaggccgagatcacgccctaccaggtgcgcacgcacctggccggcggacgcgacggcgccgtgcgcgtggccgaacgctggatcgaacaggacgaaggcccgcgccccgacagcaccgccgaggcgctggccaggctgcggccggtattcgccgcgcgcggcagcgtcaccgccggcaacagctcgcagatgtccgatggcgcggccgccgtcgtgctggtctccgagcgcgtcctgcgcgagtacggcctgcagccgctggcgcgcttcgtcgatttcgcggtggccggcgtgccgccggagatcatgggcatcggccccaggatggccattcccaaggtgctggcgcgcagcggcatcgcccagcaggacctggactggatcgaactgaacgaagccttcgccgcgcagtcgctggcggtcatgcgcgacctcgaactcgatccggccaaggtcaacccgctgggcggggcgatcgcgctgggccacccgctgggcgcgaccggcgccatccgcaccgccaccatcgtgcacggcctgcgccgcaccggcggcaagtacggcatggtcaccatgtgcatcggcaccggcatgggcgcggccggcatcttcgaggcgctgtga

SEQ ID NO: 100802 - protein, 399 aa, Bordetella bronchiseptica RB50
MSKQIQDAYIVAATRLPVGKRNGAYATTRPDDMLAAVLRAVLAQVPALLPERIDDVITGCAMPEAEQGMNVSRIGLLLAGLPQSVAGVTVNRFCASGLQAVADAANRIRLGMADVMIGAGTESMSAMPQIMGNKVAMNPAVFAHEENLGMAFGMGLTGEKVAEQWKVSREDQDAFSLSSHQKACAAIAAGHFKAEITPYQVRTHLAGGRDGAVRVAERWIEQDEGPRPDSTAEALARLRPVFAARGSVTAGNSSQMSDGAAAVVLVSERVLREYGLQPLARFVDFAVAGVPPEIMGIGPRMAIPKVLARSGIAQQDLDWIELNEAFAAQSLAVMRDLELDPAKVNPLGGAIALGHPLGATGAIRTATIVHGLRRTGGKYGMVTMCIGTGMGAAGIFEAL

SEQ ID NO: 100803 - DNA, 1206 bp, Bordetella bronchiseptica RB50
  CDS (1)..(1206): transl_table=11
atgactgtgcaagcctttatctgtgatgcgattcgcacccctttcggccgctacggcggtgcgctgtcttccgtgcgggccgacgatctggccgccgtgccgatcaaggccctgatggcgcgcaaccccggcgtacgttgggaagaactggacgatgtgctgtacggctgcgccaaccaggcgggcgaggacaaccgcaacgtcgcccgcatggcggccttgctggccggactgccgatcgaggtgccgggcgcgaccatcaaccgcctgtgcggttcggggctggacgccgtcggctcggccgcgcgcgcgatcgccgccggccaggccagcctgatgctggcgggcggggtggagagcatgagccgcgccccgttcgtgatgggcaaggccgacagcgccttttcgcgcaacgccgccatctacgacaccaccatcggctggcgcttcgtcaacaaactgatgaaggcccagtacggcgtggattccatgccggagacggccgagaacgtggccgatgatttcaagatcagccgcgccgaccaggacaaattcgcgctggccagccagcagaaggcgctgcgcgcgcagcagtcgggctttttcgacgccgagatcacgccggtgtccatcgctcagaagaagggcgatcccgtggtggtgtccaaggacgagcacccgcgcgataccagcctggaagcgctggccaagctcaagggcgtggtgcgcgagggcggttcggtgaccgccggcaacgcttcgggcgtcaacgatggcgcggccgcgctgttgctggccgacgagaaggcggccgccagccatgggctgacgccgcgcgctcgcgtggtcggcatggccaccgccggcgtggcgccgcgcatcatgggcatgggcccggcgcccgccacgcgcaaggtgctggcgcagaccggcctgtcgctggcgcagatggacgtcatcgagctgaacgaagccttcgcggcgcagggcctggccgtgatgcgcgacctcggcatcgccgatgacgacgcccgggtcaacatcaacggcggcgccatcgcgctgggccatccgctgggcgcctccggcgcgcgcctggtgacgaccgccatcaaccagctgcagcgcggcggcggccgctacgcgctgtgcacgatgtgcatcggcgtggggcagggcatcgcgctgatcatcgagcgcgtctga

SEQ ID NO: 100804 - protein, 401 aa, Bordetella bronchiseptica RB50
MTVQAFICDAIRTPFGRYGGALSSVRADDLAAVPIKALMARNPGVRWEELDDVLYGCANQAGEDNRNVARMAALLAGLPIEVPGATINRLCGSGLDAVGSAARAIAAGQASLMLAGGVESMSRAPFVMGKADSAFSRNAAIYDTTIGWRFVNKLMKAQYGVDSMPETAENVADDFKISRADQDKFALASQQKALRAQQSGFFDAEITPVSIAQKKGDPVVVSKDEHPRDTSLEALAKLKGVVREGGSVTAGNASGVNDGAAALLLADEKAAASHGLTPRARVVGMATAGVAPRIMGMGPAPATRKVLAQTGLSLAQMDVIELNEAFAAQGLAVMRDLGIADDDARVNINGGAIALGHPLGASGARLVTTAINQLQRGGGRYALCTMCIGVGQGIALIIERV

SEQ ID NO: 100805 - DNA, 1203 bp, Chromobacterium violaceum ATCC 12472
  CDS (1)..(1203): transl_table=11
atgaaaaatgcttatatctgcgatgccgtgcgtaccccctttggtcgttacggcggttctctgtcttccattcgcggcgacgagctggcggcgctgcccatccaggccttgctggcgaggaacccgcaattgggcgcggcttcgatcgacgatgtgatctatggatgcgccaaccaggccggagaggacaatcggaacgtggcgcgcatggcggcgctgctggcggggttgccggcagccgtgccgggcactacggtcaaccgcttgtgcggttccagcctggatgcgctggcgatgtcggcgcgggcgttgaaaagcggcgaagcggagctgcttgtcgccggcggggtggaaagcatgagcagggcaccttacgtggtgggcaaagcggacagcgtgttctcgcgctctctgaagatggaggacaccaccatgggttggcgtttcgtcaatccgagaatgaagaccctgtatggcgtggataccatgccggaaaccgcggaaaacgtggcgaaggagttcggcgtgtcacggtccgaccaagatgcgttcgccttgttgagccagcaacggaccgcagcggcctatgagcggggtttttttgccgatgagctgatggaggtgcgtattccgcagcggaagggcgaggacaagatatttgcccaggacgagcatccgaggcaaacctcgctggaggaactggcgcggctcaaaggcgttgtcactccggatggcacggtgactgccggaaacgcttcaggcatcaatgacggcgcttgcgcattgctgttggcgggcgaggaggggattcgccgccatggactggtaccgcgcgcccgcatcttggcggcagcggcagcgggagtagcgccccgagtgatgggaatggggccggtgccggcgatcaacaaggccttggcgctggcggggttgaggctggagcagatcgaccacatagaattgaatgaagcgttcgctgcccaggcgctggcggtgctgcgggagttgcgtctgtcggacgacgatagccgagtcaaccccaatggcggggccatcgcgttgggccatccgcttggcgccagcggcgcgcggctggtctccaccgcggtgtaccacctggcgcggacggggggacgctacgcgctgtgttccatgtgcgtgggcgtaggccagggcatcgctatggtgattgagcggatttaa

SEQ ID NO: 100806 - protein, 400 aa, Chromobacterium violaceum ATCC 12472
MKNAYICDAVRTPFGRYGGSLSSIRGDELAALPIQALLARNPQLGAASIDDVIYGCANQAGEDNRNVARMAALLAGLPAAVPGTTVNRLCGSSLDALAMSARALKSGEAELLVAGGVESMSRAPYVVGKADSVFSRSLKMEDTTMGWRFVNPRMKTLYGVDTMPETAENVAKEFGVSRSDQDAFALLSQQRTAAAYERGFFADELMEVRIPQRKGEDKIFAQDEHPRQTSLEELARLKGVVTPDGTVTAGNASGINDGACALLLAGEEGIRRHGLVPRARILAAAAAGVAPRVMGMGPVPAINKALALAGLRLEQIDHIELNEAFAAQALAVLRELRLSDDDSRVNPNGGAIALGHPLGASGARLVSTAVYHLARTGGRYALCSMCVGVGQGIAMVIERI

SEQ ID NO: 100807 - DNA, 1209 bp, Rhodopseudomonas palustris CGA009
  CDS (1)..(1209): transl_table=11
atggccgacgtgtttgtctgcgacgcggtgcgcaccccgatcggccgttacggcggatccctcgccaaggtgcggaccgatgatctcgcggcggtgccgatcaaggcgctgatggccaaacatccggacatggattggagcgcggtggacgaggtgttcttcggctgcgccaatcaggccggcgaagacaaccgcaacgttgcccggatggcggcgctgctggcgggcttgccggattcagtgcccggccagactctcaatcggttgtgcgcctccggcctcgatgcggtcggcgccgcgggccgtgcgatccgcggcggcgagatcgatctggcgatcaccggcggcgtcgagtcgatgacccgggcgccgttcgtgcagggcaaggccaccgaagcgttcgcgcgctcggccgacatcttcgacaccacgatcggttggcgcttcatcaatccgctgatgaaacagcaatacggcgtcgactcgatgccggagaccggcgagaacgtcgccgaagaattccagatctcgcgcgccgatcaggatgcgttcgcgatccgcagccagcagcgcgccggcgcggcgatcgcggccggctacttcgccgaggagatcgcgccggtgacctacgcgggcggcaaggccggcccgatcacggtcgataaggacgagcatccgcgccccgaaaccacgctggaaggcctcgccaagctcaagccgatcgtgcgcaatccgggcaccgtgacggccggtaacgcctcgggcgtcaatgacggcgccgcagcgctgctgatcgcctcggaagccgcggtgaagaaatatggcctgacgccgcgcgccaagattctgggcctcgcctcggcggcggtgccgccgcggatcatgggcatcggcccggtgccggcgacccgcaagctgatggaacggctcgggctgaagatcagcgacttcgacctgatcgagctgaacgaagcgttcgcctcgcagggcatcgcctgcctgcgccaactcggcgttgccgacgatgccgacttcgtcaatccgcacggcggcgcgatcgcgctcggccacccgctcggtatgagcggcgcccgcctggcgctcaccgcggtgcacggcctcgaaaagcgcggcggcaagctggcgctggccacgatgtgcgtcggcgtcggccagggcgtcgcgatggcgatcgagaagctgaactaa

SEQ ID NO: 100808 - protein, 402 aa, Rhodopseudomonas palustris CGA009
MADVFVCDAVRTPIGRYGGSLAKVRTDDLAAVPIKALMAKHPDMDWSAVDEVFFGCANQAGEDNRNVARMAALLAGLPDSVPGQTLNRLCASGLDAVGAAGRAIRGGEIDLAITGGVESMTRAPFVQGKATEAFARSADIFDTTIGWRFINPLMKQQYGVDSMPETGENVAEEFQISRADQDAFAIRSQQRAGAAIAAGYFAEEIAPVTYAGGKAGPITVDKDEHPRPETTLEGLAKLKPIVRNPGTVTAGNASGVNDGAAALLIASEAAVKKYGLTPRAKILGLASAAVPPRIMGIGPVPATRKLMERLGLKISDFDLIELNEAFASQGIACLRQLGVADDADFVNPHGGAIALGHPLGMSGARLALTAVHGLEKRGGKLALATMCVGVGQGVAMAIEKLN

SEQ ID NO: 100809 - DNA, 1176 bp, Mycobacterium avium subsp. paratuberculosis K-10
  CDS (1)..(1176): transl_table=11
atgaaccgcgacgccgtcatcgtcggagccgtccgcaccccgatcggcaagggcaaggccagtggtgcgctgcacgacgtgttgcccgccgacctgctggcccacagcctgcgggagctggtggcgcgcaccggagtcgatccggcgcagatcgacgacgtcatcgccggcgccgtcacccaggtcggcgaccaggcggtcaacatcgcgcgaaacgcgttgctgggagcgggcttcccggagtcggttcccggtgtcaccatcgaccgccagtgcggcagcagccagcaggcgatcaacttcgcggcccagggcgtcatcgccggcgcctatgacgtggtgatcgccgccggggtggagtcgatgggccgcgtcccgatgggctcccaggtgctgcccggcagcaacccgttcggcgaggcgatgaacgcccggtatcccgaaggcctggtgccgcaagggatcagcgccgaactgatcgccgcgaagtggggattctcgcgcacccagctcgacgagttctccgccgccagccacgagaaggccgcccgcgccaccaaggacgggctgttcgacaacgagctcatcccgatcgccgggctggccaccgacgagttcatccggcccgggaccacggtgcagacgctggccggactacagcccgcgttctacagcgaagccaccgaagcccgcttcccgcagatcaattgggagatcacggccggcaactcctcgccgctgtccgacggcagcgccgcggtgctgatcaccagcagcgagaccgccgcgcggctgggtctgcggccgctggcccggatccacaccaccgccgtggtcggctccgagccgctctacatgctgaccggcgtgattccggccaccgagaaggtgctgtcgaaggcgggcctgacgctggccgacatcgacctgttcgaggtgaacgaggcgttcgcccccgtcgtgctggcctgggcgcaggacaccggcgcggatctggacaagaccaacgtcaacggcggggcgatcgcgatcggacatccgttgggggccagcggcgcccgcatcatcaccactctcgtcaacgcgctggagcaacgcggcggaaggtatggcctgcagacgatgtgcgagggcggcggcatggccaacgccaccatcatcgagcggttgagttag

SEQ ID NO: 100810 - protein, 391 aa, Mycobacterium avium subsp. paratuberculosis K-10
MNRDAVIVGAVRTPIGKGKASGALHDVLPADLLAHSLRELVARTGVDPAQIDDVIAGAVTQVGDQAVNIARNALLGAGFPESVPGVTIDRQCGSSQQAINFAAQGVIAGAYDVVIAAGVESMGRVPMGSQVLPGSNPFGEAMNARYPEGLVPQGISAELIAAKWGFSRTQLDEFSAASHEKAARATKDGLFDNELIPIAGLATDEFIRPGTTVQTLAGLQPAFYSEATEARFPQINWEITAGNSSPLSDGSAAVLITSSETAARLGLRPLARIHTTAVVGSEPLYMLTGVIPATEKVLSKAGLTLADIDLFEVNEAFAPVVLAWAQDTGADLDKTNVNGGAIAIGHPLGASGARIITTLVNALEQRGGRYGLQTMCEGGGMANATIIERLS

SEQ ID NO: 100811 - DNA, 1182 bp, Bdellovibrio bacteriovorus HD100
  CDS (1)..(1182): transl_table=11
atggaaaaaatcgtatttatctctggaaaaagaactcccttcggagccttcggcggttcattgaaggatgtatcagcaacggatctgggtgtcgctgccgctaaagcgaccctggagcaagccggtctgtctgcagacaagattgatcacgtggtgtttggcaacgtggttcagtccggtgcggatgcagcctatcttccaagacatattggtttgaaaaccggagtgccggtcgcggtgggcgcttttgcggtcaaccgtctgtgtggcagtggtttccagtcctgggtgaatgccgtgcagatgatccagtgtggggaagccaccgcggttcttgccggtggtgtcgagcaaatgtcccagattccttatgtggcccgcaaagtccgctttgatggcatgcgcatggggaacttcgaactggaagatctgatgacctcggcgctgacggacgcttatgccaagatgcctatggcgatcacggctgaaaatctggcggtgaaatacggtatcacgcgcgaagaatctgacaagtattccatccagtcccagcagcgcttccaggccgcggttgaaaaaggtttcatgaaacaggaaatctgcctggtcacagttgagggtcgcaagggcaccgtggtgattgaaaaagacgaacatccaaaaccggattccactctggaaaaactggcgacgctaaagcctgtcttcaaaaaagacgggattgtaacggcggcggcggcttccggtattgtcgacggggcggcttgttctttgttgatgagcgaatccaaagccaaggaactgggcatgaaaccaatggcgcgtatcgtgagctacgcttctgtgggttgtgacccgacgatcatgggtattggtccagcgggcgcagctcgtctggcattacagaaagccggactgactctggatcagatggatctggtggaagtgaacgaagcttttgcggcccagtacctggcggtggaaaaagaattgaaactggatccggcaaaaaccaatgtgaacggtggtgcgattgctgtcggtcaccccttgggtgcctccggcacccgcattatgaatcacctggtgtatgagcttcatcgccgcaacgccaagtacgctctgggttctgcttgtattggcggcggtcagggtattgcgatcatcatcgaaagaatctaa

SEQ ID NO: 100812 - protein, 393 aa, Bdellovibrio bacteriovorus HD100
MEKIVFISGKRTPFGAFGGSLKDVSATDLGVAAAKATLEQAGLSADKIDHVVFGNVVQSGADAAYLPRHIGLKTGVPVAVGAFAVNRLCGSGFQSWVNAVQMIQCGEATAVLAGGVEQMSQIPYVARKVRFDGMRMGNFELEDLMTSALTDAYAKMPMAITAENLAVKYGITREESDKYSIQSQQRFQAAVEKGFMKQEICLVTVEGRKGTVVIEKDEHPKPDSTLEKLATLKPVFKKDGIVTAAAASGIVDGAACSLLMSESKAKELGMKPMARIVSYASVGCDPTIMGIGPAGAARLALQKAGLTLDQMDLVEVNEAFAAQYLAVEKELKLDPAKTNVNGGAIAVGHPLGASGTRIMNHLVYELHRRNAKYALGSACIGGGQGIAIIIERI

SEQ ID NO: 100813 - DNA, 1218 bp, Arabidopsis thaliana; identical to SEQ ID NO: 92754
  CDS (1)..(1218)

SEQ ID NO: 100814 - protein, 405 aa, Arabidopsis thaliana; identical to SEQ ID NO: 92755

SEQ ID NO: 100815 - DNA, 1221 bp, Arabidopsis thaliana; identical to SEQ ID NO: 92756
  CDS (1)..(1221)

SEQ ID NO: 100816 - protein, 406 aa, Arabidopsis thaliana; identical to SEQ ID NO: 92757

SEQ ID NO: 100817 - DNA, 1173 bp, Bacillus cereus ATCC 10987
  CDS (1)..(1173): transl_table=11
atgagagaagctgtcattgttgcgggagcaagaacaccaattggaaaagcaaagaggggttcattaaaaacagttcgtcctgacgatttaggggcgttagtagtaaaagaaacgttaaagcgtgcgaattatgaaggaccaatcgatgatttaattttcggttgtgcgatgccagaagcagagcaaggtttaaatatggctcgtaatatcggcggattagcaggactttcttacgatgttccagctattacaattaaccgttactgttcttcaggtttacaaagtatcgcttacggagcagagcgcattatgcttggtcactcagaagctgtattatcaggcggagcggaatcaatgagtttagttccaatgatgggacacgttgttcgtccaaatagccgccttgtagaagcagctccagaatattatatgggtatgggacatacagcagagcaagttgctgtgaaatatggaatttctcgtgaagagcaagatgcatttgcagtacgaagtcatcaacgtgctgcgaaagcattagctgcaggaaactttgctgatgaaacagtacctgtagatgtaacgttacgtactgttggatcaaataacaaactgcaagaagaaacaatcactttcacgcaagacgaaggtgtaagagcagaaacgacgatagacattttaggtaaattacgtccagcatttaacgttcgcggttctgtaacagctggtaactcttcacaaatgagtgatggtgcagcatctgtattattaatggaccgtgaaaaagcagtaagcgatggtatgaagccacttgcgaaattccgttcatttgcagtagcgggtgtaccaccagaagtaatgggaattggcccaatcgcagcaattcctaaagcattaaaactagctggcttagagctatctgatattggcttattcgaactaaatgaagcattcgcttctcaatcgattcaagttattcgtgaacttggtttagatgaagaaaaagtaaacgtaaacggcggtgcaatcgcacttggacatccacttggctgtacaggagcaaaactaacactatctcttattcacgaaatgaaacgccgcaacgaacaattcggtatcgtaacaatgtgtatcggcggcggaatgggagcagcgggagtgtttgaattactataa

SEQ ID NO: 100818 - protein, 390 aa, Bacillus cereus ATCC 10987
MREAVIVAGARTPIGKAKRGSLKTVRPDDLGALVVKETLKRANYEGPIDDLIFGCAMPEAEQGLNMARNIGGLAGLSYDVPAITINRYCSSGLQSIAYGAERIMLGHSEAVLSGGAESMSLVPMMGHVVRPNSRLVEAAPEYYMGMGHTAEQVAVKYGISREEQDAFAVRSHQRAAKALAAGNFADETVPVDVTLRTVGSNNKLQEETITFTQDEGVRAETTIDILGKLRPAFNVRGSVTAGNSSQMSDGAASVLLMDREKAVSDGMKPLAKFRSFAVAGVPPEVMGIGPIAAIPKALKLAGLELSDIGLFELNEAFASQSIQVIRELGLDEEKVNVNGGAIALGHPLGCTGAKLTLSLIHEMKRRNEQFGIVTMCIGGGMGAAGVFELL

SEQ ID NO: 100819 - DNA, 1218 bp, Apis mellifera; identical to SEQ ID NO: 92760
  CDS (1)..(1218)

SEQ ID NO: 100820 - protein, 405 aa, Apis mellifera; identical to SEQ ID NO: 92761

SEQ ID NO: 100821 - DNA, 1194 bp, Strongylocentrotus purpuratus; identical to SEQ ID NO: 92762
  CDS (1)..(1194)

SEQ ID NO: 100822 - protein, 397 aa, Strongylocentrotus purpuratus; identical to SEQ ID NO: 92763

SEQ ID NO: 100823 - DNA, 1185 bp, Strongylocentrotus purpuratus; identical to SEQ ID NO: 92764
  CDS (1)..(1185)

SEQ ID NO: 100824 - protein, 394 aa, Strongylocentrotus purpuratus; identical to SEQ ID NO: 92765

SEQ ID NO: 100825 - DNA, 1200 bp, Nasonia vitripennis; identical to SEQ ID NO: 92766
  CDS (1)..(1200)

SEQ ID NO: 100826 - protein, 399 aa, Nasonia vitripennis; identical to SEQ ID NO: 92767

SEQ ID NO: 100827 - DNA, 1416 bp, Nasonia vitripennis; identical to SEQ ID NO: 92768
  CDS (1)..(1416)

SEQ ID NO: 100828 - protein, 471 aa, Nasonia vitripennis; identical to SEQ ID NO: 92769

SEQ ID NO: 100829 - DNA, 1185 bp, Nasonia vitripennis; identical to SEQ ID NO: 92770
  CDS (1)..(1185)

SEQ ID NO: 100830 - protein, 394 aa, Nasonia vitripennis; identical to SEQ ID NO: 92771

SEQ ID NO: 100831 - DNA, 1233 bp, Nasonia vitripennis; identical to SEQ ID NO: 92772
  CDS (1)..(1233)

SEQ ID NO: 100832 - protein, 410 aa, Nasonia vitripennis; identical to SEQ ID NO: 92773

SEQ ID NO: 100833 - DNA, 1197 bp, Anopheles gambiae str. PEST; identical to SEQ ID NO: 92774
  CDS (1)..(1197)

SEQ ID NO: 100834 - protein, 398 aa, Anopheles gambiae str. PEST; identical to SEQ ID NO: 92775

SEQ ID NO: 100835 - DNA, 1185 bp, Anopheles gambiae str. PEST; identical to SEQ ID NO: 92776
  CDS (1)..(1185)

SEQ ID NO: 100836 - protein, 394 aa, Anopheles gambiae str. PEST; identical to SEQ ID NO: 92777

SEQ ID NO: 100837 - DNA, 1302 bp, Magnaporthe grisea 70-15; identical to SEQ ID NO: 92778
  CDS (1)..(1302)

SEQ ID NO: 100838 - protein, 433 aa, Magnaporthe grisea 70-15; identical to SEQ ID NO: 92779

SEQ ID NO: 100839 - DNA, 1251 bp, Magnaporthe grisea 70-15; identical to SEQ ID NO: 92780
  CDS (1)..(1251)

SEQ ID NO: 100840 - protein, 416 aa, Magnaporthe grisea 70-15; identical to SEQ ID NO: 92781

SEQ ID NO: 100841 - DNA, 1251 bp, Gibberella zeae PH-1; identical to SEQ ID NO: 92782
  CDS (1)..(1251)

SEQ ID NO: 100842 - protein, 416 aa, Gibberella zeae PH-1; identical to SEQ ID NO: 92783

SEQ ID NO: 100843 - DNA, 1248 bp, Gibberella zeae PH-1; identical to SEQ ID NO: 92784
  CDS (1)..(1248)

SEQ ID NO: 100844 - protein, 415 aa, Gibberella zeae PH-1; identical to SEQ ID NO: 92785

SEQ ID NO: 100845 - DNA, 1191 bp, Gibberella zeae PH-1; identical to SEQ ID NO: 92786
  CDS (1)..(1191)

SEQ ID NO: 100846 - protein, 396 aa, Gibberella zeae PH-1; identical to SEQ ID NO: 92787

SEQ ID NO: 100847 - DNA, 1143 bp, Gibberella zeae PH-1; identical to SEQ ID NO: 92788
  CDS (1)..(1143)

SEQ ID NO: 100848 - protein, 380 aa, Gibberella zeae PH-1; identical to SEQ ID NO: 92789

SEQ ID NO: 100849 - DNA, 1200 bp, Apis mellifera; identical to SEQ ID NO: 92790
  CDS (1)..(1200)

SEQ ID NO: 100850 - protein, 399 aa, Apis mellifera; identical to SEQ ID NO: 92791

SEQ ID NO: 100851 - DNA, 1230 bp, Candida glabrata CBS 138; identical to SEQ ID NO: 92792
  CDS (1)..(1230)

SEQ ID NO: 100852 - protein, 409 aa, Candida glabrata CBS 138; identical to SEQ ID NO: 92793

SEQ ID NO: 100853 - DNA, 1197 bp, Candida glabrata CBS 138; identical to SEQ ID NO: 92794
  CDS (1)..(1197)

SEQ ID NO: 100854 - protein, 398 aa, Candida glabrata CBS 138; identical to SEQ ID NO: 92795

SEQ ID NO: 100855 - DNA, 1197 bp, Kluyveromyces lactis NRRL Y-1140; identical to SEQ ID NO: 92796
  CDS (1)..(1197)

SEQ ID NO: 100856 - protein, 398 aa, Kluyveromyces lactis NRRL Y-1140; identical to SEQ ID NO: 92797

SEQ ID NO: 100857 - DNA, 1215 bp, Kluyveromyces lactis NRRL Y-1140; identical to SEQ ID NO: 92798
  CDS (1)..(1215)

SEQ ID NO: 100858 - protein, 404 aa, Kluyveromyces lactis NRRL Y-1140; identical to SEQ ID NO: 92799

SEQ ID NO: 100859 - DNA, 1239 bp, Debaryomyces hansenii CBS767; identical to SEQ ID NO: 92800
  CDS (1)..(1239)

SEQ ID NO: 100860 - protein, 412 aa, Debaryomyces hansenii CBS767; identical to SEQ ID NO: 92801

SEQ ID NO: 100861 - DNA, 1212 bp, Debaryomyces hansenii CBS767; identical to SEQ ID NO: 92802
  CDS (1)..(1212)

SEQ ID NO: 100862 - protein, 403 aa, Debaryomyces hansenii CBS767; identical to SEQ ID NO: 92803

SEQ ID NO: 100863 - DNA, 1251 bp, Debaryomyces hansenii CBS767
  CDS (1)..(1251)
atggacagattaaatcaactttctggacaattgaacccatcttctaaacaagccttacttgaaaagaacccagacgatgttgttatcgtagctgcttacagaactgccattactaagggtcttaaaggtggattcaaggacgttcattccgattatatcttgagaaactttttagtggaatttatcaagaaaaccaatgttgacccaaacttaattgaagatgttgcatgtggtaacgttttaaatagaggtgcaggtgcgaatgagcatcgtggtgcttgtctttccgctggtattccatacaccgctggtttcatcgctttgaacagattatgttcttctggtttgatggcgatttctgaaattgccaacaagattaagtgtggtgaaatcgactgtggattagctgcaggttccgaatcgatgactgccaactggggtcctcaagcactttctaagtctgatccaaacttagctgatgacccagaaatggaaaagtgtatgattccaatgggtatcactaacgaaaatgttgctgccaaattcaacatttcaagagctgtccaagatgaattcgctgccaagtcttacgctaaggcaagtgcagcagtcaaacgtggtgcattcaaggatgaaattttgccaattgaaaccgcgtttaaggaaggagatgatgatgatgatgatgaagatgtcaaatacacgaaggctattattgacactgacgaatgtccaagagaaggtgtcactgctgcctctttatctaagattaaacctgctttcaagtcagatggttctactcacgctggtaactcttcccaagtctcagatggtgcgtctggtgtcttattaatgagaagatctttagctgaacaaaagggttacccaatcgaagctaagtacgttttatgctctactgttggtgttccaccagaaatcatgggtattggtccagctgttgccatcccacaagtcttaaagaagactggcttaactgttagtgatgttgatgtattcgaaatcaacgaagctttcgctgctcaatgtttatactcagcgcaagtatgcaaggttccagaagaaaaattaaatataaacggtggtggaatttctcttgggcatccattaggtggtacaggtaccagacaatacgcaactatcttaagattgttaaagaagggtgaaatcggtctcacctctatgtgtatcggttccggtatgggtgctgcttctattcttgttagagaataa

SEQ ID NO: 100864 - protein, 416 aa, Debaryomyces hansenii CBS767
MDRLNQLSGQLNPSSKQALLEKNPDDVVIVAAYRTAITKGLKGGFKDVHSDYILRNFLVEFIKKTNVDPNLIEDVACGNVLNRGAGANEHRGACLSAGIPYTAGFIALNRLCSSGLMAISEIANKIKCGEIDCGLAAGSESMTANWGPQALSKSDPNLADDPEMEKCMIPMGITNENVAAKFNISRAVQDEFAAKSYAKASAAVKRGAFKDEILPIETAFKEGDDDDDDEDVKYTKAIIDTDECPREGVTAASLSKIKPAFKSDGSTHAGNSSQVSDGASGVLLMRRSLAEQKGYPIEAKYVLCSTVGVPPEIMGIGPAVAIPQVLKKTGLTVSDVDVFEINEAFAAQCLYSAQVCKVPEEKLNINGGGISLGHPLGGTGTRQYATILRLLKKGEIGLTSMCIGSGMGAASILVRE

SEQ ID NO: 100865 - DNA, 1206 bp, Debaryomyces hansenii CBS767; identical to SEQ ID NO: 92804
  CDS (1)..(1206)

SEQ ID NO: 100866 - protein, 401 aa, Debaryomyces hansenii CBS767; identical to SEQ ID NO: 92805

SEQ ID NO: 100867 - DNA, 1179 bp, Yarrowia lipolytica CLIB122; identical to SEQ ID NO: 92806
  CDS (1)..(1179)

SEQ ID NO: 100868 - protein, 392 aa, Yarrowia lipolytica CLIB122; identical to SEQ ID NO: 92807

SEQ ID NO: 100869 - DNA, 1401 bp, Apis mellifera; identical to SEQ ID NO: 92808
  CDS (1)..(1401)

SEQ ID NO: 100870 - protein, 466 aa, Apis mellifera; identical to SEQ ID NO: 92809

SEQ ID NO: 100871 - DNA, 1254 bp, Aspergillus nidulans FGSC A4; identical to SEQ ID NO: 92810
  CDS (1)..(1254)

SEQ ID NO: 100872 - protein, 417 aa, Aspergillus nidulans FGSC A4; identical to SEQ ID NO: 92811

SEQ ID NO: 100873 - DNA, 1221 bp, Aspergillus nidulans FGSC A4
  CDS (1)..(1221)
atggcttcccttcctccggtctatatcgtgtcttacgctcgtactcccgtgggctcatttctggggtctctttcaagccaaactgccccgcagctggctcggccaccaaaggcgttcttgactcaccttcatttagctgcgcttgaaagagccgatgggatcaagccttccgatgtccaggaagtgttctttggaaacgtactctctgcaaatgttggccagaaccctgctagacaatgtgcactcggtgctggtcttgaaacatcaaccgtttgtactactgtcaacaaggtgtgcgcctcgggattaaaggctgtcattcttggagcccagactatcatgactggaaacgcggatgtcgttgtggctggtggaactgaatccatgtcgaacactcctcactatcttcccaatcttcgtactggagctaaatatggcaaccaaaccatggtggacggcatcgtgaaggatggcttgacggacgtgggcaagcaggagctcatggggctacaagcggaagagtgtgcgcaggaccacggtttcaacaggcaacagcaggatgattacgccatccgatcttacgagaaagctcaagctgcccaggctgctggtctttttaacgatgagattgctcctattgatctacccggttttagaggcaagcctggtgttactgtaactcaggatgacgagccaaagaacctcaaccctgataagcttcgcgctatgaagcccgcttttatccctggcaccgggacagtgacagctcccaactcgtctcctcttaacgacggtgctgccgcagttgttttagtatccgaggccaagttgaaggagcttaacctgaagccggtcgcaaagattcttggctggggtgaggcggcacagcaacccagcaaatttacaactgccccagcactcgcaattccaagggcgctcaagcatgccggtgtctctcaggatgcagtcgatgcattcgagattaacgaagctttcagtgtagttgccctcgctaacttgaagctccttggactttctgaggacaaggtcaatattcacggaggagccgtggctatcggtcaccctcttggtgcgagcggtgcccgtatcctgacaactttactcggagtcctcaaggctcggaagggcaaggttggctgtgcaggtatttgcaacggtgggggtggtgccagtgctctggttgttgagtacatcgcttga

SEQ ID NO: 100874 - protein, 406 aa, Aspergillus nidulans FGSC A4
MASLPPVYIVSYARTPVGSFLGSLSSQTAPQLARPPKAFLTHLHLAALERADGIKPSDVQEVFFGNVLSANVGQNPARQCALGAGLETSTVCTTVNKVCASGLKAVILGAQTIMTGNADVVVAGGTESMSNTPHYLPNLRTGAKYGNQTMVDGIVKDGLTDVGKQELMGLQAEECAQDHGFNRQQQDDYAIRSYEKAQAAQAAGLFNDEIAPIDLPGFRGKPGVTVTQDDEPKNLNPDKLRAMKPAFIPGTGTVTAPNSSPLNDGAAAVVLVSEAKLKELNLKPVAKILGWGEAAQQPSKFTTAPALAIPRALKHAGVSQDAVDAFEINEAFSVVALANLKLLGLSEDKVNIHGGAVAIGHPLGASGARILTTLLGVLKARKGKVGCAGICNGGGGASALVVEYIA

SEQ ID NO: 100875 - DNA, 1206 bp, Aspergillus nidulans FGSC A4; identical to SEQ ID NO: 92812
  CDS (1)..(1206)

SEQ ID NO: 100876 - protein, 401 aa, Aspergillus nidulans FGSC A4; identical to SEQ ID NO: 92813

SEQ ID NO: 100877 - DNA, 1254 bp, Aspergillus nidulans FGSC A4; identical to SEQ ID NO: 92814
  CDS (1)..(1254)

SEQ ID NO: 100878 - protein, 417 aa, Aspergillus nidulans FGSC A4; identical to SEQ ID NO: 92815

SEQ ID NO: 100879 - DNA, 1242 bp, Aspergillus nidulans FGSC A4; identical to SEQ ID NO: 92816
  CDS (1)..(1242)

SEQ ID NO: 100880 - protein, 413 aa, Aspergillus nidulans FGSC A4; identical to SEQ ID NO: 92817

SEQ ID NO: 100881 - DNA, 1266 bp, Aspergillus nidulans FGSC A4; identical to SEQ ID NO: 92818
  CDS (1)..(1266)

SEQ ID NO: 100882 - protein, 421 aa, Aspergillus nidulans FGSC A4; identical to SEQ ID NO: 92819

SEQ ID NO: 100883 - DNA, 1209 bp, Candida albicans SC5314; identical to SEQ ID NO: 92820
  CDS (1)..(1209): transl_table=12

SEQ ID NO: 100884 - protein, 402 aa, Candida albicans SC5314; identical to SEQ ID NO: 92821

SEQ ID NO: 100885 - DNA, 1227 bp, Candida albicans SC5314; identical to SEQ ID NO: 92822
  CDS (1)..(1227): transl_table=12

SEQ ID NO: 100886 - protein, 408 aa, Candida albicans SC5314; identical to SEQ ID NO: 92823

SEQ ID NO: 100887 - DNA, 1182 bp, Candida albicans SC5314; identical to SEQ ID NO: 92824
  CDS (1)..(1182): transl_table=12

SEQ ID NO: 100888 - protein, 393 aa, Candida albicans SC5314; identical to SEQ ID NO: 92825

SEQ ID NO: 100889 - DNA, 1233 bp, Candida albicans SC5314; identical to SEQ ID NO: 92826
  CDS (1)..(1233): transl_table=12

SEQ ID NO: 100890 - protein, 410 aa, Candida albicans SC5314; identical to SEQ ID NO: 92827

SEQ ID NO: 100891 - DNA, 1257 bp, Ustilago maydis 521; identical to SEQ ID NO: 92828
  CDS (1)..(1257)

SEQ ID NO: 100892 - protein, 418 aa, Ustilago maydis 521; identical to SEQ ID NO: 92829

SEQ ID NO: 100893 - DNA, 1245 bp, Ustilago maydis 521; identical to SEQ ID NO: 92830
  CDS (1)..(1245)

SEQ ID NO: 100894 - protein, 414 aa, Ustilago maydis 521; identical to SEQ ID NO: 92831

SEQ ID NO: 100895 - DNA, 1212 bp, Ustilago maydis 521; identical to SEQ ID NO: 92832
  CDS (1)..(1212)

SEQ ID NO: 100896 - protein, 403 aa, Ustilago maydis 521; identical to SEQ ID NO: 92833

SEQ ID NO: 100897 - DNA, 1188 bp, Ustilago maydis 521; identical to SEQ ID NO: 92834
  CDS (1)..(1188)

SEQ ID NO: 100898 - protein, 395 aa, Ustilago maydis 521; identical to SEQ ID NO: 92835

SEQ ID NO: 100899 - DNA, 1227 bp, Ustilago maydis 521; identical to SEQ ID NO: 92836
  CDS (1)..(1227)

SEQ ID NO: 100900 - protein, 408 aa, Ustilago maydis 521; identical to SEQ ID NO: 92837

SEQ ID NO: 100901 - DNA, 1197 bp, Tribolium castaneum; identical to SEQ ID NO: 92840
  CDS (1)..(1197)

SEQ ID NO: 100902 - protein, 398 aa, Tribolium castaneum; identical to SEQ ID NO: 92841

SEQ ID NO: 100903 - DNA, 1170 bp, Tribolium castaneum; identical to SEQ ID NO: 92842
  CDS (1)..(1170)

SEQ ID NO: 100904 - protein, 389 aa, Tribolium castaneum; identical to SEQ ID NO: 92843

SEQ ID NO: 100905 - DNA, 1239 bp, Tribolium castaneum; identical to SEQ ID NO: 92844
  CDS (1)..(1239)

SEQ ID NO: 100906 - protein, 412 aa, Tribolium castaneum; identical to SEQ ID NO: 92845

SEQ ID NO: 100907 - DNA, 1425 bp, Tribolium castaneum; identical to SEQ ID NO: 92846
  CDS (1)..(1425)

SEQ ID NO: 100908 - protein, 474 aa, Tribolium castaneum; identical to SEQ ID NO: 92847

SEQ ID NO: 100909 - DNA, 1182 bp, Leptospira interrogans serovar Copenhageni str. Fiocruz L1-130; identical to SEQ ID NO: 92848
  CDS (1)..(1182): transl_table=11

SEQ ID NO: 100910 - protein, 393 aa, Leptospira interrogans serovar Copenhageni str. Fiocruz L1-130; identical to SEQ ID NO: 92849

SEQ ID NO: 100911 - DNA, 1212 bp, Leptospira interrogans serovar Copenhageni str. Fiocruz L1-130
  CDS (1)..(1212): transl_table=11
atgtcaaacgcttatgtaattgatgcagttagaactccaagaggaaaaggtaaaaaaagaggggcacttgcaagcattcacccgcaagaactttctgctgcaaccttaaacgcaatccaggaaagaaacggaatcaaacctgaaattgtagaagaagtagtaatgggatgtgtatctcaagtagacgaccaagccgcttgtattgcacgttatgcggtaatgtcagctctttggccaaactcagttcctggttacaccgtaaatcgtttttgtggctccggtctacaagcggtgaataacgcagcaaatcatgttcaatctggttctatgcaaattgctcttggcggaggagtcgaatccatgtccagagtcaagatgggagccgacatgaatggaagagattttaatatcggaaatccgaatattcaaaaacactataatttagttcctcaaggaatttcagcggatctaattgctactaaattcggaatctcccgtgaagaagcggatcgttttgcagaatcctctcagatcaaagcggacaaagcgatcaaagaaggttactttaaaaaatccatcatcccagtaaaaacagaagatggaaccatagtagattcggatgaaaatccgagaatcgaatctacattcgaatggctttcggatctggctcccgtttttaaaacgatcggagaaaaagaattagatgcaatcgctcttaaatcttatccagaaattccaaaaatcaatcatatccatacgttaggcaattcttctggtatcgtagacggagctgcttccgttcttcttgcttccgatgaaggaattaaaaaatacggtttaaaacctcgtgcaagaatcgctgctatggcttctaccggcgaagatcctacgattatgttaacaggacctgtttccgcttctaaaaaagcattggcgatggcaggactcaaaccggaagatatagacctttgggaaatcaacgaagcattcgcttcggtagttctttatacccaaaagtcccttggaattcctatcgaaaaaatcaacgtcaacggaggctccatttctctcggacatcccctaggagcaacaggtgcgattcttctcggaaccgcgttagacgaactagaaagaagacaaaaacgttatgcgttgattactctttgtatcggtggtggtatgggaattgccacaatcatcgaaagaatataa

SEQ ID NO: 100912 - protein, 403 aa, Leptospira interrogans serovar Copenhageni str. Fiocruz L1-130
MSNAYVIDAVRTPRGKGKKRGALASIHPQELSAATLNAIQERNGIKPEIVEEVVMGCVSQVDDQAACIARYAVMSALWPNSVPGYTVNRFCGSGLQAVNNAANHVQSGSMQIALGGGVESMSRVKMGADMNGRDFNIGNPNIQKHYNLVPQGISADLIATKFGISREEADRFAESSQIKADKAIKEGYFKKSIIPVKTEDGTIVDSDENPRIESTFEWLSDLAPVFKTIGEKELDAIALKSYPEIPKINHIHTLGNSSGIVDGAASVLLASDEGIKKYGLKPRARIAAMASTGEDPTIMLTGPVSASKKALAMAGLKPEDIDLWEINEAFASVVLYTQKSLGIPIEKINVNGGSISLGHPLGATGAILLGTALDELERRQKRYALITLCIGGGMGIATIIERI

SEQ ID NO: 100913 - DNA, 1155 bp, Thermus thermophilus HB27
  CDS (1)..(1155): transl_table=11
atgggagagccggtgatcctcgaggcggtgcgcacgcccatcggcaagcggaacggggccctgagggcctacaggcccgatgccctctacgccaaggtcctggacgccctcttggagcggacgggcatagaccccggcctcatcggggacgtggtcacggggtgcgtgacccaggtgggggagcagggggcgaacgtggggcggcttggggtgctcctctccaggcttcccaaggaggtccccgcggtgagcttgaaccgcatgtgcggttccagccagcaggccgtccacttcgccgcccaggccatcgccgcaggggatgtggacttcgccatcgccggcggggtggagagcatgacccgggtgcccatgttctcggacatcggcgggggcttccacaccctgaaccccgagcttgggaagaggtacgagctcgtccaccagggggagagcgccgagcggatcgccgagcgctacgggttttgccgcgaggagctggacgagtggggctacctctcccacaaaagggcggcccgggccacggaggaggggcggttttctgcccagatcctccccctcgaggggctggacgccgaggggaggcccttcctcctcacccgggacgagggggtccgccccgatgtggactacgagaagatgctcgccctgaaacccgtcttccgggaaaacggggtggtgacggcggggaactccagccagatctccgacggcgccgcggccctcctcctcggggaccgggaaaaggccctggccttgggcctgaggcccagggcccgcttcctcgcccgggtggtggtggcgggggaccctaccctgcagcttcttgaggtcatccccgccgcgaaaaaggccctggagcgggcggggctctccttgcgggacgtggacgtcatagaggtcaacgaggccttcgccagcgtggtcctcgcctttctgcgggagcttggggcggaccccgagaaggtgaaccccaacggcggggccatcgcccacgggcaccccttgggggccacgggggccgtgctcatgaccaagctcctttatgagctagagcgcacgggaggcgagttcggcctccaggtgatgtgcatcggccacggccaggccacggccacggtgatccagaggctatag

SEQ ID NO: 100914 - protein, 384 aa, Thermus thermophilus HB27
MGEPVILEAVRTPIGKRNGALRAYRPDALYAKVLDALLERTGIDPGLIGDVVTGCVTQVGEQGANVGRLGVLLSRLPKEVPAVSLNRMCGSSQQAVHFAAQAIAAGDVDFAIAGGVESMTRVPMFSDIGGGFHTLNPELGKRYELVHQGESAERIAERYGFCREELDEWGYLSHKRAARATEEGRFSAQILPLEGLDAEGRPFLLTRDEGVRPDVDYEKMLALKPVFRENGVVTAGNSSQISDGAAALLLGDREKALALGLRPRARFLARVVVAGDPTLQLLEVIPAAKKALERAGLSLRDVDVIEVNEAFASVVLAFLRELGADPEKVNPNGGAIAHGHPLGATGAVLMTKLLYELERTGGEFGLQVMCIGHGQATATVIQRL

SEQ ID NO: 100915 - DNA, 1194 bp, Thermus thermophilus HB27
  CDS (1)..(1194): transl_table=11
atgcgggaagcggtcatcgtgagcgcagtgcggagccccgtggcccggggcaagaagaacggggccttggccaccctccaccccgtggacctctccgcccaggtgatgcgggcggcggtggagcgggtgggcctggaccctaaggagctcgaggacgtcctctgggggtgcgccatgcccgaggcggcccaggggctgaacatcgccaggctcgccctcctccgggcgggcttcccggtggaggtggcgggggccaccatcaaccgcttctgctccagcggcctccagaccatcgccatggccgcccaggaggtgatgacggggatggcggacgccgtcttggcgggcggggtggagatgatgagccaggtgcccatgtcgggcttccacaccaggctccaccccgacctcacccccacggagtggagccccgagacctactccacctacatcggcatgggcttcaccgccgaaagggtagcggagcgcttcggcataagccgcgaggaccaggacaggtgggccttgaggagccaccagaaggcggcccaggcctgggccgaggggcgcttccccgaggtggtccccatccgggtgcctaaggtcacctaccgcgggaccaagaaggaggtggaggaggtcgtctttgatcgggacgagacggtccgccccgacaccagcctcgaggccctggccaagctgaggcccgcctttaagaagaacggcaccgtgaccgcgggcaactccagcccctactccgacggggcggcggcggtggtggtcatgagccgggagaaggcggaggccctgggcctcaagcccctcgcccgcttcgtgagcttcgccgtggccggggtggagcccgacgtgatggggatcggcccggtgaaggcggtgcccaaggcgttgcagcgcgcggggcttaccctggaccagatcgccctcattgagttcaacgaggccttcgccgcccaggtcctggcggtgatgcgggccctggagatgcccgaggagaaaacgaacgtcaacggcggggccatcgccttaggccaccccctgggggccacgggggccaagctcaccgcccagctcttgagcgagctatcccggcggggtggggggtacggcctcgtcaccatgtgcatcggcggcggcatgggcgccgcgggcgtgtttgaggtctatccggcttaa

SEQ ID NO: 100916 - protein, 397 aa, Thermus thermophilus HB27
MREAVIVSAVRSPVARGKKNGALATLHPVDLSAQVMRAAVERVGLDPKELEDVLWGCAMPEAAQGLNIARLALLRAGFPVEVAGATINRFCSSGLQTIAMAAQEVMTGMADAVLAGGVEMMSQVPMSGFHTRLHPDLTPTEWSPETYSTYIGMGFTAERVAERFGISREDQDRWALRSHQKAAQAWAEGRFPEVVPIRVPKVTYRGTKKEVEEVVFDRDETVRPDTSLEALAKLRPAFKKNGTVTAGNSSPYSDGAAAVVVMSREKAEALGLKPLARFVSFAVAGVEPDVMGIGPVKAVPKALQRAGLTLDQIALIEFNEAFAAQVLAVMRALEMPEEKTNVNGGAIALGHPLGATGAKLTAQLLSELSRRGGGYGLVTMCIGGGMGAAGVFEVYPA

SEQ ID NO: 100917 - DNA, 1170 bp, Listeria monocytogenes str. 4b F2365
  CDS (1)..(1170): transl_table=11
atgaaagaagtagttataatagatgcagttagaacaccaattggaaaatttggtggtagtttgaaagacatcagtgcagtagaccttggcgctaccgctctaaaaggtgttttagaaagagccaatattgctccagaacgggtggatcaagtgatttttggtaatgtattacaagctggacttggccaaaatgtagctagacaaatcgctattaaagcaggaattccttataaagtacccggagtcacaatcaatgaagtttgtggatctggcttaaaatcggttatgcttggtaggcaagcaattcagctaggggaggctgacatcgtagccgttggtgggaccgaaaatatgtcccaagcaccacttttacttaatcccgagctagctggcgaagaaatcgatccaaaaaaactaagaaatagcatgttaattgatggtttaacagatgtttacggcgagtatcacatgggaattactgcagaaaatgttgcagagaaattctccgtaaccagagaagaacaagatgaatttgcccataactcacaaatgaaggccgcgaatgcacaagaaaaaaacctttttgaagaggaaattattcctgtaaagcttccagacggttcattttttgaagccgatgaaacgattcgcgcgaattcaactctagaaaaattagctactttgaaaagcgtattcaaagaaggtggaacggttacagccggcaatgcttccggtatcaatgatggagcttccgcaattattttaatgtcgaaagaaaaggcagtcgcggaaaacattccttatatcgcaacaatcaaagtaacctctgaagttggtgtcgatccagcacttatgggttacgcgccatactatgcagtaaatgaagctttaactaaaggtggatattctatcgatgacattgatttattccatttaaacgaagcttttgcatcgcagtcagttgcagtggctcgtgatttaaaaattccagaagagaaacttaatatttacggtggagcaattgcactaggccatccaattggagcttctggtgcacgcattattgcctcattgttaaatgagttaaaacatgaaaataagcacatcggtgtcgcttccttgtgtgttggtggtggtattggtattgcaattatccttgaaaaagcttga

SEQ ID NO: 100918 - protein, 389 aa, Listeria monocytogenes str. 4b F2365
MKEVVIIDAVRTPIGKFGGSLKDISAVDLGATALKGVLERANIAPERVDQVIFGNVLQAGLGQNVARQIAIKAGIPYKVPGVTINEVCGSGLKSVMLGRQAIQLGEADIVAVGGTENMSQAPLLLNPELAGEEIDPKKLRNSMLIDGLTDVYGEYHMGITAENVAEKFSVTREEQDEFAHNSQMKAANAQEKNLFEEEIIPVKLPDGSFFEADETIRANSTLEKLATLKSVFKEGGTVTAGNASGINDGASAIILMSKEKAVAENIPYIATIKVTSEVGVDPALMGYAPYYAVNEALTKGGYSIDDIDLFHLNEAFASQSVAVARDLKIPEEKLNIYGGAIALGHPIGASGARIIASLLNELKHENKHIGVASLCVGGGIGIAIILEKA

SEQ ID NO: 100919 - DNA, 1188 bp, Picrophilus torridus DSM 9790
  CDS (1)..(1188): transl_table=11
atggaggatgcatatatagtttatttcaaaagggtaccattctcaagggcaaggccaaatgaccctgaaagggatatgtacaacgatttaaggatggacgatcttttatcaaggctgataagaaaatctgttgatgatacaggaataaatccagaggagatcggagacgttataacaggctgtgcattccaggcaggtgagaactggacatacggcggcaggcatccggttcttttatcggaattgcctgtaagtgtgcctgcaatgtcgctggacagggcatgctcatcctcattaaacgcggtttcaattggcgcaatggagatcatgtcagaaaaatctgatatagtaatagcaggtggcatggagcacatgacccatgtgccgcttggcatatcaaatccttatataaaaccgaatatgtccttaatgctgaatccaagatattcaaaatatgacatgaacgtttcatataacatgggattaacagcagaaaagcttgctgcactaaggggaataaccagaaaggaaatggatgaatattcatacaattcacatttaagggcaagaaaggcatatgaatctggctttatgaaggatgagataatgccagttacagtggaaagggatggcgaggaaataaaaatagaaaaggatcttagcataagggacgacgcatcacttgaaagcatggaggctttaaaaccggcattcaaaccagatggaataataacagccggcaactcggccccactgaacgacggtgcatcaatggtaatgctcatgtctgagagggccatgaatgaatatggtttaaaaccaatggccagaatagttgattttgccgctgccggtgtcgatccgacgataatgggcgatggcccggtgcctgcaacaaggaagatcctttcaaggaataaaatcgatccacaggatatagatctctgggagataaacgaggcttttgccgttgttgttttaaacgctgtaaaatcatttaatctggatttaaaaaaggtcaacatcaacggtggcggtatatcaataggccatccactgggtgcaacaggtgccagaatagcaggtacacttgcaaggcagcttgctaataaaagaaagaggtatggcatagcaacgctgtgcgtcggcggaggccagggatactcattgttaatggagcgtatctaa

SEQ ID NO: 100920 - protein, 395 aa, Picrophilus torridus DSM 9790
MEDAYIVYFKRVPFSRARPNDPERDMYNDLRMDDLLSRLIRKSVDDTGINPEEIGDVITGCAFQAGENWTYGGRHPVLLSELPVSVPAMSLDRACSSSLNAVSIGAMEIMSEKSDIVIAGGMEHMTHVPLGISNPYIKPNMSLMLNPRYSKYDMNVSYNMGLTAEKLAALRGITRKEMDEYSYNSHLRARKAYESGFMKDEIMPVTVERDGEEIKIEKDLSIRDDASLESMEALKPAFKPDGIITAGNSAPLNDGASMVMLMSERAMNEYGLKPMARIVDFAAAGVDPTIMGDGPVPATRKILSRNKIDPQDIDLWEINEAFAVVVLNAVKSFNLDLKKVNINGGGISIGHPLGATGARIAGTLARQLANKRKRYGIATLCVGGGQGYSLLMERI

SEQ ID NO: 100921 - DNA, 1173 bp, Bacillus thuringiensis serovar konkukian str. 97-27
  CDS (1)..(1173): transl_table=11
atgagagaagctgtcattgttgcgggagcaagaacaccaattggaaaagcaaagaggggttcattaaaaacagttcgtcctgacgatttaggggcgttagtagtaaaggaaacgttaaagcgtgcgaattatgaagggccaattgatgatttaattttcggttgtgcgatgccagaagcagagcaaggtttaaatatggctcgtaatatcggcggattagcaggactttcttacgatgttccagctattacaattaaccgttactgttcttcaggtttacaaagtatcgcttacggagcagagcgcattatgctcggtcactcggaagcggtattatcaggcggagcggaatcaatgagtttagttccaatgatgggacacgttgttcgtcccaatagtcgccttgtagaagcagctccagaatattatatgggtatgggacatacagcggagcaagttgctgtgaaatatggaatttctcgtgaagagcaagatgcatttgcagtaagaagtcatcaacgtgctgcgaaagcattagctgcaggaaactttgctgatgaaacagtatctgtagatgtaacgttacgtactgttggagcaaataacaaactgcaagaagaaacaattacttttgcgcaagacgaaggtgtaagagcagagacgacgctagatattttaggtaaattacgtccagcatttaacgttcgcggttctgtaacagctggtaactcttcacaaatgagtgacggcgcagcatctgtactattaatggatcgtgaaaaagcagtgagcgatggcatgaaaccacttgcgaaattccgttcatttgcagtagctggcgtaccaccagaagtaatgggaatcggcccaatcgctgccattccaaaggcattaaaattagcgggtttagagctatcagatatcggtctattcgaactaaatgaagcattcgcttctcaatccattcaagttattcgtgaacttggattagatgaagaaaaagtaaacgtaaacggcggtgcaatcgcacttggacatccacttggctgtacaggagcaaaactaacgctatctcttattcacgaaatgaaacgccgcaacgaacaattcggtatcgtaacaatgtgtatcggcggcggaatgggagcagcaggagtgtttgaattactataa

SEQ ID NO: 100922 - protein, 390 aa, Bacillus thuringiensis serovar konkukian str. 97-27
MREAVIVAGARTPIGKAKRGSLKTVRPDDLGALVVKETLKRANYEGPIDDLIFGCAMPEAEQGLNMARNIGGLAGLSYDVPAITINRYCSSGLQSIAYGAERIMLGHSEAVLSGGAESMSLVPMMGHVVRPNSRLVEAAPEYYMGMGHTAEQVAVKYGISREEQDAFAVRSHQRAAKALAAGNFADETVSVDVTLRTVGANNKLQEETITFAQDEGVRAETTLDILGKLRPAFNVRGSVTAGNSSQMSDGAASVLLMDREKAVSDGMKPLAKFRSFAVAGVPPEVMGIGPIAAIPKALKLAGLELSDIGLFELNEAFASQSIQVIRELGLDEEKVNVNGGAIALGHPLGCTGAKLTLSLIHEMKRRNEQFGIVTMCIGGGMGAAGVFELL

SEQ ID NO: 100923 - DNA, 1179 bp, Erwinia carotovora subsp. atroseptica SCRI1043; identical to SEQ ID NO: 92854
  CDS (1)..(1179): transl_table=11

SEQ ID NO: 100924 - protein, 392 aa, Erwinia carotovora subsp. atroseptica SCRI1043; identical to SEQ ID NO: 92855

SEQ ID NO: 100925 - DNA, 1185 bp, Streptococcus pyogenes MGAS10394; identical to SEQ ID NO: 92856
  CDS (1)..(1185): transl_table=11

SEQ ID NO: 100926 - protein, 394 aa, Streptococcus pyogenes MGAS10394; identical to SEQ ID NO: 92857

SEQ ID NO: 100927 - DNA, 1227 bp, Leifsonia xyli subsp. xyli str. CTCB07
  CDS (1)..(1227): transl_table=11
gtggccgagagaagcgatgtcgtgttcgtggacggagtccggactccgttcgggcgagccggcgaaaaagggaagtactggaacacccgcgcggacgacctcgtcgtgaaagcgatgatcgggctgctggatcggaatccgaacgtgcccggggacagggtcgacgatgtcgccatcgcggcgacgacccagcagggcgaccagggcctgaccctcggccgcacggcggcgctgctctccggactgccgaagtcggtccccggcttcgccatcgaccggatgtgcgcgggagccatgaccagcgtgaccacactgggctccgggatcgcgttcggcgcgtacgacctcgtgatcgcgggcggcgtcgagcacatgggccgccacccgatgggcttcggcgcggacccgaacccgcgcttcctgtcggagcgcatggtcgccgaggacgctctcaacatgggcatgacagccgagcgcatccacgaccgcttccccgccctcacgaaggagcgctccgaccggttcgcgatggtgagccagcagaagaccgccgcggcgtacgccgccggcaagctccagcccgacctcatcccggtcgccatccgctcggagtccggctggggcctcgccacccaggacgaggggatgcggcccgagaccacgctggagggcctcgccgccctgaagaccccgttccgcccccacggtcgcgtgaccgcgggcaacgcctcgccgctcaccgacggcgccaccgcgagcctgctggcgagcgccgacgcggtcaaggagctcggcctcaccccgaagatgcgcatggtcagcttcgcgttcgcgggcgtcgagccggagatcatgggcctcggaccggtgccctcgaccgagaaggcgttgcgcaaggcgggcctgaccatcgacgacatcggactgttcgagctgaacgaggcgttcgccatccaggtgctctccttcctcgaccactttggcatcgcggacgacgacccccgcgtcaaccagtggggcggttcgatcgcgatcggccacccgctcgccgccagcggcgtccgcctgatgatccagctcgccgcgcagttcgccgagcacccggaggttcgctacggtgtgaccgcgatgtgcgtcggcctgggccagggcggcacggtcatctgggagaacccccacttcaccggaaagacactgcacgacaagcgcgcggcgcggaaggcctga

SEQ ID NO: 100928 - protein, 408 aa, Leifsonia xyli subsp. xyli str. CTCB07
MAERSDVVFVDGVRTPFGRAGEKGKYWNTRADDLVVKAMIGLLDRNPNVPGDRVDDVAIAATTQQGDQGLTLGRTAALLSGLPKSVPGFAIDRMCAGAMTSVTTLGSGIAFGAYDLVIAGGVEHMGRHPMGFGADPNPRFLSERMVAEDALNMGMTAERIHDRFPALTKERSDRFAMVSQQKTAAAYAAGKLQPDLIPVAIRSESGWGLATQDEGMRPETTLEGLAALKTPFRPHGRVTAGNASPLTDGATASLLASADAVKELGLTPKMRMVSFAFAGVEPEIMGLGPVPSTEKALRKAGLTIDDIGLFELNEAFAIQVLSFLDHFGIADDDPRVNQWGGSIAIGHPLAASGVRLMIQLAAQFAEHPEVRYGVTAMCVGLGQGGTVIWENPHFTGKTLHDKRAARKA

SEQ ID NO: 100929 - DNA, 1179 bp, Rickettsia typhi str. Wilmington
  CDS (1)..(1179): transl_table=11
atgacacaacaggtttatataacacatgccaaaaggactgcattcggatcatttatgggtagtctgagtacaactccagcaccaatgctagctgctcatttaatcaataatatactgcaagatagtaaaatcgaacctgctttagtaaatgaggtaatacttgggcaagtaataacaggtggtagtggacagaatccagcaagacaaactctgatttatgctggtataccgcaagaagtgccaggttatacgattaataaagtatgcggctcaggtcttaaaagtatagcacttgcagcaaattcaattatgacatgtgataatgaaatagttatagcaggtgggcaggaaaatatgtcgctcggtatgcacggtagttatatcagagcaggagctaaattcggtgatatcaaaatggttgatctcatgcaatatgacggtttaatagatgtattttcaggagtatttatgggtatcactgccgaaaatatcgcgaagcagtttaatattagccgacaagaacaggacgaatttgccttaagttctcacaagaaagctgctaaagcacagttattaggaattttacaagatgaaatcttgcctatagaagtaacagtaaaaaaaactactagtttgtttgatcatgatgaaacagtaagacatgatacaagcattgaaatgcttagtaaattacgccctgcttttgataaaaatggtgtagttactgctggtaacgcttcctctattaatgacggtgcagcatgtgtcctgcttgtttcagaaaaagctttgaaaaaacataatttaacaccattagctcgtattgtttcttgtgcttcagctggtgttgatccaagaattatgggtactgcacctgtgccggcatctaaaaaagccttaagtaaagcaggttggagcgttaatgatttagaagttatcgaggttaatgaggcatttgcagcacaaagcatttatgtaaaccgtgaaatgaaatgggatatagagaaggttaacataaatggtggagcaatagcaattggtcatccgattggtgcaagcggtggacgtattcttataactttaatacacaacttacgaagagctaaggctaaaaaaggcttagtgactttatgtatcggtggtggtcttggtatgtctatgtgtgttgaagcagtttaa

SEQ ID NO: 100930 - protein, 392 aa, Rickettsia typhi str. Wilmington
MTQQVYITHAKRTAFGSFMGSLSTTPAPMLAAHLINNILQDSKIEPALVNEVILGQVITGGSGQNPARQTLIYAGIPQEVPGYTINKVCGSGLKSIALAANSIMTCDNEIVIAGGQENMSLGMHGSYIRAGAKFGDIKMVDLMQYDGLIDVFSGVFMGITAENIAKQFNISRQEQDEFALSSHKKAAKAQLLGILQDEILPIEVTVKKTTSLFDHDETVRHDTSIEMLSKLRPAFDKNGVVTAGNASSINDGAACVLLVSEKALKKHNLTPLARIVSCASAGVDPRIMGTAPVPASKKALSKAGWSVNDLEVIEVNEAFAAQSIYVNREMKWDIEKVNINGGAIAIGHPIGASGGRILITLIHNLRRAKAKKGLVTLCIGGGLGMSMCVEAV

SEQ ID NO: 100931 - DNA, 1215 bp, Symbiobacterium thermophilum IAM 14863
  CDS (1)..(1215): transl_table=11
ttggcagaagcggtgatcgtcgatgccgtgcgaacgcccatcggccgatacggcggcgcgctccgagatgtccggccggatgacctggccgcggtggtgatccgggcgctccttcagcggaaccccgcggtctccccggggagcatcgatgacgtctacctgggctgcgccaaccaggccggcgaggacaaccgcaacgtcgcccgcatggcggcgctgctggccgggctgccggtgacggtgcccggggttacggtgaaccggctctgcggctcggggctggaggcggtggcccaggcggccagggcggtgtggtgcggggaaggagaggttctggtcgccggcggcacggagtcgatgacccgggcgcctttcgtgatggccaagcccgctgtgccgtgggcccgccaggtggaggtctacgacaccaccctcgggtggcgcttcgtcaacccgcgcctcgcggagcggtacccgcccatcagcctgggggagacggccgagagagtggctgaacggtggaacgtgacccgggaggaccaggacaggtttgcatggcaaagccagatgcggtgtgccgccgcagtgagggaagggcgtttcgacgcggagatcgttccggtgcccgtccccggcgaggatggacgcacagagttggtggtacgggacgagcacccgcggccggacatcacgctcgaacggctggccaggctcagacccgtcttccgggagaacgggacggtcacggccggaaacgccagcggcatcaacgacggagcctccgccctgctgatcatgtccgggaagcgggcggcggccctgggactggttcccatggccaggatcgtcgccaccgcggtggtcggcgtggacccgtcgatcatgggcatgggcccggtcccggcaacaagaaaggccctgcagcgggccggcctcacggtcgatcagatcgacctggtcgagttgaatgaggcctttgccgcgcaggccctggcgtgcatccgggagctgggactggatcccgcccgggtgaacgtgaacggcggggcgatagccctgggccatccgctggggtgcagcggggcccggatcctgacgacgctggtgcatgaaatggtccgcagaggcagccgctacggcctggccaccatgtgcatcggggtggggcaggggatcgccatgatcgttgaggccattcgcccaaagtccgcgtaa

SEQ ID NO: 100932 - protein, 404 aa, Symbiobacterium thermophilum IAM 14863
MAEAVIVDAVRTPIGRYGGALRDVRPDDLAAVVIRALLQRNPAVSPGSIDDVYLGCANQAGEDNRNVARMAALLAGLPVTVPGVTVNRLCGSGLEAVAQAARAVWCGEGEVLVAGGTESMTRAPFVMAKPAVPWARQVEVYDTTLGWRFVNPRLAERYPPISLGETAERVAERWNVTREDQDRFAWQSQMRCAAAVREGRFDAEIVPVPVPGEDGRTELVVRDEHPRPDITLERLARLRPVFRENGTVTAGNASGINDGASALLIMSGKRAAALGLVPMARIVATAVVGVDPSIMGMGPVPATRKALQRAGLTVDQIDLVELNEAFAAQALACIRELGLDPARVNVNGGAIALGHPLGCSGARILTTLVHEMVRRGSRYGLATMCIGVGQGIAMIVEAIRPKSA

SEQ ID NO: 100933 - DNA, 1179 bp, Symbiobacterium thermophilum IAM 14863
  CDS (1)..(1179): transl_table=11
ttgcgcgaggcagtgattgtgaccggcgtccgaacggcgctggggaaggcgccgcggggctcactgcgccatgtgcggccggaggacctggcagcgacggttattaaggaagcgattgcgcgcacgcccgggctggatcccgcagccgtagaggacgtggtgctgggctgcgcgttcccggagggggagcaggggctgaacatcgcccgcaacgccgccatccgcgccgggctgcccacctcggttcccggcttcaccatcaaccggttctgctcgtcgggcctgaacgcgatcgccatcgcggccaacgcggtcatggccggcaacctggatatcgcgatcgccggcggcgtcgagtcgatgagccgggtgccgatgggcggccacacgccccggccgcacccggaggtggtggagagctatccgcagctctacatgtccatgggccacacggccgaggtcgtctgcgcccggtacaacgtgagccgggaggacatggacgcgtttgccctggcgtcccaccggaaggccgccgcggccatcgacgccggcaagttcaaggacgagatcgtcccgatcaccgtcaaggagcgggttttcgacggcaagcgggtcgtggagaaggagttcgtgttcgacaccgacgagggcgtgcggcgcgacacctcgatggaggccctggccaagctgcggcctgcgttctcggccaatggcaacgtcacggccggcaactccagccagaccaccgatggcgccgccgccgtggtggtgatgtcggccgagaaggcgcaggagatgggtctgaagcccctggcgatcttccgctccttcgccgtgggcggcgtcgatccggaggtgatgggcattggccccgtggtggcggtgcccaaggcgctgaagcaggcgggcatcaccttggcggatgtcgatctgatcgagctgaacgaggcgtttgcttcccagtccttggccgtgatccggaagctcgaaatggacccggacaaggtgaacgtcaacggcggcgccatcgcgctcggccacccgctgggctgctccggcgcacggctcacggtcaccatcatgcacgaggctcggcgccgcaaggccaggtacgggctcgtgacgatgtgcgtcggcggagggatgggggccgccggggtgctcgagttcgtgcactag

SEQ ID NO: 100934 - protein, 392 aa, Symbiobacterium thermophilum IAM 14863
MREAVIVTGVRTALGKAPRGSLRHVRPEDLAATVIKEAIARTPGLDPAAVEDVVLGCAFPEGEQGLNIARNAAIRAGLPTSVPGFTINRFCSSGLNAIAIAANAVMAGNLDIAIAGGVESMSRVPMGGHTPRPHPEVVESYPQLYMSMGHTAEVVCARYNVSREDMDAFALASHRKAAAAIDAGKFKDEIVPITVKERVFDGKRVVEKEFVFDTDEGVRRDTSMEALAKLRPAFSANGNVTAGNSSQTTDGAAAVVVMSAEKAQEMGLKPLAIFRSFAVGGVDPEVMGIGPVVAVPKALKQAGITLADVDLIELNEAFASQSLAVIRKLEMDPDKVNVNGGAIALGHPLGCSGARLTVTIMHEARRRKARYGLVTMCVGGGMGAAGVLEFVH

SEQ ID NO: 100935 - DNA, 1176 bp, Bacillus licheniformis ATCC 14580
  CDS (1)..(1176): transl_table=11
atgaaagaggcagttattgtatcgggggcgagaaccccgatcggaaaagcaaaaaaaggctcattgaggactgtccgtcccgatgatttaggcgcatatgcggtgagagagacgctgaaaagagcgggcggttatgaagggaatatcgatgatttgatcatcggctgcgctacgccggaagccgaacaaggcttgaatatggcgcgcaatatcggcgcgcttgccggtctgccgcacacagttccggccgttacgatcaacagatattgttcatcaggacttcaatcaatcgcttacggggccgaaaaaatcatgcttggagctgctgacacgatcattgcaggcggcgccgaatcgatgagcatcgtgccgatgatgggtcatatcgtcagaccgaacgcggctctggcggaaacggctcctgaatattatatgggaatgggccatacggctgaacaggttgccgtcaaatacggcgtttccagggaggaccaagatgcatttgccgtcaacagccatcaaaaagcagccaaggcgatcgcggaaggaaagttcgaagatgaaatcgtcccggtggacgtcaccgtcagagaagtggatgaacatcataacctgaaggagcggacgtttactttctctgccgatgaaggtgtacgcccggggacaaccaaagacgttctgtcaacgttgaaaccggcgttttcggcaaacggctcggttacggcagggaattcctcgcagacgagcgacggggctgccgcagtgatgatcatggacagagaaaaagcggacgcactcgggttaaagcccctcgcaaaatttcgttcgttcgcagtcggcggcgttccgccggaagtgatgggcatcggccctgtggaagcagtcccaagggcgctgaagatggcgggacttgagctgtcggatatcggtttattcgaattaaatgaggcgtttgcatcgcaagcgatccaggtcatcaggtcgcttggcattgatgaagaaaaagtcaatgtcaacggcggagcgattgcgctcggacatccgctcggctgcacgggtacaaagctgacgctgacattgatccacgaaatgcgccggagaagcgagcaattcggcattgtgacgatgtgtatcggcggaggcatgggagcagcaggggtattcgaattagtttaa

SEQ ID NO: 100936 - protein, 391 aa, Bacillus licheniformis ATCC 14580
MKEAVIVSGARTPIGKAKKGSLRTVRPDDLGAYAVRETLKRAGGYEGNIDDLIIGCATPEAEQGLNMARNIGALAGLPHTVPAVTINRYCSSGLQSIAYGAEKIMLGAADTIIAGGAESMSIVPMMGHIVRPNAALAETAPEYYMGMGHTAEQVAVKYGVSREDQDAFAVNSHQKAAKAIAEGKFEDEIVPVDVTVREVDEHHNLKERTFTFSADEGVRPGTTKDVLSTLKPAFSANGSVTAGNSSQTSDGAAAVMIMDREKADALGLKPLAKFRSFAVGGVPPEVMGIGPVEAVPRALKMAGLELSDIGLFELNEAFASQAIQVIRSLGIDEEKVNVNGGAIALGHPLGCTGTKLTLTLIHEMRRRSEQFGIVTMCIGGGMGAAGVFELV

SEQ ID NO: 100937 - DNA, 1185 bp, Legionella pneumophila subsp. pneumophila str. Philadelphia 1
  CDS (1)..(1185): transl_table=11
atgactgacgtatatgtagttgacgtattacgtacaccagtaggtaaagcaccaagaggtgtttttaaaaacacattacctgatgatttattggctcatactattaaatgtttaatacatagacatcaaaacattgattggcaagagatagctgacgtagtaataggttgtgcaatgccagaagcggaacaaggtatgaatgtagccagaatcgcttctttattggctgatcttccacaatctgttccagcaatgactattaatcgtttttgctcatctggtatacaaagtatagttactgcagcagatacaatccgtaatcaggaggctcatttagcactaggtggcggtgtcgaaagtatgtccatggtacctatgggtggaaataaatacacggcgaatccatccatttttaatgatgagcacgttgctatagcttatggcatggggattacagcagaaaacgttgcaaagcgttgggaaattactcgagaacaacaggatgaattcgccatagaaagccataaaaaagcaattgctgcgcaggaaagactcgatttcaacgctgaaataagtccaatcgaaatatctataagataccctgatctgaaaacttcaaaggttgaaataaagaaaaaattgataaataaggacgaaggccctagagcagacacatcttacgaagcgatttctaaattaaaaccggtattcgctttaaacgggacagtgactgcaggaaatagttctcagacgagtgacggagccggagtggcattactagccagtgagaaggctttaaaacagtatgatttaaaacctttaggccgtttaatgagctatgccgttgcgggagtaccgcctgaaatcatgggaatcggaccagtaaaggcaattcctatggcgctaaagcgcgctggaattactttagatcaattggattggattgaattgaatgaagcttttgctgcccaagctttggcggttattaaagaccttgacctacccagagagaaagttaaccctttaggtggggctattgctttggggcatcctttaggagcaacgggcaccataagaacagctacattactacatggattgagaagaacaaaagggcgctacggtatggtaaccatgtgtattggaaccggaatgggagctgctgcgatatttgaatcgctataa

SEQ ID NO: 100938 - protein, 394 aa, Legionella pneumophila subsp. pneumophila str. Philadelphia 1
MTDVYVVDVLRTPVGKAPRGVFKNTLPDDLLAHTIKCLIHRHQNIDWQEIADVVIGCAMPEAEQGMNVARIASLLADLPQSVPAMTINRFCSSGIQSIVTAADTIRNQEAHLALGGGVESMSMVPMGGNKYTANPSIFNDEHVAIAYGMGITAENVAKRWEITREQQDEFAIESHKKAIAAQERLDFNAEISPIEISIRYPDLKTSKVEIKKKLINKDEGPRADTSYEAISKLKPVFALNGTVTAGNSSQTSDGAGVALLASEKALKQYDLKPLGRLMSYAVAGVPPEIMGIGPVKAIPMALKRAGITLDQLDWIELNEAFAAQALAVIKDLDLPREKVNPLGGAIALGHPLGATGTIRTATLLHGLRRTKGRYGMVTMCIGTGMGAAAIFESL

SEQ ID NO: 100939 - DNA, 1203 bp, Burkholderia mallei ATCC 23344
  CDS (1)..(1203): transl_table=11
atgaccgaagcattcctgtgtgacgcaatccgcacgcccatcggccgctacggcggcgcgctggcgccggtgcgggccgacgacctcggcgcggtgccgctcaaggcgctcgtcgagcgcaaccgcgacgtcgactgggccgccgtcgacgacgtgatctacggctgcgcgaatcaggccggcgaggacaaccgcaacgtcgcgcgcatgtcgctgctgctcgccggcttgccgcacgccgtgcccggcgcgacgatcaaccgcctctgcggctccgggatggacgcgatcggcctcgccgcgcgcgcgatcaaggcgggcgaggcgagcctgatgatcgccggcggcgtcgagagcatgagccgcgcgccgttcgtgaccggcaaggcgatgagcgcgttctcgcgccaggccgagatcttcgatacgaccatcggctggcgcttcgtcaatccgctgatgaaacagcggtacggcgtcgattcgatgccggagacggccgaaaatgtcgcgaccgattaccgcgtgagccgcgccgatcaggacgcgttcgcgctgcgcagccagcagaaggcggcgcgcgcgcaggccgacggcacgctcgcgcaggagatcgcgccggtgacgatcgcgcagaagcagggcgagccgctcgtcgtggcgcgcgacgagcatccgcgcgagacgaccctcgaggcgctcgcgaagctcaagggcgtggtgcgcccggacggcacggtgacggcgggcaacgcgtcgggcgtgaacgacggtgcgtgcgcgctgctggtggcgagcgaggcggcggcgcgccgccacgggctcgtgccgcgcgcgcgcgtgctggggatcgcgacggcgggcgtggagccgcgggtgatggggatcggcccggcgccggcgacgcagaaactgctcgcgcggctcgggatgacgctcgaccagttcgacgtgatcgagctgaacgaggcgttcgcgtcgcaggggctcgcggtgctgcggctgctgggcgtcgcggacgacgatgcgcgggtgaatccgaacggcggcgcgatcgcgctcgggcatccgcttggcgcgtcgggcgcgcggctcgtgacgaccgccacgtatcagctgcaccgcacgggcggccgcttcgcgctctgcacgatgtgcatcggcgtcggccagggcatcgcgatcgcgatcgagcgcgtataa

SEQ ID NO: 100940 - protein, 400 aa, Burkholderia mallei ATCC 23344
MTEAFLCDAIRTPIGRYGGALAPVRADDLGAVPLKALVERNRDVDWAAVDDVIYGCANQAGEDNRNVARMSLLLAGLPHAVPGATINRLCGSGMDAIGLAARAIKAGEASLMIAGGVESMSRAPFVTGKAMSAFSRQAEIFDTTIGWRFVNPLMKQRYGVDSMPETAENVATDYRVSRADQDAFALRSQQKAARAQADGTLAQEIAPVTIAQKQGEPLVVARDEHPRETTLEALAKLKGVVRPDGTVTAGNASGVNDGACALLVASEAAARRHGLVPRARVLGIATAGVEPRVMGIGPAPATQKLLARLGMTLDQFDVIELNEAFASQGLAVLRLLGVADDDARVNPNGGAIALGHPLGASGARLVTTATYQLHRTGGRFALCTMCIGVGQGIAIAIERV

SEQ ID NO: 100941 - DNA, 1218 bp, Burkholderia pseudomallei K96243
  CDS (1)..(1218): transl_table=11
ttgccggaattcgacatgaccgaagcattcctgtgtgacgcaatccgcacgcccatcggccgctacggcggcgcgctggcgccggcgcgggccgacgacctcggcgcggtgccgctcaaggcgctcgtcgagcgcaaccgcgacgtcgactgggccgccgtcgacgacgtgatctacggctgcgcgaatcaggccggcgaggacaaccgcaacgtcgcgcgcatgtcgctgctgctcgccggcttgccgcacgccgtgcccggcgcgacgatcaaccgcctctgcggctccgggatggacgcgatcggcctcgccgcgcgcgcgatcaaggcgggcgaggcgagcctgatgatcgccggcggcgtcgagagcatgagccgcgcgccgttcgtgaccggcaaggcgacgagcgcgttctcgcgccaggccgagatcttcgatacgaccatcggctggcgcttcgtcaatccgctgatgaaacagcggtacggcgtcgattcgatgccggagacggccgaaaatgtcgcgaccgattaccgcgtgagccgcgccgatcaggacgcgttcgcgctgcgcagccagcagaaggcggcgcgcgcgcaggccgacggcacgctcgcgcaggagatcgcgccggtgacgatcgcgcagaagaagggcgagccgctcgtcgtggcgcgcgacgagcatccgcgcgagacgaccctcgaggcgctcgcgaagctcaagggcgtggtgcgcccggacggcacggtgacggcgggcaacgcgtcgggcgtgaacgacggtgcgtgcgcgctgctggtggcgagcgaggcggcggcgcgccgccacgggctcgtgccgcgcgcgcgtgtgctggggatcgcgacggcgggcgtggagccgcgggtgatggggatcggcccggcgccggcgacgcagaagctgctcgcgcggctcgggatgacgctcgaccagttcgatgtgatcgagctgaacgaggcgttcgcgtcgcaggggctcgcggtgctgcggctgctgggcgtcgcggacgacgatgcgcgggtgaatccgaacggcggcgcgatcgcgctcgggcatccgcttggcgcgtcgggcgcgcggctcgtgacgaccgccacgtatcagttgcaccgcacgggcggccgcttcgcgctctgcacgatgtgcatcggcgtcggccagggcatcgcgatcgcgatcgagcgcgtgtga

SEQ ID NO: 100942 - protein, 405 aa, Burkholderia pseudomallei K96243
MPEFDMTEAFLCDAIRTPIGRYGGALAPARADDLGAVPLKALVERNRDVDWAAVDDVIYGCANQAGEDNRNVARMSLLLAGLPHAVPGATINRLCGSGMDAIGLAARAIKAGEASLMIAGGVESMSRAPFVTGKATSAFSRQAEIFDTTIGWRFVNPLMKQRYGVDSMPETAENVATDYRVSRADQDAFALRSQQKAARAQADGTLAQEIAPVTIAQKKGEPLVVARDEHPRETTLEALAKLKGVVRPDGTVTAGNASGVNDGACALLVASEAAARRHGLVPRARVLGIATAGVEPRVMGIGPAPATQKLLARLGMTLDQFDVIELNEAFASQGLAVLRLLGVADDDARVNPNGGAIALGHPLGASGARLVTTATYQLHRTGGRFALCTMCIGVGQGIAIAIERV

SEQ ID NO: 100943 - DNA, 1203 bp, Burkholderia pseudomallei K96243
  CDS (1)..(1203): transl_table=11
atgaccgaagcattcctgtgtgacgcaatccgcacgcccatcggccgctacggcggcgcgctggcgccggtgcgggccgacgacctcggcgcggtgccgctcaaggcgctcgtcgagcgcaaccgcgacgtcgactgggccgccgtcgacgacgtgatctacggctgcgcgaaccaggccggcgaggacaaccgcaacgtcgcgcgcatgtcgctgctgctcgccggcttgccgcacgccgtgcccggcgcgacgatcaaccgcctctgcggctccgggatggacgcgatcggcctcgccgcgcgcgcgatcaaggcgggcgaggcgagcctgatgatcgccggcggcgtcgagagcatgagccgcgcgccgttcgtgaccggcaaggcgacgagcgcgttctcgcgccaggccgagatcttcgatacgaccatcggctggcgcttcgtcaatccgctgatgaaacagcggtacggcgtcgattcgatgccggagacggccgaaaatgtcgcgaccgattaccgcgtgagccgcgccgatcaggacgcgttcgcgctgcgcagccaacagaaggcggcgcgcgcgcaggccgacggcacgctcgcgcaggagatcgcgccggtgacgatcgcgcagaagcagggcgagccgctcgtcgtggcgcgcgacgagcatccgcgcgagacgaccctcgaggcgctcgcgaagctcaagggcgtggtgcgcccggacggcacggtgacggcgggcaacgcgtcgggcgtgaacgacggtgcgtgcgcgctgctggtggcaagcgaggcggcggcgcgccgccacgggctcgtgccgcgcgcgcgcgtgctggggatcgcgacggcgggcgtggagccgcgggtgatggggatcggcccggcgccggcgacgcagaaactgctcgcgcggctcgggatgacgctcgaccagttcgacgtgatcgagctgaacgaggcgttcgcgtcgcaggggctcgcggtgctgcggctgctgggcgtcgcggacgacgatgcgcgggtgaatccgaacggcggcgcgatcgcgctcgggcatccgcttggcgcgtcgggcgcgcggctcgtgacgaccgccacgtatcagctgcaccgcacgggcggccgcttcgcgctctgcacgatgtgcatcggcgtcggccagggcatcgcgatcgcgatcgagcgcgtgtga

SEQ ID NO: 100944 - protein, 400 aa, Burkholderia pseudomallei K96243
MTEAFLCDAIRTPIGRYGGALAPVRADDLGAVPLKALVERNRDVDWAAVDDVIYGCANQAGEDNRNVARMSLLLAGLPHAVPGATINRLCGSGMDAIGLAARAIKAGEASLMIAGGVESMSRAPFVTGKATSAFSRQAEIFDTTIGWRFVNPLMKQRYGVDSMPETAENVATDYRVSRADQDAFALRSQQKAARAQADGTLAQEIAPVTIAQKQGEPLVVARDEHPRETTLEALAKLKGVVRPDGTVTAGNASGVNDGACALLVASEAAARRHGLVPRARVLGIATAGVEPRVMGIGPAPATQKLLARLGMTLDQFDVIELNEAFASQGLAVLRLLGVADDDARVNPNGGAIALGHPLGASGARLVTTATYQLHRTGGRFALCTMCIGVGQGIAIAIERV

SEQ ID NO: 100945 - DNA, 1206 bp, Azoarcus sp. EbN1
  CDS (1)..(1206): transl_table=11
atgaagaacgcctatatctgcgacgcgatccgcacccccttcggccgctacggcggcacgctgtcctcggtccgtgcggacgacctcgccgcgctgccgatccgcgctctcgtggagcgcaaccctgacgtcgactgggccgccgtcgatgacgtcatctacggctgcgccaaccaggccggcgaggacaaccgcaacgtcgcgcgcatggcggcgctgctggcggggctgccgcaggacgtccccggcacgacggtcaaccgcctgtgcggttccagcctcgacgcggtcggcatggccgcgcgggcgatcaagtccggcgaagcggacctgatgatcgccggcggcgtcgagagcatgagccgcgcgcccttcgtgatgggcaaggccgacacggcgttctcgcgcagcgcgaagatcgaggacacgaccatcggctggcgcttcgtgaacccgctgatgaaggcgcagtacggcatcgactcgatgcccgaaacggccgagaacgtcgcgaccgacttcaacatcagccgcgccgaccaggacgcgctcgcactgcgttcgcagcagcgctgggcggctgcgaacgaagcgggcctcttcgcgaacgagatcgtgccggtggcgattccgcagaaaaagggtgaaccgaagctcttcaccacggacgagcatccgcgccccgaaaccacgctcgaaacgcttgcgaagctgaaaggcgtcgtccgcccggacggcacggtcactgccggcaacgcgtccggcgtcaatgacggcgcgtgcgccgtgctcctcgcgtccgaagcggcagtcgagcgctaccgcctgaaggcgcgtgcccgggtcgtcgcgatggccgctgccggtctcgctccgcgcatcatgggcttcggcccgtcgccggcgtcgaagaaggtgctcgcgaaggccgggctgacgctcgccgacatggacgtcatcgagctcaacgaggcgttcgcggcgcaagcgctggcggtgacgcgcgacctcggccttgcggacgatgccgcgcacgtgaacccgaacggcggcgcgatcgcgatgggccacccgctcggtgcgtcgggcgcgcgtctggtgaccgcggcgctgaaccagcttgaacgcaccggcggccgctacgcgctatgcacgatgtgcatcggcgtggggcaaggcatcgcactcgtcatcgaaagggtctga

SEQ ID NO: 100946 - protein, 401 aa, Azoarcus sp. EbN1
MKNAYICDAIRTPFGRYGGTLSSVRADDLAALPIRALVERNPDVDWAAVDDVIYGCANQAGEDNRNVARMAALLAGLPQDVPGTTVNRLCGSSLDAVGMAARAIKSGEADLMIAGGVESMSRAPFVMGKADTAFSRSAKIEDTTIGWRFVNPLMKAQYGIDSMPETAENVATDFNISRADQDALALRSQQRWAAANEAGLFANEIVPVAIPQKKGEPKLFTTDEHPRPETTLETLAKLKGVVRPDGTVTAGNASGVNDGACAVLLASEAAVERYRLKARARVVAMAAAGLAPRIMGFGPSPASKKVLAKAGLTLADMDVIELNEAFAAQALAVTRDLGLADDAAHVNPNGGAIAMGHPLGASGARLVTAALNQLERTGGRYALCTMCIGVGQGIALVIERV

SEQ ID NO: 100947 - DNA, 1203 bp, Silicibacter pomeroyi DSS-3
  CDS (1)..(1203): transl_table=11
atggacgccttcatctgcgatgcacagcgcaccccgatcggacgctatggtggcgccctgagccaggtgcgcaccgacgatctggccgcggtgccgctggccgccctggtcgcgcgcaacccgcaggtggactgggccagccttgacgatgtgatctatggcgatgccaatcaggccggtgaaagcaaccgcaacgtcgcccgcatggccgcgctgctggccgggcttccggtcgacgtgcccggcaccacggtgaaccggctctgcgccagcggcatggatgcggtcggcatggccgcacgcgccatcaaggccggcgattatgacatggccatcgcaggcggtgtcgaaagcatgagccgggcgcccttcgtgatgcccaaggccaccagcgcctttacccgcgccaatgcggtctatgacaccaccatcggctggcgcttcgtcaacaagaagatgcacgagatgtacggcaccgactcgatgccgcagaccgccgataacgtggccgaggattacgatatctcgcgcgccgatcaggacgcatttgccgcccgcagccaggcccgctgggccgccgcccacgccgccggcgtctttggcgacgaaatcacccccgtgaccatcccgcagcgcaagggcgatgcgatcgttgtagataccgacgaacacccccgccccggcaccactgccgagcagttgggcaagctcaagggcgtgaacggccccgacaagagcgtgaccgctggcaatgcctcgggcgtcaatgacggtgccgccgcgatcctgatggcgagcgaggctgctgctgtcaaaaacggccttaccccgatcgcgcgcgtggtgggcatgtcggtcgccggtgtcgagccgcgggtgatgggcatcggcccggttcccgccagccgcaaggttctggcgcgcgcggggctcaccatcgggcagatggatgtgatagaattgaacgaggccttcgcttcgcagggtctggcgactctgcgggcgctgggggttgccgatgatgcgccgcatgtgaaccccaacggcggcgccatcgccatcggccacccgctgggaatgtcgggtgcgcgtctggtaatgaccgccgcctatcagttgaaacgcaccggcgggcgctatgcgctctgcaccatgtgcgtcggagttggacagggcgccgccctgatcctggaacgtgtgtaa

SEQ ID NO: 100948 - protein, 400 aa, Silicibacter pomeroyi DSS-3
MDAFICDAQRTPIGRYGGALSQVRTDDLAAVPLAALVARNPQVDWASLDDVIYGDANQAGESNRNVARMAALLAGLPVDVPGTTVNRLCASGMDAVGMAARAIKAGDYDMAIAGGVESMSRAPFVMPKATSAFTRANAVYDTTIGWRFVNKKMHEMYGTDSMPQTADNVAEDYDISRADQDAFAARSQARWAAAHAAGVFGDEITPVTIPQRKGDAIVVDTDEHPRPGTTAEQLGKLKGVNGPDKSVTAGNASGVNDGAAAILMASEAAAVKNGLTPIARVVGMSVAGVEPRVMGIGPVPASRKVLARAGLTIGQMDVIELNEAFASQGLATLRALGVADDAPHVNPNGGAIAIGHPLGMSGARLVMTAAYQLKRTGGRYALCTMCVGVGQGAALILERV

SEQ ID NO: 100949 - DNA, 1161 bp, Bacillus clausii KSM-K16
  CDS (1)..(1161): transl_table=11
gtggcaggggcgaggacaccagtcgggaaagcgaaccgcggctcttttaaacatgtgcgttccgacgacttaggcgccattgccgtgaaggaaacattgcgccgcgccaaacaagtcgaaccggaagaaattgacgattgcttgatcggctgcgccatgcccgaagcggaacaagggatgaacatggcccgaaatgtgagcgtgcttgcgggcattccccaatcagttccagcagtgacaattaaccgctattgcgcttccggcttgcaaacaatcgcttatggggccgaacggattatgctagggcatgcgaaagcaatcattgcaggtggcgcagaatcaatgagcatgattccaatgggaggtcacgtcgtcaaaccgaacccaacgttgatcgacgaagcgccggaatattacatgtcaatgggctatacggcggaagaggtggcgcgccagtacggcattagcagggaagaccaagacgcgtttgcggtagaaagccataaacgagcagcggctgcacttgccaatcagcgctttaacgatgaaatcgtacctgttcctgtcgttgaacagcactttggggcagacggaacggttcaaacaacggaacgacttgttgagatggatgaaggcgtgcgcgcagatactacgatcgctgcacttagcaagcttaagccagcattccagcttaaagggacggtaacagctgggaattcatcacaaatgagcgatggcgctgcggctgtcctgctcatggacaaagaagaagcggaagctcgggggttagaaccacttgtaacgtttaaaagctttgctgttgcaggggtagcgcctgaagtgatgggggttggcccaattgaggcaattccaaaggcggtgcgtctggcaggattacagctagaagagattggtttgtttgagttaaacgaggcttttgcttcccaagcgcttgccgtcatacgtgaattggggcttgattacgacaaagtcaatgtcaatggcggagcgattgccttagggcatccacttggctgtacaggcacaaaattaacgttgtcgctcatccatgaaatgaggcggcgcgatgaacgatttggtgttgtgacgatgtgcattggtggcggcatgggggctgctgctgtgtttgaacgacattaa

SEQ ID NO: 100950 - protein, 386 aa, Bacillus clausii KSM-K16
MAGARTPVGKANRGSFKHVRSDDLGAIAVKETLRRAKQVEPEEIDDCLIGCAMPEAEQGMNMARNVSVLAGIPQSVPAVTINRYCASGLQTIAYGAERIMLGHAKAIIAGGAESMSMIPMGGHVVKPNPTLIDEAPEYYMSMGYTAEEVARQYGISREDQDAFAVESHKRAAAALANQRFNDEIVPVPVVEQHFGADGTVQTTERLVEMDEGVRADTTIAALSKLKPAFQLKGTVTAGNSSQMSDGAAAVLLMDKEEAEARGLEPLVTFKSFAVAGVAPEVMGVGPIEAIPKAVRLAGLQLEEIGLFELNEAFASQALAVIRELGLDYDKVNVNGGAIALGHPLGCTGTKLTLSLIHEMRRRDERFGVVTMCIGGGMGAAAVFERH

SEQ ID NO: 100951 - DNA, 1182 bp, Haemophilus influenzae 86-028NP
  CDS (1)..(1182): transl_table=11
atggaaaatgttgttattgttagtgcagttagaacaccgatcggcagctttaatggtgcattatcttccgtaagtgcggttgatttaggcgcaattgtgatacaagaagccatcaaacgtgccaacattgaaagtgcattagttaatgaagtcatcatggggaacgtattacaagcaggactagggcaaaatccagcccgtcaagcagcattaaaagcaggaatagagaaagaaatcccttctttaacaatcaataaagtatgtggatctggtctaaaaagtgtcgcattaggtgcacagtctattatcagtggtgatgctgatattgttgttgtgggtggcatggaaaatatgagccaagcaccttatcttttagatagcaaagtacgacaaggcgtcaaaatgggtaatctcacattaagggacacaatgattgaagacggactaacttgtgctagcaatcactatcatatggggattactgccgaaaatattgcagaacaatatggtattagccgccaagcacaagatgaactcgcattacgttcacaaaccttagcatctcaagccgtgcaattaggtgtatttgataaggaaattatccctgttatggtaaaaactcgcaaaggtgacattattgtttcacgagacgagtatcctaaagcagatactacagctgaaggtttagctaaattaaaacctgctttcaaaaaagagggtactgtcaccgcaggtaacgcttctggcattaatgatggtgctgcagcacttattttagttagcgaaagcaaagctcatgcacttggattaaaagccattgcaaaaattagaagctatgccagcggtggggtagatccatctgttatgggattaggtccagttccagcaacgcaaaaagcattgaaaaaagcaggaataaatcttgatgatatcgatctgatagaagcaaatgaagcctttgcctcacagttcttaggtgttggcaaagatctcaatttggatatgaataaaaccaatattcatggtggagctatcgcacttgggcatccaatcggtgcgagtggtgcaaggattttagtaacgttattgcacaatcttatcgaaaaagataaaaaacttggacttgctacactttgtattggcggtggtcaaggtatttctatgattgtagaacgcttataa

SEQ ID NO: 100952 - protein, 393 aa, Haemophilus influenzae 86-028NP
MENVVIVSAVRTPIGSFNGALSSVSAVDLGAIVIQEAIKRANIESALVNEVIMGNVLQAGLGQNPARQAALKAGIEKEIPSLTINKVCGSGLKSVALGAQSIISGDADIVVVGGMENMSQAPYLLDSKVRQGVKMGNLTLRDTMIEDGLTCASNHYHMGITAENIAEQYGISRQAQDELALRSQTLASQAVQLGVFDKEIIPVMVKTRKGDIIVSRDEYPKADTTAEGLAKLKPAFKKEGTVTAGNASGINDGAAALILVSESKAHALGLKAIAKIRSYASGGVDPSVMGLGPVPATQKALKKAGINLDDIDLIEANEAFASQFLGVGKDLNLDMNKTNIHGGAIALGHPIGASGARILVTLLHNLIEKDKKLGLATLCIGGGQGISMIVERL

SEQ ID NO: 100953 - DNA, 1203 bp, Psychrobacter arcticus 273-4
  CDS (1)..(1203): transl_table=11
atgttagatgcctatatttatgatggattaagaagtccttttggtcggcatggaggagcattagcaacggttcgtcctgatgacttaatcgccacagtgatgaagactttggtcgaaaaacaccaattacccaatgatatttttgatgaagtactaatcggtaataccaatcaagctggtgaagactcacgcaatatcgcccgtaatgccgcgttgctagcagggttagatgtcaaaacgcccggtcaaaccgtcaatcgcctatgcgcttcaggattatcgaccattattgatgccgctcgtagtattacttgtaatgagggggatattattttagcgggcggcgttgagtcaatgacccgcgccccctttgtttttgccaagaccgagcagccttttagccgtgagtttaaagtatttgataccaccattggcagccgcttccccaatcctatcatcgaaaaacagtttggtagcgatactatgccgcaaacgggtgataatgttgctcgcaaatacggcattactcgcgaagaagcggataaatttgcagcggcctcgcaagctaagtaccaagcggcaaaacaagctgggttctttgatgatgaaataacgccaattatggtatcgcaaggtagaaaattaccagaaaaagcgatagcagaagatgagcatccccgcgctagttctactgttgaagcattacaaaaactgaaacctttaaataacgaaggggtcgtcacagcaggcaacgcatcaggtatcaatgacggcgcagctgctcttattattggatcaaagcaagcagaagaaaagttaggctttaagcctatcgcaaaaattctctcatccggtgctatgggtgttgagccgaatattatgggcataggccctgttgaagctattaaactggcattgaaacgtgctgatttgacccttgatgatatgtccatcattgagattaatgaagcatttgcctcgcaagtactcggttgcctcaaaggtttagatattgactttgatgataagcgcgtcaaccctaatggcggtgctattgccattggacatccgcttggtgcatcaggcgctagaatagcgctaagcactgcgcgcgagctacagcgtacgggtgaaaaatatgcagtggtcagtttatgcattggcattgggcaagggcttgccatggtgattgaacgagtttaa

SEQ ID NO: 100954 - protein, 400 aa, Psychrobacter arcticus 273-4
MLDAYIYDGLRSPFGRHGGALATVRPDDLIATVMKTLVEKHQLPNDIFDEVLIGNTNQAGEDSRNIARNAALLAGLDVKTPGQTVNRLCASGLSTIIDAARSITCNEGDIILAGGVESMTRAPFVFAKTEQPFSREFKVFDTTIGSRFPNPIIEKQFGSDTMPQTGDNVARKYGITREEADKFAAASQAKYQAAKQAGFFDDEITPIMVSQGRKLPEKAIAEDEHPRASSTVEALQKLKPLNNEGVVTAGNASGINDGAAALIIGSKQAEEKLGFKPIAKILSSGAMGVEPNIMGIGPVEAIKLALKRADLTLDDMSIIEINEAFASQVLGCLKGLDIDFDDKRVNPNGGAIAIGHPLGASGARIALSTARELQRTGEKYAVVSLCIGIGQGLAMVIERV

SEQ ID NO: 100955 - DNA, 1209 bp, Psychrobacter arcticus 273-4
  CDS (1)..(1209): transl_table=11
atgactgagaccgcttatatctatgatgccatccgtacaccacgtggcaaagggaaaaaagatggctccctccatcaggcatcacctatttggctggttcgtactctattaaaagagatgcaacaacgccataatttagacaccagtttagtagacgacgtcgttttaggctgtgtgacaccagtcggtgagcagggttctgatatcgcacgtatcgccgttatcgacgccgattggcatgagagcgtggcaggtttaacgctgtcacgcttttgtgcgtctggtctagagtcaattaaccttgcggcaaccaaagtaatgtctggcatggaagacttagtcgttgctggtggcgttgaatcaatgagccgtgtaccaatgggttcagatggcggtgcttggtatatggatccacgagtaaacgatgctgttcagttcgtacctcaaggtgttggcgctgataccattgctacattaaagggtttcagccgtaaagatgttgacgagtttgcctcagagtcacacagaagagcagcggctgcctggggaaaaggctactacgataagtcagtcgttccagtgaaagatctaaacggtttattactattagacaaagatgaaaccattcgtccaaatacttcagtagaaacgctagcgagcctaaacccatcatttatgatgccaggtaaaatgggcttcgatggcgttattcttgacaaatacactacgattgaaaacgtaaatcatgttcaccatgctggtaactcttcaggcatcgttgatggttcagcattgtgtcttgtgggtagtagagctgctggcgaaaaagcaggtctaaaaccacgcgctaaaataacgatggcgtctgtgattggttcagagccaactatcatgttaacgggcccaaccccagcctgtcagaaagcactggccaaagccggtatgactgctgcagatatcgatctttgggaaattaatgaagcatttgcagccgtacctcttaataccgcaaatgactttggcctctcgcttgatatcgtcaacgtcaatggtggtgctattgcaatgggtcacccgcttggtgcaactggtgcgatgttagtgacaaccgtattagacgagttggagcgccgtaatttgaataccgctatgattaccctatgtgtgggtggtggtatgggtattgctaccattattgagcgtgtttaa

SEQ ID NO: 100956 - protein, 402 aa, Psychrobacter arcticus 273-4
MTETAYIYDAIRTPRGKGKKDGSLHQASPIWLVRTLLKEMQQRHNLDTSLVDDVVLGCVTPVGEQGSDIARIAVIDADWHESVAGLTLSRFCASGLESINLAATKVMSGMEDLVVAGGVESMSRVPMGSDGGAWYMDPRVNDAVQFVPQGVGADTIATLKGFSRKDVDEFASESHRRAAAAWGKGYYDKSVVPVKDLNGLLLLDKDETIRPNTSVETLASLNPSFMMPGKMGFDGVILDKYTTIENVNHVHHAGNSSGIVDGSALCLVGSRAAGEKAGLKPRAKITMASVIGSEPTIMLTGPTPACQKALAKAGMTAADIDLWEINEAFAAVPLNTANDFGLSLDIVNVNGGAIAMGHPLGATGAMLVTTVLDELERRNLNTAMITLCVGGGMGIATIIERV

SEQ ID NO: 100957 - DNA, 1206 bp, Dechloromonas aromatica RCB
  CDS (1)..(1206): transl_table=11
atgaatgaagcctttatctgcgacgccattcgcacccccatcggccgttacggcggcgccctggccggtgtccgcgccgacgatctcggcgccatcccgctcaaggcgctgatggaacgcaatccacaggtcgactggaccgccgtcgaagacatcatctacggctgcgccaatcaggccggtgaagacaaccgcaacgtcgcccgcatgtccggccttctggccggcttgccgatcgaagtgccgggcacgacgatcaaccgtctgtgcggttccggtatggacgccatcggtatggcggcccgctcgatcaagtctggcgaaaccgaactgatgatcgccggcggcgtcgagagcatgtcgcgcgccccgttcgtgatgggcaaggcggaaagcgcctattcccgtagcgccgcgatctacgacacgaccatcggctggcgcttccccaatccggcgatgaagaagctgtacgacacccattcgatgccgcagacggctgacaacgtcgcggccgacttcgccatcggccgggccgatcaggacgctttcgccgtccgttcgcagcagcgctgggcggcggccaatgcggccggtcgtttcaaggacgaaatcgtgccggtcgtcatcccgaagaagaagggggatccggtcgtcgtcgataccgacgagcatccgcgtccggaaacgacgctggacatgctggccaagctgaagggcgtcaatggcccggaactctcggtcacggctggcaatgcctccggggtcaatgacggcgcctgtgcgctgctgctggcttccggcgccgccgccagccagtacggtctgcagccgctggcccgcgtggtcggcatggccaccgccggcgtgctgccgcgcatcatgggcttcggtccggcgccggccgtgcgcaaggtgctggccaagaccggcctgacactggcccagatggacgtcatcgaactcaacgaagcttttgccgcccagggcctggccgtgttgcgcgacctcgggctggctgacgatgctgcccacgtcaatcccaacggcggtgccatcgccatgggtcacccgctcggcatgagcggcgcccgtctggtgactacggctgcctatgaactcaaacgccgtggcggtcgctacgccctgtgcaccatgtgtattggtgtcgggcagggcatcgcgatggtgatcgagcgtgtctga

SEQ ID NO: 100958 - protein, 401 aa, Dechloromonas aromatica RCB
MNEAFICDAIRTPIGRYGGALAGVRADDLGAIPLKALMERNPQVDWTAVEDIIYGCANQAGEDNRNVARMSGLLAGLPIEVPGTTINRLCGSGMDAIGMAARSIKSGETELMIAGGVESMSRAPFVMGKAESAYSRSAAIYDTTIGWRFPNPAMKKLYDTHSMPQTADNVAADFAIGRADQDAFAVRSQQRWAAANAAGRFKDEIVPVVIPKKKGDPVVVDTDEHPRPETTLDMLAKLKGVNGPELSVTAGNASGVNDGACALLLASGAAASQYGLQPLARVVGMATAGVLPRIMGFGPAPAVRKVLAKTGLTLAQMDVIELNEAFAAQGLAVLRDLGLADDAAHVNPNGGAIAMGHPLGMSGARLVTTAAYELKRRGGRYALCTMCIGVGQGIAMVIERV

SEQ ID NO: 100959 - DNA, 1176 bp, Thermobifida fusca YX
  CDS (1)..(1176): transl_table=11
atgaccgacgtgtacatcctcgacgcggtacgtacccccttcggacggtacggtggcgcactgtccgggatccgccccgacgacctggccgcgcacgtcctgcgcgcgctcgcggaacgctcccccgggctggaccccgccgcggtcgacgacgtcttcttcggcgacgcgaacggggctggggaggacaaccgcaacgtggcccgcatggccgcgctgctcgcgggctggcccacctcggtgccgggcgtgaccttgaaccggttgtgcggttccggcatggaatccgtgatcgccgccaaccgcgcgatcgccgtgggcgacgcctccctggcggtggccgggggtgtggagtcgatgagccgggcaccctgggtgctccccaaacccgctcagggcttccccaccggccacgaaaccctgtactccaccacgctggggtggcggatggtcaacccggccatgccggagcagtggaccgtctccctgggagagagcaccgagcaggtcgccgccacgtacggcatcagccgcgccgaacaggacgctttcgcgctccgcagtcacgagcgcgcagcccgcgcctgggcggaaggagtgttcgacgcggagatcacccaaatccccggcgcggaactggaacgggacgagagcatccgggagacgtccgcggagaaactggccgcgctcaaacccgcgttccgccccgacggcacgatcaccgcgggcaacgcctccccgctcaacgacggggcggccgcgctcctcatcggggacgcggcagcagctgaacgggtcggccgcgagccgctggcccggattgtcagccgcggggtcgccgcagtcgaccccgacgtcttcggaatcggcccggtccaggcagccgagatcgcgctgcgccgcgccgggatcggctgggacgacctgtcggtggtggaactcaacgaagcgttcgccgcccagtccctggcctgcctgaaactctggccggacctggacccggagatcgtcaaccccaacggcggcgccatcgccatcggccaccccctgggcgcgtccggtgcccggatcgtcggcacgctcgcccacgaactgcaccgccgcggcggcgggtgggggctggccgcgatctgcatcggcgtgggccagggcctcgccgtagtgctgcaccgctaa

SEQ ID NO: 100960 - protein, 391 aa, Thermobifida fusca YX
MTDVYILDAVRTPFGRYGGALSGIRPDDLAAHVLRALAERSPGLDPAAVDDVFFGDANGAGEDNRNVARMAALLAGWPTSVPGVTLNRLCGSGMESVIAANRAIAVGDASLAVAGGVESMSRAPWVLPKPAQGFPTGHETLYSTTLGWRMVNPAMPEQWTVSLGESTEQVAATYGISRAEQDAFALRSHERAARAWAEGVFDAEITQIPGAELERDESIRETSAEKLAALKPAFRPDGTITAGNASPLNDGAAALLIGDAAAAERVGREPLARIVSRGVAAVDPDVFGIGPVQAAEIALRRAGIGWDDLSVVELNEAFAAQSLACLKLWPDLDPEIVNPNGGAIAIGHPLGASGARIVGTLAHELHRRGGGWGLAAICIGVGQGLAVVLHR

SEQ ID NO: 100961 - DNA, 1179 bp, Ralstonia eutropha JMP134
  CDS (1)..(1179): transl_table=11
atgcaacaagccgtcatcgtcgacgccatccgcagcccgatgggccgctccaagcccggttcggctttcaccgaactgcatgccacggaactgctggcccaggtgctcaagggcctggtggagcgcaacaagctggatccgggtctcgtcgacgacgtcatcaccggctgcgtcacgcaggccggcgaacagtccgccggccccggccgcgtggcctggctggcggctggcttccctgaccatgtgcccgccaccacgatcgaccgcaagtgcggttcgagccagcaggccgtgcatttcgccgcgcagggcatcatggccggcgcctatgacatcgtcatcgcctgcggcatcgagtcgatgagccgcgtgccgatgggttcggcccgtatcggccagaacccctatggcccgtcgatggaagcgcgttacgcgccgggtctggtctcgcagggcgtggcagcggaactggttgccgccaagtacgaactgtcccgcgcgcagatggacggctactcggctcgttcgcacgaactggccgctgccgcacgcgaagccggtgcattccgccgcgagatcctgccgatcgtgacgccgaatggcgtgatcgagcacgacgagaccatccgcccgggcacttcggtcgaaaagcttggcacgctgcaggcctcgttccgcaatgacgagctgagcgcgcgtttcccgcagatcggctggaacgtgacggccggcaatgcatcgcagatcagcgacggcgcctcggccatgcttctgatgagcgaatccatggcgcagcgcctgggcctgaagccgcgtgcgcgtttcgtggccttcgacgtgtgtggcgacgatccggtgatgatgctgaccgcaccgatcccggccagccagcgcgccatcaagaagagcggcctcaagctcgatcagatcgaccactacgaaatcaatgaagcgttcgcttgcgtgccgttggcctggcagaaggcgcttggcgccgacgcggcgcggctgaacccgcgtggtggtgcgattgcgctgggccacccgctcggtgcatcgggcgtgcgcctgatgaccaccatgctccacgcattggaggacagcggcggccgctacggcctgcaatcgatgtgcgaagccggcggcatggccaacgccacgatcatcgaacgtctgtaa

SEQ ID NO: 100962 - protein, 392 aa, Ralstonia eutropha JMP134
MQQAVIVDAIRSPMGRSKPGSAFTELHATELLAQVLKGLVERNKLDPGLVDDVITGCVTQAGEQSAGPGRVAWLAAGFPDHVPATTIDRKCGSSQQAVHFAAQGIMAGAYDIVIACGIESMSRVPMGSARIGQNPYGPSMEARYAPGLVSQGVAAELVAAKYELSRAQMDGYSARSHELAAAAREAGAFRREILPIVTPNGVIEHDETIRPGTSVEKLGTLQASFRNDELSARFPQIGWNVTAGNASQISDGASAMLLMSESMAQRLGLKPRARFVAFDVCGDDPVMMLTAPIPASQRAIKKSGLKLDQIDHYEINEAFACVPLAWQKALGADAARLNPRGGAIALGHPLGASGVRLMTTMLHALEDSGGRYGLQSMCEAGGMANATIIERL

SEQ ID NO: 100963 - DNA, 1176 bp, Pseudomonas fluorescens PfO-1
  CDS (1)..(1176): transl_table=11
atgagcttgaatcctagagacgtcgtgattgtcgacttcggtcgtactccgatgggccgctccaagggcggcatgcaccgcaacacccgcgccgaagacatgtcggcacacctgatcagcaaactgctggaacgcaacaccaaggtcgatcctgccgaagtcgaggacgtgatctggggctgtgtgaaccagaccctggaacaaggctggaacatcgcgcgcatggcgtcgctgatgacccagatcccgcacacctcggccggccagactgtcagccgtctgtgcggctcgtcgatgagcgcgctgcacactgctgcgcaagcgatcatgaccggcaacggtgacgtgttcgtggttggcggcgtcgagcatatgggtcacgtaagcatgatgcacggtgtcgatccgaacccgcacatgtctctgtacgcggcgaaagcctcaggcatgatgggcctgaccgctgaaatgctgggcaaaatgcacggcatcactcgcgaacagcaggacgcctttggcgtgcgttcccaccagttggcccacaaggcgactgtggaaggcaagttcaaggacgaaatcatcccgatgcagggttacgacgagaacggtttcctgaaaaccttcgactacgacgaaaccattcgtccggaaaccaccctggaaagtctggcggctctgaagccggcgttcaatccaaagggcggcaccgtgaccgccggtacttcgtcgcagatcaccgatggtgcttcgtgcatgatcgtgatgtcggcgcagcgtgcacaggacctgggtatccagcctctggccgtgattcgctcgatggcggtagcgggtgtggacccggccatcatgggctatggtccggtaccggctactcagaaagcactgaaacgtgccggcctgggtatcaacgatatcgacttcttcgagctcaatgaagcgttcgccgcacaggccctgccagtgctgaaagacctgaaagtgctcgacaagatgaatgagaaggttaacctgcacggcggcgcgatcgccctgggtcacccgttcggttgctccggtgcccgtatttccggcactttgctgaacgtgatgaagcagaatggcggcaccttcggggtggccaccatgtgcattggtctcggccaaggcatctccaccgtcttcgaacgcgtttaa

SEQ ID NO: 100964 - protein, 391 aa, Pseudomonas fluorescens PfO-1
MSLNPRDVVIVDFGRTPMGRSKGGMHRNTRAEDMSAHLISKLLERNTKVDPAEVEDVIWGCVNQTLEQGWNIARMASLMTQIPHTSAGQTVSRLCGSSMSALHTAAQAIMTGNGDVFVVGGVEHMGHVSMMHGVDPNPHMSLYAAKASGMMGLTAEMLGKMHGITREQQDAFGVRSHQLAHKATVEGKFKDEIIPMQGYDENGFLKTFDYDETIRPETTLESLAALKPAFNPKGGTVTAGTSSQITDGASCMIVMSAQRAQDLGIQPLAVIRSMAVAGVDPAIMGYGPVPATQKALKRAGLGINDIDFFELNEAFAAQALPVLKDLKVLDKMNEKVNLHGGAIALGHPFGCSGARISGTLLNVMKQNGGTFGVATMCIGLGQGISTVFERV

SEQ ID NO: 100965 - DNA, 1200 bp, Rhodobacter sphaeroides 2.4.1
  CDS (1)..(1200): transl_table=11
atgacccaggtcttcatctgcgactatatccgcacgcccatcggccgctacggcggggcgctctccccggtccgggccgacgatctgggcgccgtgcccctcaaggccctgatggcccgcaatggcggggtggactgggaggccgtggacgatgtgatcttcggctgcgccaatcaggcgggcgaagacaaccgcaacgtggcccgcatgtcggcgctgctggcggggctgccggtgggtgtcacgggcacgacgatcaaccggctgtgcggctcgggcatggatgccgtgctgaccgccgcccgccagatcgccgcgggtgaggcggatctcgtgatcgcgggcggggtggagagcatgtcgcgcgcgccgttcgtgctgccgaaggcgggaacggccttcacgcgctcggccgagatccatgacacgacgatcggctggcgcttcgtcaatccggcgatggaggcggcctacggggtggatcccatgccgcagaccggtcagaacgtcgcctgcgacttcggcatcagccgtgaagcgcaggatgccatggccctcgcctcgcagacgaaggcggcggcggcgcaggcgaacgggcggctcgcacaggagatcacgccggtcctcgttccgcagcgccggggcgagccggtccgggtggagcaggacgagcatccgcgggcgacgacgccggaggcgcttgccaagctgaagccgctcttcgccggcggatccgtcacggcgggcaattccagcggcgtcaacgacggcgcggcggccctgatcctcgccagcgaggcggcggtccggcgccacgggcttacccccatggcgcgggtgctgggcggcgccaccgcgggcgtgcctccgcgcatcatgggcataggcccggtgcccgccacccgcaagctgatggcccggctcggactgaccacggaggctttcgacgtgatcgagctgaacgaggccttcgccgcgcagggggtggccacgctccggcagctcggcatcgccgaggaggatgcgcgggtgaaccccaacggcggcgccatcgccctcggccacccgctgggcatgtcgggcgcccgcatcaccggcacggcggcgctccagctgcagcgcacgggcgggcggcgggcactctcgaccatgtgcatcggtgtgggtcagggcatcgccatcgcgctggaacgggtctga

SEQ ID NO: 100966 - protein, 399 aa, Rhodobacter sphaeroides 2.4.1
MTQVFICDYIRTPIGRYGGALSPVRADDLGAVPLKALMARNGGVDWEAVDDVIFGCANQAGEDNRNVARMSALLAGLPVGVTGTTINRLCGSGMDAVLTAARQIAAGEADLVIAGGVESMSRAPFVLPKAGTAFTRSAEIHDTTIGWRFVNPAMEAAYGVDPMPQTGQNVACDFGISREAQDAMALASQTKAAAAQANGRLAQEITPVLVPQRRGEPVRVEQDEHPRATTPEALAKLKPLFAGGSVTAGNSSGVNDGAAALILASEAAVRRHGLTPMARVLGGATAGVPPRIMGIGPVPATRKLMARLGLTTEAFDVIELNEAFAAQGVATLRQLGIAEEDARVNPNGGAIALGHPLGMSGARITGTAALQLQRTGGRRALSTMCIGVGQGIAIALERV

SEQ ID NO: 100967 - DNA, 1182 bp, Carboxydothermus hydrogenoformans Z-2901; identical to SEQ ID NO: 92874
  CDS (1)..(1182): transl_table=11

SEQ ID NO: 100968 - protein, 393 aa, Carboxydothermus hydrogenoformans Z-2901; identical to SEQ ID NO: 92875

SEQ ID NO: 100969 - DNA, 1173 bp, Carboxydothermus hydrogenoformans Z-2901
  CDS (1)..(1173): transl_table=11
atgcgtgaagcggtaattgtaaaagcattaagaactccggtaggaaaagctcccaggggaaaactaagaaatactcgcccggaggatctgggagcattggttataaaggaaattatcaaccagacgggaattaacccggagattattgaagatgttatcattggttgtgcttttcccgaagcggaacaggggatgaatttaggacgggtggttgctttaagagctggtttgccctactcagttcccggtgttactgttaaccgcttttgctcttccggtttaaatgccattgccgatgcggcaatgaagattatgaccggaatgagcgatgtggtaatagctggcggtatcgaaagtatgagtatggtaccgatgggcggaaatgaccttttgcccaacccggaattaatgaatgtaatgcccgatgcttatctcagcatgggtcttactgctgaaaatgtggcttctcgctataatatttcccgggaagaacaggacgagtttgcctataaaagtcacatgaaagcaaaggaagcaatattgggcggtaaatttaaagatgaaattgttccggtaccggtagttgaaaaaatctttgacggtaagaaagttattgaaaaaaccgaaatgtttgaagtagatgaaggtccgcgctttgatactacccttgaggctctggcccggttaaagccggtttttcggcagggtggtacggttactgcagggaattcttcgcaaaccagtgacggtgctgctgcagccttattaatgtcggcggaaaaagccgaagagcttggcttaaaaccaattgctgtatttcgctcctttgccgtaggcggagtggagccggaaattatgggtattggtcctgtggtagctatacctaaagccttaaaattagccgggattaccttagatcaggtcgacgtatttgagttaaatgaagcttttgcggctcaagcactggctgtaataaaaactttagaaattgatcctgcaaaagttaatcccaacggcggtgctattgccctcggtcacccgctgggctgtaccggtgctaaactgacggcaactcttctttcggaaatgcagcggcgtagagcaaaatacggtgtggtttcaatgtgtatcggtggcggtatgggagctgccggagtctttgaattaatttaa

SEQ ID NO: 100970 - protein, 390 aa, Carboxydothermus hydrogenoformans Z-2901
MREAVIVKALRTPVGKAPRGKLRNTRPEDLGALVIKEIINQTGINPEIIEDVIIGCAFPEAEQGMNLGRVVALRAGLPYSVPGVTVNRFCSSGLNAIADAAMKIMTGMSDVVIAGGIESMSMVPMGGNDLLPNPELMNVMPDAYLSMGLTAENVASRYNISREEQDEFAYKSHMKAKEAILGGKFKDEIVPVPVVEKIFDGKKVIEKTEMFEVDEGPRFDTTLEALARLKPVFRQGGTVTAGNSSQTSDGAAAALLMSAEKAEELGLKPIAVFRSFAVGGVEPEIMGIGPVVAIPKALKLAGITLDQVDVFELNEAFAAQALAVIKTLEIDPAKVNPNGGAIALGHPLGCTGAKLTATLLSEMQRRRAKYGVVSMCIGGGMGAAGVFELI

SEQ ID NO: 100971 - DNA, 1272 bp, Burkholderia sp. 383
  CDS (1)..(1272): transl_table=11
atgcgcgctgcggcaccgacgtggcggaccgccatgcccgtcaatcattcttcgtttaactatcgtatcgagacaaccatgatcagaagcgcggtaatcgtagacgcagtacgcagtccgatggggcgtaccaaggccggcggcgccttcgtccagctgcatccggccgacctgctttcgcaggtgatccaggccctggtcgcgcgcaacgatctcgatcccgggaccgtcgacgacgtgatgatcggctgcgtgagccaggtcggcgagcaatcgacgacacccggtcgcgtcgcgtggctggcggcggggtttccggcccacgttccggccacgacgatcgagcggaagtgcggatcgagccagcaggcgattcacttcgcggcgcaggcaatcatggccggcgtgaacgacatcgtgatcgccggcggcgtcgaatcgatgagccgcgtgccgatgggttccgcgcgcatcgaccgcgatccgtacggtgcccgctttcatgcgcggtttccgcaggggctggtcggtcagggtgtcagcgccgatctcgttgcgcagaagtgggatctgtcacgcgaagcactcgacgcgtactcggccgagtcgcatcgtcgtgccgaggccgcgcgcacggccggccagttcgcccgcgagatcgtgccgatcgacgtacccggcgacggtggcctccggcgcgtggatacggacgagacgatccgtgtgggcacgagcgtcgagcgtctcgcgagcctcgcgccttcgttcgagaacgccgagctggcgcaacggttcccgggcattcgctggaacgtgacggccggcaacgcatcgcagatttccgacggcgctgccgcgctgctcgtgatgagcgagcagaaggcggcgcggctcgggctcaagccgcgtgcgcggatcgtcgcgttcgacgtgtgcggggacgatccgctcatgatgctgaccgcgccgattcccgcgaccgaacggctgctgaaacggcagggactgtcggtgcacgacatcgaccgtttcgaggtgaacgaggcgtttgcggcggtgccgctggcctggcaaaaggcgctgggtgccgatggtgcgcgactgaatgcggcgggcggcgccattgcgctcgggcatccgctgggcgcgtcgggcgcgagactgatgaccacgatgctcaattcgctggaagcatcgggggggcgatatggattgcagacgatgtgcgaggccggcgggatggcgaacgcgacattgatcgaacgcttgtga

SEQ ID NO: 100972 - protein, 423 aa, Burkholderia sp. 383
MRAAAPTWRTAMPVNHSSFNYRIETTMIRSAVIVDAVRSPMGRTKAGGAFVQLHPADLLSQVIQALVARNDLDPGTVDDVMIGCVSQVGEQSTTPGRVAWLAAGFPAHVPATTIERKCGSSQQAIHFAAQAIMAGVNDIVIAGGVESMSRVPMGSARIDRDPYGARFHARFPQGLVGQGVSADLVAQKWDLSREALDAYSAESHRRAEAARTAGQFAREIVPIDVPGDGGLRRVDTDETIRVGTSVERLASLAPSFENAELAQRFPGIRWNVTAGNASQISDGAAALLVMSEQKAARLGLKPRARIVAFDVCGDDPLMMLTAPIPATERLLKRQGLSVHDIDRFEVNEAFAAVPLAWQKALGADGARLNAAGGAIALGHPLGASGARLMTTMLNSLEASGGRYGLQTMCEAGGMANATLIERL

SEQ ID NO: 100973 - DNA, 1203 bp, Burkholderia sp. 383
  CDS (1)..(1203): transl_table=11
atgaccgaagcttttctgtgtgatgcgatccgtacgccgatcgggcgctacggcggtgcactgtccggcgtgcgcgccgacgatctgggcgcagtgccgctcaaggcgctcgtcgagcgcaaccgcgacgtcgactggacggcgatcgacgacgtgatctacggctgcgcgaaccaggccggcgaggacaaccgcaacgttgcgcgcatgtcggcgctgctcgctgggctgccgcaaggcgtgccgggctcgacgatcaaccgcctgtgcggttccgggatggatgcggtcggcgtggccgcccgtgcgatcaagtccggcgaggccgcgctgatggtcgcgggcggcgtcgagagcatgacgcgtgcgccgttcgtgatgggcaaggctgcgagcgcgttcgcgcgccaggccgacatctacgatacgacgatcggctggcgcttcgtcaatccgctgatgaaacagctgcacggtgtcgattcgatgccggagacggccgagaacgtcgcggtcgactacaacatcagccgcgccgaccaggacctgttcgcgctgcgcagccagcagaaggccgcgcgtgcgcagcaggacggcacgctcgccgaggaaatcgtcgcggtcacgattccgcagaagaagggcgatccggtggtcgtgtcgcgtgacgagcatccgcgcgagacgtcgctcgaaacgctggcgaagctgaagggcgtcgttcgcccggacggctcggtgacggccggcaatgcgtcgggcgtcaacgacggcgccgccgcgctgctgctcgcgaacgaggaaaccgcgaagcgcttcggcctgacgccgcgcgcacgcgtgctcgggatcgcgacggccggcgtcgcgccgcgcgtgatgggcatcggccccgcgccggccacgcagaagctgctcgcgcggctcgggatgacgatcgaccagttcgacgtgatcgagctgaacgaggcattcgcatcgcaaggtctcgcggtgctgcgcatgctcggcgttgccgatgacgatcctcgcgtgaacccgaacggcggcgcgatcgcactgggccatccgcttggtgcgtcgggcgcgcgtctcgtgacgaccgcgatgtaccagctgcatcgcacgaacggccgcttcgcgctgtgcacgatgtgcatcggcgtcggccagggcatcgcgatcgcgatcgagcgcgtctga

SEQ ID NO: 100974 - protein, 400 aa, Burkholderia sp. 383
MTEAFLCDAIRTPIGRYGGALSGVRADDLGAVPLKALVERNRDVDWTAIDDVIYGCANQAGEDNRNVARMSALLAGLPQGVPGSTINRLCGSGMDAVGVAARAIKSGEAALMVAGGVESMTRAPFVMGKAASAFARQADIYDTTIGWRFVNPLMKQLHGVDSMPETAENVAVDYNISRADQDLFALRSQQKAARAQQDGTLAEEIVAVTIPQKKGDPVVVSRDEHPRETSLETLAKLKGVVRPDGSVTAGNASGVNDGAAALLLANEETAKRFGLTPRARVLGIATAGVAPRVMGIGPAPATQKLLARLGMTIDQFDVIELNEAFASQGLAVLRMLGVADDDPRVNPNGGAIALGHPLGASGARLVTTAMYQLHRTNGRFALCTMCIGVGQGIAIAIERV

SEQ ID NO: 100975 - DNA, 1200 bp, Geobacter metallireducens GS-15
  CDS (1)..(1200): transl_table=11
atgcgtgaagcagtaattgtcgatgctgtccgtactccggtgggaaaattcaacggcgccctgaaaaacgtccgctctgacgacctggccgcccactgtatttccgaactggtgaagcgtaacaatcttgatccgaacctggtcgaagatgtggtgctcggttgcaccaaccaggcgggcgaggacaaccggaacgtcggccggatggcggcgcttctggccggtctgccgtattcggtcgcggggcagaccatcaaccgtctctgtgcctcgggcctgaatgccatcaacagcgcagcccatgcgattaaactcggcgaaggtgatgtctttatcgctggcggtaccgaatccatgacccgtgccccctttgtcatggccaagtccgaatcccctttctcgcgcgatatcagggtgtttgacagcgtcatcggctggcggttcaccaacccgaagatgactgaaccatatgccaaggaaggaatgggcgaaaccgccgagaacgtggcggtgcggtatggcctcacccgccaggagcaggacgagtttgccctggagacccaacgcaaatgggctgccgccgatgcggccggcaagttcaatgacgagatcgttcccgtcgttatcccccagaagaagggggatccgatcatcgtctccagggatgaattccctcgcggcaacgatgtcaccatggagcagcttgccaagctgccggctgccttcagaaaggagggcaccgtcaccgccggcaactccagcggcatcaacgacggcgccgcagcgctcctcctcatggaggcagaaaccgccaagaagctcggctacaagccgcttgccagggtcgtcgccagtgcggttgccggttgcgatccctcgtacatggggctcggccccatcccggcgatccagaaggtgctgcaacggtccggcctgaaaatcgaagatattgacctcttcgagctgaacgaggcctttgccgcccagtccatcccctgcatccgcgaactggggatcgatccggccaaggtgaacgtcaacggcggctccatcgccatcggccaccccctcggctccaccggcgcccggatcaccgccacgctggtccatgagatgaagcgccgtggctcccgctacggtctcgtgtccctctgtatcggtgtcggacagggaattgcgacgatcttcgaacgcgtgtaa

SEQ ID NO: 100976 - protein, 399 aa, Geobacter metallireducens GS-15
MREAVIVDAVRTPVGKFNGALKNVRSDDLAAHCISELVKRNNLDPNLVEDVVLGCTNQAGEDNRNVGRMAALLAGLPYSVAGQTINRLCASGLNAINSAAHAIKLGEGDVFIAGGTESMTRAPFVMAKSESPFSRDIRVFDSVIGWRFTNPKMTEPYAKEGMGETAENVAVRYGLTRQEQDEFALETQRKWAAADAAGKFNDEIVPVVIPQKKGDPIIVSRDEFPRGNDVTMEQLAKLPAAFRKEGTVTAGNSSGINDGAAALLLMEAETAKKLGYKPLARVVASAVAGCDPSYMGLGPIPAIQKVLQRSGLKIEDIDLFELNEAFAAQSIPCIRELGIDPAKVNVNGGSIAIGHPLGSTGARITATLVHEMKRRGSRYGLVSLCIGVGQGIATIFERV

SEQ ID NO: 100977 - DNA, 1173 bp, Rhodospirillum rubrum ATCC 11170
  CDS (1)..(1173): transl_table=11
atgaccgatatcgtcattgccggcgctacgcgtacgcctgtcggaacctttaacggtggattaagcggcctacccgcccacgccttgggcgaaatcgtcatccgcgaggtgttgcgccgggccaaggtcgaagccggcgaagtcgatgaagtggtgctcggccagatcctgaccgccggccagggtcagaacccggcccgtcaggccgccgtcaacgccggaattccggtggaaaaaaccgcttatggcatcaatcaactgtgcggatcagggctgcgcacggtggccttgggcttccaggccatcaccctcggcgatgccgatatcgtggtggccggtggccaggaaagcatgagcatggccccccatgccacctatctgcgctccggcatcaagatggggacgaccgaactggtcgacaccatgctcaaggacggcctgtgggatgccttccacggctatcacatgggcaccaccgccgagaacatcgccggcaaatggcagatcagccgcgaggatcaggacctcttctccgccggttcgcagaacaaggccgaagccgcgatcgcagcgggccgcttcaaggacgagatcgttcccgtcaccgtcaaaggccgcaagggcgatatcgtcatcgataccgacgagcaccccaaggccggggtgacgcccgagagtctggccaagctgcggccggccttttccaaggacggcacggtgaccgccggcaacgcctcgggcatcaacgacggcgccgccgccctggtgctgatgagcgaggccaatgccgccaagcgcggcgtcgccccgctcgcccgcatcgtgtcgtgggccacggccggcgtcgatccggcgatcatgggcaccggcccgatccccgctacccgcaaggccctggaaaaggccggctggagcatcgacgacctggatctgatcgaagccaacgaggctttcgccgcccaggcgctggcggtcaacaaggacctcggctgggatccggccaagatcaacgtcaacggcggcgccatcgccctcggtcacccggtcggtgcctcgggcgcgcgcattctggtcaccttgctccacgagatgatcaagcgcgacgccaagaagggtctggcgacgctgtgcatcggtggcggcatgggcatcgcgctctgcgtcgagcgctaa

SEQ ID NO: 100978 - protein, 390 aa, Rhodospirillum rubrum ATCC 11170
MTDIVIAGATRTPVGTFNGGLSGLPAHALGEIVIREVLRRAKVEAGEVDEVVLGQILTAGQGQNPARQAAVNAGIPVEKTAYGINQLCGSGLRTVALGFQAITLGDADIVVAGGQESMSMAPHATYLRSGIKMGTTELVDTMLKDGLWDAFHGYHMGTTAENIAGKWQISREDQDLFSAGSQNKAEAAIAAGRFKDEIVPVTVKGRKGDIVIDTDEHPKAGVTPESLAKLRPAFSKDGTVTAGNASGINDGAAALVLMSEANAAKRGVAPLARIVSWATAGVDPAIMGTGPIPATRKALEKAGWSIDDLDLIEANEAFAAQALAVNKDLGWDPAKINVNGGAIALGHPVGASGARILVTLLHEMIKRDAKKGLATLCIGGGMGIALCVER

SEQ ID NO: 100979 - DNA, 1143 bp, Rhodospirillum rubrum ATCC 11170
  CDS (1)..(1143): transl_table=11
atgacccaggtggtactcgcaagctacgtccggtcccccttcaccccggcccgcaagggcgccctggcccgggtacgtcccgatgatctggccgcccaggtgatcaaggccctggtcgcgcgaaccggggttgatccggccacgatcgaggatctgatcctcggttgcgcctttcccgagggtgagcagggtttgaacgtcgcccggctgatcgggctgatggccggcctgccccaatcgaccgccggggtgacggtcaaccgcttctgcggctcgtcgatgcaatcaatccacatggccgccggcgccatcgccctgggggctggcgaggccttcgtctgcgccggggtcgaaagcatgagccgggtgccgatgatgggcttcaatcccttgcccaatccggccttcgccaaggccatgcccggcgcctatatgggcatgggcgatacggccgaaaacgtggccaagcgctggaagatcgatcgcaaggcccaggaggagttcgccctccgctcgcaccagcgggccaagacggcccaggacgccggccatctgagcgacgagatcgtcgccatcaccgatccgcgcggcggcgccagcgtcgagaccgatggctgcgtccgcccggaaaccaccctggacggactggccgagctgaagccggccttttcgaccgagggcgtggtgacggcgggaacctcctcgccgctgaccgatggcgcctcggcggtcttcgtctgctcgcgcgagtacgccgatcgccatggcctaacgccgctggccgcgctcaaaagcatcgccgtcgccggctgcgacccggagatcatgggcatcggcccggtggcggcctcgcgcaaggccctggagcgggcggggatcgacgccggcgcccttgatgtcatcgaattgaacgaggccttcgcctcgcaggccctggcctgccttggcgagctcggcctggacgccgataaggtcaatatcgacggcggcgccatcgcccttggccatccgctgggcgccacgggggcgcgcatcgtcggcaaggcggcgtccttgctcaagcgtcagggtgggcgctacgcgctagccacccagtgcatcggcggtggccagggtatcgccaccatcctcgaagcggtctga

SEQ ID NO: 100980 - protein, 380 aa, Rhodospirillum rubrum ATCC 11170
MTQVVLASYVRSPFTPARKGALARVRPDDLAAQVIKALVARTGVDPATIEDLILGCAFPEGEQGLNVARLIGLMAGLPQSTAGVTVNRFCGSSMQSIHMAAGAIALGAGEAFVCAGVESMSRVPMMGFNPLPNPAFAKAMPGAYMGMGDTAENVAKRWKIDRKAQEEFALRSHQRAKTAQDAGHLSDEIVAITDPRGGASVETDGCVRPETTLDGLAELKPAFSTEGVVTAGTSSPLTDGASAVFVCSREYADRHGLTPLAALKSIAVAGCDPEIMGIGPVAASRKALERAGIDAGALDVIELNEAFASQALACLGELGLDADKVNIDGGAIALGHPLGATGARIVGKAASLLKRQGGRYALATQCIGGGQGIATILEAV

SEQ ID NO: 100981 - DNA, 1182 bp, Moorella thermoacetica ATCC 39073
  CDS (1)..(1182): transl_table=11
atgaaggatgttgttatagttagcggtgtcaggacagcggtagggacccgtggtggtagcctgaaggatatccaccaggctgacttgggtgccatggtgattaaagaggccgtccggagggcaggtttggaaggcaaccaggttgatgaggttattgtcggcaatgtcggccaagttgcagaaaacggttttatcgccaggatgtgttctttaaaggcagggttacctctggagacaacagctttttcagtaaaccgccagtgtggttcgggactgcaggccatcaacagcgccgttcaggagattcaaagtggcaatgctgaaattgtcgtcgcctgcggcaccgagaatatgaaccagttaccctattatgttcggaaagcccgttatggttatgggtttggccatggccaattagaagacggtttgcttaccattttaacctggcccctgggaccgtatccaaatggtgtcacagccgaaaacattgctgaacgttaccatatctccagggaagaacaagatgcctttgctttaaagagccagcagaaagctgaggctgccattaaagctggcaaatttgtggacgaaattctcccggttgaagtccctgccggtaaaagggaaaccaggatttttgcccaggatgaacatcctcgttttggcctcaccatggagcaactggcaaaattaaagcctgctttccgggaaggcggtacggtaactgctggcaattcttcgggtatcaacgacggcgctggagcagtagttctaatgacggccgaaaaagccaacaaacttggcctcaagcccttactgctaatccgcagccaggcagtggccggggttgatccagatgttatgggcatcggtcctgcccccgcgactatgaaggcagtcgagaaagccgggctaacccttgctgatatcgacctctttgagctgaatgaagcttttgcctcccagtcgattgccgttatgcgcattctgggacttcccgaagaaaaggtaaacgttaatggtggcgccatcgccctgggtcaccccatcggtgcaaccggcattatcttaactgttaaattacaaaaagaaatggtacgtcgccaggctaaatatggtatcgttaccatgtgtattggcggcggccagggtattgctacggtctttgaaaatatagcttaa

SEQ ID NO: 100982 - protein, 393 aa, Moorella thermoacetica ATCC 39073
MKDVVIVSGVRTAVGTRGGSLKDIHQADLGAMVIKEAVRRAGLEGNQVDEVIVGNVGQVAENGFIARMCSLKAGLPLETTAFSVNRQCGSGLQAINSAVQEIQSGNAEIVVACGTENMNQLPYYVRKARYGYGFGHGQLEDGLLTILTWPLGPYPNGVTAENIAERYHISREEQDAFALKSQQKAEAAIKAGKFVDEILPVEVPAGKRETRIFAQDEHPRFGLTMEQLAKLKPAFREGGTVTAGNSSGINDGAGAVVLMTAEKANKLGLKPLLLIRSQAVAGVDPDVMGIGPAPATMKAVEKAGLTLADIDLFELNEAFASQSIAVMRILGLPEEKVNVNGGAIALGHPIGATGIILTVKLQKEMVRRQAKYGIVTMCIGGGQGIATVFENIA

SEQ ID NO: 100983 - DNA, 1440 bp, Burkholderia thailandensis E264
  CDS (1)..(1440): transl_table=11
atggcgggtggaatggatgtgcagcggggaagattagcgcatggggtcgggttgcgccaacccgcgtcccgcatgggccctacgcttgacgcgcgttcgcgcgctccctatgatcgcatgggaaacgttcgattaacgatcttatgttcatatatcgaacttttatcaagtgaattcgaggcgagcggaggcggcgatgtcgagtcggctcgcgggatcagaccgaccggagacgacatgaccgaagcattcctgtgtgacgcaatccgaacgcccatcggccgctacggcggcgcgctggccccggtgcgggccgacgacctcggcgcggtgccgctcaaggcgctcgccgagcgcaaccgcgacgtcgactgggccgccgtcgacgacgtgatctacggctgcgcgaaccaggccggcgaagacaaccgcaacgtcgcgcgcatgtcgctgctgctcgccggcttgccccacgccgtgcccggcgcgacgatcaaccgcctctgcggctccgggatggacgcgatcggcatcgccgcgcgcgcgatcaaggccggcgaggcgaacctgatgatcgcgggcggcgtcgagagcatgagccgtgcgccgttcgtcacgggcaaggcgacgagcgcgttctcgcggcaggccgagatcttcgatacgacgatcggctggcgctttgtcaatccgctgatgaaacagcagtatggcgtcgattcgatgccggagacggccgagcacgtcgcgaccgattaccgcgtgagccgcgccgatcaggacgcgttcgcgctgcgcagccagcagaaggcggcgcgcgcgcaggccgacggcaccctcgcgcaggaaatcgtgccggtgacgatcgcgcagaagaagggcgagccgctcgtcgtggcgcgcgacgagcatccgcgcgagacgacgctcgatgcgctcgccaaactcaagggcgtcgtgcggccggacggcacggtgacggcaggcaacgcgtcgggcgtgaacgacggcgcgtgcgcgctgctcgtcgcgagcgaggcggccgcgcggcgtcacggcctcgtgccgcgcgcgcgcgtgctggggatcgcgaccgcgggcgtcgagccgcgggtgatggggatcggcccggcgccggcgacgcagaagctgctcgcgcggcttggcatgacgctcgaccagttcgacgtgatcgagctgaacgaggcgttcgcatcgcagggcctggcggtgctgcggctgctgggcgtcgccgacgacgatgcgcgcgtgaatccgaacggcggcgcgatcgcgctcggccatccgctcggcgcctcgggcgcgcggctcgtgacgagcgcgacgtatcagttgcatcgcaccggcggccgcttcgcgctctgcacgatgtgcatcggcgtcgggcagggcatcgcgatcgcgatcgagcgcgtgtga

SEQ ID NO: 100984 - protein, 479 aa, Burkholderia thailandensis E264
MAGGMDVQRGRLAHGVGLRQPASRMGPTLDARSRAPYDRMGNVRLTILCSYIELLSSEFEASGGGDVESARGIRPTGDDMTEAFLCDAIRTPIGRYGGALAPVRADDLGAVPLKALAERNRDVDWAAVDDVIYGCANQAGEDNRNVARMSLLLAGLPHAVPGATINRLCGSGMDAIGIAARAIKAGEANLMIAGGVESMSRAPFVTGKATSAFSRQAEIFDTTIGWRFVNPLMKQQYGVDSMPETAEHVATDYRVSRADQDAFALRSQQKAARAQADGTLAQEIVPVTIAQKKGEPLVVARDEHPRETTLDALAKLKGVVRPDGTVTAGNASGVNDGACALLVASEAAARRHGLVPRARVLGIATAGVEPRVMGIGPAPATQKLLARLGMTLDQFDVIELNEAFASQGLAVLRLLGVADDDARVNPNGGAIALGHPLGASGARLVTSATYQLHRTGGRFALCTMCIGVGQGIAIAIERV

SEQ ID NO: 100985 - DNA, 1293 bp, Syntrophus aciditrophicus SB
  CDS (1)..(1293): transl_table=11
atgaaagatgtcgtcatcgtaagcggcgccagaaccgccgtgggtgcttttggcggatcgctgaaaggcgtgagagttacggatttgggagcgctggtcatcaaagaggccatcaagagagcggggctgcggccggccatcagtgaagaagtgaaaggctgccgttgcgataccttcggagaattcgacaagaccgaaatcaacaagaaatattatgattacgatgaatccctgacccccgtttatttcgacgagtgcatcatggggaactgcctgatcgccggcctgggacagaatcccggccgtcagtccagcatctatgccggtctgcccgaagaaacgaacaccatcacagtgaacaaggtctgcgcatccggcatgaaagccatcaccctggccgcccagatcatcaaagccggcgatgccgacatcatggtggccggcggcatggaaaacatgagcaatgtaccctacgccctgcccgacgcccgctggggataccggatgaacatgcctacgggttccatcatcgacctcatggttcatgatggtctctgggaaatcttcaacggctatcacatgggattcacggcggaaaatatcgcctcccgttatggaatcagccgtcaggcccaggacgagctggccctcatgagccatcagcgcgcccgtgcggccatcgccagcggcgccgtcgccgatgaaatcatccccgttccgctgcccgtgaagaaaggcgcggctccgcagtttttctccgtcgacgagcgtcccatggacaccagcctggaaaagatggcgaagctggccccagtcttcaagaaggacggaaccgtcacggcggccaacgcctcgggtatcaatgacggtgcggcggctgtcgtcgtgatgagcgccgacaaggcaaaggaactgggcctcaaaccgctggcgaagatcctcggctatgcctccggcggcgtcgatccggcatacatgggtctgggtccgattccggcaacccgcaaggtcttcaagaaactcggcctgaccatgaaggacatggacatcgtggaactgaacgaggcctttgcatcccaggccctgggctgcgtccaggaaatgggtgtggatctggacaaaaccaatctcaacggcagcgggatctccatcggtcaccccgtcggctgcaccggcgcccggatcacctacagcttggccatgcagctgcagaagaagaacgcgcacctcggactcgccacgctgtgtatcggtggcggacaggggatggccattgtcctggaaagagtgtaa

SEQ ID NO: 100986 - protein, 430 aa, Syntrophus aciditrophicus SB
MKDVVIVSGARTAVGAFGGSLKGVRVTDLGALVIKEAIKRAGLRPAISEEVKGCRCDTFGEFDKTEINKKYYDYDESLTPVYFDECIMGNCLIAGLGQNPGRQSSIYAGLPEETNTITVNKVCASGMKAITLAAQIIKAGDADIMVAGGMENMSNVPYALPDARWGYRMNMPTGSIIDLMVHDGLWEIFNGYHMGFTAENIASRYGISRQAQDELALMSHQRARAAIASGAVADEIIPVPLPVKKGAAPQFFSVDERPMDTSLEKMAKLAPVFKKDGTVTAANASGINDGAAAVVVMSADKAKELGLKPLAKILGYASGGVDPAYMGLGPIPATRKVFKKLGLTMKDMDIVELNEAFASQALGCVQEMGVDLDKTNLNGSGISIGHPVGCTGARITYSLAMQLQKKNAHLGLATLCIGGGQGMAIVLERV

SEQ ID NO: 100987 - DNA, 1194 bp, Frankia sp. CcI3
  CDS (1)..(1194): transl_table=11
atggagaacgcagtcatcgtcgatggggtacgcacggcgtcgggacggggcaagccgggtggggcgctgtccgagacccatccggtggagctgctggccaccgtgctgaaggcactgatcgcccgtaacgaccttgatccggcgctggtcgacgacgtcatcgccgggtgtgttgaccaggccggcgagcaggccgtcaacatcgggcgcaccgcggtgctgtcggccgggttccccgagtcggtgccggccaccacgatcgaccgccagtgcggctcgagccagcaggccgcccatttcgccgcgcagggggtgctcgccggcgcctacgacatcgtcatcgccgccggcgtggagtcgatgagccgggtgccgatgggctccaccactttcggcaaggaccccaacggcccgagcctgcacgcccgctacccggagggcctggcccaccagggcatcggcgcggagctcgtcagcgcccgatggaagatcaaccgggaggacctggacatcttctccgcgcggtcgcaccagctcgcggcggcctccgtcgcggcgggggacttcgccggggagatcgtcccggtcgagatcacccttccggacggcacgacagcccagcacaccgtggacgagacggtccgagcgaccacgaccgtcgagacgctggcgaagctcaagccgtccttctacaccgaggcgtacgccgcccgcttcccggagatcacctggaacatcaccccgggtaactcctccccgctgaccgacggcgcctcggccgtcctgatcatgagcgagaccagggcgaacaagctcggcctgcggccacgggcccggttccacacgttcgcgctcgccggggacgacccgttgctcatgctgaccgcgccgatcccggcaacccgcaaggcgctcaagcgcgccggtctgagcatcgacgacatcgacgccttcgaggtcaacgaggcgttcgcgcccgtgccgctcatgtgggcccgcgacaccggtgccgacccggcgaagctcaacccgcgcgggggcgccatcgcgctgggccacccgctgggcggatcgggcacccgcctgctcaccacgatgctcaactacctggaggccaccggcggccgttacggcctgcagacgatgtgcgagggcggcggcatggccaacgccaccatcatcgaacggctctga

SEQ ID NO: 100988 - protein, 397 aa, Frankia sp. CcI3
MENAVIVDGVRTASGRGKPGGALSETHPVELLATVLKALIARNDLDPALVDDVIAGCVDQAGEQAVNIGRTAVLSAGFPESVPATTIDRQCGSSQQAAHFAAQGVLAGAYDIVIAAGVESMSRVPMGSTTFGKDPNGPSLHARYPEGLAHQGIGAELVSARWKINREDLDIFSARSHQLAAASVAAGDFAGEIVPVEITLPDGTTAQHTVDETVRATTTVETLAKLKPSFYTEAYAARFPEITWNITPGNSSPLTDGASAVLIMSETRANKLGLRPRARFHTFALAGDDPLLMLTAPIPATRKALKRAGLSIDDIDAFEVNEAFAPVPLMWARDTGADPAKLNPRGGAIALGHPLGGSGTRLLTTMLNYLEATGGRYGLQTMCEGGGMANATIIERL

SEQ ID NO: 100989 - DNA, 1173 bp, Novosphingobium aromaticivorans DSM 12444
  CDS (1)..(1173): transl_table=11
atggctacagcctatatcgtcgatgcggttcgcacggcaggcggtcggcgcgggggcaggcttgcgggcgtccatccggtggacctcgccgctcgcagcctcgatgcgatcgtcgcgcgcaccggcatcgacccgaccgcggtcgacgacgtcatcatgggctgcgtcacccaggccggtcagcaggcaatgcaggtgggccgcaacgcggtgctcgcctcgaagctgctgccgcagtcgacgccggccgtcaccatcgaccgccagtgcggttcttcgcagcaggcgatccagttcgcggcgcaggctgtcatgtctggcgtgcaggatatggtcatcgcggcgggcgtcgagagcatgagccgcgtgccgatgggctccaacgccacgttccacatgaaggaggggctcggtcactacaagtcgccggggctggaagaaaagtatcccggggtcatgttctcccagttcatgggcgcggaaatgatcgtgaagaagcatggcttcaccaaggacgatctcgaccgcttctcgctggacagccatcgcaaggcgattgcggcaaccaatgcccaggccttcgcgaacgaaatcgtgccggtagagatcgagacgcccgaaggccccgcaatgcacaccgtggacgaaggtatccgcttcgacgctacgctcgagggcatcgccggcgtcaagctgctcagccccgaaggctcgctcaccgctgccagctccagccagatctgcgatggttcgagtgccgtgctggtcgtgtcggaagctgcgctcaaggcgcatggacttaccccgctggcgcgcatccacaatctgacagtgaccgcgggcgatccggtgatcatgctcgaagagccgctcttcgccaccgatcgtgcattgcagcgcgcgggcatgaagatttccgacatcgacctatacgaagtgaacgaggcgttcgcctccgttccgatggcttggctgaagcacaccggcgccgatccggaaaagctcaacgtcaacggcggcgcgatcgcgcttggccatccgctgggcgcttcgggcagcaagctcatggcgacgctcgtccacgccctgcgcgcgcggggcggaaagtacggtttgcagacgatgtgcgaaggcggcggcgtggccaacgtcacgatcatcgaggcactttga

SEQ ID NO: 100990 - protein, 390 aa, Novosphingobium aromaticivorans DSM 12444
MATAYIVDAVRTAGGRRGGRLAGVHPVDLAARSLDAIVARTGIDPTAVDDVIMGCVTQAGQQAMQVGRNAVLASKLLPQSTPAVTIDRQCGSSQQAIQFAAQAVMSGVQDMVIAAGVESMSRVPMGSNATFHMKEGLGHYKSPGLEEKYPGVMFSQFMGAEMIVKKHGFTKDDLDRFSLDSHRKAIAATNAQAFANEIVPVEIETPEGPAMHTVDEGIRFDATLEGIAGVKLLSPEGSLTAASSSQICDGSSAVLVVSEAALKAHGLTPLARIHNLTVTAGDPVIMLEEPLFATDRALQRAGMKISDIDLYEVNEAFASVPMAWLKHTGADPEKLNVNGGAIALGHPLGASGSKLMATLVHALRARGGKYGLQTMCEGGGVANVTIIEAL

SEQ ID NO: 100991 - DNA, 1185 bp, Staphylococcus aureus subsp. aureus NCTC 8325
  CDS (1)..(1185): transl_table=11
atgcaagaagcatacattgtagcttatgggcgttcagccgcagcgaaagcaaagcaaggcgcattattccacgaaagacctgatgatgtcgcagccaaagtattacaaggcgtattgaaacgtattgacggaaaattcaataagaatatgattgaagatgtcattgttggtacggcttttccagaaggattacaaggccaaaacattgcacgaacgattgcattgcgtgcgggattatctgacacggtaccgggtcaaacagtgaatcgctactgctcatcaggattacaaaccatcgcgattgcagccaatcaaattatggctggtcaaggagatatacttgtagctggtggcgttgaattgatgagtgccgtaccaatgggtggcaacgagcccacaaacaatccaaccttacaatatgatgatataggtgcgtcatatcctatgggtttaactgctgaaaatgtagcatcccaatttgacgtatcacgcgaagatcaagatgcttatgctgtcagaagtcatcaacgtgcctatgacgcacaacgtgatggtcggttcaaagatgaaattattccaatacaagtaaactcagttgaatatacaaacgcaggaccaaaagtacacacaaatatctttgaccaagatgaatttatacgccctgacaccacgatggaggcattagccaaattacgtacagtatttaaagctgacggcactatgactgcaggaacatctgccccactttctgatggtgcaggatttgtagttttaatgtctggagataaagtgaaagaactcggcgtgacacctattgcacgattcgttggttttaaggcagtaggcgttgacccgaaaattatgggtattgggcctgcatatgcgattcctgaagtattgtcactcagcaatctatctgttgaagacattgatttgatcgaattgaacgaagcatttgcttctcaaacgattgcatctattaaagaagtaggtctagatatatcacgtacgaatgtgaatggtggcgctattgctttaggtcatccattaggtgctacaggcgcaatgttaaccgcgcgtttacttaatgaaatgggtagacgtcccgatagccgttacggcatggttacgatgtgtattggtgtcggcatgggtgcagctgctatatttgaatatgtgcgttag

SEQ ID NO: 100992 - protein, 394 aa, Staphylococcus aureus subsp. aureus NCTC 8325
MQEAYIVAYGRSAAAKAKQGALFHERPDDVAAKVLQGVLKRIDGKFNKNMIEDVIVGTAFPEGLQGQNIARTIALRAGLSDTVPGQTVNRYCSSGLQTIAIAANQIMAGQGDILVAGGVELMSAVPMGGNEPTNNPTLQYDDIGASYPMGLTAENVASQFDVSREDQDAYAVRSHQRAYDAQRDGRFKDEIIPIQVNSVEYTNAGPKVHTNIFDQDEFIRPDTTMEALAKLRTVFKADGTMTAGTSAPLSDGAGFVVLMSGDKVKELGVTPIARFVGFKAVGVDPKIMGIGPAYAIPEVLSLSNLSVEDIDLIELNEAFASQTIASIKEVGLDISRTNVNGGAIALGHPLGATGAMLTARLLNEMGRRPDSRYGMVTMCIGVGMGAAAIFEYVR

SEQ ID NO: 100993 - DNA, 1179 bp, Desulfitobacterium hafniense Y51; identical to SEQ ID NO: 92884
  CDS (1)..(1179): transl_table=11

SEQ ID NO: 100994 - protein, 392 aa, Desulfitobacterium hafniense Y51; identical to SEQ ID NO: 92885

SEQ ID NO: 100995 - DNA, 1176 bp, Saccharophagus degradans 2-40
  CDS (1)..(1176): transl_table=11
atgagcttgcaacctagagatgtggtgattgtcgattacgctcgcactcccatgggccgttctaaaaatggctgttacagaaatgttcgcgcagatgatttaagtgcagatcttattactggtttgctcgctcgcaatgcggcgctcgacccagctcaaattgacgatatgatttggggctgtgtaatgcagcgcggcgagcaagggtttaacgttgctcgcaatattttactgcgtgcaggtttgccccacactgtaccggcgcaaaccgtaaaccgcctttgcggttcttctatgtctgcattgcacacagcggctgccaatattatggctgggctgggcgatgtgtacttggtgggcggtgttgagcacatggggcatatcgatatgaaccagcatgtcgatcccaaccccgcactcggtcattcagtagcgcaagcagctggctctatggggttaacggcagagtatctttcgttgctgcacggtattacccgtgaagcgatggatgagtttggggcgcgatcacacagaaaagcggctgaagccactgagcagggtaagttcgccagagagattatcgcgcgcatcggccacgacgaaaccggtgcccctacgttaatcaagcacgacgagacaattcggccagatactaccgttgaggctttatctaagctcaagcctgcttttaaccccaagggcggaacggttacggccggtacgtcatcgcaaataactgatggcgcctcatccatgctggttatgtctgcggctaaggcggctgagttgggtttaacgcctatagctaaaattcgcagcatggcgctggcgggggttgatccttcaattatggggtacggcccagtgcctgccacgcaaaaggcactggcaaacgctggcttatctattgaggatatagatgtggtagagcttaacgaagcctttgctgcgcaggcgttacccgtacttaaagaccttaacttgctggatgctatggaagacaaggtgaacttatatggtggtgcaattgcgctggggcatccatttggttgctcgggtacccgtattaccggtacgctgctttcagttatgcaagataaagacgccacgctaggggtgtctactatgtgtataggtttagggcagggtataaccaccattgttgagcgtgtttaa

SEQ ID NO: 100996 - protein, 391 aa, Saccharophagus degradans 2-40
MSLQPRDVVIVDYARTPMGRSKNGCYRNVRADDLSADLITGLLARNAALDPAQIDDMIWGCVMQRGEQGFNVARNILLRAGLPHTVPAQTVNRLCGSSMSALHTAAANIMAGLGDVYLVGGVEHMGHIDMNQHVDPNPALGHSVAQAAGSMGLTAEYLSLLHGITREAMDEFGARSHRKAAEATEQGKFAREIIARIGHDETGAPTLIKHDETIRPDTTVEALSKLKPAFNPKGGTVTAGTSSQITDGASSMLVMSAAKAAELGLTPIAKIRSMALAGVDPSIMGYGPVPATQKALANAGLSIEDIDVVELNEAFAAQALPVLKDLNLLDAMEDKVNLYGGAIALGHPFGCSGTRITGTLLSVMQDKDATLGVSTMCIGLGQGITTIVERV

SEQ ID NO: 100997 - DNA, 1200 bp, Burkholderia xenovorans LB400
  CDS (1)..(1200): transl_table=11
atggcaaagcaattgcaagacgcatacatcgtcgccgcgagccgcacgccgatcggcaaggcgccgcgcgggatgttcaggaacacgcgcccggacgaactgctggtccacgcgatcaggtcggctgtggcgcaagtgcccggcctcgacaccaaggtgatcgaagacgcgatcatcggctgcgcgattccggaagcggaacaaggcctgaacgtggcgcgcatgggcgcgctgctggccggcctgccgaataccgtcggcggtgtgacggtgaaccgcttctgcgcgtcgggcctgacggcgctggcgatggcggcggaccgcatccgcgtcggcgagtcggacgcaatgatcgcgggcggctgcgaatccatgagcatggtgccgatgatgggcaacaagccttccatgtcgccgcatatcttcgatcgcaatgaagatatcggcatcgcgtacggcatgggcctcacggccgagaaggtcgccgagcgctggaagatcagccgcgaagcgcaggacgcgttctcggtcgaatcgcaccgccgcgccattgccgcgcagcaagccggcgagttcaacgacgaaatcgccgcctacacgatcaccgaacgcttccccgatctcgccaccggcgaagtccgcgtgaagacccgcgaagtctcgctcgacgaaggtccgcgcgcggaaacctcgctcgaaggtctcgccaaactgcgcgcagtgttcgcgaacaagggttcggtgacggcgggcaacagctcgcagacctcggacggcgcgggcgcgctgatcgtggtgtcggaaaagatgctgaaggaattcaacctgacgccgctcgcgcgtttcgtcagcttcgccgtgcgcggcgtgccgccggagatcatgggcatcggtccgaaggaagcgattccggccgcattgaaggccgccggcctgaagatcgacgacctggactggatcgagctgaacgaagcgttcgccgcgcaatcgctggcggtgattcaggacctcggtctcgatccggcgaagatcaacccgctcggcggcgcgatcgcactcggccacccgctgggcgcaacgggcgcgattcgtgcgtcgaccgtggtgcatggtttgcgccgccgtaactacaagtacggcatggtgacgatgtgcgtcggcacgggcatgggcgcggcgggcatcatcgagcgcctgtga

SEQ ID NO: 100998 - protein, 399 aa, Burkholderia xenovorans LB400
MAKQLQDAYIVAASRTPIGKAPRGMFRNTRPDELLVHAIRSAVAQVPGLDTKVIEDAIIGCAIPEAEQGLNVARMGALLAGLPNTVGGVTVNRFCASGLTALAMAADRIRVGESDAMIAGGCESMSMVPMMGNKPSMSPHIFDRNEDIGIAYGMGLTAEKVAERWKISREAQDAFSVESHRRAIAAQQAGEFNDEIAAYTITERFPDLATGEVRVKTREVSLDEGPRAETSLEGLAKLRAVFANKGSVTAGNSSQTSDGAGALIVVSEKMLKEFNLTPLARFVSFAVRGVPPEIMGIGPKEAIPAALKAAGLKIDDLDWIELNEAFAAQSLAVIQDLGLDPAKINPLGGAIALGHPLGATGAIRASTVVHGLRRRNYKYGMVTMCVGTGMGAAGIIERL

SEQ ID NO: 100999 - DNA, 1203 bp, Ralstonia metallidurans CH34
  CDS (1)..(1203): transl_table=11
atgagcgaagcattcatcgttgacgccatccgtacccccatcggccgttacgccggcagcctgtccggcgtgcgcgcggacgacctgggcgccgtgcccctgaaggccctgatggcccgtaacgccagcgtggactggtcggcgatcgacgacgtgatctttggcaacgccaaccaggccggtgaagacaaccgcaacgttgcgcgcatgtcggccctgctggctggcctgccggacgccgttcccggcgcgacgatcaaccgcctgtgcggttcgggcatggacgccaccggcaccgccgcccgcgccatcaaggctggtgaagccaacctgatgatttccggcggcgtggaaagcatgagccgcgccccgttcgtcatgggcaaggccacctcggccttctcgcgtgacgcgcagatcttcgacacgaccatcggctggcgtttcatcaacccggcgatgcgcgccgcctacggcgtggactcgatgcccgagaccgccgagaacgtggcgaccgactacaagatcggccgtgaagaccaggatctgatggcgctgcgcagccaggagaaggcatcgcgcgcgcaagccgacggcacgctggcgcaggaaatcaccccggtgacgattccgcagaagaagggcgacgccatcgtggtcgaccgcgacgaacatccgcgtgccacgagcatggaagcgctggccaagctgcgcggcgtggtgcgtccggacggcacggtgaccgccggtaacgcctcgggcgtgaacgatggcgcgtgcgcgctgctgctggccagcgaagcgggcctgaagcagcacggcctgaagccgcgtgcccgcatcgttggcatggcaacggctggtgtggcaccgcgcgtgatgggtatcggcccggcgccggccacgcagaagctgatgaagcaactgggcatgacgctggaccagatcgacgtgatcgaactgaacgaagcgttcgccgcgcaaggcctggccgtactgcgtcaactgggcatcgccgacgacgacaagcgtgtgaacccgaacggcggcgccatcgcactgggccacccgctcggcatgagcggcgcgcgtctggtgacgaccgcgatgtaccagctggagcgcactggtggccgcttcgcgctgtgcacgatgtgcatcggcgtgggccagggcatcgccatggtgatcgagcgcgtttga

SEQ ID NO: 101000 - protein, 400 aa, Ralstonia metallidurans CH34
MSEAFIVDAIRTPIGRYAGSLSGVRADDLGAVPLKALMARNASVDWSAIDDVIFGNANQAGEDNRNVARMSALLAGLPDAVPGATINRLCGSGMDATGTAARAIKAGEANLMISGGVESMSRAPFVMGKATSAFSRDAQIFDTTIGWRFINPAMRAAYGVDSMPETAENVATDYKIGREDQDLMALRSQEKASRAQADGTLAQEITPVTIPQKKGDAIVVDRDEHPRATSMEALAKLRGVVRPDGTVTAGNASGVNDGACALLLASEAGLKQHGLKPRARIVGMATAGVAPRVMGIGPAPATQKLMKQLGMTLDQIDVIELNEAFAAQGLAVLRQLGIADDDKRVNPNGGAIALGHPLGMSGARLVTTAMYQLERTGGRFALCTMCIGVGQGIAMVIERV

SEQ ID NO: 101001 - DNA, 1176 bp, Acidobacteria bacterium Ellin345
  CDS (1)..(1176): transl_table=11
atgcgcgaagtagtgattgtatcggccgtccggacgccggtcggcaaggcttacaaagggacgctgcgggcaacgcggccggatgatctgggcgcggtggcgatcaagggcgctctggagcgggtaccgcaactcgacgtgcgcgagattgaagacgtgatcctgggctgcgccatgccggaggcggaacagggcatgaacgtggcgcgcatcgcttccctgcgcgcgggattgccggtcgagtgctcggcgatgacgattaatcgtttctgcgcgtcgggactgcaggcgattgcgctggcggcggagcggattcgcggtggcggagcggaagtgatcgtcgcaggcggtaccgagagcatgacgatggtgccgatgggcggacataagttcacggccaatccgtacctggtggagacgtatccggattcgtatctgtcgatgggcttgacggcggagcggctggcggtgcgccacgggatcacgcgcgagatggcggacgagttctcgtacaacagccacaagaaagccattgccgcgatcgaggctgggcgcttcgaggatgagatcgttccggtgccggtgacgttcgtgacgccgaacggatcgaagccgaagaagcaggagatattgttcaaggtggacgaagggccgagggccgacacgacgttggaagctctggcgggattgaagccggcgttccacgtgaagggcacggtgacggcgggcaattcgtcgcagatgtcggacggggcggcggctgcggtggtgatgtcggcggagcacgcgaagaaattggggatcaagccgctcgcgaggtttgtggcgttcgcaaccgcgggttacaagccggaagagatgggactggggccggtgttcgcgattccgaaggcgctgaagatcgccgggctgaagctcgaggacattgatgtgttcgagttgaacgaggcgttcgcggcgcaggcgttgtcggtgatcaaggaagcggggattgatatcaataaggtcaatccaaatggcggcgcggtggcgttggggcatccgctgggatgcacgggagctaagctgacggcgacgatcattcgtgaattgaagcggcgcaatgggaagtacgggattgtgacgatgtgcgtcggcggaggtatgggtgctgcggggatttttgaaaatctttaa

SEQ ID NO: 101002 - protein, 391 aa, Acidobacteria bacterium Ellin345
MREVVIVSAVRTPVGKAYKGTLRATRPDDLGAVAIKGALERVPQLDVREIEDVILGCAMPEAEQGMNVARIASLRAGLPVECSAMTINRFCASGLQAIALAAERIRGGGAEVIVAGGTESMTMVPMGGHKFTANPYLVETYPDSYLSMGLTAERLAVRHGITREMADEFSYNSHKKAIAAIEAGRFEDEIVPVPVTFVTPNGSKPKKQEILFKVDEGPRADTTLEALAGLKPAFHVKGTVTAGNSSQMSDGAAAAVVMSAEHAKKLGIKPLARFVAFATAGYKPEEMGLGPVFAIPKALKIAGLKLEDIDVFELNEAFAAQALSVIKEAGIDINKVNPNGGAVALGHPLGCTGAKLTATIIRELKRRNGKYGIVTMCVGGGMGAAGIFENL

SEQ ID NO: 101003 - DNA, 1194 bp, Acidobacteria bacterium Ellin345
  CDS (1)..(1194): transl_table=11
atgaaagtcgcgttcctctgtgacgcagtgcgcacgtccatcggccgcttcggtggcgccctcgccaacgtgcgtcccgacgacctcgctgccatcaccatccgcgcgttgatggcgcgcaacacaggtgccgactggtctcgtctcgacgaagtttacttgggctgcgccaatcaagccggtgaagacagtcgcaatgtcgcgcgcatggctctgcttcttgcgggattacctgtcgccgttcccggcaccaccgtcaatcgcctctgcgcctccggtatggacgccatcggctccgctgctcgcgccatcgcctccggcgaaatcgaattcgccattgccggtggcgtggaatccatgtcgcgcgctccgtttgttatgcccaaggccgacgccgccttctcgcgcaaggccgaaatctacgacacgacgatcggctggcgtttcgtccatccgaggatgaaagagctttacggcgctgactccatgccggagaccggcgagaatgttgctgccgatttcggtatctctcgcgccgatcaggacgctttcgcgcttcgtagccagctacgcgccgcccgcgccagagccgccggattcttcgccgaagagatcgtcgccgttgcaaccggcaaaaatgcggaagtcaccgaagacgagcaccctcgtcccgacaccactctcgaagccctcgcgaggctcaagcctatcgtccgccctgatggaacgatcaccgccggcaatgcgtccggcgtgaacgacggcgccgccaccatggtcgtcgcctccgaagaagcagtgaagcagcacgatctcactcccaaagctcgcgtactcggcatggccaccgccggagttcctccgcgcgtcatgggcatcggccccgtccccgccgtgcaaaagctcttgcgtcgactcaacctcaaagtcaaagacttcgacgtcatcgaactcaatgaagccttcgccagccagtcgctcgcatgcctgcgccaactcggcatccctgacgacgccgacttcgtgaatcctaatggtggcgcgatcgcgttaggtcatccccttggaatgagcggtgctcgcctcgtgctcaccgcctcacatcaactcgagaaaacaggtgccaatcgcgctcttgccaccatgtgtgtcggcgtggggcagggagttgctttggcgatcgaacgcgtttaa

SEQ ID NO: 101004 - protein, 397 aa, Acidobacteria bacterium Ellin345
MKVAFLCDAVRTSIGRFGGALANVRPDDLAAITIRALMARNTGADWSRLDEVYLGCANQAGEDSRNVARMALLLAGLPVAVPGTTVNRLCASGMDAIGSAARAIASGEIEFAIAGGVESMSRAPFVMPKADAAFSRKAEIYDTTIGWRFVHPRMKELYGADSMPETGENVAADFGISRADQDAFALRSQLRAARARAAGFFAEEIVAVATGKNAEVTEDEHPRPDTTLEALARLKPIVRPDGTITAGNASGVNDGAATMVVASEEAVKQHDLTPKARVLGMATAGVPPRVMGIGPVPAVQKLLRRLNLKVKDFDVIELNEAFASQSLACLRQLGIPDDADFVNPNGGAIALGHPLGMSGARLVLTASHQLEKTGANRALATMCVGVGQGVALAIERV

SEQ ID NO: 101005 - DNA, 1176 bp, Silicibacter sp. TM1040
  CDS (1)..(1176): transl_table=11
atgaccaacgtagtaattgcatccgcagcccgcaccgctgtcggcagctttggcggcgccttcgccaccacaccggcccatgatctgggcgccgctgtgctcgaggcggttgtggcccgtgcaggcatcgacaaatccgaggtctcggaaaccatcctgggccaggtgctgaccgcggcacagggccagaaccccgcccggcaggcccatatcaatgcaggtctgcccaaagaatccgccgcctggggcatcaaccaggtctgtggctccggtctgcgcgctgttgcgcttggcgcgcagcacatccaactgggcgacgcctccatcgttgccgcaggtggtcaggaaaacatgactctcagcccccatgctgccaacctgcgtgccggtcacaagatgggtgacatgagctacatcgacacgatgatccgcgacgggctgtgggacgcgttcaacggctatcacatgggtcagaccgccgagaacgtggcagagcaatggcagatctcgcgcgacatgcaggacgagtttgcggttgcctctcaaaacaaagccgaagccgcccagaaagcgggcaagtttgccgatgagatcacgccctttgtggtgaagcatcgcaagggcgacatcaccgtggacgcggatgaatacatccgtcacggcgcaaccattgaggcgatgcagaaactgcgccccgccttcacgcgcgatggctcggtcaccgcggcgaacgcgtccggtctgaatgatggcgcggccgcgaccctcttgatgagcgcggatgaagccgaaaaacgcggaatcgagccgcttgcccgcatcgcgtcctacgcaaccgccggccttgatccgtcgatcatgggtgttggcccggtctttgcctcccgcaaggcactcgacaaggcgggttggagcgtggacgatctggatctggtcgaagccaacgaggcctttgccgcgcaggcctgtgcagtgaacaaggacatgggctggaaccctgaaatcgtgaacgtcaacggcggcgcgattgcaatcggccacccgattggcgcgtctgggtgccgcgttctgaacaccctgctgtttgaaatgaaacgccgtggcgccaagaaaggcctcgcgacactctgcatcggtgggggcatgggcgtcgctatgtgcgtagagcgcccgtaa

SEQ ID NO: 101006 - protein, 391 aa, Silicibacter sp. TM1040
MTNVVIASAARTAVGSFGGAFATTPAHDLGAAVLEAVVARAGIDKSEVSETILGQVLTAAQGQNPARQAHINAGLPKESAAWGINQVCGSGLRAVALGAQHIQLGDASIVAAGGQENMTLSPHAANLRAGHKMGDMSYIDTMIRDGLWDAFNGYHMGQTAENVAEQWQISRDMQDEFAVASQNKAEAAQKAGKFADEITPFVVKHRKGDITVDADEYIRHGATIEAMQKLRPAFTRDGSVTAANASGLNDGAAATLLMSADEAEKRGIEPLARIASYATAGLDPSIMGVGPVFASRKALDKAGWSVDDLDLVEANEAFAAQACAVNKDMGWNPEIVNVNGGAIAIGHPIGASGCRVLNTLLFEMKRRGAKKGLATLCIGGGMGVAMCVERP

SEQ ID NO: 101007 - DNA, 1200 bp, Myxococcus xanthus DK 1622
  CDS (1)..(1200): transl_table=11
gtgccccccgggcaaggagacatcaaaatggctggtcgagtcgtgattgccagcgcggtccgcacgcccttcacccgcgcgcacaagggagagttcaaggacacccggccggataccctggccgctgtcgccatcaaggaggccgttgcccaggtcccgggcctgaagccggaggacatcggtgacgtcgtcctgggctgtgccatgccggaggccgagcagggcatgaacgtggcccgcgtggccacgctgctggcgggcctgcccgtcacggtgcccgcgatgaccatcaaccggttctgttcctccggttcgcaggccatcgcccaggtggcccaggccatccaggcggggatgtacgacgtgggcatcggtggtggcaccgagtccatgacgatggtccccatgggcggcaacaaggcgagcgccaaccccgaggccatggagcgcctgccggagatctacacctccatgggcgccacggcggagaacatcgcgtcgcgctacggcgtgtcgcgtgaggactcggacaagttcgccgccgagagccagcgccgtgccgccaccgcgcgcgagcagggcaagttcaaggaggagatcgtccccgtcaccacgacgtactacgacgacgacggcgtggcgcagaacgtcaccgtcacggtggacaccatcctccgcccggagaccacgcaggagggcctggccaagctgcgcccggccttcaaccccaagggcgtggtgacggctggtaacgcgtcgccgctgacggacggcgccgccgccgcggtggtgatgagtgaggccaaggcgaaggagctgggcgtcaagccgctgggctacttcatcgacgccgcggtggcgggcgtgcccccggaaatcatgggcatcggcccggttcccgcggtccgcaagctgctggagaagaacaagctcaaggtcgaggacatcgacgtcttcgagctgaacgaggccttcggggcgcaggcgctgtactgcgtgcgcgagctgggcatccccgccgacaaggtgaaccccaacggcggcgccatcgccctgggtcacccgctgggcgtctctggcgcgcgcatggtggccaccatcctgcgcgagctgaagcgccgcaacggccgctacggcgtcgtctccatgtgcatcggcggcggcatgggcttcgccgccctcatcgaggcgcccaagtag

SEQ ID NO: 101008 - protein, 399 aa, Myxococcus xanthus DK 1622
MPPGQGDIKMAGRVVIASAVRTPFTRAHKGEFKDTRPDTLAAVAIKEAVAQVPGLKPEDIGDVVLGCAMPEAEQGMNVARVATLLAGLPVTVPAMTINRFCSSGSQAIAQVAQAIQAGMYDVGIGGGTESMTMVPMGGNKASANPEAMERLPEIYTSMGATAENIASRYGVSREDSDKFAAESQRRAATAREQGKFKEEIVPVTTTYYDDDGVAQNVTVTVDTILRPETTQEGLAKLRPAFNPKGVVTAGNASPLTDGAAAAVVMSEAKAKELGVKPLGYFIDAAVAGVPPEIMGIGPVPAVRKLLEKNKLKVEDIDVFELNEAFGAQALYCVRELGIPADKVNPNGGAIALGHPLGVSGARMVATILRELKRRNGRYGVVSMCIGGGMGFAALIEAPK

SEQ ID NO: 101009 - DNA, 1158 bp, Mycobacterium sp. MCS
  CDS (1)..(1158): transl_table=11
atggctgaagccgtcatcgtcgaggctgtacggtcgcccgtcggcaagcgcaacggcggtctgtcgggggtgcacccggccgaactgtccgctcaggtgctcaacggcctggtggagcgcgccggggtggaccccgcgctggtcgacgatgtcatctggggctgcgtcatgcaggccggtgagcaggcgctcgacatcgcccgcaccgcggtgctgtccgcaggctggcccgagaccgtccccggggtgaccgtggaccgccagtgcggttccagccagcagtcgctgcacttcgccgtcgccggcgtggtggcgggtcactacgacgtggtcgtcgccggcggcgtcgagtcgatgtcgcggaccccgatgggttcctcgctggccaacggcggaaacccgtacggcgagtcgttcaaggcccgctacagccagaccccgaaccagggcgtcggcgccgagatgatcgccgagcagtggggcttcagccgcaccgagctcgacgagttctccctgcgttcgcatgagaaggccgccgccgcacaggattccggtgccttcaaggaccagatcgtcggcatcgagaccaaggacgcggacggcaacgacaccgtcgtgctcgaggacggcggtatccgccgcggcggcaccgtcgagtcgatggccaagatcaagcccgcgttccgtgaggacggcgtgatccacgccggcaactccagccagatctccgacggttcggccgcgctgctgatcatgtcggcggataaggccaaggacctcggcctcaagccattggccaaggtgcacaccgcggtgctcgccggcgccgacccggtcatcatgctgaccgcgccgatcccggccacccagaaggcgctgaagaagtcgggtctgagcctcgaccagatcggcgcgttcgaggtcaacgaggccttcgcgccggtgccgatggcctggctgaaggacatcggggccgacgagtccaagctcaaccccaacggaggcgcgatcgcgctcggccacccgctcggtggctccggtgcgcgaatcctgacgacgctgctgtaccacatgcgcgacaacaacattcagtacggcctgcagacgatgtgcgagggcggcggccaggccaacgcgaccatcctcgaactgctgtga

SEQ ID NO: 101010 - protein, 385 aa, Mycobacterium sp. MCS
MAEAVIVEAVRSPVGKRNGGLSGVHPAELSAQVLNGLVERAGVDPALVDDVIWGCVMQAGEQALDIARTAVLSAGWPETVPGVTVDRQCGSSQQSLHFAVAGVVAGHYDVVVAGGVESMSRTPMGSSLANGGNPYGESFKARYSQTPNQGVGAEMIAEQWGFSRTELDEFSLRSHEKAAAAQDSGAFKDQIVGIETKDADGNDTVVLEDGGIRRGGTVESMAKIKPAFREDGVIHAGNSSQISDGSAALLIMSADKAKDLGLKPLAKVHTAVLAGADPVIMLTAPIPATQKALKKSGLSLDQIGAFEVNEAFAPVPMAWLKDIGADESKLNPNGGAIALGHPLGGSGARILTTLLYHMRDNNIQYGLQTMCEGGGQANATILELL

SEQ ID NO: 101011 - DNA, 1179 bp, Rubrobacter xylanophilus DSM 9941
  CDS (1)..(1179): transl_table=11
atgaaggaagcggtcatcgtctcgggggcccggaccgccgtggggcgggccccccgcggaaccctgcgcgggatgcacccggtggacctcgccgccgccgccatcggcgaggccgtgcgccgggccgagggcctggagagcgaggagatagaggacgtcatcctggggtgcgctatgcccgaggggacccagggctacaacatcgcccggctcgcctccctgcgcgccgggctcccggagagcgtcccggcgcagacggtcaaccggttctgctcctccgggctgcagaccatcgctatcgccgccgagcggatcatggtggggcacgccacggcggtgctggccggaggggtggagcacatgtcctccacgctggagttccccaccttcgcgcccaacccggcgctggtggagaccaaccccgccgtctacatggggatgggcttcaccgccgaggaggtggcccgccggtacaaggtctcgcgggaggaccaggacgagttcgccctgcgcagccacacgctggcgaagagggcggtcgagagcgggctgttcgacgaggagatcgtcccgctcgacgtggagtacgactacctggacgaggagggcaacccgcagcgcttcaagacggtcttccggcgcgacgaggggccgagggacacctccatggaggcgctggccaagctcaagccggccttccagcaggggggcacggtgaccgcgggcaacgcctcccagcgcagcgacggcgcggccgcggtggtggtgatggagcgggaggaggccgagcggcgcggcctcgagcccctcgcccgctttgtcgggttcgcgctcgggggggtgccgccggagatcatgggcatcggaccggcggtggccatcccccgggcgctggagcaggccgggctgaggctggaggacatagacctcatcgagttcaacgaggcgttcgcggcgcaggctttggcggtgatccgggaggtagggctcgacctggagaggaccaacgtgaacggcggcgcgatcgcgctcggccaccccatgggcgccacgggcaccaagctcaccgtccagctcatccacgagatgaagcggcgcggctcgcgctacggcatggtcacgatgtgcatcggcggcgggatgggggcggccgggatcttcgagaacctgcagggctga

SEQ ID NO: 101012 - protein, 392 aa, Rubrobacter xylanophilus DSM 9941
MKEAVIVSGARTAVGRAPRGTLRGMHPVDLAAAAIGEAVRRAEGLESEEIEDVILGCAMPEGTQGYNIARLASLRAGLPESVPAQTVNRFCSSGLQTIAIAAERIMVGHATAVLAGGVEHMSSTLEFPTFAPNPALVETNPAVYMGMGFTAEEVARRYKVSREDQDEFALRSHTLAKRAVESGLFDEEIVPLDVEYDYLDEEGNPQRFKTVFRRDEGPRDTSMEALAKLKPAFQQGGTVTAGNASQRSDGAAAVVVMEREEAERRGLEPLARFVGFALGGVPPEIMGIGPAVAIPRALEQAGLRLEDIDLIEFNEAFAAQALAVIREVGLDLERTNVNGGAIALGHPMGATGTKLTVQLIHEMKRRGSRYGMVTMCIGGGMGAAGIFENLQG

SEQ ID NO: 101013 - DNA, 1206 bp, Mesorhizobium sp. BNC1
  CDS (1)..(1206): transl_table=11
atggccgaagcgttcatctgcgattatgtccgcacaccgataggccgcttcggcggtgttctttcatcggtgcgcgcggatgaccttgccgccatccccttaaaggcgcttgtcgagcgcaacaaggaagtcgattgggcagcggtcgacgacgtgatctatggctgcgccaaccaggccggcgaggacaaccgcaacgtcgcccgaatggctgtgctgctttcaggctttcccgttgaggttcctggttctaccatcaaccggctctgcggctccggcatggacgcggttgccaccgccgctcgtgcaatcaaggcaggcgaggccgagctgatgattgcggggggcgtcgaatccatgagccgcgcacccttcgtgctcccgaaggcggacacggctttctcccgaaatgccgagatctatgacaccaccatcggctggcgcttcgtcaatccgttgatgaagaagcaatatggcgtcgattccatgcccgagaccggggagaacgtcgccgcagacttcaaggtaagccgcgcagaccaggatgcattcgccgtccgcagccaggacaaggccgttgcggcgcaggagaatggccgcctggcgaaggaaatcgtgcccgtcaccattccccagcgcaaggccgatcccatcattgtcgacaaggacgagcatccgcgtcctggcaccacggtggaaaagctcggcaagcttcccactccgttccgcgagaacggctccgtgacggccggcaatgcgtccggcgtcaatgacggtgccgcggccctcatcattgcatcggaagcggcagccaggaaatacggcctcacgcccatcgcccgcgtgctgggcggcgccacggccggcgttcccccgcgcatcatgggcatcggtccggcaccggcatcgaagaagctctgcgcccgcctcggtttgaagccgtccgatttcgatgttgtggagctaaacgaggccttcgcttcgcagggcatcgccgtgctgcgcgaacttggcattccggaagacgcggcgcatgtgaaccccaatggcggcgccatcgccctcggccatccactgggcatgtccggcgcgcgcatctccggcacggcggcgctggaactcagggagcgcggcgcaaggttggcgctcgccaccatgtgcatcggagtcggccaagggatcgcgctggcgctggagcgcgtttaa

SEQ ID NO: 101014 - protein, 401 aa, Mesorhizobium sp. BNC1
MAEAFICDYVRTPIGRFGGVLSSVRADDLAAIPLKALVERNKEVDWAAVDDVIYGCANQAGEDNRNVARMAVLLSGFPVEVPGSTINRLCGSGMDAVATAARAIKAGEAELMIAGGVESMSRAPFVLPKADTAFSRNAEIYDTTIGWRFVNPLMKKQYGVDSMPETGENVAADFKVSRADQDAFAVRSQDKAVAAQENGRLAKEIVPVTIPQRKADPIIVDKDEHPRPGTTVEKLGKLPTPFRENGSVTAGNASGVNDGAAALIIASEAAARKYGLTPIARVLGGATAGVPPRIMGIGPAPASKKLCARLGLKPSDFDVVELNEAFASQGIAVLRELGIPEDAAHVNPNGGAIALGHPLGMSGARISGTAALELRERGARLALATMCIGVGQGIALALERV

SEQ ID NO: 101015 - DNA, 1185 bp, Cytophaga hutchinsonii ATCC 33406
  CDS (1)..(1185): transl_table=11
atgaaatcgcaagaagtatatatagtagcagcttatagaagtgccgtaggtaaagcacctcgcggactgttccgtttttatcgtgcagatgatctgggtgcagatgttgttaagcatcttgtagcttcggttcctgcattggataaagaccgcattgatgatgtgatcgttggtaatgctactcccgaagcggaacaaggattgaacattggtagaatgatctccttaatgggattgaatacggtaaaagttccgggcatgacggtgaaccgttattgctcatccgggttggaaaccatcgcgattgcggatgcaaaaattcgtgcgggctacgccgattgtatcattgcaggcggtgtggaaaccatgagtccgatcccattcggcggctggaaaacggttccgaattatgaactgactaaatcacatgctgattactattggggtatgggcttaaccgctgaagctgtagctgcacaatacaatgtatccagagaagatcaggatttgttttcgtacaactcgcatcagaaagctgtagcggctattaaaaacggccacttgcaggatggtattgttccgatcacgatcaaagaaacgtatctggatgaaaaagaaaaaaagaaaataaaagaatatcaagtattggtggatgaaggtccgcgtgcagatacaagcatcgctgccttagcgaaacttcgtccggtatttgcgaacggcggttcggtaacagccggtaactcttcgcaaacatccgatggtgcagcgtttgtattgttgatgtctgagaaaatggtaaaagagttaaatctgaaaccaatcgcccgtttggtatcctacgctgttgctggtgtcgaaccacgcatcatgggtattggtccggtggaagccattccgaaggcattaaagcttgcagacttaaaacaggacgatatcaatctgatcgaattgaacgaagcatttgcagcgcaatcattggctgtgattcgcacgctggggctagacgaatccaagatcaacgtaaacggtggtgctattgcattgggtcatccgctgggttgcaccggcgcgaagttgtctgtacagatcttcaatgagctgaaacgtaccaaccagaaatacggcatggttaccatgtgtgtagggtcgggccagggtgcagcaggtatctttgagatgctttag

SEQ ID NO: 101016 - protein, 394 aa, Cytophaga hutchinsonii ATCC 33406
MKSQEVYIVAAYRSAVGKAPRGLFRFYRADDLGADVVKHLVASVPALDKDRIDDVIVGNATPEAEQGLNIGRMISLMGLNTVKVPGMTVNRYCSSGLETIAIADAKIRAGYADCIIAGGVETMSPIPFGGWKTVPNYELTKSHADYYWGMGLTAEAVAAQYNVSREDQDLFSYNSHQKAVAAIKNGHLQDGIVPITIKETYLDEKEKKKIKEYQVLVDEGPRADTSIAALAKLRPVFANGGSVTAGNSSQTSDGAAFVLLMSEKMVKELNLKPIARLVSYAVAGVEPRIMGIGPVEAIPKALKLADLKQDDINLIELNEAFAAQSLAVIRTLGLDESKINVNGGAIALGHPLGCTGAKLSVQIFNELKRTNQKYGMVTMCVGSGQGAAGIFEML

SEQ ID NO: 101017 - DNA, 1170 bp, Rhodococcus sp. RHA1
  CDS (1)..(1170): transl_table=11
atgagagacgccgtcatcgtcgaggccgtccgcacgccgatcggtaagggtaagccctcgggcgccctgcacggagtgcaccccgtcgaccttctcgcccacagcctgtcgaccctcgtcgaacgcacgggaatcgatcccgcactgatcgacgacgtcatcggcggcaccgtcacccaggtcggggaccagagccagaacatcacccgcagcgcgcttctggccgccggattccccgaatccgtacccggaacgaccgtcgaccggcagtgcggcagcagccagcaggccgtgcacttcgcagcgcagggcgtgatgtcgggtgcctacgacatcgtcgtcgccgccggtgtcgaatcgatgggccgagttccgatggggtccagcagcatcggacgcgaaacgatgggtgtgggcttcgagcgccgctaccccgacggcctcgtcccgcagggcatcagcgccgaactcatcgccgcccggtggggactgtcccgcacccagctcgacgagttcgccctgcgcagccaccagaaggctgcggccgcaacgagtgccgggaacttcgcgaaggaactcgccgtcctgccggagctgagcgtcgacgaggccctccggccggacacgacgctcgacgcgctcgccggcctgcgaccggcgttccgcagcgacttctacgaagagcggttcccccagatcgactggtcgatcaccgcgggcaacagcagtcccctgtccgacggaagtgcggcgctgatgatcaccacgagtgagatcgcgggacgcctgggactgcggccgctggcccggctccacagcttcgccgtcgccggcgacgacccgctgatgatgctcaccgccgtcattcccgcgacacgcaaggtgctgcagcgcagcggactcgacatctccgacatcgatctgttcgaggtcaacgaggcgttcgcgtcggtggtcctggcctgggcggcagacaccggagccgacctggaccgcgtcaacgtgcacggcggtgcgatcgcactcggacatccactgggggccagtggcgcccgcatcatgaccacgctggtgaacgcgatggagcagcgcggggcccggttcgggctgcagaccatgtgcgaggccggcggactcgccaatgccacggtgctcgaacgactcgtgtga

SEQ ID NO: 101018 - protein, 389 aa, Rhodococcus sp. RHA1
MRDAVIVEAVRTPIGKGKPSGALHGVHPVDLLAHSLSTLVERTGIDPALIDDVIGGTVTQVGDQSQNITRSALLAAGFPESVPGTTVDRQCGSSQQAVHFAAQGVMSGAYDIVVAAGVESMGRVPMGSSSIGRETMGVGFERRYPDGLVPQGISAELIAARWGLSRTQLDEFALRSHQKAAAATSAGNFAKELAVLPELSVDEALRPDTTLDALAGLRPAFRSDFYEERFPQIDWSITAGNSSPLSDGSAALMITTSEIAGRLGLRPLARLHSFAVAGDDPLMMLTAVIPATRKVLQRSGLDISDIDLFEVNEAFASVVLAWAADTGADLDRVNVHGGAIALGHPLGASGARIMTTLVNAMEQRGARFGLQTMCEAGGLANATVLERLV

SEQ ID NO: 101019 - DNA, 1164 bp, Shewanella sp. MR-4
  CDS (1)..(1164): transl_table=11
atgaaacaagctgttatcgtagattgcattcgtactcctatgggccgttctaaggctggggtgttccgtaatgtacgtgcagaaacactctctgccgaattaatgaaaggtctattactgcgtaacccgcaattagatcccaatactattgaagacgtgatttggggctgcgtgcagcaaaccctagagcaaggcttcaacattgcccgtaacgcatcattgctggcaggtatcccgaagacggctggcgccgtgacagtcaaccgcctatgcggttcttcaatggaagccatccatcaagccgctcgcgcaatcatgactggcatgggcgacacctttatcattggtggtgttgaacacatgggccacgtgccaatgaaccacggtgtggacttccacccaggtttagccaataacgtcgctaaagcgtcaggcatgatgggcttaaccgctgagatgttaggtaagctgcacggtattacccgtgagcagcaagatgcctttgcagtgcgttcacaccaacgcgctcacgcagcgactgttgaaggccgctttgccaaggaaatctatggcatcgaaggccatgatgctaacggcgcgctgattaaagtgctgcacgacgaagtgattcgtccagaaacctcaatggaatcattagcggcgctgcgtccagtattcgaccctgcaaacggtacagtgactgccggtacctcttcagcattatctgacggcgcttcggcgatgttagtcatggaagagtctaaagcgcgcgctttaggtctaccaatccgtgcccgtatccgctcaatggccgttgcaggttgtgacgcggcaatcatgggttacggtccagtacctgctactcaaaaagcactggctcgcgcaggcatcacagtcaatgatttagatgttatcgaactgaacgaagcctttgccgcgcaatctttaccctgcgtgaaagatttaggcctgttggatgtggtcgatgagaagattaacctcaacggtggtgctatcgcgcttggccatccactgggttgctctggtgcgcgtatttcaacgacgctgatcaacctgatggaacacaaagatgcgaccttaggtttagcgactatgtgtatcggtttaggccaaggtattgcgaccgttttcgaacgcgtttaa

SEQ ID NO: 101020 - protein, 387 aa, Shewanella sp. MR-4
MKQAVIVDCIRTPMGRSKAGVFRNVRAETLSAELMKGLLLRNPQLDPNTIEDVIWGCVQQTLEQGFNIARNASLLAGIPKTAGAVTVNRLCGSSMEAIHQAARAIMTGMGDTFIIGGVEHMGHVPMNHGVDFHPGLANNVAKASGMMGLTAEMLGKLHGITREQQDAFAVRSHQRAHAATVEGRFAKEIYGIEGHDANGALIKVLHDEVIRPETSMESLAALRPVFDPANGTVTAGTSSALSDGASAMLVMEESKARALGLPIRARIRSMAVAGCDAAIMGYGPVPATQKALARAGITVNDLDVIELNEAFAAQSLPCVKDLGLLDVVDEKINLNGGAIALGHPLGCSGARISTTLINLMEHKDATLGLATMCIGLGQGIATVFERV

SEQ ID NO: 101021 - DNA, 1164 bp, Shewanella sp. MR-7
  CDS (1)..(1164): transl_table=11
atgaaacaagctgttatcgtagattgcattcgtactcctatgggccgttctaaggctggggtgttccgtaatgtacgtgcagaaacactctctgccgaattaatgaaaggtctattactgcgtaacccgcaattagatcccaatgctattgaagacgtgatttggggctgcgtgcagcaaaccctagagcaaggcttcaacattgcccgtaatgcatcattgctggctggtattccaaagacggctggcgcagtgacagtcaaccgcctatgcggttcttcaatggaagccatccaccaagccgcacgcgcaatcatgactggcatgggcgatacctttattattggtggtgttgaacatatgggccacgtgccaatgaaccatggtgttgacttccacccaggtttggccaataacgtcgccaaagcgtctggcatgatgggcttaaccgctgagatgttgggtaagcttcacggcatcagccgtgagcagcaagatgcctttgcagtgcgttcacaccaacgcgctcacgctgccacagttgaaggccgctttgccaaggaaatctatgccatcgaaggccatgatgctaacggcgcgctgattaaagtgctgcacgacgaagtgattcgtccagaaacctcaatggaatcattagcggcgctgcgcccagtattcgacccagcaaacggtacagtgactgccggtacctcttcagcattatctgacggcgcttcggctatgttagtcatggaagagtctaaagcacgcgctttaggtctaccaatccgtgcccgtatccgctcaatggcggttgcaggttgtgacgcggcaatcatgggttacggtccagtacctgctacgcaaaaagctctggctcgcgcaggcatcacagttaatgatttggatgttatcgaactgaacgaagcctttgccgcgcaatctttaccctgcgtgaaagatttaggcctgttggatgtggtcgatgagaagattaacctcaacggtggtgctatcgcacttggccatccactgggttgctctggtgcgcgtatttcgacgacgctgatcaacctgatggagcacaaagatgcgaccttaggtttagccactatgtgtatcggtttaggccaaggtattgcgaccgttttcgaacgcgtttaa

SEQ ID NO: 101022 - protein, 387 aa, Shewanella sp. MR-7
MKQAVIVDCIRTPMGRSKAGVFRNVRAETLSAELMKGLLLRNPQLDPNAIEDVIWGCVQQTLEQGFNIARNASLLAGIPKTAGAVTVNRLCGSSMEAIHQAARAIMTGMGDTFIIGGVEHMGHVPMNHGVDFHPGLANNVAKASGMMGLTAEMLGKLHGISREQQDAFAVRSHQRAHAATVEGRFAKEIYAIEGHDANGALIKVLHDEVIRPETSMESLAALRPVFDPANGTVTAGTSSALSDGASAMLVMEESKARALGLPIRARIRSMAVAGCDAAIMGYGPVPATQKALARAGITVNDLDVIELNEAFAAQSLPCVKDLGLLDVVDEKINLNGGAIALGHPLGCSGARISTTLINLMEHKDATLGLATMCIGLGQGIATVFERV

SEQ ID NO: 101023 - DNA, 1191 bp, Alkalilimnicola ehrlichei MLHE-1
  CDS (1)..(1191): transl_table=11
atgactgaaaccgtatacatcgtcgccgcccagcgcaccccggtgggcaaggccccgcgcggcgccttccgccacacccgcccggacgatctgctggcccacgtgatccgcggcgccgtggaccggtgcccggggctggatccggccgagatcgccgacgtgatcgtcggctgcgccatgcccgagggcagccaggggctgaacgtggcccgcatcggtgccctgctggccgggctgccggaccgggtgcccggttacaccgtcaaccgcttttgcgcctcggggctgcaggcggtggccctggccgccgaccgcatccgtctgggcgaggccgacgtggtggtggccggtggcaccgagtccatgagccaagtgcccatgatgggccacaagccacagttcaaccccgccctgttccaggacgacccgcatcgggccatcgcctacggcatgggtatcaccgccgagaaggtggccgagcgctggggtgtggggcgtgaggcgcaggacgccttcgccctgcgcagccaccagcgggcggtggccgccaccgaggcggggcacttccgcgacgagatcctgccctacaccgtgcgcgagtcggtgctggacccgcaggggggcgcggtggccctgcaggagcgggtggtggacagcgatgaggggccgcggccggagaccagcgccgaggcgctggccaagctcaagccgtccttcgcggcccggggcagcgtcaccccggggaacagctcgcagatgagtgacggcgccggcgccgtggtgctgatgagcgagcgccgggtcagcgccctggggttgacgccgctggcgcgcttcgtcggcttctcggtggccggggtggcgccggagatcatgggcatcgggccggtggaggcggtgccgcgggtgttgcgacaggccggcctccgggcggccgacgtggactgggtggagctcaacgaggccttcgccgcccagagccttgcggtgatgcgcgacctggagctggacccggagcggatcaacccgcagggcggggccatcgcactgggccatccgctgggggccaccggtgccatccgtaccgccaccctggtgcacggactgcgccgcaccggcggccgctacggcctggtgaccatgtgcgtgggcaccggcatgggcgcggccggtctgtttgagcggatgtga

SEQ ID NO: 101024 - protein, 396 aa, Alkalilimnicola ehrlichei MLHE-1
MTETVYIVAAQRTPVGKAPRGAFRHTRPDDLLAHVIRGAVDRCPGLDPAEIADVIVGCAMPEGSQGLNVARIGALLAGLPDRVPGYTVNRFCASGLQAVALAADRIRLGEADVVVAGGTESMSQVPMMGHKPQFNPALFQDDPHRAIAYGMGITAEKVAERWGVGREAQDAFALRSHQRAVAATEAGHFRDEILPYTVRESVLDPQGGAVALQERVVDSDEGPRPETSAEALAKLKPSFAARGSVTPGNSSQMSDGAGAVVLMSERRVSALGLTPLARFVGFSVAGVAPEIMGIGPVEAVPRVLRQAGLRAADVDWVELNEAFAAQSLAVMRDLELDPERINPQGGAIALGHPLGATGAIRTATLVHGLRRTGGRYGLVTMCVGTGMGAAGLFERM

SEQ ID NO: 101025 - DNA, 1206 bp, Hyphomonas neptunium ATCC 15444
  CDS (1)..(1206): transl_table=11
atgcccgaagcctatatctacgacgccgtgcgcacgccccgcggcaaaggcaaatcctccggcgcgctgcatgaaatcaccgcgctcagcctcggcacgcaggtgctgcaggccatccgtgaccggaacaatctcgacacctccaaggtcgatgacgtggtcttcggctgcgtctcgcccgtcggagagcagggcggcgacatcgcgcgtatcgccgtgctgaacgccgactatgctgaaaccacagccggggttcaggtcgaccgcttctgcgcgtccggcctggaggcctgcaatatggccgcctcgaaagtcatgaccggcgaggccgacatggccatcggcggcggcgtagaatcgatgagccgcgtgccgatgggcgcagcgggcggggcctggtctgctgatccgcagatcgcgctcaaatcctactttacgccccagggtatcggcgcagacaccatcgccaccaaatacggcttcagccgcgatgatgtggacgccttcgccgtcgagagccagcgccgcgccgcgcaggcctggaaggaaggccgcttcaagaactcggttgttcccgtccgcgaccagatgggcggcatccgcctcgcgcatgacgaattcatgcgcccggataccaccatgcagagccttgccgcgctggacccgtccttcgcgggcatgggcgcgatgggctttgatgaagtcatcaagcagcgttatcccgagcttgagaagatcaaccacgtccaccacgctggcaactcctcgggcatcgtggacggcgcgtctgccgttctcttcggctcgaaggaaatgggcgaggcaatgggcctcaaaccccgcgcccgcgtccgcgccatggcctccatcggctcggagcccggcatcatgctgaccggcccgacctatgtgacccagaaggtgctcaagaaagccggcatgaatgtcggcgacatcgacatctacgaactcaacgaagcgtttgcttcggtcgtcatgctgatgatgaagatgctcgaaatcccgcacgagaaaatgaacgtgaatggcggcgccatcgccatgggtcaccccctcggcgcaaccggtggcatgatccttggtacggtcctggatgagcttgagcgctccgacaaggaaaccggcctcattacgctttgtgttggcgccggcatgggcaccgccacgatcatcgagcgcatctag

SEQ ID NO: 101026 - protein, 401 aa, Hyphomonas neptunium ATCC 15444
MPEAYIYDAVRTPRGKGKSSGALHEITALSLGTQVLQAIRDRNNLDTSKVDDVVFGCVSPVGEQGGDIARIAVLNADYAETTAGVQVDRFCASGLEACNMAASKVMTGEADMAIGGGVESMSRVPMGAAGGAWSADPQIALKSYFTPQGIGADTIATKYGFSRDDVDAFAVESQRRAAQAWKEGRFKNSVVPVRDQMGGIRLAHDEFMRPDTTMQSLAALDPSFAGMGAMGFDEVIKQRYPELEKINHVHHAGNSSGIVDGASAVLFGSKEMGEAMGLKPRARVRAMASIGSEPGIMLTGPTYVTQKVLKKAGMNVGDIDIYELNEAFASVVMLMMKMLEIPHEKMNVNGGAIAMGHPLGATGGMILGTVLDELERSDKETGLITLCVGAGMGTATIIERI

SEQ ID NO: 101027 - DNA, 1212 bp, Hyphomonas neptunium ATCC 15444
  CDS (1)..(1212): transl_table=11
atgcgcgacgttgtgattgtggagccggtgcggacggcggtgggtggctttggcggcgcgttcaagggcgtgcacgcgcatgagctgggcgcggcggtggtcgaagggctgatggcgcgcacgggcctggcgaaagacaaggtcgatgatgtgatcttcgcccagtgctacccttcgatggacgcgcccgcgctgggccgggttgtggcgctcgatgccgggctcccggtagaagtcaccggcatgcagatcgaccggcgctgcggctctggccttcaggcgatcattaacgccacgatgcaggtggccaccggcgcgatggactgcgtgatcgccggcggcgccgagtcgatgagcaatgcgccgttctattccaccaactggcgctggggtctcggtcagggcaacatgacggtgcatgatggcctcgtgaatggccgtctgacagcgggtggcaagaacttccccgtacccggcggcatgctggagacggccgaaaaccttcgccgcgattaccagatcacccgccaggcgcaggacgaattcgccgccgcttctcatgccaaggcggttgccgcgcagaactccggcgtgttcgatgaggaaatcattccgttcacggtcaagggccgcaagggcgataccgtagtgacgaaggacgaacacccccgtccggactcaacccttgaagtgctctccaaactgaaacccatccgccagaaacaggacgctgaagccaccgtcaccgccggcaatgccagcggccagaatgatggcggctcggcttgtctcgtgatgacgcgcgaaatggcagaggccaatggcctcaagccgctcgcccggctggtctcctggtcggtggccggggttggcccggcggtgatgggcatcggccctgttccgtccacggaaaaggcgctggcgcgcgcgggcctgacgctgaaagacattgacctgatcgaactcaacgaagcgtttgccgcgcaggtgcttgcctgcaccaaggcgatgggcttcgccaaggaagactatgcgcgcctcaatgtgcacggatcgggcatttcactgggccatccggtcggcgcgaccggcgggcgtattctggccacgctgctgcgtgaaatggaccgccgcgaggcgcggtacggcgttgaaaccatgtgcattggcggcgggcagggcctggctgcggtgttcgagcgcgttaactga

SEQ ID NO: 101028 - protein, 403 aa, Hyphomonas neptunium ATCC 15444
MRDVVIVEPVRTAVGGFGGAFKGVHAHELGAAVVEGLMARTGLAKDKVDDVIFAQCYPSMDAPALGRVVALDAGLPVEVTGMQIDRRCGSGLQAIINATMQVATGAMDCVIAGGAESMSNAPFYSTNWRWGLGQGNMTVHDGLVNGRLTAGGKNFPVPGGMLETAENLRRDYQITRQAQDEFAAASHAKAVAAQNSGVFDEEIIPFTVKGRKGDTVVTKDEHPRPDSTLEVLSKLKPIRQKQDAEATVTAGNASGQNDGGSACLVMTREMAEANGLKPLARLVSWSVAGVGPAVMGIGPVPSTEKALARAGLTLKDIDLIELNEAFAAQVLACTKAMGFAKEDYARLNVHGSGISLGHPVGATGGRILATLLREMDRREARYGVETMCIGGGQGLAAVFERVN

SEQ ID NO: 101029 - DNA, 1176 bp, Pseudomonas aeruginosa UCBPP-PA14
  CDS (1)..(1176): transl_table=11
atgagcctgaatccgagagacgtcgtcattgtcgacttcggccgcaccccgatgggtcgttccaagggtggcatgcaccgcaacactcgcgccgagaccatgtcggcgcacctgatcagcaagctgctggagcgtaacccgaaggtcgacccggccgaagtggaagacgtgatctggggttgcgtcaaccagaccctggaacagggctggaacatcgcgcgcatggcgtcgctgatgacccagatcccgcacaccagcgccgcgcagaccgtcagccgcctgtgcggttcgtcgatgagcgcgctgcacaccgccgcccaggcgatccagaccggcaatggcgatgtattcgtcatcggcggcgtggagcacatgggccacgtcggcatgatgcatggcgtcgacccgaacccgcacctgtccctgtacgccgccaaggcctcgggcatgatgggcctgaccgcggaaatgctcggcaagatgcacggtatcagccgtgaggcgcaggacaagttcggcgcgcgttcgcaccaactggcctggaaggccacccaggaaggcaagttcaaggacgagatcatcccgatggaagggtatgacgagaacggtttcctgaaagtcttcgacttcgacgagaccattcgtccggaaaccaccgtcgagaccctggcccagttgaagccggcgttcaatccgaaaggcggcaccgtgaccgcggggacctcctcgcagatcaccgacggtgcctcctgcatgatcgtgatgtcggcccagcgcgcccaggacctgggcatccagccgatggcggtgatccgctccatggccgtggcgggtgtcgacccggcgatcatgggctacggcccggtgccgtcgaccaacaaggcgctcaagcgcgccggcctgaccatcgccgacatcgatttcgtcgaactcaacgaagccttcgccgcccaggccctgccggtgctgaaggacctcaagctgctcgacaagatggacgagaaggtcaacctccacggcggcgccattgccctgggtcacccgttcggttgctccggtgcacgcatttccggcaccctgttgaacgtgatgaagcagaacggcggtacccttggcgtgtccaccatgtgcgtgggcctgggacagggtatcaccaccgtcttcgagcgcgtctaa

SEQ ID NO: 101030 - protein, 391 aa, Pseudomonas aeruginosa UCBPP-PA14
MSLNPRDVVIVDFGRTPMGRSKGGMHRNTRAETMSAHLISKLLERNPKVDPAEVEDVIWGCVNQTLEQGWNIARMASLMTQIPHTSAAQTVSRLCGSSMSALHTAAQAIQTGNGDVFVIGGVEHMGHVGMMHGVDPNPHLSLYAAKASGMMGLTAEMLGKMHGISREAQDKFGARSHQLAWKATQEGKFKDEIIPMEGYDENGFLKVFDFDETIRPETTVETLAQLKPAFNPKGGTVTAGTSSQITDGASCMIVMSAQRAQDLGIQPMAVIRSMAVAGVDPAIMGYGPVPSTNKALKRAGLTIADIDFVELNEAFAAQALPVLKDLKLLDKMDEKVNLHGGAIALGHPFGCSGARISGTLLNVMKQNGGTLGVSTMCVGLGQGITTVFERV

SEQ ID NO: 101031 - DNA, 1182 bp, Solibacter usitatus Ellin6076
  CDS (1)..(1182): transl_table=11
atgagagacgcggtgattgtgagcgcggtgaggacggcggtgggcaaggctccgaagggaatgctgcgcgctacgcggcccgatgatctggccgcggtggcgattcagggggcgatggcgcgggtaccggggctcgaggcgcgcgaagtggaggatgtgatcatcggctgcgcgatgccggagggcgagcaggggatgaacgtggcgcggattgcggcgctgcgcgcgggaatgccgattgaatcgtcggcgatgacgattaaccgctattgcgcgtcggggctgcaatcgatcgcgctggcggcggagcgcatacggggcgccggagcggaggcgattgtcgcgggcggcacggaatcgatgtcgttcatcccgttcggcggcaataagatttcgattaacccgtggctgcagcagaactatccggattcgtatctttcgatggggttgacggcggagcgggtggcgaagcattacggcatcacgcgcgagcaggccgacgaattcgcgctcgcgagccataccaaggcgctggcggcgcaggcggcaggcaagttcgtgcaggagattgtgccggtgccggtgaccttctcggcgccggatgcgaagtcgaaaatccgcaggacggaaatgcagttcaatattgatgaagggccgcgtgccgatacttcaatggaggcgctcgggaagttgaaggcggcctttcacgcgaagggaacagtgacggcgggtaactcgtcgcagaccagtgacggggccgccgcggcggtggtgatgtcggaggatcgcgcgcgcgcgctggggatcgcgccgctcgcgcgcttcgtggcctacgcctacgcgggctgcttgccggaagagatggggatcggtccggtgtatgctatcccgaaggcgctgaaactggcggggctgaccctggaccagatcgacctgatcgaattgaatgaagccttcgcggcgcaatccctggcggtgatcaaggcgctcggactcgcgatggaccgggtaaatgtgaacggtggcgcgatcgcgctgggccatccgctgggctgcacgggggctaagcttacggccagcctgctgcaggaaatgaagcgtcgaaaagcgcggtacggcatcgtaacgatgtgcgtggggggcggcatgggcgccgcgggaatcttcgagaacctgaattaa

SEQ ID NO: 101032 - protein, 393 aa, Solibacter usitatus Ellin6076
MRDAVIVSAVRTAVGKAPKGMLRATRPDDLAAVAIQGAMARVPGLEAREVEDVIIGCAMPEGEQGMNVARIAALRAGMPIESSAMTINRYCASGLQSIALAAERIRGAGAEAIVAGGTESMSFIPFGGNKISINPWLQQNYPDSYLSMGLTAERVAKHYGITREQADEFALASHTKALAAQAAGKFVQEIVPVPVTFSAPDAKSKIRRTEMQFNIDEGPRADTSMEALGKLKAAFHAKGTVTAGNSSQTSDGAAAAVVMSEDRARALGIAPLARFVAYAYAGCLPEEMGIGPVYAIPKALKLAGLTLDQIDLIELNEAFAAQSLAVIKALGLAMDRVNVNGGAIALGHPLGCTGAKLTASLLQEMKRRKARYGIVTMCVGGGMGAAGIFENLN

SEQ ID NO: 101033 - DNA, 1182 bp, Magnetococcus sp. MC-1; identical to SEQ ID NO: 92902
  CDS (1)..(1182): transl_table=11

SEQ ID NO: 101034 - protein, 393 aa, Magnetococcus sp. MC-1; identical to SEQ ID NO: 92903

SEQ ID NO: 101035 - DNA, 1164 bp, Shewanella sp. ANA-3
  CDS (1)..(1164): transl_table=11
atgaaacaagctgttatcgtagattgcattcgtactcctatgggccgttctaaggctggggtgtttcgtaatgtacgtgcagaaacactctctgccgaattaatgaaaggtctattactgcgtaacccgcaattagatcccaatactattgaagatgtgatttggggctgcgtgcagcaaaccctagagcaaggcttcaacattgcccgtaacgcatcattgctggcaggtatcccgaagacggctggcgctgtgacagtcaaccgcttatgtggttcttcgatggaagccattcatcaagccgctcgtgcaatcatgactggcatgggcgacacctttatcatcggtggtgttgaacacatgggccacgtgccaatgaaccacggtgtggacttccacccaggtttagccaataacgtcgctaaagcgtctggcatgatgggtttaaccgctgagatgttgggtaagcttcacggtattacccgtgagcagcaagatgcctttgcagtgcgttcacaccaacgcgctcacgcagcgacagttgaaggccgctttgccaaggaaatctatggcatcgaaggccatgatgctaacggcgcgctaattaaagtgctgcacgacgaagtgattcgtccagaaacctcaatggagtcattggcggcgctgcgcccagtattcgacccagcaaacggtactgttactgccggtacctcttcagcattatctgacggtgcttcggcaatgttagtgatggaagaatctaaagcgcgcgctttgggtctaccaatccgtgcccgtatccgctcaatggcagttgcaggttgtgacgcggcaatcatgggttacggtccagtacctgctactcaaaaagcactggctcgcgcaggcatcacagttaatgatttggatgttatcgagctaaacgaagcgttcgctgctcagtctctaccctgcgttaaagacctaggtctgctcgatgtggtagaagacaagatcaacctaaatggtggcgcgattgcgcttggccatccactgggctgttctggtgcacgtatttcgacaacgcttatcaacctgatggaacacaaagatgcgaccttaggtttagccactatgtgtatcggtttaggccaaggtattgcgaccgttttcgaacgcgtttaa

SEQ ID NO: 101036 - protein, 387 aa, Shewanella sp. ANA-3
MKQAVIVDCIRTPMGRSKAGVFRNVRAETLSAELMKGLLLRNPQLDPNTIEDVIWGCVQQTLEQGFNIARNASLLAGIPKTAGAVTVNRLCGSSMEAIHQAARAIMTGMGDTFIIGGVEHMGHVPMNHGVDFHPGLANNVAKASGMMGLTAEMLGKLHGITREQQDAFAVRSHQRAHAATVEGRFAKEIYGIEGHDANGALIKVLHDEVIRPETSMESLAALRPVFDPANGTVTAGTSSALSDGASAMLVMEESKARALGLPIRARIRSMAVAGCDAAIMGYGPVPATQKALARAGITVNDLDVIELNEAFAAQSLPCVKDLGLLDVVEDKINLNGGAIALGHPLGCSGARISTTLINLMEHKDATLGLATMCIGLGQGIATVFERV

SEQ ID NO: 101037 - DNA, 1176 bp, Mycobacterium avium 104
  CDS (1)..(1176): transl_table=11
atgaaccgcgacgccgtcatcgtcggggccgtccgcaccccgatcggcaagggcaaggccagtggtgcgctgcacgacgtgttgcccgccgacctgctggcccacagcctgcgggagctggtggcgcgcaccggagtcgatccggcgcaggtcgacgacgtcatcgccggcgccgtcacccaggtcggcgaccaggcggtcaacatcgcacgaaacgcgttgctgggagcgggtttcccggagtcggttcccggtgtcaccatcgaccgccagtgcggcagcagccagcaggcgatcagcttcgcggcccagggcgtcatcgcgggcgcctatgacgtggtgatcgccgccggggtggagtcgatgggccgcgtcccgatgggctcccaggtgctgcccggcagcaacccgttcggcgaggcgatgaacgcccgctatcccgaaggcctggtgccgcaagggatcagcgccgaactgatcgccgcgaagtgggggttctcgcgcacccagctcgacgagttctccgccgccagccacgagaaggccgcccgcgccaccaaggacgggctgttcgacaacgagctcatcccgatcgccgggctggccaccgacgagttcatccggcccgggaccacggtgcagacgctggccggactacagcccgcgttctacagcgaagccaccgaagcccgcttcccgcagatcaattgggagatcacggccggcaactcctcgccgctgtccgacggcagcgccgcggtgctgatcaccagcagcgagaccgccgcgcggctgggtctgcggccgctggcccggatccacaccaccgccgtggtcggctccgacccgctctacatgctgaccggcgtgattccggccaccgagaaggtgctgtcgaaggcgggcctgacgctggccgacatcgacctgttcgaggtgaacgaggcgttcgcccccgtcgtgctggcctgggcgcaggacaccggcgcggatctggacaagaccaacgtcaacggcggggcgatcgcgatcggacatccgttgggggccagcggcgcccgcatcatcaccactctggtcaacgcgctggagcaacgcggcggaaggtatggcctgcagacgatgtgcgagggcggcggcatggccaacgccaccatcatcgagcggttgagttag

SEQ ID NO: 101038 - protein, 391 aa, Mycobacterium avium 104
MNRDAVIVGAVRTPIGKGKASGALHDVLPADLLAHSLRELVARTGVDPAQVDDVIAGAVTQVGDQAVNIARNALLGAGFPESVPGVTIDRQCGSSQQAISFAAQGVIAGAYDVVIAAGVESMGRVPMGSQVLPGSNPFGEAMNARYPEGLVPQGISAELIAAKWGFSRTQLDEFSAASHEKAARATKDGLFDNELIPIAGLATDEFIRPGTTVQTLAGLQPAFYSEATEARFPQINWEITAGNSSPLSDGSAAVLITSSETAARLGLRPLARIHTTAVVGSDPLYMLTGVIPATEKVLSKAGLTLADIDLFEVNEAFAPVVLAWAQDTGADLDKTNVNGGAIAIGHPLGASGARIITTLVNALEQRGGRYGLQTMCEGGGMANATIIERLS

SEQ ID NO: 101039 - DNA, 1185 bp, Mycobacterium smegmatis str. MC2 155
  CDS (1)..(1185): transl_table=11
atgtccggatttgccggccgcgacgcggtcatcgtgggcgcggtacgcacgcccgtcgggaaaggcaaggccaacggcgcactgcacggtgtgctgcccgccgatctgctggcccacagcctgcgtgagttgatctcacggaccggtgtggattccgcccaggtcgacgacgtgatcgcaggtgccgtcacccaggtcggcgaccaggccgtcaacatcgcccgcaacgccctgctcggcgcgggcttccccgaatcggtgcccggcaccacggtggaccgccagtgcggcagcagccagcaggcgatcagcttcgccgcgcaaggtgtgctggccggggcctacgacatcgtgatcgccgcgggtgtcgagtcgatgtcacgcgtcccgatgggcagttcggtgctgccgggcagcgacccgttcggtgtcgcgttcgccgagcgctactccgaagggattgtcccccaaggcatcagcgccgagttgatcgccgccaagtggaacctttcgcgcgcacagctcgacgaattctcggcagccagccatgaaaaggccgccagggcaaccaaagagggcctgttcgaggccgagctcgcaccgatcgcggggttgtcgaccgacgagatcatccgccccggaaccaccgtggagaccttggccggcctcaagcccgcgttctaccacgagtcgtatgcggcgcggttcccacagatcaactgggagatcacgcccggtaactcgtcaccgctgtccgacggcagtgccgcggtgatgatcaccagtggtgaaaccgcgaagcgactcgggctcaagccgctcgcgcggatccacaccaccaccgtggtcggttcggatccgctctacatgctcaccggcgtcatcccggccaccgaaaaggtcctgcgccgagcgggtttgacgctcgccgacatcgacctgttcgaggtgaacgaggcgttcgcgccggtggtgctggcgtgggcggccgacaccggggccgacctgtccaagaccaacgtcaacggcggcgccatcgcgatcggacacccgttgggcgccagcggtgctcgcatcatgaccacgctggtcaacgccctgcaccagcgcggcgcacgttacggcctgcagaccatgtgtgaaggcggcggcatggccaacgccaccatcatcgagcgtctgtag

SEQ ID NO: 101040 - protein, 394 aa, Mycobacterium smegmatis str. MC2 155
MSGFAGRDAVIVGAVRTPVGKGKANGALHGVLPADLLAHSLRELISRTGVDSAQVDDVIAGAVTQVGDQAVNIARNALLGAGFPESVPGTTVDRQCGSSQQAISFAAQGVLAGAYDIVIAAGVESMSRVPMGSSVLPGSDPFGVAFAERYSEGIVPQGISAELIAAKWNLSRAQLDEFSAASHEKAARATKEGLFEAELAPIAGLSTDEIIRPGTTVETLAGLKPAFYHESYAARFPQINWEITPGNSSPLSDGSAAVMITSGETAKRLGLKPLARIHTTTVVGSDPLYMLTGVIPATEKVLRRAGLTLADIDLFEVNEAFAPVVLAWAADTGADLSKTNVNGGAIAIGHPLGASGARIMTTLVNALHQRGARYGLQTMCEGGGMANATIIERL

SEQ ID NO: 101041 - DNA, 1158 bp, Mycobacterium smegmatis str. MC2 155
  CDS (1)..(1158): transl_table=11
atggctgaagccgtcatcgtcgaggccgtccgctcgcctgtcggcaagcgcaacggcgcgttgtcgggaatccaccccgccgagctgtccgcccaggtcctcaacggcctggtggagcgcgcgggggttgatccggcactggtcgacgacgtcatctggggctgcgtcatgcaggccggtgaacaggccctcgacatcgcgcgcaccgcggtgctgagcgccggctggcccgagacggtcccgggtgtcaccgtggaccgccagtgcggctccagccagcagtcgctgcacttcgccgtcgccggtgtcgtcgcgggtcactacgacgtcgtcgtcgccggtggtgtcgagtcgatgtcgcgcaccccgatgggctcgtcgctggccaacggcggcaacccctacggcgagtcgttcaaggcgcgctacgacaagaccccgaaccagggtgtcggcgccgagatgatcgccgagcagtggggcttcagccgtacccagctcgacgagttctcgctgcgctcgcacgagaaggccgccgcggcccaggattcgggcgcgttctccgaccagatcgtgggcatcaagaccaaggacgccgacggcaacgacaccgtcgtgctcgaggacggcggcatccgccgcggcggcaccatcgaggcgatggccggcatcaagcccgccttcaaggaggacggcgtgatccacgccggtaactccagccagatctccgacggctcggccgccctgctgatcacctcggccgagaaggccaaggagctcggtctcaagccgatcgccaaggtgcacaccgcggttctcgcaggcgccgatccggtcatcatgctgaccgcgccgatcccggccacgcagaaggccctgaagaagtcgggcctgagcctcgaccagatcggtgcgttcgaggtcaacgaggcgttcgcgccggttccgatggcctggctcaaggacatcggtgccgacgagaagaagctgaaccccaacggcggcgccatcgccctgggccacccgctcggcggttcgggtgcgcgcatcctgacgacgctgctgtaccacatgcgcgacaacaacattcagtacggcctgcagaccatgtgcgagggtggcggccaggccaacgcgaccatcctggagcttctgtga

SEQ ID NO: 101042 - protein, 385 aa, Mycobacterium smegmatis str. MC2 155
MAEAVIVEAVRSPVGKRNGALSGIHPAELSAQVLNGLVERAGVDPALVDDVIWGCVMQAGEQALDIARTAVLSAGWPETVPGVTVDRQCGSSQQSLHFAVAGVVAGHYDVVVAGGVESMSRTPMGSSLANGGNPYGESFKARYDKTPNQGVGAEMIAEQWGFSRTQLDEFSLRSHEKAAAAQDSGAFSDQIVGIKTKDADGNDTVVLEDGGIRRGGTIEAMAGIKPAFKEDGVIHAGNSSQISDGSAALLITSAEKAKELGLKPIAKVHTAVLAGADPVIMLTAPIPATQKALKKSGLSLDQIGAFEVNEAFAPVPMAWLKDIGADEKKLNPNGGAIALGHPLGGSGARILTTLLYHMRDNNIQYGLQTMCEGGGQANATILELL

SEQ ID NO: 101043 - DNA, 1194 bp, Nocardioides sp. JS614
  CDS (1)..(1194): transl_table=11
gtgacccgggccgagacccgtgatgacgcgatcgtggtggtggacggggcgcggaccccgatcggcagcttcggcgggatgttgagggacgttcccgcccacgagctcggcgcgacggcggcccgcgaggcactccgccgcgccggcgtcgaggccgaggcgatcgacgaggtcatcatgggctgcatcggccaggtcgggccggacgcctacaacgcgcgccgtgtcgccctggccgcggggctccccgaccggaccccggcgtacaccgtcaaccgcctgtgcggctccggcctccaggccgtgtggtcggcggccatgcagatccgctggggcgccgcggagctcgcgctcgccggcggggacgagtcgatgacccggatgccgttctacgacttcggcgcgcgcgccggctacaagctgggcgaccgcgcgctcgtcgacggcaccgtgatgatgctgaccgacccgttccacggcatccacatgggcgtcacggccgagcgggtcgccgagaagtacggcgtgacccgcgcggagcaggacgagttcgcggcggagtcgcagcggcgggcggcgacccccgaggcacgggccgcgttcgccgaggagatcgtcccggtcgaggtcggcggccgccggccgttcaccgccagcgaggacgagcaccccaagcccgacaccaccgtcgagaccctggcccggctccgtcccgcgttcgccgagggcggcaccgtgacggccggcaacgcctccgggatcaacgacggcggcgccgcggtggtggtggcgagcagccgcgtggccgccgaccgcggcctcacgccgctggtagagctggtgtcggtggcgacagcagccctggaacccgagctgatgggctacgccccggtcctcgcgctgcgctcgctcttcgaacagacgggtacgacgccgggcgacatcgggatcatcgagctgaacgaggccttcgccgcgcaggcggtggcatgcgtgcgcgacgccggcctcgaccccgagcgggtcaacccgtacggcggtgccatcgcgctcggccacccggtcggcgcgaccggcgcgaacctgacgctgcgagtcgccaaggacctggtccgccgcgatctcgagctcggcatcgtgacgatgtgcatcggcggcgggcaggccctcgccgcactcttccggagagtgtga

SEQ ID NO: 101044 - protein, 397 aa, Nocardioides sp. JS614
MTRAETRDDAIVVVDGARTPIGSFGGMLRDVPAHELGATAAREALRRAGVEAEAIDEVIMGCIGQVGPDAYNARRVALAAGLPDRTPAYTVNRLCGSGLQAVWSAAMQIRWGAAELALAGGDESMTRMPFYDFGARAGYKLGDRALVDGTVMMLTDPFHGIHMGVTAERVAEKYGVTRAEQDEFAAESQRRAATPEARAAFAEEIVPVEVGGRRPFTASEDEHPKPDTTVETLARLRPAFAEGGTVTAGNASGINDGGAAVVVASSRVAADRGLTPLVELVSVATAALEPELMGYAPVLALRSLFEQTGTTPGDIGIIELNEAFAAQAVACVRDAGLDPERVNPYGGAIALGHPVGATGANLTLRVAKDLVRRDLELGIVTMCIGGGQALAALFRRV

SEQ ID NO: 101045 - DNA, 1209 bp, Azoarcus sp. BH72
  CDS (1)..(1209): transl_table=11
atgacccacaccgtctatctctgcgacgccatccgcacccccttcggccgctacggcgggctgctttcctccgtgcgtgccgacgacctcgcggcgctgccgatcagggccttgatcgcgcgcaaccccggcgtcgactggaacctggtcgacgacgtcatctacggctgcgccaaccaggcgggcgaggacaaccgcaatgtcgcccgcatggcggcgctgctggccgggctgccggtggaagtgccgggcagcacggtcaaccgcctgtgcggctccagcctggacgccatcggcagcgccgcgcgcgcgatcgccgccggcgaggccgagctgatgatcgccggcggggtcgagagcatgagccgcgcgcccttcgtcctgggcaaggccgacagcgccttttcgcgcagcgcgaagatcgaggacaccaccatcggctggcgcttcgtcaatccgctgatgaaggcgcagtacggcgtggactccatgcccgaaaccgccgagaacgtcgccaccgacttcaacgtgagccgcgccgaccaggacgcgctcgcgctgcgtagccagcagcgctgggcgagcgccaacgaacgcggcttcttcgcgcgcgagatcgtgccggtcgacatcccgaggaagaagggcgatccggtgcgcatgaccacggacgaacacccccgccccgacaccacgctggacatgctggccaagctgaaaggcgtggtgcgcccggacggcaccgtgaccgccggcaacgcctctggcgtgaacgacggcgccgccgcggtgctgctcgcctccgaagccgcggtgaagcgccacggcctgaccccgcgcgcgcgcatcctcggctcggccgcagccggcgtggcgccgcgcatcatgggcatcggcccggccccggcgagcgaaaagctgctggcgcgcctgggcatgggcatcgcccggttcgacgtcatcgaactcaacgaggccttcgccgcgcaggcgctggcggtcacccgccggctggggctggcggacgacgacgcgcgggtcaatcccaacggcggcgccatctccatcggccacccgctgggggcctcgggcgcgcgcctggtgaccaccgcgctcaaccagctcgaaaccagcggcgggcgctacggcctggcgacgatgtgcatcggcgtcggccagggcatcgcgctcgcgatcgaacggatttaa

SEQ ID NO: 101046 - protein, 402 aa, Azoarcus sp. BH72
MTHTVYLCDAIRTPFGRYGGLLSSVRADDLAALPIRALIARNPGVDWNLVDDVIYGCANQAGEDNRNVARMAALLAGLPVEVPGSTVNRLCGSSLDAIGSAARAIAAGEAELMIAGGVESMSRAPFVLGKADSAFSRSAKIEDTTIGWRFVNPLMKAQYGVDSMPETAENVATDFNVSRADQDALALRSQQRWASANERGFFAREIVPVDIPRKKGDPVRMTTDEHPRPDTTLDMLAKLKGVVRPDGTVTAGNASGVNDGAAAVLLASEAAVKRHGLTPRARILGSAAAGVAPRIMGIGPAPASEKLLARLGMGIARFDVIELNEAFAAQALAVTRRLGLADDDARVNPNGGAISIGHPLGASGARLVTTALNQLETSGGRYGLATMCIGVGQGIALAIERI

SEQ ID NO: 101047 - DNA, 1203 bp, Magnetospirillum magnetotacticum MS-1
  CDS (1)..(1203): transl_table=11
atgaccgaagcgctgatctgcgattacacccgcacccccatcggccgctatgcgggcgttctgtccggcgtcagaaccgacgatctggccgcccatcccatcaaggccctgatggcccgccatgaaggcctggactggagccgcgtcgacgaggtggccttcggctgcgccaatcaggcgggcgaggacaaccgcaacgtggcgcgcatggcgctgctgctggcagggcttcccacctcgctgggcggcaccacgctgaaccgcctgtgcggatcgggcatggatgcggtgggctatgcggcccgcgccatcatgagcggcgaggccgaactgatgatcgctggcggcgtggaaagcatgagccgcgcccccttcgtcatgaacaaggccgacagcgccttttcccgcgacgcccgcatttatgacaccaccatcggctggcgtttcgtcaattccctgatggaaaaggcctatggcaccgattccatgccggagaccgccgagaacgtggccgagcagttcggtgtcagccgcgaggatcaggacgccttcgcgctgaagtcccaggccaaggcctcggcggcgcagaagaacggccgcttcgccctggaaatctcccccgtcaccctgcccgcccgcaagggtgatccggtggtgatcagcaacgatgagcatccgcgcgaaaccaccctggaaagcctggccaagctgaaggcgccgttccgggctggcggctccgtcacggcgggcaacgcgtcgggcgtcaatgacggcgcggcggccctgctgatcgcctctccggccgccgccaaggcctttgggcttacccccatcgcccgcatcctgggtatggccacggcgggcgtcgagccgcgcatcatgggcatcggcccggtcccggcgacgcagaagctgctggcgcgcctggggctcaccacagccgatctcgacgtcatggagttcaacgaggccttcgccgctcaggccctggcctgtacccgccaattgggactggccgacgacgaccagcgcgtcaatcccaatggcggcgccatcgcgctgggccatcccctgggcatgagcggcgcgcgcatcgtcggcaccgccgccttgcagctggcccagaccggtgggcgccgggcgctgtccaccatgtgcatcggagtcggccaaggcatcgccatggtcatcgagagagtgtag

SEQ ID NO: 101048 - protein, 400 aa, Magnetospirillum magnetotacticum MS-1
MTEALICDYTRTPIGRYAGVLSGVRTDDLAAHPIKALMARHEGLDWSRVDEVAFGCANQAGEDNRNVARMALLLAGLPTSLGGTTLNRLCGSGMDAVGYAARAIMSGEAELMIAGGVESMSRAPFVMNKADSAFSRDARIYDTTIGWRFVNSLMEKAYGTDSMPETAENVAEQFGVSREDQDAFALKSQAKASAAQKNGRFALEISPVTLPARKGDPVVISNDEHPRETTLESLAKLKAPFRAGGSVTAGNASGVNDGAAALLIASPAAAKAFGLTPIARILGMATAGVEPRIMGIGPVPATQKLLARLGLTTADLDVMEFNEAFAAQALACTRQLGLADDDQRVNPNGGAIALGHPLGMSGARIVGTAALQLAQTGGRRALSTMCIGVGQGIAMVIERV

SEQ ID NO: 101049 - DNA, 1173 bp, Magnetospirillum magnetotacticum MS-1
  CDS (1)..(1173): transl_table=11
atgaccgacatcgttatcgccgccgccacccgcactcccgtcggctcgttcaacggctccctggccggattgcaggcggcccagctgggcgagatcgtcatccgtgaggcgctcaagcgcgccggggttgaggccgaggccgtggacgaggttctgctgggtcacatcctgtccgccggctgtggccagaacaccgcccgtcaggccgccatcaaggccggtattcccaacaccgccaccgccatggccatcaaccagctgtgtggctcgggcctgcgcgccgtggcgctcggcttccaggccatcaagctgggcgatgccaacatcatcgtcgccggcggccaggagagcatgagcaacgctcagcacgccatctatatgcgcggcggcgtcaagatgggcgacgccgccctggtcgacaccatgatcaaggacggcctgaccgacgccttcaaccccatccacatgggcatcaccgccgagaatctggccgagaagttccagatttcgcgcgaggagcaggacgccttcgccctggcgtcgcagaacaaggccgaggccgccatcaaggctggcaagttcaaggacgagatcactcccgtcaccatcacggtcaagcgggaagagaagctgttcgacaccgacgagttcgtccgcatgggcgccactctcgaccagatcgccaagcccaagcccgccttcaagaaggacggcacggtgaccgccgccaatgcttcgggcatcaatgacggcgccgccgccctggtcctgatgaccgccaaggaagccgataagcgcggcatcacgcccttggcccgcatcgctggctgggccaccgccggtgtcgatcccagcaccatgggctatggtccggttcccgcctcgcagaagctgctggccaagctgggctggaagcacgaggacctggacctgatcgaggccaatgaggccttcgccgcccaggccatttcggtcaacaagggcatgggctgggacacctccaaggtgaacgtcaatggcggcgccatcgccatcggccatcccatcggcgcctcgggcgcccgcatcctggtcggcctgctgcacgaaatgggcaagcgcaatgccaagaagggtcttgccaccctgtgcatcggcggcggcatgggcatcgctctgtgcgtcgagcgctga

SEQ ID NO: 101050 - protein, 390 aa, Magnetospirillum magnetotacticum MS-1
MTDIVIAAATRTPVGSFNGSLAGLQAAQLGEIVIREALKRAGVEAEAVDEVLLGHILSAGCGQNTARQAAIKAGIPNTATAMAINQLCGSGLRAVALGFQAIKLGDANIIVAGGQESMSNAQHAIYMRGGVKMGDAALVDTMIKDGLTDAFNPIHMGITAENLAEKFQISREEQDAFALASQNKAEAAIKAGKFKDEITPVTITVKREEKLFDTDEFVRMGATLDQIAKPKPAFKKDGTVTAANASGINDGAAALVLMTAKEADKRGITPLARIAGWATAGVDPSTMGYGPVPASQKLLAKLGWKHEDLDLIEANEAFAAQAISVNKGMGWDTSKVNVNGGAIAIGHPIGASGARILVGLLHEMGKRNAKKGLATLCIGGGMGIALCVER

SEQ ID NO: 101051 - DNA, 1182 bp, Haemophilus somnus 2336
  CDS (1)..(1182): transl_table=11
atgaaaaatgtcgttattgccagtgcggtgcgtaccgcaattggaaattttggcggttcacttgcagacacctctgctgtggaactcggtacagctgtaatcaaatctgcgattgaacgagcaggtattgatataactgctattgatgaagtaattatgggaaatgttttacaggcaggtcttggacaaaatcctgctcgtcaggcactattatgttccggcattgctcaagatgtaccagcttatactgtcaataaagtctgcggttcaggcttaaaagcagtagttctaggcactcaagcaattaaagctggtgatgctaaggttatcatcgcaggtggtatggaaaacatgagccaagcaccttatcttcttgaatccaaatctcgttggggctaccgattaggagatgcaaaagtacaagatgtgattttatctgatggtttgatttgtgctacaaaccactatcatatgggtatcacggctgaaaatatcgctaaaaaatatgatattacccgccaaatgcaagatgaattagcacttgcctctcaacaaaaagccaccgctgcgattcaatccggtgcattcaaaaatgaaattgtaccgttaaatatcaaaattaaacgcaaagaggtcattttcgacactgatgaatttgtcaaacaagattcaaccgctgaaggtttagcaaggcttcgtgccgcatttgataaagagggtagtgtaactgccggtaatgcgtcaggtattaacgatggtgcggcggcattagttattgttgaagaagaaacggcaaaagcattagggttgaatattcttgctcgtatcaaaggttatgcaagtggtggcgtatcaccagatattatgggaataggacctgttcctgctactttaaatgctttgaaaaaaacaggtttgcagttaagcgatatagacttaatcgaagctaatgaagcttttgcggcacaatttttagctgtaggtaaagagttaggggttaatcccgaaaaagttaatgtcaatggtggagctattgctcttggtcatccaataggtgcaagcggagcacgtattctagtcactcttttacacgcaatgcaggctcgtgataagcagttgggtttggcaactttatgtattggtggtggtcaaggcattgcaatgattgtggaacgtatttaa

SEQ ID NO: 101052 - protein, 393 aa, Haemophilus somnus 2336
MKNVVIASAVRTAIGNFGGSLADTSAVELGTAVIKSAIERAGIDITAIDEVIMGNVLQAGLGQNPARQALLCSGIAQDVPAYTVNKVCGSGLKAVVLGTQAIKAGDAKVIIAGGMENMSQAPYLLESKSRWGYRLGDAKVQDVILSDGLICATNHYHMGITAENIAKKYDITRQMQDELALASQQKATAAIQSGAFKNEIVPLNIKIKRKEVIFDTDEFVKQDSTAEGLARLRAAFDKEGSVTAGNASGINDGAAALVIVEEETAKALGLNILARIKGYASGGVSPDIMGIGPVPATLNALKKTGLQLSDIDLIEANEAFAAQFLAVGKELGVNPEKVNVNGGAIALGHPIGASGARILVTLLHAMQARDKQLGLATLCIGGGQGIAMIVERI

SEQ ID NO: 101053 - DNA, 1173 bp, Bacillus cereus G9241
  CDS (1)..(1173): transl_table=11
atgagagaagctgtcattgttgcgggagcaagaacaccaattggaaaagcaaagaggggttcattaaaaacagttcgtcctgacgatctaggggcgttagtagtaaaggaaacgttaaagcgtgcgaattatgaaggaccaatcgatgatttaattttcggttgtgcgatgccagaagcagagcaaggtttaaatatggctcgtaatatcggtggattagcaggactttcttacgatgttccagctattacgattaaccgttactgttcttcaggtttacaaagtatcgcttatggagcagagcgcattatgcttggtcactctgaagctgtattatcaggcggagcggaatcaatgagtttagttccaatgatgggacacgttgttcgtccgaatagtcgccttgtagaagcggctccagaatattatatgggtatgggacatacagcagagcaagttgctgtgaaatatggaatttctcgtgaagagcaagatgcatttgcagtaagaagtcatcaacgtgctgcgaaagcattagctgcagggaactttgctgatgaaacagtatctgtagatgtaacgttacgtactgttggatcaaataacaaactgcaagaagaaacaatcattttcgcacaagacgaaggtgtaagagcagaaacgacgctagacattttaggtaaattacgtccagcatttaacgttcgcggttctgtaacagctggtaactcttcacaaatgagtgacggtgcagcatctgtactattaatggatcgtgaaaaagcagtgagtgatggcatgaaaccacttgcgaaattccgttcatttgcagtagctggcgtaccaccagaagtaatgggaattggcccaattgctgcaattccaaaagcgttaaaactagctggcttagagctatctgatattggcttattcgaactaaatgaagcattcgcttctcaatcgatccaagttattcgtgaacttggtttagatgaagaaaaagtaaacgtaaacggcggtgcaatcgcacttggacatccacttggctgtacaggagcaaaactaacactatctcttattcacgaaatgaaacgccgcaacgaacaattcggtatcgtaacaatgtgtatcggcggcggaatgggagcagcgggagtatttgaattactataa

SEQ ID NO: 101054 - protein, 390 aa, Bacillus cereus G9241
MREAVIVAGARTPIGKAKRGSLKTVRPDDLGALVVKETLKRANYEGPIDDLIFGCAMPEAEQGLNMARNIGGLAGLSYDVPAITINRYCSSGLQSIAYGAERIMLGHSEAVLSGGAESMSLVPMMGHVVRPNSRLVEAAPEYYMGMGHTAEQVAVKYGISREEQDAFAVRSHQRAAKALAAGNFADETVSVDVTLRTVGSNNKLQEETIIFAQDEGVRAETTLDILGKLRPAFNVRGSVTAGNSSQMSDGAASVLLMDREKAVSDGMKPLAKFRSFAVAGVPPEVMGIGPIAAIPKALKLAGLELSDIGLFELNEAFASQSIQVIRELGLDEEKVNVNGGAIALGHPLGCTGAKLTLSLIHEMKRRNEQFGIVTMCIGGGMGAAGVFELL

SEQ ID NO: 101055 - DNA, 1200 bp, Burkholderia vietnamiensis G4
  CDS (1)..(1200): transl_table=11
atgagcaaacaactgcaagacgcatacatcgtcgccgccagccgcaccccgatcggcaaggccccgcgcggtgtcttcaagaacacgcgccccgacgagctgctggttcacgcgatcaagtcgacgatcgcgcaggtgccgggcttcgacacgaagctgatcgaggacgcgatcatcggctgtgcgattcccgaagccgagcagggactgaacgtcgcgcggatgggcgcgctgctcgccgggctgccgcagacggtcggcggcgtgacggtcaaccgcttctgcgcgtcgggcatcacggcgctcgcgatggcggccgaccgcattcgcgtcggcgagtcggaggcgctgctcgcgggcggctgcgaatcgatgagcatggtgccgatgatgggcaacaagccgtcgatgtcgccgcacatcttcgatcgcagcgaagacttcggcatcgcgtacggcatgggcctgaccgccgagcgcgtggccgagcagtggaaggtgagccgtgaagaccaggacgcgttctcggtcgaatcgcaccgcaaggcgctcgccgcgcagcaggccggcgaattcggcgacgagatcgccgcgtacacgatcaccgagcgcttcccgaacctcgcgaccggcgaagtcgacgtgaagacccgcgagatcgcgctcgacgaaggcccgcgtgccgatacgtcgctcgagggcctcgcgaagctgcgcacggtgttcgcgaacaagggctcggtcacggccggcaacagctcgcagacgtccgacggcgcgggcgcgctgctggtcgtgtcggagaaggtgctgaaggagttcaacctgacgccgctcgcgcgtttcgtgagcttcgcggtgcgcggcgtgccgccgcaaatcatgggcatcgggccgaaggaagcgatcccggccgcgctgaaggcagcgggcctgaagcaggacgacatcgactggatcgagctgaacgaggcgttcgccgcgcaatcgctggcggtgatccgcgatctcggcctcgatccgtcgaaggtcaacccggtgggcggtgcgatcgcgctcggccatccgctcggcgcgaccggcgcgatccgcgcggcgaccgtcgtgcacgggctgcgccgccgcaacctgaagtacgggatggtcacgatgtgcgtcggcaccggcatgggtgcggcgggcatcatcgaacgcctgtaa

SEQ ID NO: 101056 - protein, 399 aa, Burkholderia vietnamiensis G4
MSKQLQDAYIVAASRTPIGKAPRGVFKNTRPDELLVHAIKSTIAQVPGFDTKLIEDAIIGCAIPEAEQGLNVARMGALLAGLPQTVGGVTVNRFCASGITALAMAADRIRVGESEALLAGGCESMSMVPMMGNKPSMSPHIFDRSEDFGIAYGMGLTAERVAEQWKVSREDQDAFSVESHRKALAAQQAGEFGDEIAAYTITERFPNLATGEVDVKTREIALDEGPRADTSLEGLAKLRTVFANKGSVTAGNSSQTSDGAGALLVVSEKVLKEFNLTPLARFVSFAVRGVPPQIMGIGPKEAIPAALKAAGLKQDDIDWIELNEAFAAQSLAVIRDLGLDPSKVNPVGGAIALGHPLGATGAIRAATVVHGLRRRNLKYGMVTMCVGTGMGAAGIIERL

SEQ ID NO: 101057 - DNA, 1191 bp, Exiguobacterium sibiricum 255-15
  CDS (1)..(1191): transl_table=11
atgaaggaagcagtaatcgtcgccggtgcacgaacaccggtcggcaaagcaaaaaaaggatcatttaaatcaatgcgttctgatgaactcgcaggcatcgtcatcaaggaaacgttgaaacgcgcgaactacacgggagcaatcgatgatgtcattctcggatgtgccttaccggaagcggagcaggggatgaacatcgcccgttacgcgtcggtcctcgggggactgtcgcacgaagtaccggcaatcacgatcaaccggtattgctcaagtggcttacagtcgattgccgatgcctcgatgaaaatcatgacgggtcaagcaacggccgtcatcgccggcggactcgaatccatgagccaggtgccgatgccggggcacgtcgttcgaccgaatccgtcaatcgtcgaaacagaaccggaatattatatgagcatgggacatacggcagaacaagtcgcttcgacctatcaagtctcacgcgaagatcaagatgcctttgcactgaaaagccatcaaaaagcagccgctgcaattgcgtccggcaaattcgccgatgaaatcgtgccggtgacggtcacggaacagttcgtcaatgatgagttgaagattgaagaaaagacgtgggtcgtcgaacatgacgaaggtgtccgtgccgattcatcaccggaaggcctcgccaaactccgtccggcattccgcctcggcggaagtgtcacagcggggaactcgtctcagacatcagacggtgcagccgccgtcttgatcatggagcgcgaggaagcagaacgccagggactaccgattctcgggaaattcaaatcgtttgccgtcggcggtgttcgtccggaagtcatgggaatcggaccggtcgtcgcgattccaaaggcactggaactggccggcatcactttagaagaagtcggactgattgaattaaatgaagcatttgcgtcccagtcactcggtgtcatccgggaactcggattgaatgaagacatcgtcaacgtcaacggcggcgcgattgcgcttggtcatccgctcggatgtaccggaacgaaactgacattaacactcttgcatgaaatgaaacgacggaacgtccaatatggtgtcgtctcgatgtgtatcggcggcggcatgggtgcagccggtgtattcgaactagttgaaggaggaacaggacaatga

SEQ ID NO: 101058 - protein, 396 aa, Exiguobacterium sibiricum 255-15
MKEAVIVAGARTPVGKAKKGSFKSMRSDELAGIVIKETLKRANYTGAIDDVILGCALPEAEQGMNIARYASVLGGLSHEVPAITINRYCSSGLQSIADASMKIMTGQATAVIAGGLESMSQVPMPGHVVRPNPSIVETEPEYYMSMGHTAEQVASTYQVSREDQDAFALKSHQKAAAAIASGKFADEIVPVTVTEQFVNDELKIEEKTWVVEHDEGVRADSSPEGLAKLRPAFRLGGSVTAGNSSQTSDGAAAVLIMEREEAERQGLPILGKFKSFAVGGVRPEVMGIGPVVAIPKALELAGITLEEVGLIELNEAFASQSLGVIRELGLNEDIVNVNGGAIALGHPLGCTGTKLTLTLLHEMKRRNVQYGVVSMCIGGGMGAAGVFELVEGGTGQ

SEQ ID NO: 101059 - DNA, 1212 bp, Kineococcus radiotolerans SRS30216
  CDS (1)..(1212): transl_table=11
gtggtccacacccccgccccgggtcggagcgtcgtcttcgccgacggcgtccgcaccccgttcggcaaggcccgccccgacggcctgcacgcccagacccgcgccgacgacctcgtggtcgcctgcctgcgcgagctcctgcgccgcaacccgtccctaccgcccgaacgggtggaggaggtcgcgatcgccgcggccacccagtccggggaccagggcctggtcctcgggcgcagcgcggcgctgctcgccgggctgccggtcaccacgcccggctacgccatcgaccgctggtgcgcgggggcgatgaccgccgtgaccaccaccgcggcctcgatcgcggtgggggccctcgacgtcgccctcgccggcggggtggagcacatgggccaccacccgctgggccagggcatggaccccaacccccgcttcctcaccgagcgcatcgtctcccccgacgccctcgacatgggcaagaccgccgaggccctgcacgaccgcttcccgcagctcaccaagcagcgctccgacgagtacgcggtgaactcccaggccaagttcgcgaaggccgtcgccaacggccaggtcggcgccgacctcgtccccgtcgcctcgcccagcgcggagaagggctggggcctggccaccgccgacgagctcgcccgccccggcaccaccctggaggcgctggcgggcctcaagaccccgttccgcccgcacgggcgggtcaccgccggcaacgcctcccccctcaccgacggcgccaccgcctgcgtcgtggccgccgaggagaccgccgccgacctgggcctgacgccgaggatgcgactggtggggttcgccttcgccggggtcgagccggaggtcatgggcctgggccccatcccctccaccgagaaagtcctcgcccgggccgggctgggcatcgacgacatcggcctcttcgagctcaacgaggcgttcgccgtgcaggtcctcagcttcctcgaccacttcggcatcgccgacgacgacgaacgggtcaacccctacggcggggcgatcgccatcgggcacccgctcgccgcctccggggtccggctcatgacccagctggcccggcagttctccgagcaccccgaggtccgctacggcctcaccgccatgtgcgtgggcctgggccagggcggctccgtcctgtgggagaacccgaactggggaggggcgaactga

SEQ ID NO: 101060 - protein, 403 aa, Kineococcus radiotolerans SRS30216
MVHTPAPGRSVVFADGVRTPFGKARPDGLHAQTRADDLVVACLRELLRRNPSLPPERVEEVAIAAATQSGDQGLVLGRSAALLAGLPVTTPGYAIDRWCAGAMTAVTTTAASIAVGALDVALAGGVEHMGHHPLGQGMDPNPRFLTERIVSPDALDMGKTAEALHDRFPQLTKQRSDEYAVNSQAKFAKAVANGQVGADLVPVASPSAEKGWGLATADELARPGTTLEALAGLKTPFRPHGRVTAGNASPLTDGATACVVAAEETAADLGLTPRMRLVGFAFAGVEPEVMGLGPIPSTEKVLARAGLGIDDIGLFELNEAFAVQVLSFLDHFGIADDDERVNPYGGAIAIGHPLAASGVRLMTQLARQFSEHPEVRYGLTAMCVGLGQGGSVLWENPNWGGAN

SEQ ID NO: 101061 - DNA, 1185 bp, Streptococcus suis 89/1591
  CDS (1)..(1185): transl_table=11
atgaaaaaagtagctatcgtgtctgcctatcgttctgccatcggcagtttcggaggtagtctgaaagatattgaaatcgctgatttaggggcgcaagtcctcgaaacagccttagctaataaaaacatccctgcagacagcgttgatgaagttatcttcggaaatgttctttcagcaggacaaggacaaaatattgcacgtcaaattgctattcgtgcaggcattcctcagacagcctctgcctatgcagtcaataaagtctgtggttccggtctcaaatcagtcctcctagctgcccagtcaatcatgctaggtgacaatgatgtagttgtggctggaggcattgaaattatgagccaggcaccttatctatccaaaactagccggtttggtagtaaatttggtcatattagtctggaagattccatgttaacagatggtttgacagatgccttcaacgactatcacatgggcattactgcagaaaatgttgctgaacgctatcatgtcagtcgcgcagagcaagatgcttttacatacagtagccaagagaaggctgcaaaagctattgctgagggaagatttgttgacgaaattgttcctattagattaaaaaatcggaaaggcgaaactatttttgccacagatgagtaccctcgtctgacgccaattgaaaaattggcaacacttcggccatcttttaaaaaggaaggaaccgtcaccgcagccaatgcttctggcatcaacgacggctgtgctgtcttggtactcatgtctgatgaaaaagccagtgagctaaatatccagccactcgcctatattgaggcctatgcaacaagcggtttagatcctgcattgatggggcttggacctattactgctagccaaaaagcgctacaaaaactgaataaaacagtcgaggatatcgatctattcgaactcaatgaagcattcgcagcccaatcaattccagttgtcaaacaactcggcattgatcctgcaaaagtcaatgtcaatggtggtgctatagcccttggacatccaatcggagctagtggtagtcgaatcctagtcactctgattcacgaattaatcaagcaagaaaaagagcttggtctttgctcactttgtatcggaggcggtcaaggcatctccctaatcgtttccaatgcgcaaacaaattaa

SEQ ID NO: 101062 - protein, 394 aa, Streptococcus suis 89/1591
MKKVAIVSAYRSAIGSFGGSLKDIEIADLGAQVLETALANKNIPADSVDEVIFGNVLSAGQGQNIARQIAIRAGIPQTASAYAVNKVCGSGLKSVLLAAQSIMLGDNDVVVAGGIEIMSQAPYLSKTSRFGSKFGHISLEDSMLTDGLTDAFNDYHMGITAENVAERYHVSRAEQDAFTYSSQEKAAKAIAEGRFVDEIVPIRLKNRKGETIFATDEYPRLTPIEKLATLRPSFKKEGTVTAANASGINDGCAVLVLMSDEKASELNIQPLAYIEAYATSGLDPALMGLGPITASQKALQKLNKTVEDIDLFELNEAFAAQSIPVVKQLGIDPAKVNVNGGAIALGHPIGASGSRILVTLIHELIKQEKELGLCSLCIGGGQGISLIVSNAQTN

SEQ ID NO: 101063 - DNA, 1215 bp, Croceibacter atlanticus HTCC2559
  CDS (1)..(1215): transl_table=11
atgaaagaagcatatatcatagacggaacacgcacaccaatcggaagttaccacggcacattatctgctgttaggacagacgatttgggagcaatggtcatcaaacacgtactagaaaaaaatccaaacatcccaaaagacgcattcgacgatgttataatgggttgtgccaaccaagctggcgaggacaaccgcaacgtcgcaagaatgtgttcactccttgccggaatgccgttttcggttcctggcgaaacggtgaacagattatgcagttcaggtctttcggcaatcatccacgctaaccgagctataaaagctggtgacggcgacttattcatttctggaggtgttgagaatatgacgcgcggaccatacgtgatgagcaaaccctcaaaagcttttggcaacgacagtaagatgtacgactcaagttttggctggcgttttgttaacccaaaaatgcacgaaatgtacggcacagatggtatgggaaatacagctgaaaatcttgttgagaaatacaatatcagtcgtgaagaccaagatgcctttgcttataatagtcagatgaaagcaaccaaagctcaagaaaatgggcgtttagcaaaggaaataatgactgttgaaattccccaacgcaaaaaagacccaatacaattcagtaaagatgaatttgtaaaaccaacaactacgaaggaaattcttggtaagcttagacctgctttcaaaaaagaaggtggtagcgttaccgcaggaaattcttcaggattaaatgatggagcggcagcaacaatcgtcgcttcagaagatgcagtaaagaaatacaatttaaagccattggcacgaatcgtttcatctgccgttgtgggtgtcgagccaagaattatgggaatcggtccagtaaaggcgagtaataaagccttggaaaaagccgggttaactatggaagatatagacatcatcgaactcaacgaagcctttgcggcgcaagctttagcctgcattcgcgaatggggattggaggacaacgacccaagaattaaccctaatggcggctcaattgccatcggtcatccgcttggtgtcacaggcgcgcgcatcgcctattctgccgctttggagttgcaggaaaccaacaagcgttacgcattagtcacgatgtgcgtcggcgttggacaaggctatgcggcgattatcgaaaacgtgaatttatag

SEQ ID NO: 101064 - protein, 404 aa, Croceibacter atlanticus HTCC2559
MKEAYIIDGTRTPIGSYHGTLSAVRTDDLGAMVIKHVLEKNPNIPKDAFDDVIMGCANQAGEDNRNVARMCSLLAGMPFSVPGETVNRLCSSGLSAIIHANRAIKAGDGDLFISGGVENMTRGPYVMSKPSKAFGNDSKMYDSSFGWRFVNPKMHEMYGTDGMGNTAENLVEKYNISREDQDAFAYNSQMKATKAQENGRLAKEIMTVEIPQRKKDPIQFSKDEFVKPTTTKEILGKLRPAFKKEGGSVTAGNSSGLNDGAAATIVASEDAVKKYNLKPLARIVSSAVVGVEPRIMGIGPVKASNKALEKAGLTMEDIDIIELNEAFAAQALACIREWGLEDNDPRINPNGGSIAIGHPLGVTGARIAYSAALELQETNKRYALVTMCVGVGQGYAAIIENVNL

SEQ ID NO: 101065 - DNA, 1191 bp, Croceibacter atlanticus HTCC2559
  CDS (1)..(1191): transl_table=11
atgaatacagcatatattgtacaagcatatagaacagcagtaggaaaagcacctagaggcgtttttagatttaaacgcccagatgagcttgctgcagaaaccattcagttcatgatggataaattaccagactttgacaagcatcgtatagatgacgttatagttggtaacgcaatgccagaagcagaacaaggtttaaatatggcacgccttatttctttaatggggttaaaaatagaagatgtacctggcgtaactgttaataggtattgtgcttcaggagtagaaactattgctatggcaacagctaagattcaatctggaatggcagattgtattattgctggtggtgcagaaagcatgagttacataccaatgggaggctataaaccagtaccagattataaactagcgcacaaaggtcacgaagattattattggggaatgggattaacagcagaagctgttgcaaatgaatttaaagtatctcgagatgatcaagatgagtttgcgtataattctcatatgaaagccttgaaagctcaagaagaaaatcgttttcaagaccagattgtacctattgatgttgaagatacttttgtaggtgataatggtaagaaacaaacaaaaacatacacagttaataaagacgaaggtccgagaaaaggaactaacaaagaagctttagcaaaactaagacctgtatttgcagatggcggtagtgtaactgctggaaactcttcacaaatgagtgatggtgctgcatttgtaatggtaatgagtgaagctatggttaaagaactaaatcttgaacctattgcaagaatggtaaactttgcagcagcaggcgtacctcctagaataatgggtataggtcctattaaagctattcctaaagctttaaaacaagcaggattaaaacaagacgatttagatttaattgaacttaatgaagcgtttgcatcacaatctctagcagttataagagagttaggcctcaataaagatattgtaaacgtaaatggtggtgccattgcacttgggcatccactaggatgcacaggagctaaattaagtgtacagttattcgacgagatgcgtaaacgcaatatgaaaggaaaatatggcgccgtaactatgtgcgtaggtacaggacaaggtgcttgtggtatatatgaatttttaaattaa

SEQ ID NO: 101066 - protein, 396 aa, Croceibacter atlanticus HTCC2559
MNTAYIVQAYRTAVGKAPRGVFRFKRPDELAAETIQFMMDKLPDFDKHRIDDVIVGNAMPEAEQGLNMARLISLMGLKIEDVPGVTVNRYCASGVETIAMATAKIQSGMADCIIAGGAESMSYIPMGGYKPVPDYKLAHKGHEDYYWGMGLTAEAVANEFKVSRDDQDEFAYNSHMKALKAQEENRFQDQIVPIDVEDTFVGDNGKKQTKTYTVNKDEGPRKGTNKEALAKLRPVFADGGSVTAGNSSQMSDGAAFVMVMSEAMVKELNLEPIARMVNFAAAGVPPRIMGIGPIKAIPKALKQAGLKQDDLDLIELNEAFASQSLAVIRELGLNKDIVNVNGGAIALGHPLGCTGAKLSVQLFDEMRKRNMKGKYGAVTMCVGTGQGACGIYEFLN

SEQ ID NO: 101067 - DNA, 1203 bp, Sulfitobacter sp. EE-36
  CDS (1)..(1203): transl_table=11
atggacgcttttatttgtgacgcgcagcgcacacccatcggccgctttggcggcgcattgtcatcggtccgcgccgatgatctggcagcggcaccgattgccgcactgatggcccgcaatcctgatctggattggtccaaaatcgatgacgtgatctttggctgtgccaaccaggctggcgaagacaaccgtaacgtggcccgtatggcggctctgctggccggcctgccggtcgatgtgcccggtgcaacgatcaaccgtctgtgtgcctctggcatggatgcggtcggcgtcgcggcccgtgcgatcaaggccggcgacatggatctggcgattgccggcggtgtcgaaagcatgacccgcgcgcctttcgtgatgcccaaggcggaaaccgccttctcgcgcaacaacgctgtctatgataccaccattggctggcgctttgtgaaccccaagatgaaggcgcaatacggcgtcgaatccatgcctgaaaccggcgataacgtggctacggattatgatatcagccgcgaagatcaggacgcctttgccaagcgcagtcaggaccgctgggaagcggcggacaaggccggtgttttcgccgacgagatctcccccgtgtcgatcccgcagcgcaagggcgacccgattgtctttgaccgcgacgaacacccgcgccccggcaccacgattgaagcgctgaccaagctgcgcccgatcaacggccccgacctgaccgtgaccgcgggcaatgcctctggcgtcaacgacggcgcggcggcgatgctgatggcctctgaggcggcggcgtcgcagcacgggctgaccccgattgcacgcgttgtcggtatctctgccgccggtgtcgaaccgcgcgtcatgggcatcggccctgttcctgccagccagaaagttctggcccgcgcaggtctgaccatcgaccagatggatgtgatcgaactgaacgaagcattcgcttcgcaagggatcgccacattgcgcgcgcttggcgtggcggatgatgcgcctcatgtgaatgccaacggcggcgcgattgccatcggtcacccgttggggatgtcaggtgcccgtctggtcatgaccgcagccctgcagttgaaacgtacaggcggccgctatgcgctgtgcaccatgtgtgtcggcgtcggccaaggcgtcgccatcatcctcgaacgcgcttaa

SEQ ID NO: 101068 - protein, 400 aa, Sulfitobacter sp. EE-36
MDAFICDAQRTPIGRFGGALSSVRADDLAAAPIAALMARNPDLDWSKIDDVIFGCANQAGEDNRNVARMAALLAGLPVDVPGATINRLCASGMDAVGVAARAIKAGDMDLAIAGGVESMTRAPFVMPKAETAFSRNNAVYDTTIGWRFVNPKMKAQYGVESMPETGDNVATDYDISREDQDAFAKRSQDRWEAADKAGVFADEISPVSIPQRKGDPIVFDRDEHPRPGTTIEALTKLRPINGPDLTVTAGNASGVNDGAAAMLMASEAAASQHGLTPIARVVGISAAGVEPRVMGIGPVPASQKVLARAGLTIDQMDVIELNEAFASQGIATLRALGVADDAPHVNANGGAIAIGHPLGMSGARLVMTAALQLKRTGGRYALCTMCVGVGQGVAIILERA

SEQ ID NO: 101069 - DNA, 1212 bp, Roseovarius nubinhibens ISM
  CDS (1)..(1212): transl_table=11
atgtctgacgcctatatctacgatgccgtccgcaccccgcgcggcaaaggccgcaaggacggcgccctgcacgaagtgacctccgtgcggctctcggcacaggttctcaacgcgctcaaagagcgcaacggtctcgacgggcatgccgtcgaggatgtgatctggggcaatgtcacccaggtgatggaacagggtggctgtctggcacggaccgccgtgctcgcctccgatctcgacgagagcattccgggcctcgccatcaaccggttctgcgcctccggcatggaggcggtgaacctcgccgccaaccaagtgcgcggcggtgccggtcaggcctatatcgcgggcggcgtcgaaatgatgggccgcgttgccatgggcagcgacggggcggcgattgccgtcgatccgaccgtggccatggacagctatttcgtgccgcaaggcatcagcgccgacatcatcgccaccgaatacgggttcacccgtgatcaggccgatgcgctggcggtcgaaagccagaaacgcgccaaggcggcctgggacgacaaccggttcgagaaatccatcatcacggtgaaggaccaaaacgggctcaccattctcgaccatgacgaatacatgcgcccgggcaccgacatgcaggcgctcggcagcctcaacgcgagctttcaggcgatgggcgaggtgatgccgggctttgacgcggtggccaagctcaaatacccgcatctcgagcggatcaaccacatccaccacgccggcaacagctcgggcatcgtcgatggctcggcgggcgttctcatcggcaatgcggagttcggcaaggcctatgggctcaagccgcgcgcccgcatccgccagacctgcaagatcggcaccgatcccacgatcatgctgaccgggccggtgcctgccaccgaaaagatcctcgccgacagcggcatgaagatcggcgacatcgaccttttcgaggtcaatgaagcctttgccagcgtcgtgctgcgctttcagcaggcctttgacgtcgatccttcgctggtcaatgtcaacggcggctcgatcgccatgggccacccgctcggcgcgaccggggcgatcatcatcggcacgcttctggacgagctcgaacgctcggacaaggaggtgggtctcgccacgctctgcatcgcgtccggcatgggcgcggccacgatcatcgaacgcgtctga

SEQ ID NO: 101070 - protein, 403 aa, Roseovarius nubinhibens ISM
MSDAYIYDAVRTPRGKGRKDGALHEVTSVRLSAQVLNALKERNGLDGHAVEDVIWGNVTQVMEQGGCLARTAVLASDLDESIPGLAINRFCASGMEAVNLAANQVRGGAGQAYIAGGVEMMGRVAMGSDGAAIAVDPTVAMDSYFVPQGISADIIATEYGFTRDQADALAVESQKRAKAAWDDNRFEKSIITVKDQNGLTILDHDEYMRPGTDMQALGSLNASFQAMGEVMPGFDAVAKLKYPHLERINHIHHAGNSSGIVDGSAGVLIGNAEFGKAYGLKPRARIRQTCKIGTDPTIMLTGPVPATEKILADSGMKIGDIDLFEVNEAFASVVLRFQQAFDVDPSLVNVNGGSIAMGHPLGATGAIIIGTLLDELERSDKEVGLATLCIASGMGAATIIERV

SEQ ID NO: 101071 - DNA, 1194 bp, Oceanicola batsensis HTCC2597
  CDS (1)..(1194): transl_table=11
atgaccgaagcttacctttgcgatggcctgcgcacgccgatcgggcgctatggcggggcgctttcggcggtccgtcccgacgacatgctggcccatgtgatgcgcgacctgatggcccggaacgagggtctgaaggtcgacgaggtcatgatgggctgcgccaaccaggcgggagaagacaatcgcaacgtcgcacggatggccacgctgctcgcgggtctcggcgaggacgttccggggatgacgatcaaccggctctgcgggtccggtctggacgcggtcggcacggcggcgcgggcgatcaggacaggcgaggccgaggtggtgatcgcgggcggcgtggaatcgatgagccgcgcgcccctggtgatgcccaaggccgagaccgccttttcgcgcagggccgagatctatgacacgaccatcggctggcggttcgtgaacaaggagatgcacaagcacttcggcaccgattccatgcccgagaccgccgagaacgtggccgagcagttccaggtcggtcgcgaagctcaggacgcctttgccctgcggtcccagcagcgcgccatcgcggccatcgagggcggccgcctggccgaggagatcacgccggtcaccattccgcagcgcaagggagacccgatcgtcgtggaccgcgacgagcacccgcgcgacaccacgctggaaaagctggccaagctgccgacgcccttccgcgagggcgggacggtcaccgcgggcaacgcctcgggcgtgaacgacggggcctgcgcggtcatcgtcgcctcggcggccgcggtcgagaaatacgggctgacgccgcgggcgcggatcgtcgccatggccaccgccggggttccgccccggatcatggggatcggtcccgcaccggcgaccgagaaactgctggccatgaccggcacctcgatcggcgaggtggatctgatcgagttgaacgaggccttcgccgcgcaggggctggcggtgacgcggcagctgggcctgccggatgacgcggatcatgtgaacccgaacggcggggcgatcgcgctcggccatccgctcggcatgtccggggcccggctggcgctgacggcggggctttctctgggtcacatgggcggtaagcgcgcgatctgcaccatgtgcatcggcgtcggccagggcatcgcgctgatgctcgaggcggcctga

SEQ ID NO: 101072 - protein, 397 aa, Oceanicola batsensis HTCC2597
MTEAYLCDGLRTPIGRYGGALSAVRPDDMLAHVMRDLMARNEGLKVDEVMMGCANQAGEDNRNVARMATLLAGLGEDVPGMTINRLCGSGLDAVGTAARAIRTGEAEVVIAGGVESMSRAPLVMPKAETAFSRRAEIYDTTIGWRFVNKEMHKHFGTDSMPETAENVAEQFQVGREAQDAFALRSQQRAIAAIEGGRLAEEITPVTIPQRKGDPIVVDRDEHPRDTTLEKLAKLPTPFREGGTVTAGNASGVNDGACAVIVASAAAVEKYGLTPRARIVAMATAGVPPRIMGIGPAPATEKLLAMTGTSIGEVDLIELNEAFAAQGLAVTRQLGLPDDADHVNPNGGAIALGHPLGMSGARLALTAGLSLGHMGGKRAICTMCIGVGQGIALMLEAA

SEQ ID NO: 101073 - DNA, 1170 bp, Erythrobacter sp. NAP1
  CDS (1)..(1170): transl_table=11
atgaccactgcctatatcgtcgacgccgtccgcaccgcaggtggacgccgcggcggccgccttgccggggttcacccggtcgacatgctcgcaaagtcactcgacgccatcgttgatcgctctggcatcgaccctgctgccgtcgatgatgtcatcaccggctgcgtcagccaggcgggcgagcaggcaatgcaggtcgggcgcatgggcgtcttgtcctcgaagcttcccgacagcgttccggcggtcacgatcgaccgccaatgcggctcctcgcagcaggcgattcagttcgcagcgcaggccgtgatgagcgggacgcaggacgtcgtgatcgcgagcggcgttgaaagcatgacccgcgtgccgatgggcaccaacgcaacgctgcacatgaaagaggggctgggccactacaagtcgccgggcctcgaagagaagtttcccggcatccagttcagccagttcatgggcgctgaaatgatcgccaagaagcacggcttcaccaaggagcagctcgacagctttgctctctccagccacaccaaggcgaagatggcgaccgaaaccggcgcattcgagaacgagattgtcccggtcgagattgagacgcccgaaggcaccgagatgcacaccgtcgatgaaggcatccgcttcgatgcgacgctcgaagggatttctggggtcaagctgatctcacccgatggcatggtgaccgccgcaagcgcgagccagatctgcgacgggtcgagcgcggtgctggtggtttcagaagaagccctgaagcgctacggcctcaccccgatggctcgcattcacaacctcaccgttacggcgggcgaccctgtgatcatgctcgaagagccgctgtttgcgaccgacaaggcgctcgatcgcgctgggctcaagatcgacgatatcgacctttacgaagtgaacgaagcgtttgcgcccgttccgctcgcatggctcaagcacaccggcgcggacccggaaaagctcaacgtccacggcggcgctattgcgcttggccacccgcttggcgcatcgggcaccaagctgatggcgacgctcgttcacgcgctcaagcgccacgataagaaatacggcctgcagacgatgtgcgaaggcggcggcgttgccaatgtcaccatcgttgaaagcgtttaa

SEQ ID NO: 101074 - protein, 389 aa, Erythrobacter sp. NAP1
MTTAYIVDAVRTAGGRRGGRLAGVHPVDMLAKSLDAIVDRSGIDPAAVDDVITGCVSQAGEQAMQVGRMGVLSSKLPDSVPAVTIDRQCGSSQQAIQFAAQAVMSGTQDVVIASGVESMTRVPMGTNATLHMKEGLGHYKSPGLEEKFPGIQFSQFMGAEMIAKKHGFTKEQLDSFALSSHTKAKMATETGAFENEIVPVEIETPEGTEMHTVDEGIRFDATLEGISGVKLISPDGMVTAASASQICDGSSAVLVVSEEALKRYGLTPMARIHNLTVTAGDPVIMLEEPLFATDKALDRAGLKIDDIDLYEVNEAFAPVPLAWLKHTGADPEKLNVHGGAIALGHPLGASGTKLMATLVHALKRHDKKYGLQTMCEGGGVANVTIVESV

SEQ ID NO: 101075 - DNA, 1164 bp, Pseudoalteromonas tunicata D2
  CDS (1)..(1164): transl_table=11
atgaaaactccagtaattgttgattgtattcgtacacctatggggcgttcacgtaatggtatttttcgtcatactcgcgctgaagatttaagtgcgcacttgatgaaaggtttacttgatcgtaacccagcgctcaatcctgcacagatagacgatatctactggggttgtgttcagcaaacattagagcaaggcttcaatattgcacgtaacgccgcccttcttgcaggcattccacacacagtacctgcagtgactgttaaccgtttgtgtggttcatcgatgcaggcaattcatgatgctgctcgtgccattatgaccggtgctggtgatgtctatattgtcggtggtgttgagcatatgggccatgtaccaatgagccatggtgttgactttcatgcgggcttatctaaatcagtagcgcaagctgcgggtatgatgggcttaacagcagaatacttagcaacattgcatggtattagccgccagcaacaagatgaatttgcggtgcgttctcaccaacgtgcttatgctgcaacggttgaaggtcgctttaaacgtgaaatattaccaacacttggccacgatgaagacggtacgttaatcagtattgatactgatgaagtgattcgccctgaaacaactcttgaaggtctagcgcaacttcgccctgcatttaatcctgcaagtggcactgtaacagcaggtacttcatctgcattatcagatggtgcatctgcgatgttgatgatgtctgaagaaaaagcattagaacttggtttaccaattcgtgcccgcgttaaagcaatggcggttgccggttgtgatccatctatcatgggttacggccctgtacctgcaagtaaaaaagcattacaagctgctggcattactattgatgatattggtgttgctgaacttaacgaagcctttgccgcacaagctttacctgtgctaaaagatcttggtttaagtgaagtagttgatgaaaaagtgaatttaaatggtggcgcaatttcattaggtcatccattaggttgttcgggcactcggatcagcacaaccttattacatttaatggaagataaaaacgcacaatatggtttagcaactatgtgtattggtttaggccaaggcattgcaactatttttgagcgtccataa

SEQ ID NO: 101076 - protein, 387 aa, Pseudoalteromonas tunicata D2
MKTPVIVDCIRTPMGRSRNGIFRHTRAEDLSAHLMKGLLDRNPALNPAQIDDIYWGCVQQTLEQGFNIARNAALLAGIPHTVPAVTVNRLCGSSMQAIHDAARAIMTGAGDVYIVGGVEHMGHVPMSHGVDFHAGLSKSVAQAAGMMGLTAEYLATLHGISRQQQDEFAVRSHQRAYAATVEGRFKREILPTLGHDEDGTLISIDTDEVIRPETTLEGLAQLRPAFNPASGTVTAGTSSALSDGASAMLMMSEEKALELGLPIRARVKAMAVAGCDPSIMGYGPVPASKKALQAAGITIDDIGVAELNEAFAAQALPVLKDLGLSEVVDEKVNLNGGAISLGHPLGCSGTRISTTLLHLMEDKNAQYGLATMCIGLGQGIATIFERP

SEQ ID NO: 101077 - DNA, 1167 bp, Photobacterium sp. SKA34
  CDS (1)..(1167): transl_table=11
atgaataacgttgtaattgttgattgtatccgcaccccgatgggacgttcaaaagctggggcttatagaaacgttcgcgccgaagatctttcagcccacttaatgaaaggcttgcttgagcgcaacccacaacttaatccaaacaatattgaagatatttactggggctgtgtgcagcaaaccttagagcaaggttttaatgtcgcacgtaatgccgcacttttagcaggcattccccactctgttggtgcaacaactgttaatcgcttatgtggttcatcaatgcaggcgatacatgatgcaacccgcgcaatcatggttggtgacgcgaaaacatgcattataggtggcgttgagcacatgggacatgtaccaatgaaccatggtgttgatttccatccagggttatcaaaatccgttgcaaaagcggcaggtatgatgggactaaccgctgaaatgttaggtcgaatgcatggtatcagtcgagaaatgcaagatgcctttgctgcacgatctcatcagcgagcttacgctgccacagttgaaggacgatttaataacgagatattcgctactgaaggtcacgatagcgatgggattttaaagcgctttgaaaccgatgaagttattcgtcctgaaacaaccgtcgaaacattgagtcagcttcgccctgtattcgatcccgtcaatggcaccgttaccgcaggcacctcttcagccttatctgatggcgcatccgctatgctactaatggatgagcaacacgcccgtgatttagggctacgtattcgtgcacgcgtaaaatcaatggctgttgcaggctgcgatccatctattatgggatatggcccagtacctgccactcaaaaagcactcaaacgatcgggcttaaccatcgatgacatcggaatgatagaactaaatgaagcctttgcagcgcaatcactcccttgcgctaaggacttaggtctactcgataaaatggatgaaaaagtcaatctaaatggtggtgcgattgcacttgggcatcctcttggatgttctggctcacgtatttcaaccactttaataaatttaatggaaagtcatgacgttgagtttggtttagccaccatgtgtattggtttaggccaaggtattgctaccatttttgaacgcgtagaataa

SEQ ID NO: 101078 - protein, 388 aa, Photobacterium sp. SKA34
MNNVVIVDCIRTPMGRSKAGAYRNVRAEDLSAHLMKGLLERNPQLNPNNIEDIYWGCVQQTLEQGFNVARNAALLAGIPHSVGATTVNRLCGSSMQAIHDATRAIMVGDAKTCIIGGVEHMGHVPMNHGVDFHPGLSKSVAKAAGMMGLTAEMLGRMHGISREMQDAFAARSHQRAYAATVEGRFNNEIFATEGHDSDGILKRFETDEVIRPETTVETLSQLRPVFDPVNGTVTAGTSSALSDGASAMLLMDEQHARDLGLRIRARVKSMAVAGCDPSIMGYGPVPATQKALKRSGLTIDDIGMIELNEAFAAQSLPCAKDLGLLDKMDEKVNLNGGAIALGHPLGCSGSRISTTLINLMESHDVEFGLATMCIGLGQGIATIFERVE

SEQ ID NO: 101079 - DNA, 1176 bp, Oceanospirillum sp. MED92
  CDS (1)..(1176): transl_table=11
atgagcttgaaaccaactgacgtagttatcgttgacggtgttcgtaccccgatgggtaaatccagaaacggttcttttcgaaatgtacgtgcagaagcactatcagctgcagtgatgaaggcgctgcttgagcgtaatccatcgcttaagcctgccgctattgaagacatcatgtggggctgtgttaaccagactaaagagcagggcttcaatatcggccgaaatgctgcagtgctggcgggcattccgcacaccgtagcagcacagacaatcaaccgtttgtgtggttcttcgatggctgctctgcatgccgctgctcaggcaatcatgaccggtaacggtgatatcttcatcgctggtggtgtcgagcacatgggccacgtatcgatcatgcacggcgtagatgttaacccagagatgtcaaagcaggtggctaaagctgccatgatgatgggtgtaacagcagagatgctgggtaagatgaacggtatcagtcgagaaatgcaggacgaatttgctgcacgctcacaccgtctggcacatcaggcacaccttgatggtctttgggataacgaaatcatcccggtggaaggccatgatgagaacggctttaaatcactgctggaagcagacgaagtaattcgtcctgaaactacggtagaaacgctgagtacgctgaaaccggtcttcgtccctaaagtgggtacagtcacagcgggcacttcgtcagcattctctgatggcgcatccgccatgctagtgatgtctgcggcgaaagcggaagagcttggcctgacaccacgtgcgcgtattgtcagcatggcagtcgcgggttgtgatccatctattatgggttacggcccagtgcctgcaacgcagaaagcgctgaaacgtgccggcctgacaatcgatgatatcgactatgtcgagctgaacgaagccttcgcagctcagggcctgtcagttctgaaaggtctgaacctgctcgataaaatggacgataaagtaaacctgaaaggtggtgcgattgcactgggtcacccactgggttgttccggtactcgtatcactaacaccctgatgaacgttctggaacagaaggacgcgacattaggcctggcaaccatgtgtatcggcatgggtcagggcatctccaccgtaattgaacgtgtttga

SEQ ID NO: 101080 - protein, 391 aa, Oceanospirillum sp. MED92
MSLKPTDVVIVDGVRTPMGKSRNGSFRNVRAEALSAAVMKALLERNPSLKPAAIEDIMWGCVNQTKEQGFNIGRNAAVLAGIPHTVAAQTINRLCGSSMAALHAAAQAIMTGNGDIFIAGGVEHMGHVSIMHGVDVNPEMSKQVAKAAMMMGVTAEMLGKMNGISREMQDEFAARSHRLAHQAHLDGLWDNEIIPVEGHDENGFKSLLEADEVIRPETTVETLSTLKPVFVPKVGTVTAGTSSAFSDGASAMLVMSAAKAEELGLTPRARIVSMAVAGCDPSIMGYGPVPATQKALKRAGLTIDDIDYVELNEAFAAQGLSVLKGLNLLDKMDDKVNLKGGAIALGHPLGCSGTRITNTLMNVLEQKDATLGLATMCIGMGQGISTVIERV

SEQ ID NO: 101081 - DNA, 1209 bp, Oceanospirillum sp. MED92
  CDS (1)..(1209): transl_table=11
atgaccgatgcatatatctgtgatgcgatccgcacacccttcggccgttacggtggtggtttagcccctgtacgtccggacgatctgggcgcgatcccactgaaagcactgatggaacgtaaccctcaggttgactgggcaagcgttgaagacgtgatctacggtaatgctaaccaggcaggtgaagataaccgtaacgttgcacgtatgtcttctttgctggcaggcctgccaacctctgtaccgggtactacggttaaccgtctgtgtggttctggtatcgatgcgatcggcatggctgcacgtgcaatcaaagcaggcgaaaccgatctgatgatcgccggtggttgtgaatctatgtcacgtgcgcctttcgttatgggtaaagctgaatctgcattcagccgtaatccaaacggtctgttcgatacgacaatcggctggcgtttcatcaacaagaagatgaaagcagagttcggcgttgattcaatgcctgaaacggctgagaacgtcgcagaagatttcaacatctcccgtgaagaccaggacctgttcgcattccgcagccagcagaaaactgcggctgcgatggaagcaggcgtctttaaagaagagatcgttccggttgtgattccacagcgtaaaggcgacgacgttgttgtagataccgatgagcacccgcgtgcttctactactctggaaggtctggctaagctgaaagcacctttccgtgaaggcggttctgtaactgcaggtaacgcttctggtgtaaacgatggtgcttgtgctctgctgatcgcgtctaaagaggcggcagagaagaatggtctgacacctaaagcacgtatcgttggcatggcaacagcgggccttgagcctcgcatcatgggctttggccctgcgccagccactaagaaagttctggaaaaaaccggcctgacactggaccagatggatgtgatcgaactgaacgaagcattcgcatctcagggtctggcggtcatgcgtgatctgggtcttccagatgatgctgcccacgtaaacccgaatggcggcgcgatctctctgggtcacccactgggtgccagcggtgcacgtctggtgactacagctatgtaccagctacaccgtaccggtggtcgctacgcgctgtgcacaatgtgtatcggtgtcggtcagggtatcgcaattattatcgagcgcgtttaa

SEQ ID NO: 101082 - protein, 402 aa, Oceanospirillum sp. MED92
MTDAYICDAIRTPFGRYGGGLAPVRPDDLGAIPLKALMERNPQVDWASVEDVIYGNANQAGEDNRNVARMSSLLAGLPTSVPGTTVNRLCGSGIDAIGMAARAIKAGETDLMIAGGCESMSRAPFVMGKAESAFSRNPNGLFDTTIGWRFINKKMKAEFGVDSMPETAENVAEDFNISREDQDLFAFRSQQKTAAAMEAGVFKEEIVPVVIPQRKGDDVVVDTDEHPRASTTLEGLAKLKAPFREGGSVTAGNASGVNDGACALLIASKEAAEKNGLTPKARIVGMATAGLEPRIMGFGPAPATKKVLEKTGLTLDQMDVIELNEAFASQGLAVMRDLGLPDDAAHVNPNGGAISLGHPLGASGARLVTTAMYQLHRTGGRYALCTMCIGVGQGIAIIIERV

SEQ ID NO: 101083 - DNA, 1206 bp, Xanthobacter autotrophicus Py2
  CDS (1)..(1206): transl_table=11
atgagcgacgccttcatctgtgacgcggtgcgcacgcccatcgggcgctatgccggcgcgctggcctcggtgcggccggacgacctggcggcccacgtgatccgcgccctcgccgcgcgcagccccggcctcgatgcggctcaggtggaggacgtgatcttcggctgcgccaaccaggccggcgaggacaaccgcaacgtggcccgcatgggcgccctgctctccggcctgcccatcgaggtgcccggctccaccatcaatcggctgtgcggctcgggcatggatgcggtgggcactgccgcccgcgccatcaaggccggcgagaccgacctcatgatcgccggcggcgtcgagagcatgagccgcgcccccttcgtcatgggcaaggccgacagcgccttctcccgcgccgccaagatcgaggacaccaccatcggctggcgcttcgtgaacccggccatgaaggccctgcacggggtcgattccatgcccgagaccgccgagaacgtggcggaggatttccagatcagccgcgcccgccaggacgccttcgcgctggaaagccagcgccgcgccgccgaggcctgggccgccggccgcttcgccgacgagatcgtggcggtgagcatcccccagcgcaagggcgaccccaagctgttcgaccgcgacgagcacatgcgccccgacaccaagctggaagacctcgcccgcctcaagggcgtggtgaagcccggcggcaccgtgaccgccggcaacgcctccggcgtcaatgacggcgcggccgccctgctgctggcctccgccgccggggtggagaagcacggcctcaccccgcgcgggcgcgtcatcgccatggccaccgccggcgtgccaccgcgcatcatgggcatggggcctgccccggccacccgcaaggtgctggagaaggccggcctgacacttgccgacatggacgtgatcgagctgaacgaggcgtttgccgcgcaggcctgcgccgtgctcgccgacctcggcctgccggatgacgccgcccatgtgaaccctaacggcggcgccatcgcccttggccatccgctcggcatgtcgggggcgcggctcatcaccaccgcgctctaccagctccaccgcaccggcgggcgctacgccctcgccaccatgtgcatcggcgtcggccagggcatcgccaccatcatcgagcgggtgtga

SEQ ID NO: 101084 - protein, 401 aa, Xanthobacter autotrophicus Py2
MSDAFICDAVRTPIGRYAGALASVRPDDLAAHVIRALAARSPGLDAAQVEDVIFGCANQAGEDNRNVARMGALLSGLPIEVPGSTINRLCGSGMDAVGTAARAIKAGETDLMIAGGVESMSRAPFVMGKADSAFSRAAKIEDTTIGWRFVNPAMKALHGVDSMPETAENVAEDFQISRARQDAFALESQRRAAEAWAAGRFADEIVAVSIPQRKGDPKLFDRDEHMRPDTKLEDLARLKGVVKPGGTVTAGNASGVNDGAAALLLASAAGVEKHGLTPRGRVIAMATAGVPPRIMGMGPAPATRKVLEKAGLTLADMDVIELNEAFAAQACAVLADLGLPDDAAHVNPNGGAIALGHPLGMSGARLITTALYQLHRTGGRYALATMCIGVGQGIATIIERV

SEQ ID NO: 101085 - DNA, 1149 bp, Xanthobacter autotrophicus Py2
  CDS (1)..(1149): transl_table=11
atgcaaaacgttgtgattgcggggtacgcccgctcgcccttcgcccttgccaagaagggtgaactggcgcgcgtgcgcccggatgacctcgccgcacaggtggtggcggagctggtggcccgcaccggcgtcaaggtcgaggacatcgaggacctcatcgtcggctgcgcttttcccgaggcggagcagggctttaacatcgcgcgcctgatcggcatgatcgccggcctacccgacagcgtcgccggcgcaacggtaaaccgcttctgcggctcgtccatgcagtcggtgcacatggcggccggtcagatccaactgggcgccggcgaagtcttcatctgcgccggcatcgagagcatgagccgcgtgcccatgaccggcttcaatcccatgcccaatccggcgctctacgccaagctcccgcaggcctacatgggcatgggcgagacggcggaaaatgtcgccgccaagtggcagatcacccgcgccgaccaggatgctttcgccttgaaaagccatgcgaaagcaacggcggccgaggccgccggcaagttcgccgacgagatcgtttccatccgcataaacggcaaggactcgggcaagaccgccacccaggacggctgcatccgccgcgatgccacggccgagcagctggccggcctcaagcccgcttttgacgagcatggcaccgtcaccgccggcacctcctcccccctcaccgatggcgcgtctgccgtgctggtgtgctcggaggactatgcgctgaagcatggcctggagcccctcgcccgcctgaaaggcgttgcggttgctggctgcgcgccggagatcatgggcatcggcccggtggcggcgaccaagaaggcgctgacccgctccggcatcgacatctcgcagatcgacgtggtggagctgaacgaggccttcgcctcccaggcccttgcctgccaacgcgaactcggcgtccgcgacgagaccctcaacatcgacggcggcgccatcgcgctcggccatccgctgggggctaccggggcgcgcatcgtcggcaaagccgcgtcgttgctgaagcgggaaggcggcaaatatgccctcgccacccagtgcatcggcggcggacagggcatcgccaccgtcctcgaacgcgtctga

SEQ ID NO: 101086 - protein, 382 aa, Xanthobacter autotrophicus Py2
MQNVVIAGYARSPFALAKKGELARVRPDDLAAQVVAELVARTGVKVEDIEDLIVGCAFPEAEQGFNIARLIGMIAGLPDSVAGATVNRFCGSSMQSVHMAAGQIQLGAGEVFICAGIESMSRVPMTGFNPMPNPALYAKLPQAYMGMGETAENVAAKWQITRADQDAFALKSHAKATAAEAAGKFADEIVSIRINGKDSGKTATQDGCIRRDATAEQLAGLKPAFDEHGTVTAGTSSPLTDGASAVLVCSEDYALKHGLEPLARLKGVAVAGCAPEIMGIGPVAATKKALTRSGIDISQIDVVELNEAFASQALACQRELGVRDETLNIDGGAIALGHPLGATGARIVGKAASLLKREGGKYALATQCIGGGQGIATVLERV

SEQ ID NO: 101087 - DNA, 1179 bp, Xanthobacter autotrophicus Py2
  CDS (1)..(1179): transl_table=11
atgaaggacgaggtcgtcatcgtcagcgcagcgcgcaccccggtcgggtcgttcaacggcgcgctcgcgccgttgcccgcccatgagctgggcgcgatcgccatcaaggcggcgctggagcgcgccggacttcccgccgataccgtcagcgaagtgattctcggtcaggtgctgactgcagcccaaggccagaaccccgcccgccaggcctcgctgaaggccggcctgcccatcggcgtcccggcgtgggaagtgcagatggtgtgcggctccgggctgcgctccgtggcgctgggcgctcaggccatcgtcaacggcgacagcgaaatcgtcgtggccggcggccaggaatccatgagccagtccacccacgcggcccacgtgcgcaacggcacccgcatgggcggcctcgagttcgtggacaccatgatcaaggacggcctgtgggatgccttcaatggctaccacatgggcaacaccgccgagaacgtggcgcgccagttccagatcacccgccaggagcaggacgagttcgccgtcgcttcccagaacaaggcggaagcggcccagaagggcggcaagttcaaggaggagatcgtccccgtcaccatctccacccgcaagggcgacgtggtggtggaccaggacgaatacatccgccacggtgccagcatcgaggccatgaccaagctgaagcccgccttcgccaaggacggcacggtgaccgccggcaacgcctccggcatcaatgacggcgccgccgccgtggtgctcatgagcgccgccaaggccaaggccgagggccgcaccccgctggcccgcatcgtctcctgggcgcaggccggcgtcgatccgtcgatcatgggcacgggtcccatccccgcctcccgcctcgcgctggagaaggccggctggagcgcctcggacctcgacctggtggaagccaacgaggccttcgccgcccaggccatcgccgtgaacaaggacctcggctgggataccagtaaggtgaacgtgaacggcggcgccatcgccatcggccaccccatcggcgcctcgggcacccgcatcctggtgaccctgctgcacgagatgcagaagcgcgacgccaagaagggccttgccaccctgtgcatcggcggcggcatgggcatcgccatgtgccttgcgcgggactga

SEQ ID NO: 101088 - protein, 392 aa, Xanthobacter autotrophicus Py2
MKDEVVIVSAARTPVGSFNGALAPLPAHELGAIAIKAALERAGLPADTVSEVILGQVLTAAQGQNPARQASLKAGLPIGVPAWEVQMVCGSGLRSVALGAQAIVNGDSEIVVAGGQESMSQSTHAAHVRNGTRMGGLEFVDTMIKDGLWDAFNGYHMGNTAENVARQFQITRQEQDEFAVASQNKAEAAQKGGKFKEEIVPVTISTRKGDVVVDQDEYIRHGASIEAMTKLKPAFAKDGTVTAGNASGINDGAAAVVLMSAAKAKAEGRTPLARIVSWAQAGVDPSIMGTGPIPASRLALEKAGWSASDLDLVEANEAFAAQAIAVNKDLGWDTSKVNVNGGAIAIGHPIGASGTRILVTLLHEMQKRDAKKGLATLCIGGGMGIAMCLARD

SEQ ID NO: 101089 - DNA, 1212 bp, Flavobacteria bacterium BBFL7
  CDS (1)..(1212): transl_table=11
atgaaaaacacatatataatagacggtgttcgtacaccgataggaaattacaaaggaacattatctaccataagaccggatgatcttgcagctcatgtaataaaaaccgtagtagatagaaatcctaatattccaacagatgcttatgcagacgtgatcatgggctgtgccaaccaggctggagaagataatcgtaatgtcgctcgcatggcaggattattggctggcttgccagtgactgttcctggagaaacggtgaacagattgtgtagttctggattgagtgccattgtacatgctcatagagccatacaaactggtgatggagaagtttttatttctggtggagtagagaacatgactcgtggaccgctagttattgcaaagcctagcagtgcctttggtaccgactcaaagatgtacgattctagctttggatggcgttttgtcaaccacaaaatggccgaaatgtacggtgtagacggaatgggaaacacggcagagaatcttgtcgagaaatttacgatctctcgagaagatcaagatgcctttgcagcgtggtcccaacaaaaagccacagcagctcaacaatcaggaagacttgctaaggaaatagtagctgtagaaataccacaacgtaaaaaagatccaattatctttaaagatgatgagttcatcaaaccaactactacaaaagaagttctagcaaaactgcgtccagcctttaaaaaagaaggtggatctgtaactgcagggaattctagtggtttgaatgatggtgctgcagcaacgattattgctagtgaagatgctgtaaaaaagtatgaccttaaaccgatagcaagagtagtaagtagtgcggtagttggagtagagccacgcattatgggaataggtccagttacagcgagtaataaagcactagaaaaggcaggtttaacgctagctgatatggatgtaatagaattgaatgaagcatttgcatcacaagcactagcttgcaccagagcttggggacttgcagatgatgatccaagacttaatccgaatggtggatctatcgcgataggtcatccactaggtgtaactggaactcgacttgcttatagtgctgctttagaacttcaattaactaataagaaatatgccttaataactatgtgtgtaggagtagggcaaggctatgcaatggtgattgaaaatgtgagttaa

SEQ ID NO: 101090 - protein, 403 aa, Flavobacteria bacterium BBFL7
MKNTYIIDGVRTPIGNYKGTLSTIRPDDLAAHVIKTVVDRNPNIPTDAYADVIMGCANQAGEDNRNVARMAGLLAGLPVTVPGETVNRLCSSGLSAIVHAHRAIQTGDGEVFISGGVENMTRGPLVIAKPSSAFGTDSKMYDSSFGWRFVNHKMAEMYGVDGMGNTAENLVEKFTISREDQDAFAAWSQQKATAAQQSGRLAKEIVAVEIPQRKKDPIIFKDDEFIKPTTTKEVLAKLRPAFKKEGGSVTAGNSSGLNDGAAATIIASEDAVKKYDLKPIARVVSSAVVGVEPRIMGIGPVTASNKALEKAGLTLADMDVIELNEAFASQALACTRAWGLADDDPRLNPNGGSIAIGHPLGVTGTRLAYSAALELQLTNKKYALITMCVGVGQGYAMVIENVS

SEQ ID NO: 101091 - DNA, 1194 bp, Flavobacteria bacterium BBFL7
  CDS (1)..(1194): transl_table=11
atgatgaaaaccgcatatatagtagctgcaaaacgtactgcagttgggaaagcaccaaaaggagttttccgttttaaaagacctgatgagcttgctgcagaaacaattgaggcaatgcttaaagatgttcctaatctagacaaaacgagaatagatgatgttattataggtaatgcgatgcctgaagcagagcaaggacttaatatggcgcgtcttatttctttaatgggattaaaaatagatgatgttcctggagtaacggttaatagatattgcgcaagtggtgttgaaactattgcgatggcaaccgcaaaaattcaatctggaatggcagattgtattattgctggtggtgcagagtccatgagctatataccaatgggtggttacaaaccaacaccagattatcgagttgccaaagcaggtaatgaggattattactggggaatgggattaactgcagaagctgttgcaaatgaatttaacgtatcacgtgaagatcaagatcaatttgcatacaactctcatcaaaaagctttaaaagcacaagctgaaggtcgttttcaagatcaaattgttcctatcgatgtagaagaaactttcttaaatgccgatggtaaaaaagaaacaagaacttatacagtaaataaggatgaaggtccacgagcagatactaaattagaaatacttgcaaaactacgaccagtttttgcggctggtggttctgttactgctggtaactcatcacaaatgagtgatggtgcagctatggttttagtaatgagtgaagaaatggttaaagagttaaaccttgaacctatcgctcgtatggtcaactttgctgccgctggtgttcctcctagaattatgggtataggtccagtcaaagctattcctaaagcattaaagcaggctggtcttactttaaatgatgtagatatgattgaattaaatgaagcatttgcttctcaatcacttgccgttattagagaattaggacttaatcctgatatcatcaatcctaatggtggtgccatctctttaggacatccactaggttgtaccggagcaaaattgagcgttcaattatttgatgaaatgagaaaacgcgaaatgaaaagtaagtatggtctcgttactatgtgtgtaggaactggacaaggtgcttgtggagtatatgaatttttgaattaa

SEQ ID NO: 101092 - protein, 397 aa, Flavobacteria bacterium BBFL7
MMKTAYIVAAKRTAVGKAPKGVFRFKRPDELAAETIEAMLKDVPNLDKTRIDDVIIGNAMPEAEQGLNMARLISLMGLKIDDVPGVTVNRYCASGVETIAMATAKIQSGMADCIIAGGAESMSYIPMGGYKPTPDYRVAKAGNEDYYWGMGLTAEAVANEFNVSREDQDQFAYNSHQKALKAQAEGRFQDQIVPIDVEETFLNADGKKETRTYTVNKDEGPRADTKLEILAKLRPVFAAGGSVTAGNSSQMSDGAAMVLVMSEEMVKELNLEPIARMVNFAAAGVPPRIMGIGPVKAIPKALKQAGLTLNDVDMIELNEAFASQSLAVIRELGLNPDIINPNGGAISLGHPLGCTGAKLSVQLFDEMRKREMKSKYGLVTMCVGTGQGACGVYEFLN

SEQ ID NO: 101093 - DNA, 1176 bp, Oceanobacter sp. RED65
  CDS (1)..(1176): transl_table=11
atgagctacgcagataacgatgtagttgtaattgatgcggtacgttcaccgatgggtcgctcaaaaggcggcgtgttccgtaacgtccgtgcagaagatatttctgcaaacctaattaacgctttatttgagcgtaacccaaatgcaaacccaaaagacgttgaagatgtaatctggggttgtgttaaccaaactttggaacagggtttcaacgttgctcgtcaaatttctttgatgactgacgttcctaaagaagcggctgcacagactgttaaccgtctatgtggttctgcaatgacagcgattcataccgctgctcaagccattcaaactggtaacggtgatgtattcgttgttggtggtgttgagcacatgggtcacgtaaacatgcagcacggtttcgaccacaacccagcttcttctaagtatgctgccaaagcatctaacatgatgggtctaacggctgaaatgctaggcaaaatgcatggtattactcgtcagcaacaagacgagttcgctgcgcgttcacatcgtctagcgcacaaagcaacgttggaaggtgatttcaaaaatgaaatcgttccaatgtacggccacgatgctgatggtaagcaaattctggttactgaagacgaaacaattcgtccagaaacaacagtagaaagccttggtaagctacgccctgcgttcgatccaaaaggcggtacggtaacagcgggtacttcttcacagatcaccgatggtggttctgcaatgttgctaatgagcggtaaaaaagcaaaagagttaggtctaactcctcgtgctaaaatccgcgcaatggcagttgctggttgtgatgctgcgatcatgggttacggtcctgttcctgcgactaagaaagcacttaagcgtgctggtctagaagcaagcgacatcgaatactgggaactaaatgaagcatttgctgctcagtctcttccatgtgttaaagacctaggtcttaaagacattgctgacgagcgtgtaaatattcacggtggtgcaatcgctctaggtcacccattgggttgttctggtgcgcgtatctctacgactctaatcaacgtattagagcaaaaagatgcgaagcttggcgtatcgactatgtgtatcggtatgggtcaaggtattgctaccgtatgggagcgcctataa

SEQ ID NO: 101094 - protein, 391 aa, Oceanobacter sp. RED65
MSYADNDVVVIDAVRSPMGRSKGGVFRNVRAEDISANLINALFERNPNANPKDVEDVIWGCVNQTLEQGFNVARQISLMTDVPKEAAAQTVNRLCGSAMTAIHTAAQAIQTGNGDVFVVGGVEHMGHVNMQHGFDHNPASSKYAAKASNMMGLTAEMLGKMHGITRQQQDEFAARSHRLAHKATLEGDFKNEIVPMYGHDADGKQILVTEDETIRPETTVESLGKLRPAFDPKGGTVTAGTSSQITDGGSAMLLMSGKKAKELGLTPRAKIRAMAVAGCDAAIMGYGPVPATKKALKRAGLEASDIEYWELNEAFAAQSLPCVKDLGLKDIADERVNIHGGAIALGHPLGCSGARISTTLINVLEQKDAKLGVSTMCIGMGQGIATVWERL

SEQ ID NO: 101095 - DNA, 1179 bp, Desulfitobacterium hafniense DCB-2
  CDS (1)..(1179): transl_table=11
ttgcaggatgtcgtcatcgtcagtgcggttcgtacccccatcgcctccttcggaggcgctttgcaggggtatggggccgttaatttgggagcattggttattcgggaagcggtgcagagagcaggtattcaggggaagcaagtggatgaagtcattatgggcaatgtgctgcaagccggactggggcagaatcctgcccgccaggcggccttgaaagcagggctgcctgtggaaacgacagcccagaccatcaatgtggtttgcggttcaggacttaaagcggtcattgccgcggcccaggccattagggccggggatgccgagatcgtagcggcaggcgggatggaaagcatgtcggatgcggcctttctcctggaccaggccagatggggccagcgcatgggccatggcacccttgtggacagcatgatcaaggatggcctgtggtgtgctttcaatgagtatcatatggggattacggcggaaaatgtcgccgaaaaatatggcatcagccgcagggagcaggatgagtttgcggcctggagccaggctaaggccgtggcggcgatggaaaaaggccgctttaaagaggagattgtcccggtggcgatcccccaaagaaaaggggaaccggttattttcgacagggatgaatatccccgggccggcacaacggtggaaaccttagccaagttaaaaccggcctttaaaaaagacggcacggtaaccgccggcaatgcttccggtatcaatgatgccgccgcggcctgtgtgctgatgagtaaagaaaaagccgctgccctggggattccttatctggcggccattaaaggctacggcatggcaggggtggacccggcgattatgggtgtcgggccggtcaatgccgtgaaaaaggctttgcagaaagcaggcattgccctggatgagcttgatctgatcgaagccaatgaagcctttgccgcacaggctttagctgtcaccaaagaattgggcttccccggggagaaggtgaacgtcaatggcggggctattgctctggggcatcccatcggcgccagcggcacccgtattctcgtcaccttagtgcacgaaatgaaaaaacgccgggataagctgggcctggccaccctttgcatcggcggcgggcagggcatcgcccttgttgtcgagggctga

SEQ ID NO: 101096 - protein, 392 aa, Desulfitobacterium hafniense DCB-2
MQDVVIVSAVRTPIASFGGALQGYGAVNLGALVIREAVQRAGIQGKQVDEVIMGNVLQAGLGQNPARQAALKAGLPVETTAQTINVVCGSGLKAVIAAAQAIRAGDAEIVAAGGMESMSDAAFLLDQARWGQRMGHGTLVDSMIKDGLWCAFNEYHMGITAENVAEKYGISRREQDEFAAWSQAKAVAAMEKGRFKEEIVPVAIPQRKGEPVIFDRDEYPRAGTTVETLAKLKPAFKKDGTVTAGNASGINDAAAACVLMSKEKAAALGIPYLAAIKGYGMAGVDPAIMGVGPVNAVKKALQKAGIALDELDLIEANEAFAAQALAVTKELGFPGEKVNVNGGAIALGHPIGASGTRILVTLVHEMKKRRDKLGLATLCIGGGQGIALVVEG

SEQ ID NO: 101097 - DNA, 1176 bp, Vibrio sp. Ex25
  CDS (1)..(1176): transl_table=11
atgactaatcaaacaagaaatgttgtcgtagtcgattgtctacgtactccaatgggtcgctctaaaggtggtgctttccgtcatacacgagcagaagatctatctgcgcgtctaatgaaaggcattcttgcacgtaacccacaagtgaacccaagcgagattgaagacatctactggggctgtgtacagcaaacactagagcaaggctttaacgttgcacgtaatgccgcgctactcgcgggcctgccgattgaaattggcgctgtgacggttaaccgtttgtgtggctcatccatgcaagcgctgcatgacggtacacgtgccatcatgactggcgatgctgaaatctgcctaattggtggtgttgaacacatgggacacgtaccaatgaaccacggcgtggacttccacccaggtatgtcaaagaacgtagcaaaagctgcgggcatgatgggcttaacggctgaaatgcttggtaaattacatggcattagccgtgagcaacaagacgagtttgccgcgcgctctcacgctcgtgcgcacgcagcaaccgtagagggtcgctttaaaaacgaaatcctaccaattgaaggccatgcggctgacggtacactgtttactctcgactatgatgaagtgattcgccctgaaacatccgttgaaggtctatctcaacttcgcccagtgttcgaccctgcaaacggtacagtaacagccggtacttcatcggcgctgtccgatggtgcatcagcgatgttgatcatgagtgaagagaaagccaatgagcttggcttgaagattcgtgcacgtattaaaggcatggccattgcgggctgcgatccttctattatgggttacggtcctgtaccggcgacgaaaaaagcgctcaagcgtgccggtctttcaattgaagacatggatgtggttgagctaaacgaagcatttgcagcgcagtctctgccgtgtgctaaagacttaggcctgcttgatgtgatggatgagaaggtcaaccttaacggtggtgcgatagcattgggtcatccactaggctgttctggttcacgcatctcaacaacgttgatcaacctaatggaagcgaaagatgcgaaatatggtctagccactatgtgtatcggtttgggtcagggtatagcgaccgtatttgagaggccttaa

SEQ ID NO: 101098 - protein, 391 aa, Vibrio sp. Ex25
MTNQTRNVVVVDCLRTPMGRSKGGAFRHTRAEDLSARLMKGILARNPQVNPSEIEDIYWGCVQQTLEQGFNVARNAALLAGLPIEIGAVTVNRLCGSSMQALHDGTRAIMTGDAEICLIGGVEHMGHVPMNHGVDFHPGMSKNVAKAAGMMGLTAEMLGKLHGISREQQDEFAARSHARAHAATVEGRFKNEILPIEGHAADGTLFTLDYDEVIRPETSVEGLSQLRPVFDPANGTVTAGTSSALSDGASAMLIMSEEKANELGLKIRARIKGMAIAGCDPSIMGYGPVPATKKALKRAGLSIEDMDVVELNEAFAAQSLPCAKDLGLLDVMDEKVNLNGGAIALGHPLGCSGSRISTTLINLMEAKDAKYGLATMCIGLGQGIATVFERP

SEQ ID NO: 101099 - DNA, 1248 bp, marine gamma proteobacterium HTCC2143
  CDS (1)..(1248): transl_table=11
atgacgtgtttcacaacgggtggcagaatttattcacagcagaatcgacacattacagactggagagaaatcatggctgaagcctatatcgttggagcagtaagaacccccggtgggaaaaagaacggatcgttaagcaaaattcaccccgccgacctcggtgctaaaatcatcgacgaactcattaaacgaaccggtattccgggcgataaggtcgacgatgttatttttggctgtgttggccagaatggtgctcaagccggcaacgttgctcgcaatgccattttgtcctcgagcttacccgagagcgttcccggaacaaccgttgaccgccagtgcggctcatctcagcaggccatccattttgccgctcaagcggttatgtcgggcacccaagatatcgttatcgccggcggtgttgaagtcatgagcttggttccaatcggcactaatattatcgactcttacaaggccggacgtggccaacctagcaatagcgaaggcatggaacaacgctacccaggtatcaagttcagccaattcaccggcgcggaaatgattgccaaacaatggggaatgaaaaaagaagctattgatgcgtttgcttacaacagtcacaaaaaagccgccgaagcgactaacgcgggcagattcagcaatgaaattatgcccgttgattttgttgacgaagacggcaatgctcaaacattgagcattgacgaaggcattcgttttgacgccgacctagccgccatgtccagtctaaaaactattgccgagggtggcgtcattaccgctgccaatgcgagtcaaatcaccgatggtgcagcagcgattatgattgttaatgaaaaagcactgaaggaactcggcctgacgcctcgcgcgcggattcataccctgtctgttgttggtgacgatcctatcaaaatgcttactggacctatcccggcaaccaaaaaagcgttggaacgcagcggactgtcaatcgaagacatcgacctttacgaggttaatgaagcctttgcacccgtgccaatggcatgggctcaggaagtcggtgctgatttgaacaagctcaacgttaatggcggtgcctgtgctttgggtcacccactgggtggaacaggcgccaagttaatgaccactttactgcatgagctagaacgtactggcggtaagtatggcctgcaggcgatctgcgaaggtggtggtactgctaacgcgactatcatcgaacggatgtaa

SEQ ID NO: 101100 - protein, 415 aa, marine gamma proteobacterium HTCC2143
MTCFTTGGRIYSQQNRHITDWREIMAEAYIVGAVRTPGGKKNGSLSKIHPADLGAKIIDELIKRTGIPGDKVDDVIFGCVGQNGAQAGNVARNAILSSSLPESVPGTTVDRQCGSSQQAIHFAAQAVMSGTQDIVIAGGVEVMSLVPIGTNIIDSYKAGRGQPSNSEGMEQRYPGIKFSQFTGAEMIAKQWGMKKEAIDAFAYNSHKKAAEATNAGRFSNEIMPVDFVDEDGNAQTLSIDEGIRFDADLAAMSSLKTIAEGGVITAANASQITDGAAAIMIVNEKALKELGLTPRARIHTLSVVGDDPIKMLTGPIPATKKALERSGLSIEDIDLYEVNEAFAPVPMAWAQEVGADLNKLNVNGGACALGHPLGGTGAKLMTTLLHELERTGGKYGLQAICEGGGTANATIIERM

SEQ ID NO: 101101 - DNA, 1206 bp, marine gamma proteobacterium HTCC2080
  CDS (1)..(1206): transl_table=11
atgactgaggcctatatttgtgacgctgtccgcactccaatcgggcgctatggcggtggtttatcagctgtccgtactgatgacttgggcgctatacctatcgctgcgcttatgaaacgtaatcccaatactgattggttggcggttgacgacatttggatgggttgcgctaatcaggcgggagaagacaacagaaatgtggggcgcatgagtgcactgttagcgggcatgccagagcaagtgcctgctgtcacgctaaatcgtttgtgcggttctggcttagatgctgtgggttctgcggctcgcgccatcaagagcggcgaggtcagtttggcgatcgctggcggcgtcgagtcaatgagtcgtgcaccctatgtaacgagtaaagcgaattcagcattcgatcgtaacgtgcagacctacgatacaaccattggttggcgctttgtgaatccggtctttaaaaaacgctggggcacagactcaatgcctgaaacggctgagaatctcgctatacaatttgaaatatcgagggcagatcaagatgcctttgccttacgctcccaacaaaaggctgtcgcagctcaagatgaagggcggctgggagaggaaatcacattggtatcgattccccagcgtaaaggcgattctctgaaagtaaccttagatgaaagccctagaaaggacacgtcattagagcgtttggctagcttgccggctccttttcgagagggcggcacggtaacggcgggtaatgcctctagcgtcaacgatggcgcctgcgccttgctgcttgcgtctgaggccgctgcatcggcacagggactggagccccttgcccgtgttgtggcaatggcgacctcaggtcttgaaccgcgaattatggggcatggtccttacgaggctactttaaaggtgctcgcccaagctggtttgaagcttgcagatatggatgtaatcgaactcaatgaagcttttgcggctcaggcactggcggtaacccgatctctaggattagccgacgatgctgagcacgttaatcccaatggtggtgccatcgcgctggggcaccccctaggtatgagtggtgcgaggttggtcaccacagcggcctatcagttacagcgcagcaatggacgcttcgccttgtgcaccatgtgcattggtgttggacagggtatagccctgattattgaacgtgtttaa

SEQ ID NO: 101102 - protein, 401 aa, marine gamma proteobacterium HTCC2080
MTEAYICDAVRTPIGRYGGGLSAVRTDDLGAIPIAALMKRNPNTDWLAVDDIWMGCANQAGEDNRNVGRMSALLAGMPEQVPAVTLNRLCGSGLDAVGSAARAIKSGEVSLAIAGGVESMSRAPYVTSKANSAFDRNVQTYDTTIGWRFVNPVFKKRWGTDSMPETAENLAIQFEISRADQDAFALRSQQKAVAAQDEGRLGEEITLVSIPQRKGDSLKVTLDESPRKDTSLERLASLPAPFREGGTVTAGNASSVNDGACALLLASEAAASAQGLEPLARVVAMATSGLEPRIMGHGPYEATLKVLAQAGLKLADMDVIELNEAFAAQALAVTRSLGLADDAEHVNPNGGAIALGHPLGMSGARLVTTAAYQLQRSNGRFALCTMCIGVGQGIALIIERV

SEQ ID NO: 101103 - DNA, 1206 bp, Escherichia coli B
  CDS (1)..(1206): transl_table=11
atgcgtgaagcctttatctgtgacggaattcgtacgccaattggtcgctacggcggggcattatcaggtgttcgggctgacgatctggctgctatccctttgcgggagctgctggtgcgaaacccgcgtctcgatgcggagtgtatcgatgatgtgatcctcggctgtgctaatcaggcgggagaagataaccgtaacgtagcccggatggcgactttactggcggggctgccgcagagtgtttccggcacaaccattaaccgcttgtgtggttccgggctggacgcactggggttcgccgcacgggcgattaaagcgggcgatggcgatttgctgatcgccggtggcgtggagtcaatgtctcgggcaccgtttgttatgggcaaggcaaccagtgcattttctcgtcaggctgagatgtttgataccactattggctggcgatttgtgaacccgctcatggctcaacaatttggaactgacagcatgccggaaacggcagagaatgtagctgaactgttaaaaatctcgcgagaagatcaagatagttttgcgctacgcagtcagcaacgttcggcaaaagcgcaatcttcaggcattttagctgaagagattgttccggttgtgttgaaaaataagaaaggtgttgtaacagaaatacaacatgacgagcatttgcgcccggaaacgacgctggaacagttacgtggactaaaagcaccatttcgtgccaatggagtgatcaccgcaggcaatgcctccggggtgaatgacggagccgctgcgttgattattgccagtgaacagatggcagcagcgcaaggactgacaccgcgagcgcgtatcgtagccatggcaaccgccggggtggaaccgcgcctgatggggcttggtccggtgcctgcaactcgccgggtgctggaacgcgcggggctgagtattcacgatatggacgtgattgaactgaacgaagcattcgcggcccaggcgttgggtgtactacgcgaattggggctgcctgatgatgccccacatgttaaccccaacggaggcgctatcgccttaggccatccgttgggaatgagtggtgcccgcctggcactggctgccagccatgagctgcatcggcgtaacggtcgttacgcattgtgcaccatgtgcatcggtgtcggtcagggcatcgccatgattctggagcgtgtttga

SEQ ID NO: 101104 - protein, 401 aa, Escherichia coli B
MREAFICDGIRTPIGRYGGALSGVRADDLAAIPLRELLVRNPRLDAECIDDVILGCANQAGEDNRNVARMATLLAGLPQSVSGTTINRLCGSGLDALGFAARAIKAGDGDLLIAGGVESMSRAPFVMGKATSAFSRQAEMFDTTIGWRFVNPLMAQQFGTDSMPETAENVAELLKISREDQDSFALRSQQRSAKAQSSGILAEEIVPVVLKNKKGVVTEIQHDEHLRPETTLEQLRGLKAPFRANGVITAGNASGVNDGAAALIIASEQMAAAQGLTPRARIVAMATAGVEPRLMGLGPVPATRRVLERAGLSIHDMDVIELNEAFAAQALGVLRELGLPDDAPHVNPNGGAIALGHPLGMSGARLALAASHELHRRNGRYALCTMCIGVGQGIAMILERV

SEQ ID NO: 101105 - DNA, 1266 bp, Aspergillus niger; identical to SEQ ID NO: 92942
  CDS (1)..(1266)

SEQ ID NO: 101106 - protein, 421 aa, Aspergillus niger; identical to SEQ ID NO: 92943

SEQ ID NO: 101107 - DNA, 1260 bp, Aspergillus niger; identical to SEQ ID NO: 92944
  CDS (1)..(1260)

SEQ ID NO: 101108 - protein, 419 aa, Aspergillus niger; identical to SEQ ID NO: 92945

SEQ ID NO: 101109 - DNA, 1257 bp, Aspergillus niger; identical to SEQ ID NO: 92946
  CDS (1)..(1257)

SEQ ID NO: 101110 - protein, 418 aa, Aspergillus niger; identical to SEQ ID NO: 92947

SEQ ID NO: 101111 - DNA, 1242 bp, Aspergillus niger
  CDS (1)..(1242)
atggcctctccaatcccccggggcctgcgccaggtcctccagaaatctccctcggacattgtcattctctcttccctccgtaccccggtcacccgtgcgaagaagggcggcttcaaggacgcctatcccgaagagctgctcgctcacgtcctccgggctactttggaggcgaacccgaacctcgaccctgctctcattgacgatgtcgccatcggttccgttctccaggaactcggcggtgcgaaggctggccgtatggctcaaatccacgccggcttcccccacagcgtgcctttccacacgatcaacagacagtgctcctccggtctggctgctatctccactatcggaaacggaatccgctccggagcgattaacgtcggtatcggtggtggaatggagtccatgaccagaaactatggctcccgcgccatccccacggttctctggcccgagctgaaggagtctcactcccaggacgcccgtgactgcattatgcccatgggtatcacctccgagaacgttgcttcgcgctacggcatctcccgtgccgaccaggacgcgttcgctgccgagtcccacaagaaggctactgccgcccagaacgccggtctgttcgacaaggaaatcatccccgtcaagaccctctcctatgaccccgagaaccccgatgctcctcccaaggagattaccgtgaccaaggacgacggtgtccgccccaacatctcggttgagaagatggctagcctgaagcccgctttctctcccaccggtgctagtaccgctggaaacagctcccaggtcagcgacggtgcggctgccgctctgctcatgcgccgctctactgctaccgagctcggcctgacctctcagatccagggccgctgggttggcactgccgttgcgggctgtgctcccgacgagatgggtgtcggccctgccgttgctatccccaagctccttcagcagcttgacatgaccgtctcagatgttaacgtctgggaaatcaacgaggctttcgcctcccaggccctgtactctatccgcaagctgggtattgacgaggccaaggtgaaccctaagggtggtgccatcgctatcggtcaccctcttggtgccaccggtgccagacagcttgccactctgctgcctgagttggagcgtaccggccaggaagtcggtgttgtgagcatgtgcattggcactggtatgggcatggctggcatgttcgtccgggagtaa

SEQ ID NO: 101112 - protein, 413 aa, Aspergillus niger
MASPIPRGLRQVLQKSPSDIVILSSLRTPVTRAKKGGFKDAYPEELLAHVLRATLEANPNLDPALIDDVAIGSVLQELGGAKAGRMAQIHAGFPHSVPFHTINRQCSSGLAAISTIGNGIRSGAINVGIGGGMESMTRNYGSRAIPTVLWPELKESHSQDARDCIMPMGITSENVASRYGISRADQDAFAAESHKKATAAQNAGLFDKEIIPVKTLSYDPENPDAPPKEITVTKDDGVRPNISVEKMASLKPAFSPTGASTAGNSSQVSDGAAAALLMRRSTATELGLTSQIQGRWVGTAVAGCAPDEMGVGPAVAIPKLLQQLDMTVSDVNVWEINEAFASQALYSIRKLGIDEAKVNPKGGAIAIGHPLGATGARQLATLLPELERTGQEVGVVSMCIGTGMGMAGMFVRE

SEQ ID NO: 101113 - DNA, 1428 bp, Aspergillus niger; identical to SEQ ID NO: 92948
  CDS (1)..(1428)

SEQ ID NO: 101114 - protein, 475 aa, Aspergillus niger; identical to SEQ ID NO: 92949

SEQ ID NO: 101115 - DNA, 1200 bp, Aspergillus niger; identical to SEQ ID NO: 92950
  CDS (1)..(1200)

SEQ ID NO: 101116 - protein, 399 aa, Aspergillus niger; identical to SEQ ID NO: 92951

SEQ ID NO: 101117 - DNA, 1197 bp, Herbaspirillum seropedicae
  CDS (1)..(1197): transl_table=11
atgagcaaacaactgcaagacgcctacatcgtcgccgccacccgcacccccatcggcaaggcgccgcgtggcatgttcaagaacacccgcccggatgacctgctggtgcgcgccatccagtccgccgtggcgcaggtgccgggcctggaccccaagctgatcgaggacgccatcgtcggctgctccttccccgaaggcgcacagggcctgaacatggcgcgcaatgccgtgctgctggccggcctgcccaacaccatcggcggcgtcaccatcaaccgctactgcgcctccggcatcaccgccatcgccatggccgccgaccgcatccgcgtgggggaggccgatgtcatgatcgccgccggtgccgaatcgatgtcgatggtgccgatgatgggctttcatccttcgatcaacatcaatgccttcaaggatgagaacgtcggcatggcctatggcatgggcctgaccgccgagaaggtggcgcagcagtggaaggtctcgcgcgaagcgcaggacgagttctcgctggcctcgcaccagaaggccatcgccgcccaggaggccggtgaattcgccgatgagatgacttccttcgagatcgtcgagcgcttccccaatctggccaccggcgagatcgacgtcaagacccgcaccgtcagcctggacgaaggcccgcgcgccgattccaacctggccgcgctggccaagctcaagcccgtcttcgccgccaagggcagcgtgaccgccggcaacagctcgcagacctcggacggcgccggcgcgttgatcatcgtctcggaaaagatcctcaagcaattcaacctcaccccgctggcccgcttcgtctccttcgccgtgcgcggcgtgccgccggagatcatgggcatcggtccgaaggaagcgattcctgcggccctgaaggccggtggcctgacccaggaccagatcgactggatcgaactgaacgaagccttcgcagcccaagcgctggcggtcatcggcgacctgggcctggacccgagcaaggtcaaccccatgggcggtgcgattgcgctgggtcacccgctgggggccaccggtgcgatccgtgccgctaccaccatccatgcactgcgccgcaagaacctgaagtacggcatggtgaccatgtgcgtgggcaccggcatgggcgcagcggggatcttcgagcgcgtctga

SEQ ID NO: 101118 - protein, 398 aa, Herbaspirillum seropedicae
MSKQLQDAYIVAATRTPIGKAPRGMFKNTRPDDLLVRAIQSAVAQVPGLDPKLIEDAIVGCSFPEGAQGLNMARNAVLLAGLPNTIGGVTINRYCASGITAIAMAADRIRVGEADVMIAAGAESMSMVPMMGFHPSININAFKDENVGMAYGMGLTAEKVAQQWKVSREAQDEFSLASHQKAIAAQEAGEFADEMTSFEIVERFPNLATGEIDVKTRTVSLDEGPRADSNLAALAKLKPVFAAKGSVTAGNSSQTSDGAGALIIVSEKILKQFNLTPLARFVSFAVRGVPPEIMGIGPKEAIPAALKAGGLTQDQIDWIELNEAFAAQALAVIGDLGLDPSKVNPMGGAIALGHPLGATGAIRAATTIHALRRKNLKYGMVTMCVGTGMGAAGIFERV

SEQ ID NO: 101119 - DNA, 1176 bp, Herbaspirillum seropedicae
  CDS (1)..(1176): transl_table=11
atggatgatgtggtcattgtcgcagcacagagaacggcgatcggcaaattcggcggagccttgtcgaagattgcggcagccgatctgggtgcgcaagtcatcaaggccttgctggccaagaccggcatcaagcccgaagcgatcagcgaagtcatcctcggccaggtgttgacggctggcctgggccagaacccggcgcgccagtcggtcatcaagtccggcctgcccgacatggtcccggccttcgtggtcggcaaggtctgcggcagcggcctgaaggccgtgcaactggcggcccaggccatccgttgcggcgacgcccagatcgtcatcgccggcggccaggaaaacatgagcgcctccccgcacgtactgaacaactcgcgcgacggtttccgcatgggcgacgccaagctcaccgacaccatgatcgtcgatggcctgtgggacgtctacaaccagtaccacatgggcattaccgccgagaacgtcgccaagaagttcgagatcagccgcgaagagcaggacgccttcgccgccgcctcgcagaacaaggcagaagccgcccagaaggccggcaagttcaaggatgagatcgtgcccatcgaaatcaagggcaagaaggaaaccgtggtcttcgacaccgacgagttcgtcaagcacggtgtcaccgccgaatccctggccacgctgcgcccggccttcgacaaggccggtacggtgacggccggcaacgcctcgggcatcaacgatggcgccgccgccgtggtggtgacctcggccaagctggctgctgagctgggtctgccggtgctggccaagatcaaggcctactcctcggccggcctggaccccagcatcatgggcatgggcccggtgccggcgtcgcagctgaccctgaagaaggccggctggaccccgcaggacctggacctgatggaaatcaacgaagccttcgccgcgcaggccattgcggtgaacaagcagatgggctgggacaccagcaagatcaacgtcaacggcggcgccatcgcattgggccaccccatcggcgcctcgggctgccgcgtgctggtgaccctgctgcacgagatggtgcgccgtgacgccaagaagggtctggccagcctctgtattggtggcggcatgggcgtggcgctggcggtggagcgttga

SEQ ID NO: 101120 - protein, 391 aa, Herbaspirillum seropedicae
MDDVVIVAAQRTAIGKFGGALSKIAAADLGAQVIKALLAKTGIKPEAISEVILGQVLTAGLGQNPARQSVIKSGLPDMVPAFVVGKVCGSGLKAVQLAAQAIRCGDAQIVIAGGQENMSASPHVLNNSRDGFRMGDAKLTDTMIVDGLWDVYNQYHMGITAENVAKKFEISREEQDAFAAASQNKAEAAQKAGKFKDEIVPIEIKGKKETVVFDTDEFVKHGVTAESLATLRPAFDKAGTVTAGNASGINDGAAAVVVTSAKLAAELGLPVLAKIKAYSSAGLDPSIMGMGPVPASQLTLKKAGWTPQDLDLMEINEAFAAQAIAVNKQMGWDTSKINVNGGAIALGHPIGASGCRVLVTLLHEMVRRDAKKGLASLCIGGGMGVALAVER

SEQ ID NO: 101121 - DNA, 1410 bp, Drosophila melanogaster; identical to SEQ ID NO: 92952
  CDS (1)..(1410)

SEQ ID NO: 101122 - protein, 469 aa, Drosophila melanogaster; identical to SEQ ID NO: 92953

SEQ ID NO: 101123 - DNA, 1179 bp, Clostridium thermosaccharolyticum
  CDS (1)..(1179): transl_table=11
atgaaagaagtagttattgcaagtggtgtaaggactgctgtcgggaaatttggtggcacgcttctaaatgtacctgcagtagatttaggtgctgtgaataataaaagaagcataaaaagagccaatgtgaaacctgaagatgttagtgaagtgataatgggaaatgtattgcaggcaggtcttgggcagaaccccgcaagacaagctgaaataaaagcgggcataccagtagaagttccggctatgactgtaaacatggtatgtggatcaggtcttagagctgtgacacttgctgctcaggcagttatgcttggtgatgctgacattgttgtagccggtggaatggaaaatatgtcaagagcaccatatatattaaatgatgctcgctttgggtacaggatgaacaatggccagcttgtagatgaaatggtatatgatggtttaacagatgtttttaaccaatatcacatgggaatcactgccgaaaatcttgctgaaaaatacggcatatcaagagaagagcaggatgaatttgcatatagaagccaaaaattagcgtcagaagcgatatcatcaggaagatttgaggatgagatagttcctgtgattgtgccgcagaaaaaaggtgaaccgatagaatttaaagttgatgaacatgtgagacctaatacgacaattgaagcacttgcaaaattaaaaccagcattccaaaaagatggaactgtaactgctggaaatgcatcaggaattaacgatgcagctgcagcagtagttgtgatgtcaaaagaaaaggcatgtgaacttggaataaagaccattgcaacgattaaatcatttggttatgcaggtgttgaccccagcatcacgggaattggtccagtatatgctacgagaaaggcattagaaaaagctaatctaactgtagatgatttagatttaattgaagcaaatgaagcatttgcagcacaatcactggctgttgcaaaagaattaaaatttaatatggacagagtgaatgtaaatggtggcgcaattgcgataggtcatccaatcggcgccagcggatgtagaattctagtgacgcttttatatgagatgcagaagaggaattcgcatactggacttgcaacattgtgcatcggcggaggaatgggaatagcaatggttgtcgaaagatag

SEQ ID NO: 101124 - protein, 392 aa, Clostridium thermosaccharolyticum
MKEVVIASGVRTAVGKFGGTLLNVPAVDLGAVNNKRSIKRANVKPEDVSEVIMGNVLQAGLGQNPARQAEIKAGIPVEVPAMTVNMVCGSGLRAVTLAAQAVMLGDADIVVAGGMENMSRAPYILNDARFGYRMNNGQLVDEMVYDGLTDVFNQYHMGITAENLAEKYGISREEQDEFAYRSQKLASEAISSGRFEDEIVPVIVPQKKGEPIEFKVDEHVRPNTTIEALAKLKPAFQKDGTVTAGNASGINDAAAAVVVMSKEKACELGIKTIATIKSFGYAGVDPSITGIGPVYATRKALEKANLTVDDLDLIEANEAFAAQSLAVAKELKFNMDRVNVNGGAIAIGHPIGASGCRILVTLLYEMQKRNSHTGLATLCIGGGMGIAMVVER

SEQ ID NO: 101125 - DNA, 1389 bp, Cucumis sativus
  CDS (1)..(1389)
atggagaaggcgatcaacaggcagagcattttgctacatcatctccggccttcttcttccgcttacacaaatgaatcttcgctctctgcatcggtttgtgcagctggggatagtgcttcgtatcaaaggacatcggtgtttggagatgatgtcgtgattgttgcagcgtaccgtactgccatttgcaaatcgaagcgtggtggcttcaaggatacttatcccgatgatctgctcgcccctgttttgaaggcattgatagagaaaactaatttgaatccaagtgaagttggggatattgttgttggttctgtacttgcaccaggctctcagagagctagtgaatgtaggatggcggctttctatgccggcttccctgaaactgtgcccgttagaactgttaataggcaatgttcgtcggggctgcaggccgttgctgatgtagctgcagctataagagcagggttttatgatattggaattggagctgggttggagtctatgactactaatccaatggcttgggaaggatctgtcaacccaagagtgaaatcaatagaaaatgcacagaactgccttcttccaatgggtgtaacctcagaaaatgttgcccagcgttttggggtgtcaagggagaagcaggatcaggctgctattgagtctcaccggaaggctgcagctgccactgctagtggaaaatttaaggatgaaattatcccagtttctactaagattattgaccctaaaactggtcaagaaaaaccggttacaatctctgtggatgatgggattcggcctaacacaactcaagcagatctggggaaattgaaggctgtgtttaagaaagatgggactaccactgcaggtaattccagccaggtgagtgatggtgctggagctgttctcctcatgaagagaagtgttgcaatgcgaaaagggctccccattcttggtgttttcaggaccttttctgctgtgggtgtggatcctgctatcatgggtgttggcccggctgtagcaattccagctgctgtcaaggctgctggacttgaactgaacgatattgatctttttgagataaatgaggcatttgcatcccaatttgtttattgtcgtaacaagttggggctagatccagaaaagattaatgtcaatgggggagcaatcgccattggacacccattgggtgcaacaggcgcccgctgtgtcgctacattgttgcatgagatgaaacgccgtggcaaagattgtcgttttggagtcatatcaatgtgcataggcacgggaatgggggcggcagctgtatttgagaggggtgattgtgttgacgaactttgcaatgctaagaaagttgaaggaggtgtcaatcttctgtccaaggatgctcgttag

SEQ ID NO: 101126 - protein, 462 aa, Cucumis sativus; identical to SEQ ID NO: 92957

SEQ ID NO: 101127 - DNA, 1245 bp, Arabidopsis thaliana
  CDS (1)..(1245)
atggctgcttttggagatgacattgtgattgtagcggcatatcgtaccgccatttgcaaagcgagacgtggaggtttcaaagacactcttcctgatgatcttcttgcttctgttcttaaggctgtagtggaaagaacatctttggatccaagtgaagttggtgatatcgttgttggtaccgtgatagcgcctggttctcagagagcaatggagtgtagagttgcagcttattttgctggttttcctgactccgtgccagttagaactgtcaatagacaatgctcatcaggactacaagcagttgctgatgttgctgcttccattagagctggttattacgacattggtattggtgctggagtggaatcaatgtcaactgatcatattcctggaggcggctttcatggctctaatccaagagcacaggatttcccaaaagcccgtgattgtttgcttccaatgggaattacttctgaaaacgttgcagaaaggttcggtgtcacaagagaagagcaagatatggctgcggtggagtctcacaaacgcgctgcagctgcaatcgcgtctggtaaactcaaggatgaaatcattcctgttgctactaagattgtggaccctgagactaaagcagagaaggcaatcgtcgtatctgttgatgacggtgtacgtccaaactcaaacatggcagatttggcaaagctgaagactgtctttaaacaggacggttccaccacagctggcaatgctagtcagatcagtgatggtgctggagcagtactgctaatgaagagaagtttggctatgaagaagggacttcccattcttggagtattcaggagttttgctgttactggtgtggaaccatctgtaatgggtattggtccagctgttgccattcccgctgcaactaagctcgcagggctcaacgtcagcgatattgatctattcgagatcaatgaggcatttgcatctcagtatgtgtactcttgcaagaagttagagctggatatggaaaaggtcaatgttaatggaggagccattgctattggccatcccctgggtgctacaggagctcgatgtgttgcgacattgttgcacgagatgaagcggagaggaaaagattgccgctttggagtaatctcaatgtgcataggcactggaatgggagctgcagctgtttttgagaggggagactctgttgataacttgtccaacgctcgtgtggctaacggggatagtcattag

SEQ ID NO: 101128 - protein, 414 aa, Arabidopsis thaliana; identical to SEQ ID NO: 92959

SEQ ID NO: 101129 - DNA, 1308 bp, Medicago truncatula; identical to SEQ ID NO: 92962
  CDS (1)..(1308)

SEQ ID NO: 101130 - protein, 435 aa, Medicago truncatula; identical to SEQ ID NO: 92963

SEQ ID NO: 101131 - DNA, 1215 bp, Picrorhiza kurrooa
  CDS (1)..(1215)
atggctccagcagcggccgattcaattaaaccgagagatgtttgcattgttggtgtttcccgaacccctatgggtggcttccttggttctatttcatctttaccagcaacaaagcttggatctattgctattgagagtgctcttaagagagcaaatgttgatccatctcatgtgcaagaagttttctttggaaatgtactcagtgcaaacttgggccaggctcctgccaggcaggcagctttaggtgcaggaatccccaatacagttatctgcacaactgtcaacaaagtctgtgcatctggaatgaaagctgctatgcttgcagcacaaagtatccagttgggcatcaatgatgttgttgttgctggtggcatggaaagtatgtctaatgtccctaaatatctggcagaagcgaggaaaggatctcgactcggacacgattctcttgttgatggaatgctgaaagatggattgtgggatgtctataatgactatggcatgggagtttgtgctgaattatgtgccgaacaccatagtgttactagagaggagcaggacaattatgcagttcagagttttgagcgtggtattgccgctaaagatagtggtgctttctcatgggagattgtgccggttgaagtgtctggtggaagaggaggaccatccacaattgttgataaggatgaaggtctaggaaagtttgatgctgcaaaattgaggaagctaagaccaagtttcaaggaaactgggggttctgttacagctggcaatgcatctagcataagtgatggtgctgctgctcttgttctagtaagcggagagaaggccctgaagcttaggctggaagttattgcaaagatcactggatatgctgatgctgctcaggcaccagaattatttaccactgctccggccattgctattccaaaagcaatctcaaatgctggtctagaagcatctcaaatagactattatgaaatcaatgaagcctttgcagttgtggctcttgcaaaccagaagctcttgagtctaaatccggaaaaagttaacgtacacggtggagctgtgtcactgggacatcctctaggttgtagtggagctcgtatcttggttacacttttaggggtattaaggcagaagggtggaaaatatggagttggtggtgtttgcaatggaggaggaggtgcttcagctgtcgttatagagctcctttaa

SEQ ID NO: 101132 - protein, 404 aa, Picrorhiza kurrooa; identical to SEQ ID NO: 92965

SEQ ID NO: 101133 - DNA, 1179 bp, Clostridium pasteurianum
  CDS (1)..(1179): transl_table=11
atgaaagaagtagtaatagcaagtgctgtaagaacagcagtaggttcttttggtggaagtttaaaaaatgtttcagcagtagatttaggagcaacagtaatcaaagaagctgttaaaagagctggaataaatccagaattagttgaagaagtagttatgggaaatgtacttcaagcaggattaggacaaaatacagctaggcaggcttctgtaaaggcaggattaccatttgaagtatcatcacttacaataaataaagtatgtggatctggtcttagagccgtatcacttgcacgtcagatgatattagcaggggatgctgatgttatagttgctggtggtatggaaagtatgtcaagagctccttacttagttaacaatgctagatggggtgctaaaatgggagatactaaatttgtagatgaaatgattactgatggattatgggatgctttcaataattaccatatgggaattactgctgagaatatagccgaaaaatgggaacttactagagaagatcaagacaaatttgctcttgcatctcaacaaaaagcagaagctgctataaaagcaggaggatttaaagaagaaatagttcctgtagaaatacctcagagaaaaggtgaccctaaaatatttgatacagatgaatttcctagatttggtacaacattagaaggattagcaaaacttagacctgcatttaaaaagggtggtactgtaactgctggaaatgcttcaggtataaatgatggagctgcagcttttgttatcatgagtgcagaaaaagctgaggaacttggagttaaacctcttgctagaattgcagcttttggttcaaaaggccttgatccagctataatgggatacggaccagtaggagctactaaagttgcccttgaaagagcagatttaaaagtaggagatttagatttaattgaagcaaatgaggcatttgcagctcaaagtttagctgttgctaaagatttaaattttgatatggataaagttaatgttaatggtggagctatagctattggacatccagtaggagcttcaggcgctagaatacttgttacacttttatatgaaatgcaaagaagagatgctaaaacaggtcttgctactctttgtattggtggaggacaaggtactgctcttatagttaaaagataa

SEQ ID NO: 101134 - protein, 392 aa, Clostridium pasteurianum
MKEVVIASAVRTAVGSFGGSLKNVSAVDLGATVIKEAVKRAGINPELVEEVVMGNVLQAGLGQNTARQASVKAGLPFEVSSLTINKVCGSGLRAVSLARQMILAGDADVIVAGGMESMSRAPYLVNNARWGAKMGDTKFVDEMITDGLWDAFNNYHMGITAENIAEKWELTREDQDKFALASQQKAEAAIKAGGFKEEIVPVEIPQRKGDPKIFDTDEFPRFGTTLEGLAKLRPAFKKGGTVTAGNASGINDGAAAFVIMSAEKAEELGVKPLARIAAFGSKGLDPAIMGYGPVGATKVALERADLKVGDLDLIEANEAFAAQSLAVAKDLNFDMDKVNVNGGAIAIGHPVGASGARILVTLLYEMQRRDAKTGLATLCIGGGQGTALIVKR

SEQ ID NO: 101135 - DNA, 1299 bp, Aspergillus oryzae; identical to SEQ ID NO: 92966
  CDS (1)..(1299)

SEQ ID NO: 101136 - protein, 432 aa, Aspergillus oryzae; identical to SEQ ID NO: 92967

SEQ ID NO: 101137 - DNA, 1200 bp, Aspergillus oryzae; identical to SEQ ID NO: 92968
  CDS (1)..(1200)

SEQ ID NO: 101138 - protein, 399 aa, Aspergillus oryzae; identical to SEQ ID NO: 92969

SEQ ID NO: 101139 - DNA, 1251 bp, Aspergillus oryzae; identical to SEQ ID NO: 92970
  CDS (1)..(1251)

SEQ ID NO: 101140 - protein, 416 aa, Aspergillus oryzae; identical to SEQ ID NO: 92971

SEQ ID NO: 101141 - DNA, 1260 bp, Aspergillus oryzae; identical to SEQ ID NO: 92972
  CDS (1)..(1260)

SEQ ID NO: 101142 - protein, 419 aa, Aspergillus oryzae; identical to SEQ ID NO: 92973

SEQ ID NO: 101143 - DNA, 1242 bp, Aspergillus oryzae; identical to SEQ ID NO: 92974
  CDS (1)..(1242)

SEQ ID NO: 101144 - protein, 413 aa, Aspergillus oryzae; identical to SEQ ID NO: 92975

SEQ ID NO: 101145 - DNA, 1221 bp, Raphanus sativus
  CDS (1)..(1221)
atggcccattcagcagattcctccgacaatcccagagatgtttgcatcgtgggtgttgcacgcactcctatgggtggctttctcggatctctctcctccttacccgccacaaagcttggatcccttgccatcacagctgctctgaagagagaaatgttgacccgtctctggtccaaggaagttgtgtttgggaatgttctcagtgctaatttgggtcaagctcccgctcgtcaggccgctttaggtgctgggatctctaactctgttatctgtaccactgtcaacaaggtctgtgcctcaggcatgaaagctgtgatgattgctgctcagagtatccagctggggatcaatgatgtagtcgtggcgggtggtatggaaagcatgtctaatacaccaaagtatcttgcagaagcaagaaaaggatctaggtttggtcatgattctctcgtagatgggatgcttaaggatggactgtgggatgtctataacgactgtgggatgggaagctgtgcagagttatgcgctgagaagtttgagataaccagggagcagcaagatgattacgctgttcagagctttgagcgtggtattgctgctcaggaatctggcgccttcacatgggagatcgtcccggttgaagtttctggaggaaggggtaggccatcaaccattgttgacaaggatgaaggtcttgggaagtttgatgctgcaaaactgaggaaactccgtccgagtttcaaggagaatggaggcacagttacagctggaaatgcctctagcataagtgatggtgcagctgctattgtcctagtgagtggagagaaggcgcttcagctaggacttcaagtacttgcaaaagttaaaggttatggtgatgcagctcaggagccagagtttttcactactgctcctgctctggcaataccaaaagctattgcacccaattcgccctatagtgagtcgtatcaagttgattactatgagatcaatgaagcatttgcagttgtagcacttgcaaatcaaaagctacttgggattagtccggagaaggtgaatgtaaatggaggagccgtctccttaggacatcctctaggctgcagtggagcccgtattctaatcacattgcttgggatactgaagaagagaaacggcaagtacggtgtgggaggagtgtgcaacggaggaggaggtgcttctgctcttgttcttgaagtcgtgtga

SEQ ID NO: 101146 - protein, 406 aa, Raphanus sativus; identical to SEQ ID NO: 92977

SEQ ID NO: 101147 - DNA, 1389 bp, Brassica napus; identical to SEQ ID NO: 92978
  CDS (1)..(1389)

SEQ ID NO: 101148 - protein, 462 aa, Brassica napus; identical to SEQ ID NO: 92979

SEQ ID NO: 101149 - DNA, 1410 bp, Lysiphlebus testaceipes
  CDS (1)..(1410)
atgtcaatatttattgcaagaaatgcattaaaattaactccaggaatatctcgtcaaggtttcataggagtaacaacaggtgttggaaataaacaatatgcaacaaaaagtgataatcaaggaggaaaaaaaattgtttttgttgatgctgttagaacaccatttttagtgtctggtactgattacaataaattaatggcacatgatttagcaacacacacactattaaatcttcagagaaaaacaaatattccaaaagaaatgattgattatgttgtttatggtactgttatgcaagaagttaaaacatcaaatattggtcgtgaagctgcacttgctgctggttatagtgatcgtacaccagctcatactgttacaatggcttgtattagtagtaatgttgcattaacaactggtatgggtcttattgcaagtggtgcatttgatgttgttgttgctggtggagttgaatttatgactgatataccaataagacatagtcgtcaaatgcgtagtacaatggttaaagcatcaaaagcaaaatcacttggacaaacattatcaatattatcaacaattagacctggacattttgttcctgatgtacctggtgttgctgaattttcatctggtgaaataatgggacattcatctgatcgtcttgcagcatcatttggtgttacaagagctgaacaagatgaatatgcacttagatcacatacacttgctaaacaagctgaacaacgtggtgatttatcagatttagtaccatttaaagtaccaggaaaagataaagttgttgataaagataatggtatacgtgtatcaacaccagaatcattggctaaattaaaaccagcatttgttaaaccatatggtacaataactgcagcaaatgcatcatttttaactgatggtgcatctgctggtcttattatgactgaagaaaaagctaaacaattaggactcaaaccaaaagcatatatgaaaagttttacatatgtttcacaagatccaattgatcaacttcttcttggaccagcatatgctataccaaaagttttagatattgctggactttcaatgaaagacattggtgtttgggaagttcatgaagcatttgctgcacaaatattagcaaatttaaaagctttagattctgattattttgctaaagaatatttaaaaaaaaatacaaaaattggagtaccagatttaaaaaaatggaatgcttggggtggttcactttcaattggtcatccatttgcagcaactggagttagattagcttgtcatacagcaaatagaatgattaaagaagatcaacaatttggtcttattgcagcttgtgctgctggtggacagggtgttggtatgattatggaaagacatccagatgcaaaattataa

SEQ ID NO: 101150 - protein, 469 aa, Lysiphlebus testaceipes
MSIFIARNALKLTPGISRQGFIGVTTGVGNKQYATKSDNQGGKKIVFVDAVRTPFLVSGTDYNKLMAHDLATHTLLNLQRKTNIPKEMIDYVVYGTVMQEVKTSNIGREAALAAGYSDRTPAHTVTMACISSNVALTTGMGLIASGAFDVVVAGGVEFMTDIPIRHSRQMRSTMVKASKAKSLGQTLSILSTIRPGHFVPDVPGVAEFSSGEIMGHSSDRLAASFGVTRAEQDEYALRSHTLAKQAEQRGDLSDLVPFKVPGKDKVVDKDNGIRVSTPESLAKLKPAFVKPYGTITAANASFLTDGASAGLIMTEEKAKQLGLKPKAYMKSFTYVSQDPIDQLLLGPAYAIPKVLDIAGLSMKDIGVWEVHEAFAAQILANLKALDSDYFAKEYLKKNTKIGVPDLKKWNAWGGSLSIGHPFAATGVRLACHTANRMIKEDQQFGLIAACAAGGQGVGMIMERHPDAKL

SEQ ID NO: 101151 - DNA, 1197 bp, Dendroctonus jeffreyi; identical to SEQ ID NO: 92980
  CDS (1)..(1197)

SEQ ID NO: 101152 - protein, 398 aa, Dendroctonus jeffreyi; identical to SEQ ID NO: 92981

SEQ ID NO: 101153 - DNA, 1206 bp, Streptomyces nodosus
  CDS (1)..(1206): transl_table=11
atggtcgacagttatgtgtacgcagcggcgagaacgcccttcggccggttccggggggcgctctccgacgtccggcccgacgatctcgcggcgctggccgtctccggggtcctggccggcaccccgtccctggacccggcggcgatcggcgatgtggtctggggaaacgccaacggcgcgggtgaggacaaccggaacgtcggccggatggccgtcctgctggccgggctgccgacctcggtgcccgccaccaccgtcaaccggctctgcggctcctccctggacgcggcgatcatcgcttcgcgcgcgatcgagacgggcgatacggacatcgtcctcaccggtggtgtggagtcgatgacccgcgccccctgggtgctgcccaagccgtcgcgcggcttccccgcgggggacatgaccgccgtctccaccaccctgggctggcggctggtcaacgaacggatgcccgcggagtggacggtctcgctgggcgaggccaacgagatgctggccgaggagttcggcatctcccgggagcggcaggacgagttcgcggcccgctcgcaccacctggcggacgaggcatgggcgtcgggcttctacgacgacctggtggtgcccgtcgaggtgggcggcgacggcgggccgttctcccgcgacgaggggatcaggccgggatccacggcgcggaagctggccgggctcaaaccggccttccgacccgacggagtgatcaccgccggcaatgcctcgccgctcaacgacggggcgtccgccgtgctgctgggttcccgggaggcctcgtcgcgcatcggtctggcgccccaggcgcggatcgccggccgcggggtgtccgccctggaaccccggatgttcgggttcgcccccgtcgaggcggccgggcgggcgctgcgccgggcgggcatctcctggtccgatgtgtccgccgtggagctcaacgaggccttcgccgtgcagtcgctggcctgtgtggacgcctgggggatcgacccggggatcgtgaacgccaagggcggcgcgatcgcgatcggccaccccctgggcgcgtccggcggccggctgctcggcaccctcacggcccggctgcgcgagtcgggcggccggtggggcgtcgccgcgatctgtatcggagtgggacaggcgctggccgtcgtcctggagaacgtgacggaggaccgagcgtga

SEQ ID NO: 101154 - protein, 401 aa, Streptomyces nodosus
MVDSYVYAAARTPFGRFRGALSDVRPDDLAALAVSGVLAGTPSLDPAAIGDVVWGNANGAGEDNRNVGRMAVLLAGLPTSVPATTVNRLCGSSLDAAIIASRAIETGDTDIVLTGGVESMTRAPWVLPKPSRGFPAGDMTAVSTTLGWRLVNERMPAEWTVSLGEANEMLAEEFGISRERQDEFAARSHHLADEAWASGFYDDLVVPVEVGGDGGPFSRDEGIRPGSTARKLAGLKPAFRPDGVITAGNASPLNDGASAVLLGSREASSRIGLAPQARIAGRGVSALEPRMFGFAPVEAAGRALRRAGISWSDVSAVELNEAFAVQSLACVDAWGIDPGIVNAKGGAIAIGHPLGASGGRLLGTLTARLRESGGRWGVAAICIGVGQALAVVLENVTEDRA

SEQ ID NO: 101155 - DNA, 1155 bp, Comamonas testosteroni
  CDS (1)..(1155): transl_table=11
atgagcgcccaggcctatatcgttgatgcgctgcgctctccaaccggaaagcgcaagggctctcttgccgccgtgcacggtgccgacctcggcgcccatgtgatcaaagcgctggtcgagcgcaacgacattcccgcagccgattacgacgacgtgatatttggctgcgtggacaccatcggttctctggccggcgacattgcccgcacgtcctggctggcagccggcatgcccatgaatgttcccggcaccacgatcgaccgccagtgcggatcgtcccagcaagccattcattttgcggcccaggccgtgatgagtggcacgcaggacgtggtgctggccggtggcgtgcagaccatgaccgcgattcccatttcctcggccatgctcgccggtcagcccctgggctttaccacgccgtttgccgagagcaaaggctggcaggcccgcttcggcaacgcgcccgtgaaccagttctatgccgcccagcgtattgccgaccactggggtgtgagtcgggccgatatggaagtgtttgccaaggaaagccacgaccgcgcgttgaatgcgattgccgaggggcgcttcgaccgtgaaatcgtcccctttggcactttcaggatggacgagacggctcgcctttccactctggagaagatggccacgctggagccggtggaccccgcctatccctccatcacggcagccgtctccagctccacctgcgatgcagcggctgcggtgctggtggtgtccgaagccgctctcaagcgctacaacctcaagccccgcgcccgcattcaccatatgagcgtgcgcgccgatgaccccatctggcacctgaccgcgccgattccagccacggaatatgcgctcaagaaggcgggcatgaccatgtccgacatcgacctggtcgagatcaacgaggccttcgcttccgtggtcatggcctggctcaaggagactggctacgaccatggcaggaccaacgtcaacggcggcgcgattgcgctcggtcatccactgggagcctcgggcgcaaagctcatgaccacgctgctgcacgagctggagcgcacgggcggtcgctacgggctgcagaccatgtgcgaaggtggtggtcaggccaacgtcaccatcatcgaacgtctctga

SEQ ID NO: 101156 - protein, 384 aa, Comamonas testosteroni
MSAQAYIVDALRSPTGKRKGSLAAVHGADLGAHVIKALVERNDIPAADYDDVIFGCVDTIGSLAGDIARTSWLAAGMPMNVPGTTIDRQCGSSQQAIHFAAQAVMSGTQDVVLAGGVQTMTAIPISSAMLAGQPLGFTTPFAESKGWQARFGNAPVNQFYAAQRIADHWGVSRADMEVFAKESHDRALNAIAEGRFDREIVPFGTFRMDETARLSTLEKMATLEPVDPAYPSITAAVSSSTCDAAAAVLVVSEAALKRYNLKPRARIHHMSVRADDPIWHLTAPIPATEYALKKAGMTMSDIDLVEINEAFASVVMAWLKETGYDHGRTNVNGGAIALGHPLGASGAKLMTTLLHELERTGGRYGLQTMCEGGGQANVTIIERL

SEQ ID NO: 101157 - DNA, 1245 bp, Nicotiana tabacum
  CDS (1)..(1245)
atggcaaagatggttaatgattccattaaacctcgagatgtatgcattgtgggtgttgctcgaacaccaatgggtggtttccttggttctctttcgtctttgtctgctacagagcttggttctgtagctatccgagctgctcttaagagagcaaatgtagacccgtcccttgttcaagaggtcttctttggaaatgttctcagtgcaaacttaggtcaagcccctgctagacaggctgccttaggagccgggattcctaattcagtgatttgcacgaccatcaacaaagtttgttcttcgggacttaaagcaacaatgattgcagctcagactatacaatcaggaagcaatgatatcgttgtgactggtggcatggaaagcatgtctaatgtaccgaaatacctagctcaagcaaggaaggggtcgcggctaggtcatgatactatagtagatggcatgctaaaagatggactctgggatgcctataatgatttcgggatgggcgtctgtgcagaactatgtgctgatcagtataaaatcacaagacaacagcaggattcttacgctattcaaagctttgagcgaggaattgctgcacaacgtagtggtgcatttgtgtgggaaatagttccggtagaaatttctggtggaagtggaagaccatctacatatgttgataaagatgaaggtttaataaagtttgatgcctccaaactaaaaaagcttagaccaagtttcaaggagaatggaggttctgtcactgcaggcaatgcttccattataagtgatggcgctgcagcattagttctggtgagtggacaaaaggcacttgaacttggattgcaagtaattggtaggatcagaggatttgcagatgcagctcaggcacctgagttatttacaacagctccagctcttgcaataccaaaagcaattaagaattctggccttgagtcatctcaaattgactattatgaaataaatgaagcgttctctgtggtggctcttgccaacaaaagactgctcaatctcaattccggaaagctaaatgcacatggtggagctgtgtcattgggacatcccttggggtgcagtggagctaggatcctggtatctcttttaggggtattgaagcacaagaatgggaagtttggtgttgcaggaatctgcaatgggggaggaggcgcatctgctcttgttgtagagctcatgcctataaggatggtggcacgttcatcgctttga

SEQ ID NO: 101158 - protein, 414 aa, Nicotiana tabacum; identical to SEQ ID NO: 92983

SEQ ID NO: 101159 - DNA, 1215 bp, Nicotiana tabacum
  CDS (1)..(1215)
atggctccagctgcagcagactccatcaagcctagagatgtttgcattgttggtgttgcccgtactccaatgggaggcttccttggttctctttcttcgctgtcagcgaccaaacttggatcaatagccattgagggtgctcttaagaaagctaatgttgatccatcactagtagaagaagtattctttgggaatgtcctcagtgcaaacctgggacaggctcctgctaggcaagcagcattaggtgcaggaatacccaatacagtagtttgtacagctgtgaacaaagtctgtgcatctgggttgaaagcaactatgcttgcagctcaaagtatccagttgggcatcaatgatgttgtggtggctggtggaatggaaagcatgtccaatgttccgaaatacattgcagaagcaaggaagggatctcgtcttggacatgatagtcttgttgacggaatgcttaaagatggtttgactgacgtatataaggattgtggtatgggagtttgtgcagaaatatgtgccgaaaatcataaaatcacaagagaggagcaggatgactatgcagttcaaagttttgaacgtggcatcgctgctcaggaagctggtgcttttgcatgggagattgtgccggttgaggtgcctgggggaagaggaaaaccatccattattgttgataaggatgacggtctaggaaagtttgatggtgcaaaattgagaaaactccgaccaagttttaaggaaaaggatggtactgtgactgctggtaacgcttctagcataagtgatggagctgctgcattggtcttagtaagtggagagaaggcgataaaacttggactaaatgtgattgcaaagatcagtggctatgctgacgctgctcaggcacctgaattattcacaactgcacctgctctagcaattccaaaagctatcaaaagtgctagcttagaggcttctcaaattgactactatgaaattaatgaagcttttgctgtggtatctcttgcaaatcaaaagctgcttggtcttaatccagaaaaagttaatgtacatggtggagctgtatctttggggcaccctcttggatgcagtggagctcgtatattggttacacttcttggggtattgagacagaaaaacggcaaatatggcgctgctggtgtttgcaatggcggaggaggtgcctcagcccttgtcctagagcttgtgtaa

SEQ ID NO: 101160 - protein, 404 aa, Nicotiana tabacum; identical to SEQ ID NO: 92985

SEQ ID NO: 101161 - DNA, 1203 bp, Butyrivibrio fibrisolvens
  CDS (1)..(1203): transl_table=11
atgggcaaagaaagtagttttagctgtgcatgtcgtacagccatcggaacaatgggtggatctcttagcacaattcctgcagtagatttaggtgctatcgttatcaaagaggctcttaaccgcgcaggtgttaaacctgaagatgttgatcacgtatacatgggatgcgttattcaggcaggacagggacagaacgttgctcgtcaggcttctatcaaggctggtcttcctgtagaagtacctgcagttacaactaacgttgtatgtggttcaggtcttaactgtgttaaccaggcagctcagatgatcatggctggagatgctgatatcgttgttgccggtggtatggaaaacatgtcacttgcaccatttgcacttcctaatggccgttacggatatcgtatgatgtggccaagccagagccagggtggtcttgtagacactatggttaaggatgctctttgggatgctttcaatgattatcatatgatccagacagcagacaacatctgcacagagtggggtcttacacgtgaagagctcgatgagtttgcagctaagagccagaacaaggcttgtgcagcaatcgaagctggcgcattcaaggatgagatcgttcctgtagagatcaagaagaagaaagagacagttatcttcgatacagatgaaggcccaagacagggtgttacacctgaatctctttcaaagcttcgtcctatcaacaaggatggattcgttacagctggtaacgcttcaggtatcaacgacggtgctgcagcactcgtagttatgtctgaagagaaggctaaggagctcggcgttaagcctatggctacattcgtagctggagcacttgctggtgttcgtcctgaagttatgggtatcggtcctgtagcagctactcagaaggctatgaagaaggctggtatcgagaacgtatctgagttcgatatcatcgaggctaacgaagcattcgcagctcagtctgtagcagttggtaaggatcttggaatcgacgtccacaagcagctcaatcctaacggtggtgctatcgctcttggacacccagttggagcttcaggtgctcgtatccttgttacacttcttcacgagatgcagaagaaagacgctaagaagggtcttgctacactttgcatcggtggcggtatgggatgcgctactatcgttgagaagtacgaataa

SEQ ID NO: 101162 - protein, 400 aa, Butyrivibrio fibrisolvens
MGKESSFSCACRTAIGTMGGSLSTIPAVDLGAIVIKEALNRAGVKPEDVDHVYMGCVIQAGQGQNVARQASIKAGLPVEVPAVTTNVVCGSGLNCVNQAAQMIMAGDADIVVAGGMENMSLAPFALPNGRYGYRMMWPSQSQGGLVDTMVKDALWDAFNDYHMIQTADNICTEWGLTREELDEFAAKSQNKACAAIEAGAFKDEIVPVEIKKKKETVIFDTDEGPRQGVTPESLSKLRPINKDGFVTAGNASGINDGAAALVVMSEEKAKELGVKPMATFVAGALAGVRPEVMGIGPVAATQKAMKKAGIENVSEFDIIEANEAFAAQSVAVGKDLGIDVHKQLNPNGGAIALGHPVGASGARILVTLLHEMQKKDAKKGLATLCIGGGMGCATIVEKYE

SEQ ID NO: 101163 - DNA, 1206 bp, Oryza sativa; identical to SEQ ID NO: 93038
  CDS (1)..(1206)

SEQ ID NO: 101164 - protein, 401 aa, Oryza sativa; identical to SEQ ID NO: 93039

SEQ ID NO: 101165 - DNA, 1338 bp, Glycine max
  CDS (1)..(1338)
atggataaagcaattcaaagacagagagtcctgcttgatcatcttcaacccatttcttcaagttcaaatttttcttctcaaacccatcaatctacggatctctcagcttcattatgttttgccaagaattcttcgcacggtcaaataggtggatcagatgacgacgtggtgattgtagctgcatatcgtactgccatctgcaaagcaaagcgtgggggctttaaggatacccttccagatgacctgcttgccacagttctgaaggctgtaatagagaaaacaaatgtgaacccagcagaagttggagacattgttgtgggcactgtactggcacctggatcagatagaggaattgagtgcagaatggctgccttttatgcaggtttcccagagacagtgcctcttcgaactgtcaataggcaatgttcatctggacttcaggcggtttctgacgtagctgcttatataaaagctgggttctatgaaattgggattggggctggattggagtctatgacagtagatcgtgtgaataggcttcgcaacattaacccaaaggtagaaacctttgcagaagcccgggattgtcttcttccaatgggaattacttctgagaatgtagcgcagcgttatggtgtgacaaggctagagcaagatcaagctgctgttgagtctcatcagcgtgctgcagctgcaacagcagctggtaagttcaaagaagaaatcattccagtttctacaaagtttgtggaccctaaaactggagtggagaagaaaattgttgtttctgtcgatgatggtatccggccaaacacaaatttagtggatttggcaaagctgaagcctgcattccagaaagatggaaccacaacagcagggaatgctagccaaattagtgacggtgcagcagctgttctcctcatgaagagaagagtggctgtgcaaaaggggcttcctatacttggaatcttcaggagttttgctgctgttggagtagatcctgcagtcatgggtgttggccctgctgttgctatcccagctgcagtgaaatccgtgggccttgaacttggcaacattgacttatttgaaatcaatgaggcatttgcatcacagtatgtttattgcctcaagaaattgggacttgatcccagaaaggtcaatgtcaatggtggtgccattgctcttggacatcctttgggtgttacaggtgcacgctgtgttgcaactttgttgaatgagatgaaacgtcgtggcaaggattgtcgctatggtgtaatctcaatgtgcatagggtcaggtatgggagctgctgctgtatttgaaaggggagacttttga

SEQ ID NO: 101166 - protein, 445 aa, Glycine max; identical to SEQ ID NO: 92987

SEQ ID NO: 101167 - DNA, 1350 bp, Helianthus annuus; identical to SEQ ID NO: 92988
  CDS (1)..(1350)

SEQ ID NO: 101168 - protein, 449 aa, Helianthus annuus; identical to SEQ ID NO: 92989

SEQ ID NO: 101169 - DNA, 1200 bp, bacterium SB2
  CDS (1)..(1200): transl_table=11
atgtctgaggcatatatttgcgattatattagaacaccgattggtcgttatgggggcgcgctgtcttctgttcgggcggacgatcttggcgctttgccaattaaagcgttgatggagcggaacccttcagttgattgggaagccgttgatgaagtgtattacggctgcgcaaaccaggctggtgaggacaaccgcaacgtggctcgcatggtcgcactgctggcaggtctgccagaagccgtacctggtacaacgctgaaccgtttgtgcggttctggtatggatgctgtcattgcggcttcccgtgccatcaagacaggtgaatgcgatcttgtgattgctggcggcgtggaatccatgtcccgtgcgccatttgtgatgccaaaggcgaccacaccgttttcacgtgccaacgaagttgtcgacaccaccattggctggcggtttgtgaatccgaagatgaagaagcagttcggcatcgacagtatgcctgagactggtgaaaacgttgctgaagactttggtgtctcccgagctgatcaagacgcgtttgccgcgaggtcacaggctaaagcagcggctgcacaagaaaatggccgccttgccaaggaaatcatcgaggtgacaatcccgcagcgcaaaggcgatccgattatcgtgtccgctgatgagcacccacgtgcagggacaactgccgagaaacttgcaaaactgccgacaccatttcgtgaaaatggcagcgtgactgcgggcaatgcctcaggtgtcaacgatggcgctgtgctgattgttgcctctgcagcagcggtcaaaaaatatggtctgaccccaattgcacgcgtgcttggcggaaacagccggcgttgcgccacgtattatgggcattggccagctcctgcagcgcaaaaactttgcgcgcggttaaatttgcaaccttttgattttgacgtcattgagctcaatgaagcctttgcaagtcaggggattgcagttctgcgcgaactggggttggatgcaggtgcagctcatatcaacccgaatggcggggcgattgcattgggccaccctctgggcatgtccggcgcacgcatcaccggaaccgcagcgttggaactgagcctgcaagcgaaaaaacgcgcactggccactatgtgtattggagttggtcagggcatcgcgatcgcgctggaaagggactaa

SEQ ID NO: 101170 - protein, 399 aa, bacterium SB2
MSEAYICDYIRTPIGRYGGALSSVRADDLGALPIKALMERNPSVDWEAVDEVYYGCANQAGEDNRNVARMVALLAGLPEAVPGTTLNRLCGSGMDAVIAASRAIKTGECDLVIAGGVESMSRAPFVMPKATTPFSRANEVVDTTIGWRFVNPKMKKQFGIDSMPETGENVAEDFGVSRADQDAFAARSQAKAAAAQENGRLAKEIIEVTIPQRKGDPIIVSADEHPRAGTTAEKLAKLPTPFRENGSVTAGNASGVNDGAVLIVASAAAVKKYGLTPIARVLGGNSRRCATYYGHWPAPAAQKLCARLNLQPFDFDVIELNEAFASQGIAVLRELGLDAGAAHINPNGGAIALGHPLGMSGARITGTAALELSLQAKKRALATMCIGVGQGIAIALERD

SEQ ID NO: 101171 - DNA, 1209 bp, Azoarcus evansii
  CDS (1)..(1209): transl_table=11
atgccccgccacgtctacatctgcgacgccatccgcacccccttcggccgctacggcggcaccctctcctccatgcgcgccgacgacctcgccgcgctgccgatcaaggccctcgtcgcgcgcaatgcgtcggtcgactgggccgccgtcgatgacataatctacggctgcgccaaccaggccggcgaggacaaccgcaacgtcgcgcgcatggccgcgctgctcgccggcctgccggtcgaagtgcccggcaccaccgtcaaccgcctgtgcggctccagcctcgacgcgctgggtatggtggcgcgcgcgatcgcctccggcgagaccgagctgatgatcgccggcggcgtcgagagcatgagccgcgcccccttcgtgctgggcaaggccgacagcgccttctcgcgcagcgccaagatcgaggacacgaccatcggctggcgcttcgtgaacccgctgatgaaggcgcaatacggcatcgactcgatgcccgagaccgccgagaacgtcgcgcaggaattcggcgtctcgcgcgccgaccaggacgccttcgcactgcgcagccagcagcgctggtcggcggcgaacgagcgcggctttttcggccgtgagatcctgccggtcgagattccgcgcaagaagggcgacccggtgatcttcagcgtcgacgagcacccgcgcgccgacaccacgctggaaggcctcgccaagctgaaaggcgtcgtgcgccccgacggcagcgtcaccgccggcaacgcctccggcgtcaatgatggcgcctgcgcgctgctgctggcctcggaggacgccgtgcgccgccacggcctcacgccgcgcgcccgcatcctcggctccgcggctgccggcgtgcccccgcgcatcatgggcatcggtcccgcgcccgcgacgcagaagctcatcgcccgcctcggcatggacatcggcgaattcgacaccatcgagctgaacgaggctttcgccgcccaaggcctcgccgtactgcgccagctgggcctgcccgacgacggcgagcacgtgaacccgaacggcggcgccatcgccatcggccacccgctcggcgcctcgggtgcgcgcctggtcacgacggcgctgaaccagctcgagaccaccggcggccgctacggcctcgcgaccatgtgcatcggcgtgggccagggcatcgcgctcgcgttcgagcgcgtgtaa

SEQ ID NO: 101172 - protein, 402 aa, Azoarcus evansii
MPRHVYICDAIRTPFGRYGGTLSSMRADDLAALPIKALVARNASVDWAAVDDIIYGCANQAGEDNRNVARMAALLAGLPVEVPGTTVNRLCGSSLDALGMVARAIASGETELMIAGGVESMSRAPFVLGKADSAFSRSAKIEDTTIGWRFVNPLMKAQYGIDSMPETAENVAQEFGVSRADQDAFALRSQQRWSAANERGFFGREILPVEIPRKKGDPVIFSVDEHPRADTTLEGLAKLKGVVRPDGSVTAGNASGVNDGACALLLASEDAVRRHGLTPRARILGSAAAGVPPRIMGIGPAPATQKLIARLGMDIGEFDTIELNEAFAAQGLAVLRQLGLPDDGEHVNPNGGAIAIGHPLGASGARLVTTALNQLETTGGRYGLATMCIGVGQGIALAFERV

SEQ ID NO: 101173 - DNA, 1164 bp, Azospirillum brasilense
  CDS (1)..(1164): transl_table=11
atgacctcggcgcctttgaccacgcccgccaatccggtcgtcatcgccggctacgcccgttcccccttcgccttcgccaacaagggcgagctggcgaaggtccgccccgacgacctgctggcccatgtcgtcgcggcgctggtcgagcgcacgggcgtcaacccgcaggacatcgaggatgtggtcgtcggctgcgccttccccgagggcgagcagggcatgaacatcgcccgcaccgtgtccttcctggcgaagctgccgctgaccgccggggccaccacgatcaaccgctactgcggctcctccatgcaggcgatccatcaggcggccggcgccatccagatgggggcgggcgaggtcttcctgtgcgggggcatcgaatcgatgagccgcgtcccgatgatgggttacaacccgctgccccatccgggcctgaaggaccattatccggaagcctactgctcgatgggcgtcacggcggagaacgtcgcccgccgctatgaaatttcccgcgccgaccaggaggcgatggccgccgagtcccacgccaaggccgccgcggcccagcaggccgggcgcctcgccgaggagatcgtcgccatccagaccgccgctggcctcgtggagcgcgacggctgcatccgccccggcaccagcggcgagacgctgagcggcctgaagcccgccttcctggccgacggctcggtcaccgccggcacctcctcccccctgacggacggcgcctcggcggtgctggtgacgacggaggcctacgccaaggccaacggtctgccgatcctcgcccgcatccgctcggtcgcggtggccggctgcgcgccggaggtgatggggctcggcccggtcccggcggcgcagaaggcgctggcgcgcgccggcctgtccatccgcgacatcgacgtgatcgaactgaacgaggccttcgccgcccaggccatcgcctgcatgcgcgacctcgacatcgacccggccaaggtgaatctggacggcggcgccatcgcgctcggccacccgctcggcgccaccggcgcccgcatcaccggcaaggccgcggccctgctgaagcgcgagggcaagcaattcgccctggccacccagtgcatcggcggcggccagggcatcgccacggttctggaagcggtctga

SEQ ID NO: 101174 - protein, 387 aa, Azospirillum brasilense
MTSAPLTTPANPVVIAGYARSPFAFANKGELAKVRPDDLLAHVVAALVERTGVNPQDIEDVVVGCAFPEGEQGMNIARTVSFLAKLPLTAGATTINRYCGSSMQAIHQAAGAIQMGAGEVFLCGGIESMSRVPMMGYNPLPHPGLKDHYPEAYCSMGVTAENVARRYEISRADQEAMAAESHAKAAAAQQAGRLAEEIVAIQTAAGLVERDGCIRPGTSGETLSGLKPAFLADGSVTAGTSSPLTDGASAVLVTTEAYAKANGLPILARIRSVAVAGCAPEVMGLGPVPAAQKALARAGLSIRDIDVIELNEAFAAQAIACMRDLDIDPAKVNLDGGAIALGHPLGATGARITGKAAALLKREGKQFALATQCIGGGQGIATVLEAV

SEQ ID NO: 101175 - DNA, 1173 bp, Paracoccus zeaxanthinifaciens; identical to SEQ ID NO: 92990
  CDS (1)..(1173): transl_table=11

SEQ ID NO: 101176 - protein, 390 aa, Paracoccus zeaxanthinifaciens; identical to SEQ ID NO: 92991

SEQ ID NO: 101177 - DNA, 1194 bp, Staphylococcus aureus
  CDS (1)..(1194): transl_table=11
atgataaccatgcaagaagcatacattgtagcttatgggcgttcagccgcagcgaaagcaaagcaaggcgcattattccacgaaagacctgatgatgtcgcagccaaagtattacaaggcgtattgaaacgtattgacggaaaattcaataagaatatgattgaagatgtcattgttggtacggcttttccagaaggattacaaggccaaaacattgcacgaacgattgcattgcgtgcgggattatctgacacggtaccgggtcaaacagtgaatcgctactgctcatcaggattacaaaccatcgcgattgcagccaatcaaattatggctggtcaaggagatatacttgtagctggtggcgttgaattgatgagtgccgtaccaatgggtggcaacgagcccacaaacaatccaaccttacaatatgatgatataggtgcgtcatatcctatgggtttaactgctgaaaatgtagcatcccaatttgacgtatcacgcgaagatcaagatgcttatgctgtcagaagtcatcaacgtgcctatgacgcacaacgtgatggtcggttcaaagatgaaattattccaatacaagtaaactcagttgaatatacaaacgcaggaccaaaagtacacacaaatatctttgaccaagatgaatttatacgccctgacaccacgatggaggcattagccaaattacgtacagtatttaaagctgacggcactgtgactgcaggaacatctgccccactttctgatggtgcaggatttgtagttttaatgtctggagataaagtgaaagaactcggcgtgacacctattgcacgattcgttggttttaaggcagtaggcgttgacccgaaaattatgggtattgggcctgcatatgcgattcctgaagtattgtcactcagcaatctatctgttgaagacattgatttgatcgaattgaacgaagcatttgcttctcaaacgattgcatctattaaagaagtaggtctagatatatcacgtacgaatgtgaatggtggcgctattgctttaggtcatccattaggtgctacaggcgcaatgttaaccgcgcgtttacttaatgaaatgggtagacgtcccgatagccgttacggcatggttacgatgtgtattggtgtcggcatgggtgcagctgctatatttgaatatgtgcgttag

SEQ ID NO: 101178 - protein, 397 aa, Staphylococcus aureus
MITMQEAYIVAYGRSAAAKAKQGALFHERPDDVAAKVLQGVLKRIDGKFNKNMIEDVIVGTAFPEGLQGQNIARTIALRAGLSDTVPGQTVNRYCSSGLQTIAIAANQIMAGQGDILVAGGVELMSAVPMGGNEPTNNPTLQYDDIGASYPMGLTAENVASQFDVSREDQDAYAVRSHQRAYDAQRDGRFKDEIIPIQVNSVEYTNAGPKVHTNIFDQDEFIRPDTTMEALAKLRTVFKADGTVTAGTSAPLSDGAGFVVLMSGDKVKELGVTPIARFVGFKAVGVDPKIMGIGPAYAIPEVLSLSNLSVEDIDLIELNEAFASQTIASIKEVGLDISRTNVNGGAIALGHPLGATGAMLTARLLNEMGRRPDSRYGMVTMCIGVGMGAAAIFEYVR

SEQ ID NO: 101179 - DNA, 1343 bp, Laccaria bicolor; identical to SEQ ID NO: 92996
  CDS (21)..(1250)

SEQ ID NO: 101180 - protein, 409 aa, Laccaria bicolor; identical to SEQ ID NO: 92997

SEQ ID NO: 101181 - DNA, 1221 bp, Streptomyces venezuelae
  CDS (1)..(1221): transl_table=11
atgcccgaagccgtgatcgtctcgaccgcccgctcgcccatcggccgggccttcaagggctccctcaaggacctgcggccggacgacctcaccgcgaccatcgtccaggccgcgctggccaaggtgccggagctcgacccgcgcgacatcgacgacctgatgctgggctgcggcctcccgggcggcgagcagggcaacaacctgggccgcatcgtggccgtgcagatgggcatggaccacctgccgggctgcacgatccaccgctactgctcctcctcgctgcagacctcccggatggcgctgcacgcgatcaaggcgggcgagggcgacgtcttcatctcggccggtgtcgagatggtgtcccgcttcgtgaagggcaactcggactccctgcccgacacgcacaacccgctcttcgccgacgccgaggcccgcacggccgccgtcgccgcctccgagggctccagctggcacgacccgcgcgaggacggcctcgtccccgacgcgtacatcgccatgggccagaccgccgagaacctggcccgctggaagggcatcacgcgccaggagatggacgagttcggcgtgcggtcgcagaacctcgccgagcaggccatcaagaacggcttctgggagcgggagatcacccccgtgacgctgccggacggcaccgtcgtctcgaccgacgacggcccgcgcgccggtgtcaccctggagggcgtctccggcctcaagccggtcttccgccccgacggcctggtcaccgccggcaactgctgcccgctgaaccacggcgccgccgcgctcgtgatcatgtcggacaccaaggcccgcgagctcggcctcacgccgctcgcccgcatcgtctccaccggcgtctccggcctctcccccgagatcatgggcctcggcccggtcgaggcctcgaagcaggccctccagcgcgccggcctgaccatcggcgacatcgacctggccgagatcaacgaggccttcgccgcccaggtcatcccgtcctaccaggagctcggcctggacctggacaaggtgaacgtcaacggtggcgccatcgccgtcggccaccccttcggcatgaccggcgcccggatcaccggcacgctgatcaacagcctccagttccacgacaagcagttcggcctggagaccatgtgcgtcggcggcggccagggcatggccatggtcatcgagcgcctctcctga

SEQ ID NO: 101182 - protein, 406 aa, Streptomyces venezuelae
MPEAVIVSTARSPIGRAFKGSLKDLRPDDLTATIVQAALAKVPELDPRDIDDLMLGCGLPGGEQGNNLGRIVAVQMGMDHLPGCTIHRYCSSSLQTSRMALHAIKAGEGDVFISAGVEMVSRFVKGNSDSLPDTHNPLFADAEARTAAVAASEGSSWHDPREDGLVPDAYIAMGQTAENLARWKGITRQEMDEFGVRSQNLAEQAIKNGFWEREITPVTLPDGTVVSTDDGPRAGVTLEGVSGLKPVFRPDGLVTAGNCCPLNHGAAALVIMSDTKARELGLTPLARIVSTGVSGLSPEIMGLGPVEASKQALQRAGLTIGDIDLAEINEAFAAQVIPSYQELGLDLDKVNVNGGAIAVGHPFGMTGARITGTLINSLQFHDKQFGLETMCVGGGQGMAMVIERLS

SEQ ID NO: 101183 - DNA, 1185 bp, Ectothiorhodospira vacuolata
  CDS (1)..(1185): transl_table=11
atggctgaatctattgtcatcgtcgatgcggcgcgcaccccggtcggtaccttcaacggttccctgtcacagattccggcctcgaccctgggggccatggtcatgaaggcgctgctggctcgcaccggcctgtcccccgagcaggtggacgaggtcatcctcgggcaggtgctgcaggccggcgtgggccagaatgccgcccgtcaggccgccgtgaaggccggtatcccttattcttccccggccatgaccatcaataaggtctgcggcagtggtctcaaggcggttcatctggcctggcagtcggtcctgtgcggcgattccaacgtggtgatcgccggaggccaggaaaacatgagtgcctctccccatgtcctgccgggctcccgtcagggaaccaagatgggcgactggaagatggtggataccatgatcaaggatggcctgtggtgtgccttcaatgattatcacatgggcaccaccgccgagaacatcgccggcgagttcaggattagccgggatgagcaggacgcctttgccgcccagtcccagcagcgggccgaggccgcccagaaggcgggatatttcaaggatgagatcgtgccggtggagattccgcagaaaaagggcgaggtcaaggtcttcgacatggatgaatttccccgtcacggcaccacggcggaaggcctgggcaagctgaggccggctttcagccgggatggcacggtgaccgccggcaatgcctccggtatcaatgacggtgccgcggccgtggtggtcatgcgtgaatccatggccagcgagctgggcctcaaccccctggcccgcatcgtttccttcgccgccgccggcgtggacccggcgatcatgggcaccggtcccatccccgccaccatcaagtgcctggagaaggccggctggcgtcccgccgatctggacatggtggaggccaacgaggcctttgccgcccaggccattgcagtcaacaagcagctgggctgggacctgtccaaggtgaacgtgagcggcggggccattgccatcggccatcccatcggtgcctccggcgcccgggtgctggtgaccctcctgcacggcatgaagcgcaccggtgccaggcggggtctggccaccctgtgcatcggtggtggtcagggtgtggcgctggctgtcgaggcagtctga

SEQ ID NO: 101184 - protein, 394 aa, Ectothiorhodospira vacuolata
MAESIVIVDAARTPVGTFNGSLSQIPASTLGAMVMKALLARTGLSPEQVDEVILGQVLQAGVGQNAARQAAVKAGIPYSSPAMTINKVCGSGLKAVHLAWQSVLCGDSNVVIAGGQENMSASPHVLPGSRQGTKMGDWKMVDTMIKDGLWCAFNDYHMGTTAENIAGEFRISRDEQDAFAAQSQQRAEAAQKAGYFKDEIVPVEIPQKKGEVKVFDMDEFPRHGTTAEGLGKLRPAFSRDGTVTAGNASGINDGAAAVVVMRESMASELGLNPLARIVSFAAAGVDPAIMGTGPIPATIKCLEKAGWRPADLDMVEANEAFAAQAIAVNKQLGWDLSKVNVSGGAIAIGHPIGASGARVLVTLLHGMKRTGARRGLATLCIGGGQGVALAVEAV

SEQ ID NO: 101185 - DNA, 1419 bp, Polyandrocarpa misakiensis; identical to SEQ ID NO: 92998
  CDS (1)..(1419)

SEQ ID NO: 101186 - protein, 472 aa, Polyandrocarpa misakiensis; identical to SEQ ID NO: 92999

SEQ ID NO: 101187 - DNA, 1266 bp, Aspergillus oryzae; identical to SEQ ID NO: 93000
  CDS (1)..(1266)

SEQ ID NO: 101188 - protein, 421 aa, Aspergillus oryzae; identical to SEQ ID NO: 93001

SEQ ID NO: 101189 - DNA, 1179 bp, Azohydromonas lata
  CDS (1)..(1179): transl_table=11
atgaccgacatcgtcatcgtcgccgcagcccgcaccgccgtgggcaagttcggcggcacgctggccaagacccccgctccggagctgggcgccgtggtcatcaaggccctgctggagaagacgggcgtcaagcccgaccagatcggtgaagtcatcatgggccaggtgctggccgccggcgcgggccagaaccccgcgcgccaggcgatgatgaaggcgggcatcgccaaggaaacgccggcgctgaccatcaacgccgtgtgcggctccggcctcaaggccgtgatgctggccgcccaggccatcgcctggggcgacagcgacatcgtcatcgccggcggccaggagaacatgagcgccagcccgcacgtgctgatgggcagccgcgacggccagcgcatgggcgactggaagatggtcgacaccatgatcaacgacggcctgtgggacgtgtacaacaagtaccacatgggcatcacggccgagaacgtcgccaaggaacacgacatcagccgcgaccagcaggacgccctggccctggccagccagcagaaggccaccgccgcgcaggaagccggccgcttcaaggacgagatcgttccggtctcgatcccgcagcgcaagggcgacccggtgctgttcgacaccgacgagttcatcaacaagaagaccaccgccgaagcgctggcgggcctgcgcccggccttcgacaaggccggcagcgtgaccgcgggcaacgcctcgggcatcaacgacggcgccgctgcggtgatggtgatgtccgccgccaaggcgaaggagctgggcctgacgcccatggcgcgcatcaagagcttcggcaccagcggcctggatccggccaccatgggcatgggcccggtgccggcctcgcgcaaggcgctggagcgcgccggctggcaggtcggtgacgtggacctgttcgagctcaacgaagccttcgccgcccaggcctgcgcggtgaacaaggagctgggcgtggatccggccaaggtcaacgtcaacggcggtgccatcgccatcggccaccccatcggcgcctccggctgccgcgtgctggtgacgctgctgcacgagatgcagcgccgggacgccaagaagggcctggccgcgctgtgcatcggcggcggcatgggcgtgtcgctgaccgtcgagcgctga

SEQ ID NO: 101190 - protein, 392 aa, Azohydromonas lata
MTDIVIVAAARTAVGKFGGTLAKTPAPELGAVVIKALLEKTGVKPDQIGEVIMGQVLAAGAGQNPARQAMMKAGIAKETPALTINAVCGSGLKAVMLAAQAIAWGDSDIVIAGGQENMSASPHVLMGSRDGQRMGDWKMVDTMINDGLWDVYNKYHMGITAENVAKEHDISRDQQDALALASQQKATAAQEAGRFKDEIVPVSIPQRKGDPVLFDTDEFINKKTTAEALAGLRPAFDKAGSVTAGNASGINDGAAAVMVMSAAKAKELGLTPMARIKSFGTSGLDPATMGMGPVPASRKALERAGWQVGDVDLFELNEAFAAQACAVNKELGVDPAKVNVNGGAIAIGHPIGASGCRVLVTLLHEMQRRDAKKGLAALCIGGGMGVSLTVER

SEQ ID NO: 101191 - DNA, 1161 bp, Colwellia psychrerythraea
  CDS (1)..(1161): transl_table=11
atgaacgaagttgtaattgtagactgcatacgaactccaatgggtcgctctaaggccggtgtttttcgcaatgtacgtgctgaagcactatcagcacacttaatgaaacaaattttagtacgtaatcctgcattaaacccagaagacattgaagatgttatttggggttgtgtgaagcaaactaaagaacaaggttttaatattgcacgtaatgcatcattacttgctggtttaccaaagtccattggtggcgttacggtaaatcgcttatgtggctcttctatggaagcgttacatcaagcaagtactagcatcatgtcaggacaaggcgatgtattccttattggtggcgtagagcacatgggtcacgtacctatgatgtatgacgttgattttgatccagcactgaataaaaatatcgctttagcctctggtaacatgggcttaacggctgagttattaggtaaacaacacggcattacgcgtgaaatgcaagatgcttttggtgcgcgttcgcatcaaaaagcgcatgaagcacacttggctggtcgttgggataatgaaattgttgcaacacaaggtcatgatgctactggtgcattaacattagtagagcacgatgaagttatccgccctgaaacaacggcagaaagcttatccgctttgcgcccagtgtttgatccggtcaatggtacggtaactgccggaacttcatcagcgttatcagatggcgcttcagcaatgttggttatgtctgctgctaaagcgaaagaattaggcttaacaccacgcgttaaaattcgtggtatggccgttgctggttgcgatcctgcgactatgggctttggtcctgttcctgctaccaagaaagcactaaaacgtgctggtttatctattgcagatattgagttatttgaattcaatgaagcttttgctgcgcaagcattatcttgtgttcgctcattaaaagtggaagataaaatggatcaaattaacttaaatggtggtgctattgcattgggtcatcctttaggttgttcaggttcacgtatctcaggtacgctgattaacttgatggaaggacaagatgttaatattggtttagctactatgtgtatcggcttaggtcagggtatcgcaacagtatttgaacgcgtgtaa

SEQ ID NO: 101192 - protein, 386 aa, Colwellia psychrerythraea
MNEVVIVDCIRTPMGRSKAGVFRNVRAEALSAHLMKQILVRNPALNPEDIEDVIWGCVKQTKEQGFNIARNASLLAGLPKSIGGVTVNRLCGSSMEALHQASTSIMSGQGDVFLIGGVEHMGHVPMMYDVDFDPALNKNIALASGNMGLTAELLGKQHGITREMQDAFGARSHQKAHEAHLAGRWDNEIVATQGHDATGALTLVEHDEVIRPETTAESLSALRPVFDPVNGTVTAGTSSALSDGASAMLVMSAAKAKELGLTPRVKIRGMAVAGCDPATMGFGPVPATKKALKRAGLSIADIELFEFNEAFAAQALSCVRSLKVEDKMDQINLNGGAIALGHPLGCSGSRISGTLINLMEGQDVNIGLATMCIGLGQGIATVFERV

SEQ ID NO: 101193 - DNA, 1164 bp, Enterobacter cloacae
  CDS (1)..(1164): transl_table=11
atggaaaaggttgtcattgttgatgcgattcgcaccccgatgggccgttcaaaaggcggtgcattccgtaacgtgcgtgcggaagacctctccgcgcatctgatgcgtagcctgctggcgcgtaacccggcgctggatcctgctgcgctggacgatatctactggggctgcctgcaccaaaccctggagcaaggtttcaacctcgcccgtaacgcgtcgctgctggcggaaatcccgcactcggttccggctgtcaccgtcaatcgtctgtgcggttcgtcaatgcaggcgctgcacgacgcggcgcggatgatcatgaccggtgatgcgcaggcctgcctggtgggcggcgttgagcacatggggcacgtgccgatgagccacggggtccatttccaccctggcatgagccgtaacgtggcgaaagccgcggggatgatgggtctgaccgccgagatgctctctcgtctgcacggcattagccgtgaaatgcaggatgcctttgccgcgcgctctcatgctcgcgcatgggcggcgacgcagtccggtgcctttaagaatgagatcatcccgaccggcggccacgacgctgacggcgtactgaagcagttcagttacgacgaagtcatccgcccggaaaccaccgtagaagcgctttctaccctgcgccctgcgtttgatccggtcacgggtacggtaacggcaggtacttcgtcggcgctgtcagacggtgccgccgcgatgctggtgatgagcgaaagtcgcgcccgcgagctgggcttaacgcctcgcgcacgggtacgttcgatggcggtcgtgggctgcgatccttcaatcatgggttacggcccggttccggcctcgaagctggcgctgaaaaaagcgggattaaccgccagcgacatcgacctgtttgaaatgaacgaagcgttcgccgcgcagatcctgccgtgcattaaagatctggggctgatggggcagatcgacgagaagattaacctcaacggcggcgcgatcgccctcggccacccgctgggctgttccggggcgcgtatcagcacgacgcttatcaacctgatggaaggcaaagatgcccagtttggtctggcaacgatgtgtatcgggctgggtcagggtatcgcgacggtgtttgagagagtgtaa

SEQ ID NO: 101194 - protein, 387 aa, Enterobacter cloacae
MEKVVIVDAIRTPMGRSKGGAFRNVRAEDLSAHLMRSLLARNPALDPAALDDIYWGCLHQTLEQGFNLARNASLLAEIPHSVPAVTVNRLCGSSMQALHDAARMIMTGDAQACLVGGVEHMGHVPMSHGVHFHPGMSRNVAKAAGMMGLTAEMLSRLHGISREMQDAFAARSHARAWAATQSGAFKNEIIPTGGHDADGVLKQFSYDEVIRPETTVEALSTLRPAFDPVTGTVTAGTSSALSDGAAAMLVMSESRARELGLTPRARVRSMAVVGCDPSIMGYGPVPASKLALKKAGLTASDIDLFEMNEAFAAQILPCIKDLGLMGQIDEKINLNGGAIALGHPLGCSGARISTTLINLMEGKDAQFGLATMCIGLGQGIATVFERV

SEQ ID NO: 101195 - DNA, 1164 bp, Idiomarina loihiensis
  CDS (1)..(1164): transl_table=11
atgaaagacatcgtcatagtagattgtattcgtacgccaatggggcgttcaaaaaatggtgttttccgccatactcgtgccgaagacctctcagctgcgctgatgaagggcttacttgagcgtaacccggaagttgacccggaagaactggaagacatttactggggttgtgtacaacaaaccttagagcaaggcttcaacattgcgcgtaactcagcgttaattgccggcattccacacaaagtagccggtgttaccgttaaccgtctgtgcggctcatcaatgcaagcattgcacgacgctacgcgcgctattatgaacggcgacggcgacatctttatggccggtggtgttgagcacatgggtcacgtacctatgacccacggaatcgactttcacccgggcatgaacaagtctgttgcaaaagcttcgggcagcatgggtatgaccgctgaactgttatctcgtaagttcggtattacccgcgaacaacaagacgaatttggtgcacgctctcacagaaaagcgcacgaggcgacggttgaaggccgctttgctaaagagatttacgcaatgaatggccacaacgccgacggcgaactggtacgtgttactgaagacgaagtgattcgcccagaaaccactgctgaaggcttgtcacagcttcgcccagtgtttgaccctgctaacggtacggtaaccgctggtacctcgtcagccttgtcagacggcgccgcagccatgttggttatgtctgctgacaaagccaaagaactgggtctgacgccacgcgttaaaatccgttcaatggccgttgcaggctgcgatccatccattatgggttacggaccggttccggcaacagaaaaagcgctgaagcgtgctggtgtgtctattgacgacatcgacgttgttgaactgaacgaagcctttgccgcacagtcactgcctgtacttaaaggtttaaaactgttcgacaagatggaagagaaagtgaacctgaacggcggtgctatcgctttaggtcacccattaggctgttctggcgctcgtatctcaacgacgctaatcaacttaatggaagagaaagacgcgaaacttggcttagcaaccatgtgcattggccttggccagggtattgctactgtcttcgaacgcgtttaa

SEQ ID NO: 101196 - protein, 387 aa, Idiomarina loihiensis
MKDIVIVDCIRTPMGRSKNGVFRHTRAEDLSAALMKGLLERNPEVDPEELEDIYWGCVQQTLEQGFNIARNSALIAGIPHKVAGVTVNRLCGSSMQALHDATRAIMNGDGDIFMAGGVEHMGHVPMTHGIDFHPGMNKSVAKASGSMGMTAELLSRKFGITREQQDEFGARSHRKAHEATVEGRFAKEIYAMNGHNADGELVRVTEDEVIRPETTAEGLSQLRPVFDPANGTVTAGTSSALSDGAAAMLVMSADKAKELGLTPRVKIRSMAVAGCDPSIMGYGPVPATEKALKRAGVSIDDIDVVELNEAFAAQSLPVLKGLKLFDKMEEKVNLNGGAIALGHPLGCSGARISTTLINLMEEKDAKLGLATMCIGLGQGIATVFERV

SEQ ID NO: 101197 - DNA, 1164 bp, Photobacterium profundum
  CDS (1)..(1164): transl_table=11
atgaataacgtagtaattgttgactgtatccgtaccccaatgggacgttctaaagcgggtgcatttcgaaatgtgcgtgctgaagatttatctgcacacctaatgaaaggcttaataagtcgtaacccgcagctagatcccaattcaattgaagatatttactggggctgtgttcagcaaacattagagcaaggctttaacgttgcacgtaatgcatcactgctcgccggaattccacacaccgtggccgctacaacggttaaccgtttatgtggttcatcaatgcaagcactgcatgatgcaacacgcgccataatggttggtgacgctgaaacctgcatcatcggtggtgtagaacacatgggccacgtgccgatgaaccacggtgttgatttccaccctggcatgtcaaagtctgttgcaaaagcagcaggaatgatgggactaacagctgaaatgctaggccgtatgcatggtattagccgtcagatgcaagatgagtttgccgcacgctcgcatcagcgcgcacatgctgcaaccattgaaggtcgctttaaaaacgagatattgccgatcgaaggccatgatgaaaacggcatcctcaagctttacgactatgatgaagtgattcgtccagaaaccacagttgaaggtctatcaaacctacgtccagcctttgatccggtgaacggtactgttaccgctggctcctcatcagcactatcagatggtgcttctgcaatgttagtgatgagtgagcaccgcgccaaagaattagggctaaccattcgtgcacgcgttaaatcaatggctgtggctggctgcgatccttctattatgggatacggacccgttcctgctactcaaaaagccctaaaacgagcaggtctcagtattgatgatattggcatggttgagcttaatgaagcctttgcggcacagtcgcttccttgtgctaaagatctaggcttactcgataaaattgacgagaaggtgaacctaaatggtggcgcaattgcgcttggtcaccctcttggttgttcaggctcacgtatttcaacaaccttgatcaaccaaatggaacatcatgatgttcaatttggtttagcaacaatgtgtattggtttaggtcaaggtatcgcgacggtatttgaacgcgtgtaa

SEQ ID NO: 101198 - protein, 387 aa, Photobacterium profundum
MNNVVIVDCIRTPMGRSKAGAFRNVRAEDLSAHLMKGLISRNPQLDPNSIEDIYWGCVQQTLEQGFNVARNASLLAGIPHTVAATTVNRLCGSSMQALHDATRAIMVGDAETCIIGGVEHMGHVPMNHGVDFHPGMSKSVAKAAGMMGLTAEMLGRMHGISRQMQDEFAARSHQRAHAATIEGRFKNEILPIEGHDENGILKLYDYDEVIRPETTVEGLSNLRPAFDPVNGTVTAGSSSALSDGASAMLVMSEHRAKELGLTIRARVKSMAVAGCDPSIMGYGPVPATQKALKRAGLSIDDIGMVELNEAFAAQSLPCAKDLGLLDKIDEKVNLNGGAIALGHPLGCSGSRISTTLINQMEHHDVQFGLATMCIGLGQGIATVFERV

SEQ ID NO: 101199 - DNA, 1176 bp, Pseudomonas aeruginosa
  CDS (1)..(1176): transl_table=11
atgagcctgaatccgagagacgtcgtcattgtcgacttcggccgcaccccgatgggtcgttccaagggtggcatgcaccgcaacacccgcgccgagaccatgtcggcgcacctgatcagcaagctgctggagcgcaacccgaaggtcgacccggccgaagtggaagacgtgatctggggctgcgtcaaccagaccctggagcagggctggaacatcgcgcgcatggcgtcgctgatgacccagatcccgcacaccagcgccgcgcagaccgtcagccgcctgtgcggttcgtcgatgagcgcgctgcacaccgccgcccaggcgatccagaccggcaatggcgatgtattcgtcatcggcggcgtggagcacatgggccacgtcggcatgatgcatggcgtcgacccgaacccgcacctgtccctgtacgccgccaaggcctcgggcatgatgggcctgactgcggaaatgctcggcaagatgcacggtatcagccgtgaggcgcaggacaagttcggcgcgcgttcgcaccaactggcctggaaggccacccaggaaggcaagttcaaggacgagatcatcccgatggaagggtatgacgagaacggtttcctgaaagtcttcgacttcgacgagaccattcgtccggaaaccaccgtcgagaccctggccgagttgaagccggcgttcaatccgaaaggcggcaccgtgaccgcggggacctcctcgcagatcaccgacggtgcctcctgcatgatcgtgatgtcggcccagcgcgcccaggacctgggcatccagccgatggcggtgatccgctccatggccgtggcgggtgtcgacccggctatcatgggctacggcccggtgccgtcgaccaacaaggcgctcaagcgtgccggcctgaccatcgccgacatcgatttcgtcgaactcaacgaagccttcgccgcccaggccctgcctgtgctgaaggacctcaagctgctcgacaagatggacgagaaggtcaacctccacggcggcgccatcgccctgggtcacccgttcggttgctccggtgcgcgcatttccggcaccctgttgaacgtgatgaagcagaacggcggtacccttggcgtgtccaccatgtgcgtgggcctgggacagggtatcaccaccgtcttcgagcgcatctaa

SEQ ID NO: 101200 - protein, 391 aa, Pseudomonas aeruginosa
MSLNPRDVVIVDFGRTPMGRSKGGMHRNTRAETMSAHLISKLLERNPKVDPAEVEDVIWGCVNQTLEQGWNIARMASLMTQIPHTSAAQTVSRLCGSSMSALHTAAQAIQTGNGDVFVIGGVEHMGHVGMMHGVDPNPHLSLYAAKASGMMGLTAEMLGKMHGISREAQDKFGARSHQLAWKATQEGKFKDEIIPMEGYDENGFLKVFDFDETIRPETTVETLAELKPAFNPKGGTVTAGTSSQITDGASCMIVMSAQRAQDLGIQPMAVIRSMAVAGVDPAIMGYGPVPSTNKALKRAGLTIADIDFVELNEAFAAQALPVLKDLKLLDKMDEKVNLHGGAIALGHPFGCSGARISGTLLNVMKQNGGTLGVSTMCVGLGQGITTVFERI

SEQ ID NO: 101201 - DNA, 1176 bp, Pseudomonas fluorescens
  CDS (1)..(1176): transl_table=11
atgagcttgaatcctagagacgtcgtgattgtcgacttcggtcgtactccgatgggccgctccaagggcggcatgcaccgcaacacccgcgccgaagacatgtcggcgcacctgatcagcaaactgctggaacgcaacgccaaggtcgacccggcggaagtcgaggacgtgatttggggctgcgtcaaccagaccctggagcagggctggaacatcgcgcgcatggcgtcgctgatgacccagatcccgcacacctcggccggccagaccgtcagccgcctgtgtggctcgtccatgagtgctttgcacactgccgcgcaagcgatcatgactggcaacggtgacgtgttcgtggtcggcggcgtcgagcacatgggccacgtgagcatgatgcacggtgtcgatccgaacccgcacatgtccctgtacgcagccaaagcttccggcatgatgggcctgaccgccgagatgctgggcaagatgcacggcatcacccgtgagcagcaggacgcctttggcgtgcgctcccatcagctcgcccacaaggcgactgtggaaggcaagttcaaggatgaaatcatcccgatgcagggctacgacgagaacggtttcctgaaactgttcgactacgacgaaaccatccgtcccgagaccaccctggagagcctggcggccctgaagccggcgttcaaccctaaaggtggtaccgtgactgccggtacttcttcgcagatcaccgacggtgcctcgtgcatgatcgtgatgtcggcccagcgtgcccaggacctgggtatccagccgatggcggtgattcgttcgatggccgttgcaggtgtggatccggccatcatgggctatggtccagtaccggccacgcagaaagccctgaagcgcgcgggcctgggcatcaacgatatcgacttcttcgagctcaacgaagctttcgctgcacaggccctgccagtgctgaaagatctgaaagtgctcgacaagatgaacgagaaggttaacctgcacggcggcgcgatcgccctgggtcacccgttcggttgctccggcgcacgtatctccgggaccctgctcaacgtcatgaagcagaatggcggcaccttcggggtgtccaccatgtgcatcggccttggccagggtatctcgaccgtcttcgaacgcgtttaa

SEQ ID NO: 101202 - protein, 391 aa, Pseudomonas fluorescens
MSLNPRDVVIVDFGRTPMGRSKGGMHRNTRAEDMSAHLISKLLERNAKVDPAEVEDVIWGCVNQTLEQGWNIARMASLMTQIPHTSAGQTVSRLCGSSMSALHTAAQAIMTGNGDVFVVGGVEHMGHVSMMHGVDPNPHMSLYAAKASGMMGLTAEMLGKMHGITREQQDAFGVRSHQLAHKATVEGKFKDEIIPMQGYDENGFLKLFDYDETIRPETTLESLAALKPAFNPKGGTVTAGTSSQITDGASCMIVMSAQRAQDLGIQPMAVIRSMAVAGVDPAIMGYGPVPATQKALKRAGLGINDIDFFELNEAFAAQALPVLKDLKVLDKMNEKVNLHGGAIALGHPFGCSGARISGTLLNVMKQNGGTFGVSTMCIGLGQGISTVFERV

SEQ ID NO: 101203 - DNA, 1176 bp, Pseudomonas oleovorans
  CDS (1)..(1176): transl_table=11
atgagcctgaatccaagagacgtggtgattgtcgacttcggtcgcacgccgatgggccgctccaagggtggcatgcaccgcaatacccgcgccgaagacatgtcggcgcacctgatcagcaagctgctggaacgcaacgacaaggtcgacccgaaagaagtcgaggacgtgatctggggctgcgtcaaccagaccctcgagcagggctggaacatcgcccgcatggcctcgctgatgacccagatcccgcacacctccgcggcgcagaccgtcagccgcctgtgcggctcgtcgatgagcgcgctgcacaccgccgcccaggcgatcatgaccggcaacggtgatgtattcgtggtcggtggcgtggagcacatgggccacgtcagcatgatgcatggcgtcgaccccaacccgcacctgtccttgcatgccgccaaggcttccgggatgatgggcctgaccgcggaaatgctcggcaagatgcacggcatcacccgtgagcagcaggacctgttcggcctgcgttcgcaccagctggcgcacaaggccacggtcgaaggcaagttcaaggacgaaatcatcccgatgcagggctatgacgagaacggcttcctgaaggtgttcgatttcgacgaaaccattcgcccggaaaccactctcgaaggcctggcgtcgctgaagccggcgttcaacccgaaaggcggtaccgtcactgccggtacctcgtcgcagatcaccgacggtgcgtcgtgcatggtcgtcatgtccggccagcgcgccatggacctgggtatccagccattggcggtcatccgttccatggcggtggctggtgtcgacccggcgatcatgggctacggcccggtgccatcgacccagaaagccctcaagcgtgctggcctgaccatggccgacatcgacttcatcgagctcaacgaagccttcgctgcacaggccctgccagtgctgaaagacttgaaagtactcgacaagatggatgagaaggttaacctgcacggcggcgccattgccttgggccacccgttcggttgctccggggcacggatttccggcaccctgctcaatgtcatgaagcagaatggcggtaccctgggggtggcgaccatgtgcgtcggcctcggccaaggtatcaccaccgtcttcgagcgcatctaa

SEQ ID NO: 101204 - protein, 391 aa, Pseudomonas oleovorans
MSLNPRDVVIVDFGRTPMGRSKGGMHRNTRAEDMSAHLISKLLERNDKVDPKEVEDVIWGCVNQTLEQGWNIARMASLMTQIPHTSAAQTVSRLCGSSMSALHTAAQAIMTGNGDVFVVGGVEHMGHVSMMHGVDPNPHLSLHAAKASGMMGLTAEMLGKMHGITREQQDLFGLRSHQLAHKATVEGKFKDEIIPMQGYDENGFLKVFDFDETIRPETTLEGLASLKPAFNPKGGTVTAGTSSQITDGASCMVVMSGQRAMDLGIQPLAVIRSMAVAGVDPAIMGYGPVPSTQKALKRAGLTMADIDFIELNEAFAAQALPVLKDLKVLDKMDEKVNLHGGAIALGHPFGCSGARISGTLLNVMKQNGGTLGVATMCVGLGQGITTVFERI

SEQ ID NO: 101205 - DNA, 1176 bp, Pseudomonas putida
  CDS (1)..(1176): transl_table=11
atgagcctgaatccaagagacgtggtgattgtcgacttcggtcgcacgccaatgggccgctccaagggtggcatgcaccgcaacacccgcgccgaagacatgtcggcgcacctgatcagcaagctgctggaacgcaacggcaaggtcgacccgaaagaagtcgaggacgtgatctggggctgcgtcaaccagaccctggagcagggctggaacatcgcccgcatggcttcgctgatgaccccgatcccgcacacctctgcggcgcagaccgtcagccgcctgtgcggctcgtccatgagcgcgctgcacacggccgcccaggcgatcatgaccggtaacggtgatgtgttcgtggtcggtggcgtggagcacatgggccacgtcagcatgatgcatggcgtagaccccaacccgcacctgtccttgcatgccgccaaggcttccgggatgatgggcctgactgcagaaatgctcggcaagatgcacggcatcacccgtgagcagcaggacctgttcggcttgcgttcgcaccagctggcccacaaggccacggtcgaaggcaagttcaaggacgagatcatcccgatgcagggctacgacgagaacggcttcctgaaggtgttcgatttcgacgaaaccattcgcccggaaaccaccctcgaaggcctggcatcgctcaagcctgcgttcaacccgaaaggcggtacggtcacggccggtacctcgtcgcagatcaccgacggcgcctcgtgcatgatcgtcatgtccggtcagcgtgccatggacctcggtatccagccattggcggtgatccgttcgatggcagtggccggtgtcgacccggcaatcatgggctacggcccggtgccatcgacccagaaagccctcaagcgtgcgggcttgaccatggccgatatcgacttcatcgagctcaacgaagccttcgctgcgcaggccctgcccgtgctgaaagacttgaaagtgctcgacaagatggatgagaaggttaacctgcacggcggcgccattgctttgggccacccgttcggttgctccggggcgcggatttccggcaccctgctcaacgtcatgaagcaaaatggcggtacgctgggtgttgcgaccatgtgcgtcggcctgggccaaggtatcaccactgtcttcgaacgcgtctga

SEQ ID NO: 101206 - protein, 391 aa, Pseudomonas putida
MSLNPRDVVIVDFGRTPMGRSKGGMHRNTRAEDMSAHLISKLLERNGKVDPKEVEDVIWGCVNQTLEQGWNIARMASLMTPIPHTSAAQTVSRLCGSSMSALHTAAQAIMTGNGDVFVVGGVEHMGHVSMMHGVDPNPHLSLHAAKASGMMGLTAEMLGKMHGITREQQDLFGLRSHQLAHKATVEGKFKDEIIPMQGYDENGFLKVFDFDETIRPETTLEGLASLKPAFNPKGGTVTAGTSSQITDGASCMIVMSGQRAMDLGIQPLAVIRSMAVAGVDPAIMGYGPVPSTQKALKRAGLTMADIDFIELNEAFAAQALPVLKDLKVLDKMDEKVNLHGGAIALGHPFGCSGARISGTLLNVMKQNGGTLGVATMCVGLGQGITTVFERV

SEQ ID NO: 101207 - DNA, 1215 bp, Pseudomonas putida
  CDS (38)..(1213): transl_table=11
aactgagcggtcaacgagctagagcgagagatttgatatgagcctgaatccaagagacgtggtgattgtcgacttcggtcgcacgccaatgggccgctccaagggtggcatgcaccgcaatacccgcgccgaggacatgtcggcgcacctgatcagcaagctgctggagcgtaacgacaaggtcgacccgaaggaagtcgaggacgtgatctggggctgcgtcaaccagaccctggagcaggggtggaacatcgcccgcatggcgtcgctgatgaccccgatcccgcacacttctgcagcgcagaccgtcagccgcctgtgcggctcgtcgatgagcgcactgcacaccgctgcccaggcgatcatgaccggtaacggcgatgtgttcgtgattggcggggtggagcacatgggccacgtcagcatgatgcacggcgtcgaccccaacccgcacctgtccttgcatgcagccaaggcttccgggatgatgggcctgactgcggaaatgctcggcaagatgcacggcatcacccgtgagcagcaagacctgttcggcgtgcgttcgcaccaattggcccacaaggccacggtcgaaggcaagttcaaggacgagatcatcccgatgcagggctatgacgagaacggcttcctgaaggtgttcgatttcgacgaaaccattcgcccggaaaccaccctcgaaggcctggcgtcgctcaagcccgcgtttaacccgaaaggcggtaccgtcactgccggtacctcgtcgcagatcaccgacggcgcttcgtgcatgatcgtcatgtccggccagcgtgcgatggacctgggtatccagccattggcggtgatccgttcgatggcggtggccggtgtcgatccggcgatcatgggttatggcccggtgccgtcgacccaaaaagccctcaagcgcgccgggctgaccatggccgacatcgacttcatcgagctcaacgaagcctttgctgcacaggccttgccagtgctgaaagacttgaaagtgctcgacaagatggatgagaaggttaacctgcacggcggcgccattgctttgggccacccgttcggttgctccggggcacgtatttcgggcaccctgctcaacgtcatgaagcagaatggcggtaccctgggggtggcgaccatgtgcgtcggcctcggtcaaggtatcaccactgtctttgaacgcgtctgatc

SEQ ID NO: 101208 - protein, 391 aa, Pseudomonas putida
MSLNPRDVVIVDFGRTPMGRSKGGMHRNTRAEDMSAHLISKLLERNDKVDPKEVEDVIWGCVNQTLEQGWNIARMASLMTPIPHTSAAQTVSRLCGSSMSALHTAAQAIMTGNGDVFVIGGVEHMGHVSMMHGVDPNPHLSLHAAKASGMMGLTAEMLGKMHGITREQQDLFGVRSHQLAHKATVEGKFKDEIIPMQGYDENGFLKVFDFDETIRPETTLEGLASLKPAFNPKGGTVTAGTSSQITDGASCMIVMSGQRAMDLGIQPLAVIRSMAVAGVDPAIMGYGPVPSTQKALKRAGLTMADIDFIELNEAFAAQALPVLKDLKVLDKMDEKVNLHGGAIALGHPFGCSGARISGTLLNVMKQNGGTLGVATMCVGLGQGITTVFERV

SEQ ID NO: 101209 - DNA, 1164 bp, Salmonella paratyphi
  CDS (1)..(1164): transl_table=11
atggaacaggttgtcattgtcgatgctattcgcaccccgatgggccgttcgaagggcggcgcgtttcgcaacgtgcgggcagaagatctctccgcccacttaatgcgtagcctgctggcgcgtaatccgtcgcttacagcggcgaccctcgatgatatttactggggctgcgtacaacaaacgctggagcaaggcttcaacattgcccgtaacgccgcgctgctggcagaaattccccattcggtaccggcggtcaccgtcaaccgtctgtgtggttcctcgatgcaggcgttacacgatgcagcgcgaatgatcatgaccggcgatgcgcaggtttgtctggttggcggcgtggagcatatggggcacgtgccgatgagccacggcgtggattttcacccgggtctgagccgcaacgtcgccaaagcggcagggatgatggggctaacggcggaaatgctctcccgcctgcacggcattagccgggaaatgcaggaccagttcgccgcgcgttctcacgctcgcgcctgggccgccacgcagtctggcgcattcaaaacggagattatcccgactggcggtcatgatgcagacggcgtgttgaagcagtttaactacgatgaagtgatccgcccggaaaccacggtcgaagcgctatcaacgctgcgtccggcatttgatccggttagtggcacggtcacggcgggcacctcatccgcgctttccgatggcgctgccgccatgctggtaatgagcgaaagtcgtgcccgtgagctgggcctgaaacctcgcgcccgtattcgctcaatggcagtggtgggttgcgatccgtcaattatgggttacgggccggttccggcatcaaaactggcgttgaaaaaagcgggactgtcggccagcgatatcgatgtgtttgagatgaacgaagcgtttgccgcacagatcctgccatgcattaaggatctgggattgatggagcagatagacgagaagatcaacctcaacggcggcgcgatcgcgcttggtcatccgctcggctgctccggagcacgtatcagcaccacgcttatcaacctgatggagcgcaaagacgcgcagtttggtctggcgacgatgtgtattggtctgggtcagggcatcgccacggtgtttgagcgggtttaa

SEQ ID NO: 101210 - protein, 387 aa, Salmonella paratyphi
MEQVVIVDAIRTPMGRSKGGAFRNVRAEDLSAHLMRSLLARNPSLTAATLDDIYWGCVQQTLEQGFNIARNAALLAEIPHSVPAVTVNRLCGSSMQALHDAARMIMTGDAQVCLVGGVEHMGHVPMSHGVDFHPGLSRNVAKAAGMMGLTAEMLSRLHGISREMQDQFAARSHARAWAATQSGAFKTEIIPTGGHDADGVLKQFNYDEVIRPETTVEALSTLRPAFDPVSGTVTAGTSSALSDGAAAMLVMSESRARELGLKPRARIRSMAVVGCDPSIMGYGPVPASKLALKKAGLSASDIDVFEMNEAFAAQILPCIKDLGLMEQIDEKINLNGGAIALGHPLGCSGARISTTLINLMERKDAQFGLATMCIGLGQGIATVFERV

SEQ ID NO: 101211 - DNA, 1164 bp, Shewanella oneidensis
  CDS (1)..(1164): transl_table=11
atgaaacaagctgttatcgtagattgcattcgtactcctatgggccgctctaaggctggggtgttccgtaatgtgcgtgcagaaacactgtctgccgaattaatgaaaggtctattactgcgtaacccgcaattagatcccaacaccattgaagacgtgatttggggctgtgtgcaacagaccttagagcaaggcttcaacattgcccgtaacgcatcgttactggcaggtatcccgaaaacggctggcgccgtaacggtaaaccgcttatgtggttcttcaatggaagccatccaccaagcagcacgtgccattatgacaggtatgggcgacacctttatcattggcggtgttgaacatatgggccacgttccgatgaaccatggtgtggatttccaccctggtttagccaataacgttgctaaagcttcaggtatgatgggcttaaccgctgaaatgctcggcaagctccacggcattacccgtgagcaacaggatgcctttgcagtgcgttcacaccaacgcgcttatgctgcgacgattgaaggccgttttgccaaggaaatctatggcattgaaggccatgatgctactggtgccttaattaaagtgctgcaagacgaagtgatccgcccagaaaccacaatggaatctctagcagtactgcgcccagtatttgatcccgtaaacgggactgtcactgcgggtacatcttctgcactgtctgatggcgcttcggcaatgttaattatggaagagtctaaggctcgcgccttaggcttacctatccgcgcacgcattcgctcaatggccgttgctggttgtgatgcggcaatcatgggttatggcccagtccccgcaactcaaaaggcactggctcgcgcaggcatcacagtcaatgacttagatgttattgaactaaacgaagcttttgctgcccagtctttaccttgtgtgaaagatttaggcctgctggatgtggttgatgaaaagattaaccttaatggtggcgcgattgcacttggccacccactgggttgttctggcgcgcgtatctctacgacgcttattaacttgatggaacacaaagatgcaaccttaggtttggcaaccatgtgtatcggtttaggccaaggtattgcaaccgttttcgaacgagtctaa

SEQ ID NO: 101212 - protein, 387 aa, Shewanella oneidensis
MKQAVIVDCIRTPMGRSKAGVFRNVRAETLSAELMKGLLLRNPQLDPNTIEDVIWGCVQQTLEQGFNIARNASLLAGIPKTAGAVTVNRLCGSSMEAIHQAARAIMTGMGDTFIIGGVEHMGHVPMNHGVDFHPGLANNVAKASGMMGLTAEMLGKLHGITREQQDAFAVRSHQRAYAATIEGRFAKEIYGIEGHDATGALIKVLQDEVIRPETTMESLAVLRPVFDPVNGTVTAGTSSALSDGASAMLIMEESKARALGLPIRARIRSMAVAGCDAAIMGYGPVPATQKALARAGITVNDLDVIELNEAFAAQSLPCVKDLGLLDVVDEKINLNGGAIALGHPLGCSGARISTTLINLMEHKDATLGLATMCIGLGQGIATVFERV

SEQ ID NO: 101213 - DNA, 1164 bp, Shigella flexneri
  CDS (1)..(1164): transl_table=11
atggaacaggttgtcattgtcgatgcaattcgcaccccgatgggccgttcgaagggcggtgcttttcgtaacgtgcgtgcggaagatctctccgctcatttaatgcgtagcctgctggcgcgtaacccggcgctggaagcggcggccctcgacgatatttactggggttgtgtgcaacagacgctggagcagggttttaacatcgcccgtaacgcggcgctgctggcagaagtgccgcactctgtcccggcggttaccgtcaatcgcttgtgtggttcatccatgcaggcactgcatgacgcagcacgaatgatcatgactggcgatgcgcaggcatgtctggttggcggcgtggagcatataggccatgtgccgatgagtcacggcgtcgattttcaccccggcctgagccgcaatgtcgccaaagcggcgggcatgatgggcttaacggcagaaatgctggcgcgtatgcacggtatcagccgtgaaatgcaggatgcctttgccgcgcggtcacacgcccgcgcctgggccgccacgcagtcggccgcatttaaaaatgaaatcatcccaactggtggtcacgatgccgacggcgtcctgaagcagtttaattacgacgaagtgattcgcccggaaaccaccgtggaagccctcgccacgctgcgtccggcgtttgatccagtaaacggtacggtaacggcgggcacatcttctgcactttccgatggcgcagctgccatgctggtgatgagtgaaagccgcgcccatgaattaggtcttaagccgcgcgctcgtgtgcgttcgatggcggtcgttggttgtgacccatcgattatgggttacggcccggttccggcctcgaagctggcgctgaaaaaagcggggctttctgccagcgatatcggcgtgtttgagatgaacgaagcctttgccgcgcagatcctgccgtgcattaaagatctcgggctaatggagcagattgacgagaagatcaacctcaatggtggtgcgatcgcgctgggtcatccgctgggttgttccggtgcgcgtatcagcaccacgctgctgaatctgatggaacgcaaagacgttcagtttggtctggcgacgatgtgtatcggtctgggtcagggtattgcgacggtgtttgagcgggtttaa

SEQ ID NO: 101214 - protein, 387 aa, Shigella flexneri
MEQVVIVDAIRTPMGRSKGGAFRNVRAEDLSAHLMRSLLARNPALEAAALDDIYWGCVQQTLEQGFNIARNAALLAEVPHSVPAVTVNRLCGSSMQALHDAARMIMTGDAQACLVGGVEHIGHVPMSHGVDFHPGLSRNVAKAAGMMGLTAEMLARMHGISREMQDAFAARSHARAWAATQSAAFKNEIIPTGGHDADGVLKQFNYDEVIRPETTVEALATLRPAFDPVNGTVTAGTSSALSDGAAAMLVMSESRAHELGLKPRARVRSMAVVGCDPSIMGYGPVPASKLALKKAGLSASDIGVFEMNEAFAAQILPCIKDLGLMEQIDEKINLNGGAIALGHPLGCSGARISTTLLNLMERKDVQFGLATMCIGLGQGIATVFERV

SEQ ID NO: 101215 - DNA, 1164 bp, Vibrio cholerae
  CDS (1)..(1164): transl_table=11
atgaatacagtagtgattgttgattgcctacgtactccgatgggacgctccaaaggcggtgcgtttcgccaccaacgtgcggaagatctttcagcacatttgatgaaaggcattctggcgcgcaacccacaggtcaatccaaaagagattgaagacatttattggggctgtgtgcagcaaacccttgaacaaggctttaacgttgcgcgtaacgcagcgctgcttgcgggtctgccaattgagattggcgcggtcaccgtcaaccgtttgtgtggatcgtccatgcaagcactgcatgatgcggcgcgcgcaatcatggttggcgatgcagagatctgtttagtgggcggcgttgagcacatgggccacgtgccaatgactcacggcgttgatttccatcctggcctgtctaagaacgtggccaaagcagcgggaatgatgggactgaccgcagagatgcttgggaagctgcatggtattagccgtcagcagcaagatgagttcgctgcgcgctcccatgcgcgtgctcatgcagcaacattagaaggtcgctttaaaaacgagattctgcccaccgaggggcatgctgccgatggcacgctgtttaccctcgattacgatgaagtgatccgcccggaaaccacagtggcgggattagctgaactgcgtcccgtgttcgatccggccaacggaactgtgactgcaggaacctcttcagccctttcggatggtgcttcagcgatgttggtgatgagtgagcaaaaagccaaagcgctcggtttaaccattcgcgcccgcattaaagcgatggccgtggccggttgcgatccttccatcatgggttatggccctgtacctgcgacccataaagcgctgcaacgtgcgggcttaaccatgcaggatatggatgtggtggaattgaacgaagcgtttgccgcacaatctctaccttgcgctaaagacttaggcttactggagatgatggatgacaaggtcaacctcaatggcggcgcgattgcgctcggtcatccactgggttgctcgggtacacgtatctcaaccacgctgatcaatttgatggaagccaaagatgcgaaatatggccttgctaccatgtgtatcggcttaggtcagggtattgcgaccatttttgagcgcccataa

SEQ ID NO: 101216 - protein, 387 aa, Vibrio cholerae
MNTVVIVDCLRTPMGRSKGGAFRHQRAEDLSAHLMKGILARNPQVNPKEIEDIYWGCVQQTLEQGFNVARNAALLAGLPIEIGAVTVNRLCGSSMQALHDAARAIMVGDAEICLVGGVEHMGHVPMTHGVDFHPGLSKNVAKAAGMMGLTAEMLGKLHGISRQQQDEFAARSHARAHAATLEGRFKNEILPTEGHAADGTLFTLDYDEVIRPETTVAGLAELRPVFDPANGTVTAGTSSALSDGASAMLVMSEQKAKALGLTIRARIKAMAVAGCDPSIMGYGPVPATHKALQRAGLTMQDMDVVELNEAFAAQSLPCAKDLGLLEMMDDKVNLNGGAIALGHPLGCSGTRISTTLINLMEAKDAKYGLATMCIGLGQGIATIFERP

SEQ ID NO: 101217 - DNA, 1176 bp, Vibrio parahaemolyticus
  CDS (1)..(1176): transl_table=11
atgactaatcaaaccagaaacgttgtcgtagtcgattgtctacgtaccccaatgggtcgctctaaaggtggtgctttccgtcatactcgtgcagaagacctttctgcgcacctaatgaaaggcattctggcacgcaacccgcaagtgaacccaagtgagattgaagacatctactggggctgtgtgcaacaaacgcttgagcaaggctttaacatcgcgcgtaatgcagcgctgcttgctggcctaccaattgagattggcgcagtaaccgtgaatcgtctgtgtggctcatctatgcaagccctgcatgatggtactcgtgcaatcatgacaggtgacgcggaaatttgcctgatcggtggtgtcgagcacatgggtcacgtaccaatgaaccacggtgtagacttccatcctggcatgtcgaaaaacgtcgccaaagccgctggcatgatgggtttaaccgctgaaatgcttggtaagcttcatggtatcagccgtgagcaacaagatgagtttgcggcgcgctctcatgctcgtgctcacgcagcaacattggaaggtcgctttaaaaacgaaatcctaccaaccgaaggccacgcagcagacggtacgttgttccagttagattacgatgaagtgattcgtccagagaccaccgttgaaggtctgtctcaacttcgtccggtattcgacccagcgaacggtactgtaacagccggcacgtcttccgctttatctgatggtgcatccgcaatgctgatcatgagcgaagagaaagccaatgaacttggtttgaagattcgcgcacgaatcaaaggcatggcgatcgcaggttgcgatccatccatcatgggttacggccctgtacctgcaacgcaaaaagcgctgaaacgtgcaggtcttgcaattgaagatatggacgttgtcgagctaaacgaagcgtttgcagcgcaatctctgccatgtgcgaaagacctaggtctgcttgaggtgatggacgaaaaagtgaacctgaatggcggcgcgattgctctaggtcacccattgggttgttctggtgcacgtatctcaacaacacttatcaacctaatggaagccaaggacgccaaatacggccttgcgaccatgtgtatcggtcttggtcagggtatcgctactgtctttgagcgcccgtag

SEQ ID NO: 101218 - protein, 391 aa, Vibrio parahaemolyticus
MTNQTRNVVVVDCLRTPMGRSKGGAFRHTRAEDLSAHLMKGILARNPQVNPSEIEDIYWGCVQQTLEQGFNIARNAALLAGLPIEIGAVTVNRLCGSSMQALHDGTRAIMTGDAEICLIGGVEHMGHVPMNHGVDFHPGMSKNVAKAAGMMGLTAEMLGKLHGISREQQDEFAARSHARAHAATLEGRFKNEILPTEGHAADGTLFQLDYDEVIRPETTVEGLSQLRPVFDPANGTVTAGTSSALSDGASAMLIMSEEKANELGLKIRARIKGMAIAGCDPSIMGYGPVPATQKALKRAGLAIEDMDVVELNEAFAAQSLPCAKDLGLLEVMDEKVNLNGGAIALGHPLGCSGARISTTLINLMEAKDAKYGLATMCIGLGQGIATVFERP

SEQ ID NO: 101219 - DNA, 1164 bp, Vibrio vulnificus
  CDS (1)..(1164): transl_table=11
atgaaaaatgtcgtaattgtcgattgtctacgtacgccaatgggtcgctctaaaggtggcgccttccgccacactcgagcagaagatctttctgcccatttgatgaaagggattctggcgcgtaacccacaagttaacccaagtgagattgaagatatctattggggatgtgttcaacaaaccctagaacaaggctttaacgtagcgcgaaacgcagcgctgctggcaggtttgccaattgaaattggcgcggtgacggtcaaccgtctctgtggctcatcgatgcaagcgctgcacgatggtgcgcgcgccatcatgactggtgatgcagagatctgtttgatcggcggtgttgagcatatgggccacgtgccaatgaaccacggtgtggattttcacccgggcatgtcgaaacacgttgccaaagcggcgggtatgatgggcctaaccgctgaaatgcttggcaagctgcacggcattagccgtgagcaacaagatgagtttgccgcacgctctcacgctcgcgcgcatgcagcaacgatggaaggtcgattcaaaaacgaaattctgcccaccgaagggcatgccgcggatggcaccttgttcaccttggatcatgacgaagtgattcgcccagaaaccacagtggaagggctttctcaacttcgccctgtgtttgatccggccaatggcaccgtcactgctggcacatcctctgcgttgtcagatggtgcatctgcgatgttgatcatgagtgaagaaaaagccaatgagcttggcgtgacgattcgtgctcgtattaaaggcatggcgatcgccggttgcgatccgtccatcatgggttacggccctgtacctgcgacgcaaaaagcacttaaacgtgccggtctatcgattgaagacatggatgtgattgagctaaatgaagcgtttgcagcgcaatctctaccgtgtgcgaaagacctaggtctgctggatgtgatggatgagaaggtcaaccttaacggtggcgcgatcgctcttggtcacccactgggttgctcgggggctcgtatttcaacaactctgattaacctgatggaagccaaagacgccaaatacggccttgcgaccatgtgcattggtttaggtcaaggcattgcaacggtatttgaacgcccttaa

SEQ ID NO: 101220 - protein, 387 aa, Vibrio vulnificus
MKNVVIVDCLRTPMGRSKGGAFRHTRAEDLSAHLMKGILARNPQVNPSEIEDIYWGCVQQTLEQGFNVARNAALLAGLPIEIGAVTVNRLCGSSMQALHDGARAIMTGDAEICLIGGVEHMGHVPMNHGVDFHPGMSKHVAKAAGMMGLTAEMLGKLHGISREQQDEFAARSHARAHAATMEGRFKNEILPTEGHAADGTLFTLDHDEVIRPETTVEGLSQLRPVFDPANGTVTAGTSSALSDGASAMLIMSEEKANELGVTIRARIKGMAIAGCDPSIMGYGPVPATQKALKRAGLSIEDMDVIELNEAFAAQSLPCAKDLGLLDVMDEKVNLNGGAIALGHPLGCSGARISTTLINLMEAKDAKYGLATMCIGLGQGIATVFERP

SEQ ID NO: 101221 - DNA, 1164 bp, Yersinia pestis
  CDS (1)..(1164): transl_table=11
atggaaaatgtagtcattattgatgccgtgcgtacaccgatgggccgctccaaagggggggcttttcgtcatgtacgggctgaagacctctctgcccatttaatgcgtgccgttatcagccgtaatcctgggttgaatgctgctgaaatcgacgatatttattggggttgtgtgcaacaaacgttggagcagggtttcaatattgcccgtaacgcgtctttattagccgaaattcctcacagcgtacccgctgttaccgttaatcgcctgtgtggctcatcaatgcaagctctgcatgatggcgcacgagccattatggtgggtgatgcgaagatcagtttgattggtggagtggaacatatgggccacgtgccaatgaaccacggcgtggatttccatccaggaatgggtcgcactgttgccaaagcggctggaatgatgggcttgaccgctgagatgttggctaaaattcacaatatcagccgccagtcacaagatgagtttgcattccgttctcatcaacgtgcttatgctgcgactcaggcagggcatttcgcaaaagaaatcgttgcaaccaatgggcatgatgcagaaggtgtattaaaacgctttgatttcgatgaagtcattcgtcctgaaacaaatctatccggtctagcagccttgcgccctgcatttgatccggtaaatggcacagttactgcagggacatcatcagccttgtccgatggggcttctgcgatgctgattatgagcgaatccagagcgaagtcattaggtttaaccccacgagcacgtatccgttcgatggcggtcgtaggttgtgacccctcaatcatgggctatggcccggtacctgctagtcaattggcattaaaacgtgctggccttgaattggcagatattggtttatttgagttaaacgaggcgtttgctgctcagtcactggcttgtctgaaaggtttaggtttgttagaaagcatggacgataaagtaaacctgaacggtggagccattgcattaggtcacccgttaggctgttcaggcgcacggatctctaccacattgttaaacctgatggagcgccgtgacgtacaatttgggctagcaaccatgtgtatcggcctagggcaaggtattgctaccgtatttgagcgcttatag

SEQ ID NO: 101222 - protein, 387 aa, Yersinia pestis
MENVVIIDAVRTPMGRSKGGAFRHVRAEDLSAHLMRAVISRNPGLNAAEIDDIYWGCVQQTLEQGFNIARNASLLAEIPHSVPAVTVNRLCGSSMQALHDGARAIMVGDAKISLIGGVEHMGHVPMNHGVDFHPGMGRTVAKAAGMMGLTAEMLAKIHNISRQSQDEFAFRSHQRAYAATQAGHFAKEIVATNGHDAEGVLKRFDFDEVIRPETNLSGLAALRPAFDPVNGTVTAGTSSALSDGASAMLIMSESRAKSLGLTPRARIRSMAVVGCDPSIMGYGPVPASQLALKRAGLELADIGLFELNEAFAAQSLACLKGLGLLESMDDKVNLNGGAIALGHPLGCSGARISTTLLNLMERRDVQFGLATMCIGLGQGIATVFERL

SEQ ID NO: 101223 - DNA, 1702 bp, Candida tropicalis; identical to SEQ ID NO: 93006
  CDS (266)..(1477): transl_table=12

SEQ ID NO: 101224 - protein, 403 aa, Candida tropicalis; identical to SEQ ID NO: 93007

SEQ ID NO: 101225 - DNA, 1707 bp, Candida tropicalis; identical to SEQ ID NO: 93008
  CDS (272)..(1483): transl_table=12

SEQ ID NO: 101226 - protein, 403 aa, Candida tropicalis; identical to SEQ ID NO: 93009

SEQ ID NO: 101227 - DNA, 1248 bp, Arabidopsis thaliana; identical to SEQ ID NO: 93012
  CDS (1)..(1248)

SEQ ID NO: 101228 - protein, 415 aa, Arabidopsis thaliana; identical to SEQ ID NO: 93013

SEQ ID NO: 101229 - DNA, 1332 bp, Arabidopsis thaliana
  CDS (1)..(1332)
atggaaaaagcaacggagagacaaaggatactgcttcgtcatcttcaaccttcgtcatcttccgacgcctctctctctgcctcagcttgcttgtccaaagacagtgctgcatatcaatatggagatgatgttgtcattgtcgcggcacaaaggactgcactttgcaaggcaaaacgtggcagcttcaaggatacatttccagacgagttgcttgcctctgtattgagagcattgatagagaaaactaatgtaaacccaagtgaagttggtgacattgtagtgggtactgttttgggaccaggatctcagagagccagtgaatgcaggatggctgcgttctatgctggtttccccgaaactgttcccatcagaaccgtgaacagacagtgttcatctgggcttcaggctgttgctgatgttgccgctgccataaaagctggtttttatgacattggtattggagctgggctggagtccatgacaactaatccaaggggatggaaaggatcagtcaacccaaatgtgaagaagtttgaacaagctcacaattgccttcttccaatgggtattacttcagaaaatgtagcacaccggtttaatgtttcaagggaggagcaggatcaagctgctgttgattctcacagaaaggctgcttctgctactgcttccggaaagtttaaggatgagataacccctgtaaaaaccaagattgttgacccaaagacaggtgatgagaaacccataacagtttctgtggatgatgggattcgacctaacacaaccctttccggacttgcaaagctgaagccagtgtttaaggaagacggaaccacaactgctgggaattctagccaattaagtgacggtgctggagctgttctccttatgaggagaaatgtcgcaatgcagaaaggccttcccattcttggtgtattcaggacattttctgcagttggtgtggacccagccatcatgggggttgggccagccgttgccattcctgctgcagtcaaggcagctggtttagaactcaatgacgtcgacttgtttgagattaacgaggcatttgcatctcagtttgtttattgtcggaacaagctcgggctagacgcggaaaagatcaatgtcaatggaggagccatagccattggacatcccttgggcgctacaggagccagatgcgttgcgacgctgctgcatgagatgaaacgacgtggtaaagactgtcgttttggcgtagtgtcaatgtgtataggttcgggaatgggagcagccgctgtgtttgagagaggaggcggtgtggatgagctctgtgatgtccggaaagtctaa

SEQ ID NO: 101230 - protein, 443 aa, Arabidopsis thaliana; identical to SEQ ID NO: 93015

SEQ ID NO: 101231 - DNA, 1389 bp, Arabidopsis thaliana
  CDS (1)..(1389)
atggagaaagcgatcgagagacaacgcgttcttcttgagcatctcagaccttcttcttcttcttcgcacaattacgaggcttctctatctgcttctgcttgcttggctggggacagtgctgcatatcagaggacctctctctatggagatgatgttgtcattgtcgcggcacataggactccactatgcaagtccaaacgtggcaatttcaaggatacatatcccgatgatttgctcgcacctgttttgagggcattgatagagaagacgaatctaaacccaagtgaagtaggtgacattgttgtgggtactgttttggcacctggatctcagagagccagtgaatgcaggatggctgcgttctatgctggtttccctgaaaccgtggctgtcagaactgtgaatagacagtgctcatctgggcttcaggctgttgctgatgtagccgctgccattaaagcgggattttatgacattggtatcggggctggtttggagtccatgactaccaatccaatggcatgggaagggtcagtcaacccagcggtgaagaagtttgcacaagcgcagaattgtcttcttcctatgggtgttacgtcagaaaatgtagcacaacgctttggtgtctcaaggcaggagcaagatcaagctgctgttgactcgcacagaaaggcagctgctgctactgctgctggtaaattcaaggatgagatcattcctgttaagaccaagcttgttgacccgaagactggtgatgagaaacccattacagtttctgttgatgatggtatccgaccaaccacaactcttgcttctcttgggaagctgaagccagtgtttaagaaggatggcaccactactgctggaaattccagccaagtaagtgatggtgcaggagcggttctcctaatgaagagaagtgttgcaatgcaaaaaggacttcccgttcttggtgtattcaggacatttgctgcagttggtgttgaccctgcaatcatgggtatcggtccagcagttgccattcctgctgcagttaaggcggctggtttagaacttgatgacatcgacttgtttgagatcaatgaggcatttgcatctcagtttgtttattgccgtaacaaattgggacttgacccagagaaaatcaatgtcaacggaggtgcaatggccataggccatcctttgggcgctacaggagcgcgttgtgttgctacattgttgcacgagatgaaacgccgtggtaaagactgccgttttggagtagtgtcaatgtgcattgggacggggatgggtgcagcagctgtgtttgagagaggagatggagttgatgagcttcgcaacgcaaggaaagttgaagcgcaaggtcttttgtccaaggacgctcgctag

SEQ ID NO: 101232 - protein, 462 aa, Arabidopsis thaliana; identical to SEQ ID NO: 93017

SEQ ID NO: 101233 - DNA, 1374 bp, Arabidopsis thaliana; identical to SEQ ID NO: 93018
  CDS (1)..(1374)

SEQ ID NO: 101234 - protein, 457 aa, Arabidopsis thaliana; identical to SEQ ID NO: 93019

SEQ ID NO: 101235 - DNA, 1640 bp, Candida tropicalis; identical to SEQ ID NO: 93020
  CDS (166)..(1392): transl_table=12

SEQ ID NO: 101236 - protein, 408 aa, Candida tropicalis; identical to SEQ ID NO: 93021

SEQ ID NO: 101237 - DNA, 1658 bp, Candida tropicalis; identical to SEQ ID NO: 93022
  CDS (166)..(1392): transl_table=12

SEQ ID NO: 101238 - protein, 408 aa, Candida tropicalis; identical to SEQ ID NO: 93023

SEQ ID NO: 101239 - DNA, 1245 bp, Yarrowia lipolytica; identical to SEQ ID NO: 93024
  CDS (1)..(1245)

SEQ ID NO: 101240 - protein, 414 aa, Yarrowia lipolytica; identical to SEQ ID NO: 93025

SEQ ID NO: 101241 - DNA, 1254 bp, Saccharomyces cerevisiae; identical to SEQ ID NO: 93026
  CDS (1)..(1254)

SEQ ID NO: 101242 - protein, 417 aa, Saccharomyces cerevisiae; identical to SEQ ID NO: 93027

SEQ ID NO: 101243 - DNA, 1185 bp, Chromatium vinosum
  CDS (1)..(1185): transl_table=11
atgagcgagaacatcgtcatcgtcgacgccggccgcagtgccatcggaaccttcggcggcagtctgtcgtcactctcggccaccgagatcggcaccgccgtgctcaaggggctgctggcgcgtaccggactcgcgccggaacagatcgacgaggtgattctcggccaggtgctgaccgccggcgtgggccagaaccccgcccgtcagaccacgctgcacgcggggctaccgcattcggtgccggccatgaccatcaacaaggtctgcggcagcggtctgaaggcggtgcatctggcgatgcaggccatcgcctgcggggatgccgacatcgtcatcgccggcggtcaggagagcatgagccagtcctcgcacgtcctgccgcgttcgcgcgacggtcagcgcatgggcgactggtcgatgaaggacaccatgatcgtcgacggcctctgggatgccttcaacaactatcacatgggcaccaccgccgagaacatcgcccagaagtacggctttacgcgcgagcagcaggacgccttcgccgccgcctcgcagcagaagaccgaggccgcgcagaaggctggccgcttccaggacgagatcattccgatcgagattccgcagcgcaagggcgatccgaaggtgtttgatgccgacgagttcccgcgtcacggcaccacggccgagagtctgggcaagctgcgtccggccttctcgaaggacggcagcgtcacggcgggtaacgcctccggcatcaacgacggggcggccatggtcgtggtgatgaaggagtccaaggccaaggaactgggtctgaagccgatggcgcgtctggtggccttcgccagcgccggtgtcgatccggcgatcatggggacgggcccgatcccggcgtcgaccaagtgcctggagaaggccggctggaccccggcggatctggatctgatcgaggccaacgaagccttcgccgcgcaggccatgtcggtcaaccaggacatgggctgggatctgtccaaggtcaacgtcaacggcggcgccatcgccatcggtcatccgatcggcgcctccggtgcgcgcgtgctcgtgaccctgctctatgagatgcagaagcgcgacgccaagaagggtctggcgacgctgtgcatcggcggcggccagggcgtggcgctggcggtcgagcggatgtga

SEQ ID NO: 101244 - protein, 394 aa, Chromatium vinosum
MSENIVIVDAGRSAIGTFGGSLSSLSATEIGTAVLKGLLARTGLAPEQIDEVILGQVLTAGVGQNPARQTTLHAGLPHSVPAMTINKVCGSGLKAVHLAMQAIACGDADIVIAGGQESMSQSSHVLPRSRDGQRMGDWSMKDTMIVDGLWDAFNNYHMGTTAENIAQKYGFTREQQDAFAAASQQKTEAAQKAGRFQDEIIPIEIPQRKGDPKVFDADEFPRHGTTAESLGKLRPAFSKDGSVTAGNASGINDGAAMVVVMKESKAKELGLKPMARLVAFASAGVDPAIMGTGPIPASTKCLEKAGWTPADLDLIEANEAFAAQAMSVNQDMGWDLSKVNVNGGAIAIGHPIGASGARVLVTLLYEMQKRDAKKGLATLCIGGGQGVALAVERM

SEQ ID NO: 101245 - DNA, 1179 bp, Chromobacterium violaceum; identical to SEQ ID NO: 93028
  CDS (1)..(1179): transl_table=11

SEQ ID NO: 101246 - protein, 392 aa, Chromobacterium violaceum; identical to SEQ ID NO: 93029

SEQ ID NO: 101247 - DNA, 1176 bp, Paracoccus denitrificans
  CDS (1)..(1176): transl_table=11
atgaccaaagccgtaatcgtttccgctgcccgcacccccgtcggcagctttctgggatcctttgcgaacctgccggcgcatgagcttggcgccatcgtcctgaaagcggtcgtcgagcgcgccggaatcgatccttccgaagtgtccgaaaccatcctgggccaggtgctgaccgccgcccagggccagaaccccgcccgccaggcgcatatcaaggttggcttaccgcgggaatcggcggcctgggtcatcaaccaggtctgcggctcgggtctgcgtacggtggcgctggcggcgcagcaggttctgctgggcgacgccaggatcgtcgtggccggcggccaggaatccatgtcgctggcaccccatgccgcctatatcgcgccggggcagaagatgggcgacatgaagatgctcgacaccatgatcaaggacgggctctgggacgccttcaacgattaccacatgggcaccacggccgaaaacgtcgccggcaaatgggaaatctcgcgggccgagcaggaccagttcgccgtcgcctcgcagaacaaggccgaggctgcgcagaaggccggcaagttcgccgacgagattgtgcccgtgaccatcaagtcccgaaagggcgagacggtggtcgatgccgatgaatacatccgccacggcgccacgctggaggcaatggagaacgtgcgccccgcctttagcaaggaggggacggtgacggccggcaatgcctcgggcctgaacgacggcgccgccgccgtgctggtcatgaccgaggacgaggccgctcgccgcggcctgacgccgctggcccgcatcgcctcctatgcgaccgccggtgtggacccgcagatcatgggcaccggcccgatccccgccagccgcaaggcgctggaaaaggccggctggtcggtcggcgacctggacctggtcgaggcgaacgaggccttcgctgcccaggccatcgccgtgaaccgcgacatgggctgggatccctcgatcgtgaacgtgaacggcggcgccatcgccatcggccatcccatcggcgcctcgggctgccgcatcctgaacacgctgctgttcgaaatgcagcgccgcgacgcgaaaaagggcctggccacgctgtgcatcggcggcggcatgggcgtcgccctgtgcctcgagcgcccctga

SEQ ID NO: 101248 - protein, 391 aa, Paracoccus denitrificans
MTKAVIVSAARTPVGSFLGSFANLPAHELGAIVLKAVVERAGIDPSEVSETILGQVLTAAQGQNPARQAHIKVGLPRESAAWVINQVCGSGLRTVALAAQQVLLGDARIVVAGGQESMSLAPHAAYIAPGQKMGDMKMLDTMIKDGLWDAFNDYHMGTTAENVAGKWEISRAEQDQFAVASQNKAEAAQKAGKFADEIVPVTIKSRKGETVVDADEYIRHGATLEAMENVRPAFSKEGTVTAGNASGLNDGAAAVLVMTEDEAARRGLTPLARIASYATAGVDPQIMGTGPIPASRKALEKAGWSVGDLDLVEANEAFAAQAIAVNRDMGWDPSIVNVNGGAIAIGHPIGASGCRILNTLLFEMQRRDAKKGLATLCIGGGMGVALCLERP

SEQ ID NO: 101249 - DNA, 1182 bp, Rhizobium meliloti
  CDS (1)..(1182): transl_table=11
atgagcaatccctcgatcgtcatcgccagcgcggctcgcacggccgtcggctccttcaacggcgccttcggcaatactctcgcgcacgaactgggtgcggccgccatcaaggcggtgctggagcgggctggcgtcgaagcgggcgaggtggacgaggtgatcctcggtcaggtgctgccggcgggcgaggggcagaatcctgcgcggcaagcggcgatgaaggccggtctcccgcaggaaaagaccgcctggggcatgaaccagctttgcggctcgggcctgcgcgccgtagcgctcggcatgcagcagatcgcaaccggcgatgcgaaggtcatcgttgccggcggcatggagtcgatgtcgatggcgccgcattgcgcgcacctgcgcggcggcgtgaagatgggcgactacaagatgatcgacacgatgatcaaggacggcctgacggatgccttctacggctaccacatgggcatcaccgccgagaacgttgcgcggaaatggcagctgacgcgcgaggaacaggacgaattcgcgcttgcctcccagaacaaggcggaagcggcccagaaggccggccgtttcgccgacgagatcgtgcctttcgtcgtgaagacgcgcaagggcgacgtaaacgtggatcaggacgagtacatccgccacggtgccacgctggattcgatcgcaaagctccgcccggccttcgacaaggaaggtactgtgaccgcgggcaacgcttcgggtctcaacgacggtgccgccgcggcgctcttgatgaccgaggccgaggcggcccggcgcggcatccagccgcttgcccgcatcgtctcctgggccacggcaggcgtcgacccgcagatcatgggcaccggccccatccccgcatcgcgcaaggccctcgaaaaggccggctggtcggtcgccgatatcgagctcgtggaggcgaacgaggctttcgcggctcaggcctgcgccgtcaacaaggacctcggctgggatccttcgatcgtcaacgtcaatggcggagcgatcgccatcggccatccgatcggtgcctccggtgcccgcgtgctgaacacgcttcttttcgaaatgaagcggcgcggcgtctccaaggggcttgccaccctgtgcatcggcggcggcatgggcgtcgccatgtgcgtggaacgcctgtaa

SEQ ID NO: 101250 - protein, 393 aa, Rhizobium meliloti
MSNPSIVIASAARTAVGSFNGAFGNTLAHELGAAAIKAVLERAGVEAGEVDEVILGQVLPAGEGQNPARQAAMKAGLPQEKTAWGMNQLCGSGLRAVALGMQQIATGDAKVIVAGGMESMSMAPHCAHLRGGVKMGDYKMIDTMIKDGLTDAFYGYHMGITAENVARKWQLTREEQDEFALASQNKAEAAQKAGRFADEIVPFVVKTRKGDVNVDQDEYIRHGATLDSIAKLRPAFDKEGTVTAGNASGLNDGAAAALLMTEAEAARRGIQPLARIVSWATAGVDPQIMGTGPIPASRKALEKAGWSVADIELVEANEAFAAQACAVNKDLGWDPSIVNVNGGAIAIGHPIGASGARVLNTLLFEMKRRGVSKGLATLCIGGGMGVAMCVERL

SEQ ID NO: 101251 - DNA, 2001 bp, Saccharomyces bayanus; identical to SEQ ID NO: 93030
  CDS (475)..(1671)

SEQ ID NO: 101252 - protein, 398 aa, Saccharomyces bayanus; identical to SEQ ID NO: 93031

SEQ ID NO: 101253 - DNA, 1185 bp, Thiocystis violacea
  CDS (1)..(1185): transl_table=11
atgagcgacactatcgttatcgtcgatgcgggtcggaccgcgatcggaaccttcggcggcgcactctcggccctccaggcgaccgatatcggcacgaccgtgctcaaggccctgatcgagcggaccggaatcgcccccgagcaggtcagcgaagttattctggggcaggtgctgaccgcgggctgcggtcagaatccggcgcgtcagaccaccttgatggcggggctgccgcacacggtcccggcgatgaccatcaacaaggtctgcggcagtgggctcaaggcggtccatctggccatgcaggcggttgcctgtggcgatgcggagatcgtgatcgccggtggtcaagagagcatgagtcagtcgtcgcacgtcctgccgcgctcgcgcgaggggcagcgcatgggcgactggccgatgaaggacaccatgatcgtcgacggcctctgggatgccttcaatcagtgccacatgggtgtcacggcggagaacatcgcgaagaagtacgccttcacccgcgaggcgcaggatgcgttcgccgcggcgtcccagcagaaggcggaggccgccatccaatccggacgctttgccgacgagatcatcccggtgagcatcccgcagcgcaagggcgatcccctggtgttcgacaccgacgagtttccgcgtccgggcaccacggccgaaacgctcggcaggctgcgccccgccttcgacaagcaaggcactgtgaccgccggcaacgcctccgggatcaacgacggcgcggccatggtcgtggtgatgaaggaatccaaggccaaggaactgggtttgacgcccatggcgcgcctggtcgcgttctcgagcgcgggcgtggatccggccatcatgggcaccggacctatcccggcttcgaccgattgtctgaagaaggccggctgggccccggctgatctggaccttgtcgaggccaatgaggcctttgccgctcaggcgatgtccgtcaatcaggagatgggctgggatctcagcaaggtaaacgtcaatggcggagctatcgccatcggccacccgatcggtgcctctggtgcgcgtgtgctggtcaccctcctctatgagatgcagaagcgcgatgcgaagaagggtctcgcaaccctctgcatcggcggcggccagggcgtggcgttggcggtcgagcgtctctga

SEQ ID NO: 101254 - protein, 394 aa, Thiocystis violacea
MSDTIVIVDAGRTAIGTFGGALSALQATDIGTTVLKALIERTGIAPEQVSEVILGQVLTAGCGQNPARQTTLMAGLPHTVPAMTINKVCGSGLKAVHLAMQAVACGDAEIVIAGGQESMSQSSHVLPRSREGQRMGDWPMKDTMIVDGLWDAFNQCHMGVTAENIAKKYAFTREAQDAFAAASQQKAEAAIQSGRFADEIIPVSIPQRKGDPLVFDTDEFPRPGTTAETLGRLRPAFDKQGTVTAGNASGINDGAAMVVVMKESKAKELGLTPMARLVAFSSAGVDPAIMGTGPIPASTDCLKKAGWAPADLDLVEANEAFAAQAMSVNQEMGWDLSKVNVNGGAIAIGHPIGASGARVLVTLLYEMQKRDAKKGLATLCIGGGQGVALAVERL

SEQ ID NO: 101255 - DNA, 1194 bp, Yarrowia lipolytica; identical to SEQ ID NO: 93032
  CDS (1)..(1194)

SEQ ID NO: 101256 - protein, 397 aa, Yarrowia lipolytica; identical to SEQ ID NO: 93033

SEQ ID NO: 101257 - DNA, 1197 bp, Saccharomyces cerevisiae; identical to SEQ ID NO: 92668
  CDS (1)..(1197)

SEQ ID NO: 101258 - protein, 398 aa, Saccharomyces cerevisiae; identical to SEQ ID NO: 92669

SEQ ID NO: 101259 - DNA, 1937 bp, Clostridium acetobutylicum
  CDS (493)..(1671): transl_table=11
agacgaagcctataaaataatgaaagatgaagaagaatatgaaaaaatgagtaaggcaataaatccatatggtgatggaaaggcttcagatagaatagttgatgctatattgtatcattttggagtattaaaggatagaccagatgaattttcacctaaaaagtaatacatgagcattctaaaagaatttagaatgaagtttcttatgcacaagtattttttattacattaatatagttaaaatataaacttatgtatttatgctaaaacatgattttaagggggttagcatatgcataagtttaatttttttgttaaaaaatattaaactttgtgttttttttaacaaaatatattgataaaaataataatagtgggtataattaagttgttagagaaaacgtataaattagggataaactatggaacttatgaaatagattgaaatggtttatctgttaccccgtatcaaaatttaggaggttagttagaatgaaagaagttgtaatagctagtgcagtaagaacagcgattggatcttatggaaagtctcttaaggatgtaccagcagtagatttaggagctacagctataaaggaagcagttaaaaaagcaggaataaaaccagaggatgttaatgaagtcattttaggaaatgttcttcaagcaggtttaggacagaatccagcaagacaggcatcttttaaagcaggattaccagttgaaattccagctatgactattaataaggtttgtggttcaggacttagaacagttagcttagcagcacaaattataaaagcaggagatgctgacgtaataatagcaggtggtatggaaaatatgtctagagctccttacttagcgaataacgctagatggggatatagaatgggaaacgctaaatttgttgatgaaatgatcactgacggattgtgggatgcatttaatgattaccacatgggaataacagcagaaaacatagctgagagatggaacatttcaagagaagaacaagatgagtttgctcttgcatcacaaaaaaaagctgaagaagctataaaatcaggtcaatttaaagatgaaatagttcctgtagtaattaaaggcagaaagggagaaactgtagttgatacagatgagcaccctagatttggatcaactatagaaggacttgcaaaattaaaacctgccttcaaaaaagatggaacagttacagctggtaatgcatcaggattaaatgactgtgcagcagtacttgtaatcatgagtgcagaaaaagctaaagagcttggagtaaaaccacttgctaagatagtttcttatggttcagcaggagttgacccagcaataatgggatatggacctttctatgcaacaaaagcagctattgaaaaagcaggttggacagttgatgaattagatttaatagaatcaaatgaagcttttgcagctcaaagtttagcagtagcaaaagatttaaaatttgatatgaataaagtaaatgtaaatggaggagctattgcccttggtcatccaattggagcatcaggtgcaagaatactcgttactcttgtacacgcaatgcaaaaaagagatgcaaaaaaaggcttagcaactttatgtataggtggcggacaaggaacagcaatattgctagaaaagtgctagaaagtattgttaaaaataactctgtagaattataaattagttctacagagttattttttaaaaaaattctaaacttatgtataaaaaatacgataagaatgtagaattaaaactaaagacagttcaatttcttttagaataatttagttagtgtggtaaaaaaatgtcataatgatatttatgttgaaatttgtataaaattcagaaaatgaatatattttatcaattttcagtcatttgaaagattatgaggctaatgcagtact

SEQ ID NO: 101260 - protein, 392 aa, Clostridium acetobutylicum
MKEVVIASAVRTAIGSYGKSLKDVPAVDLGATAIKEAVKKAGIKPEDVNEVILGNVLQAGLGQNPARQASFKAGLPVEIPAMTINKVCGSGLRTVSLAAQIIKAGDADVIIAGGMENMSRAPYLANNARWGYRMGNAKFVDEMITDGLWDAFNDYHMGITAENIAERWNISREEQDEFALASQKKAEEAIKSGQFKDEIVPVVIKGRKGETVVDTDEHPRFGSTIEGLAKLKPAFKKDGTVTAGNASGLNDCAAVLVIMSAEKAKELGVKPLAKIVSYGSAGVDPAIMGYGPFYATKAAIEKAGWTVDELDLIESNEAFAAQSLAVAKDLKFDMNKVNVNGGAIALGHPIGASGARILVTLVHAMQKRDAKKGLATLCIGGGQGTAILLEKC

SEQ ID NO: 101261 - DNA, 1176 bp, Clostridium difficile
  CDS (1)..(1176): transl_table=11
atgagagaagtagtaattgccagtgcagctagaacagcagtaggaagttttggaggagcatttaaatcagtttcagcggtagagttaggggtaacagcagctaaagaagctataaaaagagctaacataactccagatatgatagatgaatctcttttagggggagtacttacagcaggtcttggacaaaatatagcaagacaaatagcattaggagcaggaataccagtagaaaaaccagctatgactataaatatagtttgtggttctggattaagatctgtttcaatggcatctcaacttatagcattaggtgatgctgatataatgttagttggtggagctgaaaacatgagtatgtctccttatttagtaccaagtgcgagatatggtgcaagaatgggtgatgctgcttttgttgattcaatgataaaagatggattatcagacatatttaataactatcacatgggtattactgctgaaaacatagcagagcaatggaatataactagagaagaacaagatgaattagctcttgcaagtcaaaataaagctgaaaaagctcaagctgaaggaaaatttgatgaagaaatagttcctgttgttataaaaggaagaaaaggtgacactgtagtagataaagatgaatatattaagcctggcactacaatggagaaacttgctaagttaagacctgcatttaaaaaagatggaacagttactgctggtaatgcatcaggaataaatgatggtgctgctatgctagtagtaatggctaaagaaaaagctgaagaactaggaatagagcctcttgcaactatagtttcttatggaacagctggtgttgaccctaaaataatgggatatggaccagttccagcaactaaaaaagctttagaagctgctaatatgactattgaagatatagatttagttgaagctaatgaggcatttgctgcccaatctgtagctgtaataagagacttaaatatagatatgaataaagttaatgttaatggtggagcaatagctataggacatccaataggatgctcaggagcaagaatacttactacacttttatatgaaatgaagagaagagatgctaaaactggtcttgctacactttgtataggtggtggaatgggaactactttaatagttaagagatag

SEQ ID NO: 101262 - protein, 391 aa, Clostridium difficile
MREVVIASAARTAVGSFGGAFKSVSAVELGVTAAKEAIKRANITPDMIDESLLGGVLTAGLGQNIARQIALGAGIPVEKPAMTINIVCGSGLRSVSMASQLIALGDADIMLVGGAENMSMSPYLVPSARYGARMGDAAFVDSMIKDGLSDIFNNYHMGITAENIAEQWNITREEQDELALASQNKAEKAQAEGKFDEEIVPVVIKGRKGDTVVDKDEYIKPGTTMEKLAKLRPAFKKDGTVTAGNASGINDGAAMLVVMAKEKAEELGIEPLATIVSYGTAGVDPKIMGYGPVPATKKALEAANMTIEDIDLVEANEAFAAQSVAVIRDLNIDMNKVNVNGGAIAIGHPIGCSGARILTTLLYEMKRRDAKTGLATLCIGGGMGTTLIVKR

SEQ ID NO: 101263 - DNA, 1182 bp, Staphylococcus aureus; identical to SEQ ID NO: 93034
  CDS (1)..(1182): transl_table=11

SEQ ID NO: 101264 - protein, 393 aa, Staphylococcus aureus; identical to SEQ ID NO: 93035

SEQ ID NO: 101265 - DNA, 1182 bp, Staphylococcus aureus
  CDS (1)..(1182): transl_table=11
atgacgagagtcgtattagcagcagcatacaggacacctattggcgtttttggaggtgcgtttaaagacgtgccagcctatgatttaggtgcgactttaatagaacatattattaaagagacgggtttgaatccaagtgagattaatgaagtcatcatcggtaacgtactacaagcaggacaaggacaaaatccagcacgaattgctgctatgaaaggtggcttgccagaaacagtacctgcatttacagtgaataaagtatgtggttctgggttaaagtcgattcaattagcatatcaatctattgtgactggtgaaaatgacatcgtgctagctggcggtatggagaatatgtctcaatcaccaatgcttgtcaacaacagtcgctttggttttaaaatgggacatcaatcaatggttgatagcatggtatatgatggtttaacagatgtatttaatcaatatcatatgggtattactgctgaaaatttagtagagcaatatggtatttcaagagaagaacaagatacatttgctgtaaactcacaacaaaaagcagtacgtgcacagcaaaatggtgaatttgatagtgaaatagttccagtatcgattcctcaacgtaaaggtgaaccaatcgttgtcactaaggatgaaggtgtacgtgaaaatgtatcagttgaaaaattaagtcgcttaagaccagctttcaaaaaagacggtacagttacagcaggtaatgcatcaggaatcaatgatggtgctgcgatgatgttagtcatgtcagaagacaaagctaaagaattaaatatcgaaccattggcagtgcttgatggctttggaagtcatggtgtagatcctgctattatgggtattgccccagttgacgctgttgaaaaggctttgaaacgtagtaaaaaagaattaagtgatattgatgtatttgaattaaatgaagcatttgcagcacaatcattagctgttgatcgtgaattaaaattacctcctgaaaaggtgaatgttaaaggtggcgctattgcattaggacatcctattggtgcatctggtgctagagttttagtgacattattgcatcaactgaatgatgaagttgaaactggtttaacatcattgtgtattggtggcggtcaagctatcgctgcagttgtatcaaagtataaataa

SEQ ID NO: 101266 - protein, 393 aa, Staphylococcus aureus
MTRVVLAAAYRTPIGVFGGAFKDVPAYDLGATLIEHIIKETGLNPSEINEVIIGNVLQAGQGQNPARIAAMKGGLPETVPAFTVNKVCGSGLKSIQLAYQSIVTGENDIVLAGGMENMSQSPMLVNNSRFGFKMGHQSMVDSMVYDGLTDVFNQYHMGITAENLVEQYGISREEQDTFAVNSQQKAVRAQQNGEFDSEIVPVSIPQRKGEPIVVTKDEGVRENVSVEKLSRLRPAFKKDGTVTAGNASGINDGAAMMLVMSEDKAKELNIEPLAVLDGFGSHGVDPAIMGIAPVDAVEKALKRSKKELSDIDVFELNEAFAAQSLAVDRELKLPPEKVNVKGGAIALGHPIGASGARVLVTLLHQLNDEVETGLTSLCIGGGQAIAAVVSKYK

SEQ ID NO: 101267 - DNA, 1182 bp, Staphylococcus aureus
  CDS (1)..(1182): transl_table=11
atgacgagagtcgtattagcagcagcatacaggacacctattggcgtttttggaggtgcgtttaaagacgtgccagcctatgatttaggtgcgactttaatagaacatattattaaagagacgggtttgaatccaagtgagattgatgaagttatcatcggtaacgtactacaagcaggacaaggacaaaatccagcacgaattgctgctatgaaaggtggcttgccagaaacagtacctgcatttacagtgaataaagtatgtggttctgggttaaagtcgattcaattagcatatcaatctattgtgactggtgaaaatgacatcgtgctagctggcggtatggagaatatgtctcagtcaccaatgcttgtcaacaacagtcgcttcggttttaaaatgggacatcaatcaatggttgatagcatggtatatgatggtttaacagatgtatttaatcaatatcatatgggtattactgctgaaaatttagtggagcaatatggtatttcaagagaagaacaagatacatttgctgtaaactcacaacaaaaagcagtacgtgcacagcaaaatggtgaatttgatagtgaaatagttccagtatcgattcctcaacgtaaaggtgaaccaatcttagtcactaaggatgaaggtgtacgtgaaaatgtatcagtcgaaaaattaagtcgcttaagaccagctttcaaaaaagacgggacagttacagcaggtaatgcatcaggaatcaatgatggtgctgcgatgatgttagtcatgtcagaagacaaagctaaagaattaaatatcgaaccattggcagtgcttgatggctttggaagtcatggtgtagatccttctattatgggtattgcaccagttggcgctgtagaaaaggctttgaaacgtagtaaaaaagaattaagcgatattgatgtatttgaattaaatgaagcatttgcagcacaatcattagctgttgatcgtgaattaaaattacctcctgaaaaggtgaatgttaaaggtggcgctattgcattaggacaccctattggtgcatctggtgctagagttttagtgacattattgcatcaactgaatgatgaagttgaaactggtttaacatcattgtgtattggtggcggtcaagctatcgctgcagttgtatcaaagtataaataa

SEQ ID NO: 101268 - protein, 393 aa, Staphylococcus aureus
MTRVVLAAAYRTPIGVFGGAFKDVPAYDLGATLIEHIIKETGLNPSEIDEVIIGNVLQAGQGQNPARIAAMKGGLPETVPAFTVNKVCGSGLKSIQLAYQSIVTGENDIVLAGGMENMSQSPMLVNNSRFGFKMGHQSMVDSMVYDGLTDVFNQYHMGITAENLVEQYGISREEQDTFAVNSQQKAVRAQQNGEFDSEIVPVSIPQRKGEPILVTKDEGVRENVSVEKLSRLRPAFKKDGTVTAGNASGINDGAAMMLVMSEDKAKELNIEPLAVLDGFGSHGVDPSIMGIAPVGAVEKALKRSKKELSDIDVFELNEAFAAQSLAVDRELKLPPEKVNVKGGAIALGHPIGASGARVLVTLLHQLNDEVETGLTSLCIGGGQAIAAVVSKYK

SEQ ID NO: 101269 - DNA, 1185 bp, Staphylococcus epidermidis
  CDS (1)..(1185): transl_table=11
atgtcacgcatagtattagctgaagcatatcgaacacctataggcgtgtttggtggtgtatttaaggatatacctgcctatgaactaggtgcaacagttattcgtcaaattttagaacatagtcaaatagatcctaatgaaatcaatgaagttattctaggaaacgtattacaggcaggtcaaggacaaaatcctgctcgtattgctgcgattcatggtggtgtgccagaagcggtaccttcttttactgtaaataaagtttgcggttctggattaaaagcgattcaacttgcctatcaatctattgtagcgggagataatgagattgttatcgctggaggcatggaaagtatgtctcaatctccaatgcttcttaaaaatagtcgtttcggttttaaaatgggaaatcaaactttagaagatagtatgatagctgatggtttaactgataagtttaatgattaccatatgggtatcacagccgaaaatctagttgaacagtatcagattagtcgtaaagaacaagatcaatttgcattcgattctcaacaaaaagcatcacgtgcacaacaagctggtgtatttgatgctgaaattgtacctgtagaggtaccacaacgtaaaggcgaccccctaattatttctcaagatgaaggcattagacctcaaacgacaattgataagttagcacaactccgtccagcatttaaaaaagatggatcagtaactgctggtaatgcatccggtatcaatgacggtgctgctgctatgctcgttatgacggaggacaaagcgaaagcattgggcttacaacctatagctgtattagatagttttggtgcgagtggtgtggcgccttcaattatgggtattggtccagttgaagcgatacataaagctttaaaacgttctaataaagtgataaatgatgttgatatttttgaattaaacgaagcttttgcagcgcaatcaattgctgtaaaccgtgagttgcaattaccgcaagataaagtcaatgttaatggtggtgcgattgcactaggacatccgataggggcttcgggtgcgcgtactttagtttcattattacatcaattaagtgatgctaagccaacaggtgtggcatctttatgtatcggtggcggtcaaggtatcgctacggttgtatctaaatatgaagtttaa

SEQ ID NO: 101270 - protein, 394 aa, Staphylococcus epidermidis
MSRIVLAEAYRTPIGVFGGVFKDIPAYELGATVIRQILEHSQIDPNEINEVILGNVLQAGQGQNPARIAAIHGGVPEAVPSFTVNKVCGSGLKAIQLAYQSIVAGDNEIVIAGGMESMSQSPMLLKNSRFGFKMGNQTLEDSMIADGLTDKFNDYHMGITAENLVEQYQISRKEQDQFAFDSQQKASRAQQAGVFDAEIVPVEVPQRKGDPLIISQDEGIRPQTTIDKLAQLRPAFKKDGSVTAGNASGINDGAAAMLVMTEDKAKALGLQPIAVLDSFGASGVAPSIMGIGPVEAIHKALKRSNKVINDVDIFELNEAFAAQSIAVNRELQLPQDKVNVNGGAIALGHPIGASGARTLVSLLHQLSDAKPTGVASLCIGGGQGIATVVSKYEV

SEQ ID NO: 101271 - DNA, 1224 bp, Oryza sativa; identical to SEQ ID NO: 93036
  CDS (1)..(1224)

SEQ ID NO: 101272 - protein, 407 aa, Oryza sativa; identical to SEQ ID NO: 93037

SEQ ID NO: 101273 - DNA, 1371 bp, Brassica napus; identical to SEQ ID NO: 93040
  CDS (1)..(1371)

SEQ ID NO: 101274 - protein, 456 aa, Brassica napus; identical to SEQ ID NO: 93041

SEQ ID NO: 101275 - DNA, 1248 bp, Brassica napus; identical to SEQ ID NO: 93042
  CDS (1)..(1248)

SEQ ID NO: 101276 - protein, 415 aa, Brassica napus; identical to SEQ ID NO: 93043

SEQ ID NO: 101277 - DNA, 1215 bp, Brassica napus; identical to SEQ ID NO: 93044
  CDS (1)..(1215)

SEQ ID NO: 101278 - protein, 404 aa, Brassica napus; identical to SEQ ID NO: 93045

SEQ ID NO: 101279 - DNA, 1206 bp, Triticum aestivum; identical to SEQ ID NO: 93046
  CDS (1)..(1206)

SEQ ID NO: 101280 - protein, 401 aa, Triticum aestivum; identical to SEQ ID NO: 93047

SEQ ID NO: 101281 - DNA, 1206 bp, Zea mays; identical to SEQ ID NO: 93048
  CDS (1)..(1206)

SEQ ID NO: 101282 - protein, 401 aa, Zea mays; identical to SEQ ID NO: 93049

SEQ ID NO: 101283 - DNA, 1212 bp, Brassica napus; identical to SEQ ID NO: 93050
  CDS (1)..(1212)

SEQ ID NO: 101284 - protein, 403 aa, Brassica napus; identical to SEQ ID NO: 93051

SEQ ID NO: 101285 - DNA, 1212 bp, Brassica napus; identical to SEQ ID NO: 93052
  CDS (1)..(1212)

SEQ ID NO: 101286 - protein, 403 aa, Brassica napus; identical to SEQ ID NO: 93053

SEQ ID NO: 101287 - DNA, 1389 bp, Brassica napus; identical to SEQ ID NO: 93054
  CDS (1)..(1389)

SEQ ID NO: 101288 - protein, 462 aa, Brassica napus; identical to SEQ ID NO: 93055

SEQ ID NO: 101289 - DNA, 1266 bp, Brassica napus; identical to SEQ ID NO: 93056
  CDS (1)..(1266)

SEQ ID NO: 101290 - protein, 421 aa, Brassica napus; identical to SEQ ID NO: 93057

SEQ ID NO: 101291 - DNA, 1212 bp, Brassica napus; identical to SEQ ID NO: 93058
  CDS (1)..(1212)

SEQ ID NO: 101292 - protein, 403 aa, Brassica napus; identical to SEQ ID NO: 93059

SEQ ID NO: 101293 - DNA, 1215 bp, Brassica napus; identical to SEQ ID NO: 93060
  CDS (1)..(1215)

SEQ ID NO: 101294 - protein, 404 aa, Brassica napus; identical to SEQ ID NO: 93061

SEQ ID NO: 101295 - DNA, 1230 bp, Glycine max; identical to SEQ ID NO: 93062
  CDS (1)..(1230)

SEQ ID NO: 101296 - protein, 409 aa, Glycine max; identical to SEQ ID NO: 93063

SEQ ID NO: 101297 - DNA, 1338 bp, Glycine max; identical to SEQ ID NO: 93064
  CDS (1)..(1338)

SEQ ID NO: 101298 - protein, 445 aa, Glycine max; identical to SEQ ID NO: 93065

SEQ ID NO: 101299 - DNA, 1338 bp, Glycine max; identical to SEQ ID NO: 93066
  CDS (1)..(1338)

SEQ ID NO: 101300 - protein, 445 aa, Glycine max; identical to SEQ ID NO: 93067

SEQ ID NO: 101301 - DNA, 1224 bp, Glycine max
  CDS (1)..(1224)
atggctccagtagcagcagcatcttcagattcaatcaagccaagagatgtttgcatcgttggtgttgcacgtacaccaatgggtggatttcttggtactctgtcatctctatctgccaccaagctaggctctatagctattgaagctgctcttaaaagggccaatgttgatccatcccttgtggaagaagtattttttgggaatgttcttagtgctaatttggggcaagctcctgcaagacaagctgctcttggagcaggaatatccaattcagttatctgcactaccgttaacaaagtttgtgcatcaggaatgaaagctgcaatgcttgctgcacagagtattcaattaggcacaaatgatgttgttgtggctggtggtatggaaagcatgtctaatgtacccaagtacctggctgaagcaaggaaaggatcacgccttggacatgattcacttgttgatgggatgttgaaagatggtttgtgggatgtctataaggatgttggcatgggagtgtgtgctgagctatgtgcagataaccatgcattaacaagagacgaccaggataactatgcaattcagagttttgaacgtggaattgctgcccaagaaagtggtgccttttcatgggaaattgctccagttgaagtctctggtggaagaggaagaccatcaacagttgttgataaggatgaaggcctaggaaagtttgatgctgccaagttacgcaaacttcggccaagtttcaaggagactggaggttctgttacagctggcaatgcttccagcataagtgatggtgctgctgcactagttttggtgagtggagagaaggcactgaagcttgggcttcaagttattgcaaaaatcactggatatgctgatgctgctcaggaaccagagttatttacaacggctccatcccttgccattcccaaagctattgccaaggcggggttggagacttcacaaattgatttttatgaaattaatgaagcctttgcggttgtggctctcgcaaatcagaaacttcttggacttaactcggaaaaagtaaacgtacatggtggagctgttgcactgggtcatcctcttggttgcagtggtgctcgcattctggtgacacttttgggggtactgaagcagaagaatgggaagtacggagttggtggcatttgcaatggaggaggtggtgcatctgcccttgttgttgagcttcagtaa

SEQ ID NO: 101302 - protein, 407 aa, Glycine max; identical to SEQ ID NO: 92671

SEQ ID NO: 101303 - DNA, 1338 bp, Glycine max; identical to SEQ ID NO: 93068
  CDS (1)..(1338)

SEQ ID NO: 101304 - protein, 445 aa, Glycine max; identical to SEQ ID NO: 93069

SEQ ID NO: 101305 - DNA, 1392 bp, Glycine max; identical to SEQ ID NO: 93070
  CDS (1)..(1392)

SEQ ID NO: 101306 - protein, 463 aa, Glycine max; identical to SEQ ID NO: 93071

SEQ ID NO: 101307 - DNA, 1386 bp, Zea mays; identical to SEQ ID NO: 93072
  CDS (1)..(1386)

SEQ ID NO: 101308 - protein, 461 aa, Zea mays; identical to SEQ ID NO: 93073

SEQ ID NO: 101309 - DNA, 1206 bp, Zea mays; identical to SEQ ID NO: 93074
  CDS (1)..(1206)

SEQ ID NO: 101310 - protein, 401 aa, Zea mays; identical to SEQ ID NO: 93075

SEQ ID NO: 101311 - DNA, 1266 bp, Zea mays; identical to SEQ ID NO: 93076
  CDS (1)..(1266)

SEQ ID NO: 101312 - protein, 421 aa, Zea mays; identical to SEQ ID NO: 93077

SEQ ID NO: 101313 - DNA, 1206 bp, Zea mays
  CDS (1)..(1206)
atggcttccgacggcatcggccccagagatgtatgtgttgttggggttgcacgcaccccaatgggcggtttccttggtgccttgtctcccttgcctgctacgaaacttggctctatagtaattcaagctgctctggaaagagcaaacgtggatccagccctcgtgcaggaggtctactttggaaacgtcttgagtgctaatttggggcaagctcctgcaaggcaagctgctctgggtgccgggataccaaactctgttgtttgcaccactgttaacaaagtctgtgcatctggcatgaaagctactatgtttgcagcacagtcaattcaattgggtatcaatgatattgttgtggctggtggcatggaaagcatgtccaatgccccaaagtacattgctgaagctaggaaggggtctcgttttggtcatgacacacttgttgatgccatgcttaaggatgggctttgggatgtatacaatgattgtgccatgggaatgtgtgccgagctttgtgctgacaaccatgccctcacaagagaagaccaggatgcatttgctatccaaagcaacgagcgtggaattgctgctcgtgacagtggtgcttttgcatgggagattattccggttcaagttcctgttggtagaggaaaacccccaacattaattgagagagatgaaagcctggataagtttgacccagtaaaactaaagaaacttcgcccaagtttcaaggagaatggtggtacagttacagctggaaatgcttctagtataagtgatggagctgctgcattagttttagtgagtgggcagaaggctcaagagcttggccttcaagtccttgcaaggatcaaaggttatgctgatgcagctcaagctccggagctttttacaaccactccagcacttgcaataccaaaggctatcgcaaatgctggattagagtcatcccgtgttgatttctatgagattaatgaagccttttcggctgttgcgcttgcaaatcaaaaacttcttggaattccttcagaaaagattaatgttcatggaggagctgtatccttaggacatcctctcgggtgcagtggtgctcgcattttggttacccttattggtgttctcagggcgaagagtggcaagatcggagttgctggtgtctgcaacggtggaggcggagcatcagctcttgttctggagctcgcataa

SEQ ID NO: 101314 - protein, 401 aa, Zea mays; identical to SEQ ID NO: 92673

SEQ ID NO: 101315 - DNA, 1386 bp, Zea mays; identical to SEQ ID NO: 93078
  CDS (1)..(1386)

SEQ ID NO: 101316 - protein, 461 aa, Zea mays; identical to SEQ ID NO: 93079

SEQ ID NO: 101317 - DNA, 1386 bp, Zea mays; identical to SEQ ID NO: 93080
  CDS (1)..(1386)

SEQ ID NO: 101318 - protein, 461 aa, Zea mays; identical to SEQ ID NO: 93081

SEQ ID NO: 101319 - DNA, 1386 bp, Zea mays; identical to SEQ ID NO: 93082
  CDS (1)..(1386)

SEQ ID NO: 101320 - protein, 461 aa, Zea mays; identical to SEQ ID NO: 93083

SEQ ID NO: 101321 - DNA, 24 bp, Artificial sequence
  primer
atggaacaggttgtcattgtcgat

SEQ ID NO: 101322 - DNA, 22 bp, Artificial sequence
  primer
ttaaacccgctcaaacaccgtc

SEQ ID NO: 101323 - protein, 528 aa, Artificial sequence
  consensus sequence
  Variant (3)..(7): Xaa in position 3 to 7 is any amino acid
  Variant (8)..(14): Xaa in position 8 to 14 is any or no amino acid
  Variant (16)..(23): Xaa in position 16 to 23 is any amino acid
  Variant (24)..(24): Xaa in position 24 is any or no amino acid
  Variant (26)..(47): Xaa in position 26 to 47 is any amino acid
  Variant (48)..(84): Xaa in position 48 to 84 is any or no amino acid
  Variant (86)..(96): Xaa in position 86 to 96 is any amino acid
  Variant (97)..(99): Xaa in position 97 to 99 is any or no amino acid
  Variant (101)..(105): Xaa in position 101 to 105 is any amino acid
  Variant (108)..(108): Xaa in position 108 is any amino acid
  Variant (109)..(109): Xaa in position 109 is any or no amino acid
  Variant (111)..(118): Xaa in position 111 to 118 is any amino acid
  Variant (120)..(121): Xaa in position 120 to 121 is any amino acid
  Variant (123)..(123): Xaa in position 123 is any amino acid
  Variant (125)..(135): Xaa in position 125 to 135 is any amino acid
  Variant (137)..(138): Xaa in position 137 to 138 is any amino acid
  Variant (140)..(147): Xaa in position 140 to 147 is any amino acid
  Variant (149)..(149): Xaa in position 149 is any amino acid
  Variant (151)..(151): Xaa in position 151 is any amino acid
  Variant (153)..(161): Xaa in position 153 to 161 is any amino acid
  Variant (162)..(209): Xaa in position 162 to 209 is any or no amino acid
  Variant (212)..(214): Xaa in position 212 to 214 is any amino acid
  Variant (215)..(218): Xaa in position 215 to 218 is any or no amino acid
  Variant (220)..(221): Xaa in position 220 to 221 is any amino acid
  Variant (223)..(228): Xaa in position 223 to 228 is any amino acid
  Variant (229)..(232): Xaa in position 229 to 232 is any or no amino acid
  Variant (234)..(235): Xaa in position 234 to 235 is any amino acid
  Variant (238)..(239): Xaa in position 238 to 239 is any amino acid
  Variant (241)..(242): Xaa in position 241 to 242 is any amino acid
  Variant (244)..(246): Xaa in position 244 to 246 is any amino acid
  Variant (248)..(249): Xaa in position 248 to 249 is any amino acid
  Variant (251)..(253): Xaa in position 251 to 253 is any amino acid
  Variant (255)..(255): Xaa in position 255 is any amino acid
  Variant (257)..(257): Xaa in position 257 is any amino acid
  Variant (258)..(268): Xaa in position 258 to 268 is any or no amino acid
  Variant (271)..(271): Xaa in position 271 is any amino acid
  Variant (273)..(278): Xaa in position 273 to 278 is any amino acid
  Variant (279)..(304): Xaa in position 279 to 304 is any or no amino acid
  Variant (306)..(315): Xaa in position 306 to 315 is any amino acid
  Variant (316)..(317): Xaa in position 316 to 317 is any or no amino acid
  Variant (319)..(320): Xaa in position 319 to 320 is any amino acid
  Variant (322)..(323): Xaa in position 322 to 323 is any amino acid
  Variant (324)..(324): Xaa in position 324 is any or no amino acid
  Variant (326)..(326): Xaa in position 326 is any amino acid
  Variant (327)..(350): Xaa in position 327 to 350 is any or no amino acid
  Variant (352)..(353): Xaa in position 352 to 353 is any amino acid
  Variant (357)..(357): Xaa in position 357 is any amino acid
  Variant (359)..(359): Xaa in position 359 is any amino acid
  Variant (361)..(363): Xaa in position 361 to 363 is any amino acid
  Variant (367)..(367): Xaa in position 367 is any amino acid
  Variant (369)..(380): Xaa in position 369 to 380 is any amino acid
  Variant (382)..(397): Xaa in position 382 to 397 is any amino acid
  Variant (398)..(399): Xaa in position 398 to 399 is any or no amino acid
  Variant (401)..(405): Xaa in position 401 to 405 is any amino acid
  Variant (406)..(407): Xaa in position 406 to 407 is any or no amino acid
  Variant (409)..(410): Xaa in position 409 to 410 is any amino acid
  Variant (412)..(419): Xaa in position 412 to 419 is any amino acid
  Variant (421)..(426): Xaa in position 421 to 426 is any amino acid
  Variant (427)..(428): Xaa in position 427 to 428 is any or no amino acid
  Variant (430)..(431): Xaa in position 430 to 431 is any amino acid
  Variant (433)..(433): Xaa in position 433 is any amino acid
  Variant (439)..(447): Xaa in position 439 to 447 is any amino acid
  Variant (449)..(455): Xaa in position 449 to 455 is any amino acid
  Variant (456)..(472): Xaa in position 456 to 472 is any or no amino acid
  Variant (474)..(475): Xaa in position 474 to 475 is any amino acid
  Variant (479)..(479): Xaa in position 479 is any amino acid
  Variant (481)..(481): Xaa in position 481 is any amino acid
  Variant (485)..(485): Xaa in position 485 is any amino acid
  Variant (487)..(488): Xaa in position 487 to 488 is any amino acid
  Variant (490)..(490): Xaa in position 490 is any amino acid
  Variant (491)..(491): Xaa in position 491 is any or no amino acid
  Variant (493)..(495): Xaa in position 493 to 495 is any amino acid
  Variant (497)..(506): Xaa in position 497 to 506 is any amino acid
  Variant (507)..(510): Xaa in position 507 to 510 is any or no amino acid
  Variant (512)..(515): Xaa in position 512 to 515 is any amino acid
  Variant (517)..(517): Xaa in position 517 is any amino acid
  Variant (519)..(519): Xaa in position 519 is any amino acid
  Variant (521)..(523): Xaa in position 521 to 523 is any amino acid
  Variant (525)..(527): Xaa in position 525 to 527 is any amino acid
RTXXXXXXXXXXXXGXXXXXXXXXLXXXXXXXXXXXXXXXXXXXXXXXXXXXXXXXXXXXXXXXXXXXXXXXXXXXXXXXXXXXGXXXXXXXXXXXXXXRXXXXXAGXXPXXXXXXXXNXXCXSXXXXXXXXXXXIXXGXXXXXXXXGXEXMXXXXXXXXXXXXXXXXXXXXXXXXXXXXXXXXXXXXXXXXXXXXXXXXXXXXXXXXXMGXXXXXXXEXXAXXXXXXXXXXRXXQDXXAXXSXXXAXXAXXXGXFXXXXXXXXXXXXEIXPXXXXXXXXXXXXXXXXXXXXXXXXXXXXXXXXDXXXXXXXXXXXXLXXLXXXFXXXXXXXXXXXXXXXXXXXXXXXXXGXXTAGXNXSXXXDGAXAXXXXXXXXXXXXGXXXXXXXXXXXXXXXXXXPXXXXXXXPXXAXXXXXXXXGXXXXXXXXDXXEXNEAFAXXXXXXXXXLXXXXXXXXXXXXXXXXXXXXXXXXNXXGGAXAXGHPXGXXGXXRXXXTXXXXXXXXXXXXXXGXXXXCXGXGXXXAXXXE

SEQ ID NO: 101324 - protein, 19 aa, Artificial sequence
  protein pattern
  Variant (2)..(2): Xaa in position 2 is Ala, Ile, Leu, Pro or Val
  Variant (3)..(3): Xaa in position 3 is any amino acid
  Variant (6)..(6): Xaa in position 6 is Ala, Gly or Ser
  Variant (7)..(7): Xaa in position 7 is any amino acid
  Variant (8)..(8): Xaa in position 8 is Ala or Ser
  Variant (9)..(9): Xaa in position 9 is Phe, Ile, Leu, Met or Val
  Variant (13)..(13): Xaa in position 13 is Phe, Ile, Leu or Val
  Variant (15)..(15): Xaa in position 15 is any amino acid
  Variant (16)..(16): Xaa in position 16 is Ser or Thr
  Variant (18)..(18): Xaa in position 18 is Ala, Cys, Gly, Asn, Ser, Thr or Val
NXXGGXXXXGHPXGXXGXR

SEQ ID NO: 101325 - protein, 20 aa, Artificial sequence
  protein pattern
  Variant (2)..(2): Xaa in position 2 is any amino acid
  Variant (3)..(3): Xaa in position 3 is any or no amino acid
  Variant (5)..(5): Xaa in position 5 is any or no amino acid
  Variant (7)..(7): Xaa in position 7 is Ala, Gly or Pro
  Variant (8)..(8): Xaa in position 8 is Asn, Ser or Thr
  Variant (9)..(9): Xaa in position 9 is Ala or Ser
  Variant (11)..(12): Xaa in position 11 to 12 is any amino acid
  Variant (13)..(13): Xaa in position 13 is Cys, Asn, Ser or Thr
  Variant (16)..(16): Xaa in position 16 is Ala, Gly, Ser or Val
  Variant (17)..(17): Xaa in position 17 is Ala, Cys, Gly, Ser, Thr or Val
  Variant (18)..(19): Xaa in position 18 to 19 is any amino acid
  Variant (20)..(20): Xaa in position 20 is Phe, Ile, Leu, Met or Val
GXXTXAXXXSXXXDGXXXXX

SEQ ID NO: 101326 - protein, 8 aa, Artificial sequence
  protein pattern
  Variant (2)..(2): Xaa in position 2 is any amino acid
  Variant (8)..(8): Xaa in position 8 is Ala, Gly, Ser, Thr or Val
EXNEAFAX

SEQ ID NO: 101327 - DNA, 1410 bp, Escherichia coli
  CDS (1)..(1410): transl_table=11
atgtccgctgaacacgtactgacgatgctgaacgagcacgaagtgaagtttgttgatttgcgcttcaccgatactaaaggtaaagaacagcacgtcactatccctgctcatcaggtgaatgctgaattcttcgaagaaggcaaaatgtttgacggctcctcgattggcggctggaaaggcattaacgagtccgacatggtgctgatgccagacgcatccaccgcagtgattgacccgttcttcgccgactccaccctgattatccgttgcgacatccttgaacctggcaccctgcaaggctatgaccgtgacccgcgctccattgcgaagcgcgccgaagattacctgcgttccactggcattgccgacaccgtactgttcgggccagaacctgaattcttcctgttcgatgacatccgtttcggatcatctatctccggttcccacgttgctatcgacgatatcgaaggcgcatggaactcctccacccaatacgaaggtggtaacaaaggtcaccgtccggcagtgaaaggcggttacttcccggttccaccggtagactcggctcaggatattcgttctgaaatgtgtctggtgatggaacagatgggtctggtggttgaagcccatcaccacgaagtagcgactgctggtcagaacgaagtggctacccgcttcaataccatgaccaaaaaagctgacgaaattcagatctacaaatatgttgtgcacaacgtagcgcaccgcttcggtaaaaccgcgacctttatgccaaaaccgatgttcggtgataacggctccggtatgcactgccacatgtctctgtctaaaaacggcgttaacctgttcgcaggcgacaaatacgcaggtctgtctgagcaggcgctgtactacattggcggcgtaatcaaacacgctaaagcgattaacgccctggcaaacccgaccaccaactcttataagcgtctggtcccgggctatgaagcaccggtaatgctggcttactctgcgcgtaaccgttctgcgtctatccgtattccggtggtttcttctccgaaagcacgtcgtatcgaagtacgtttcccggatccggcagctaacccgtacctgtgctttgctgccctgctgatggccggtcttgatggtatcaagaacaagatccatccgggcgaagccatggacaaaaacctgtatgacctgccgccagaagaagcgaaagagatcccacaggttgcaggctctctggaagaagcactgaacgaactggatctggaccgcgagttcctgaaagccggtggcgtgttcactgacgaagcaattgatgcgtacatcgctctgcgtcgcgaagaagatgaccgcgtgcgtatgactccgcatccggtagagtttgagctgtactacagcgtctaa

SEQ ID NO: 101328 - protein, 469 aa, Escherichia coli
MSAEHVLTMLNEHEVKFVDLRFTDTKGKEQHVTIPAHQVNAEFFEEGKMFDGSSIGGWKGINESDMVLMPDASTAVIDPFFADSTLIIRCDILEPGTLQGYDRDPRSIAKRAEDYLRSTGIADTVLFGPEPEFFLFDDIRFGSSISGSHVAIDDIEGAWNSSTQYEGGNKGHRPAVKGGYFPVPPVDSAQDIRSEMCLVMEQMGLVVEAHHHEVATAGQNEVATRFNTMTKKADEIQIYKYVVHNVAHRFGKTATFMPKPMFGDNGSGMHCHMSLSKNGVNLFAGDKYAGLSEQALYYIGGVIKHAKAINALANPTTNSYKRLVPGYEAPVMLAYSARNRSASIRIPVVSSPKARRIEVRFPDPAANPYLCFAALLMAGLDGIKNKIHPGEAMDKNLYDLPPEEAKEIPQVAGSLEEALNELDLDREFLKAGGVFTDEAIDAYIALRREEDDRVRMTPHPVEFELYYSV

SEQ ID NO: 101329 - DNA, 1410 bp, Vibrio cholerae
  CDS (1)..(1410): transl_table=11
atgtcagtagaaaatgttttatcgctgatccaagaaaacgaagttaagtttgttgacctacgcttcacagacaccaagggtaaagaacaacatatctctatccctgctcaccaaattgatgctgacttcttcgaagacggtaaaatgttcgatggttcttctgtggctggctggaaaggtatcaacgaatccgacatggtgatgatgccagatccatcttccgctgtgctcgacccattcactgaagatgctacgctgaacattcgttgtgacatcttagaacctgcgactatgcaaggttacgatcgtgacccacgttctatcgcaaaacgtgcagaagaatatatgcgctctacgggtatcgcagacacagttcttgtcggtccagagccagaattcttcctgtttgacgatgtgaaattcgccaccaacatgtctggttcattcttcaagattgacgacgtagaagcggcatggaacacaggtactgaatacgaagatggtaacaaaggtcaccgtccaggcgtaaaaggcggttacttcccagttgctcctgttgactcatcacaagacatccgctcagcgatgtgtttgatcatggaagaaatgggtctggttgttgaagcgcaccaccatgaagtagccactgcgggtcagaacgaaatcgcgactcgctttaacacgctcaccacgaaagcagacgagatccaaatctacaagtacgttgtacacaacgttgcgcacgcttttggtaaaacagccacctttatgcctaagccactggttggcgataacggctcaggtatgcacgttcaccaatctctcgcgaaagacggcgttaacctgtttgcgggtgataagtacggcggcctatctgaaaccgcactgtactacattggtggtatcatcaagcacgctcgcgcgctgaatgcgatcactaacccatccaccaactcctacaagcgtctggttcctcactatgaagcaccagtaatgctggcttactctgcgcgtaaccgttcggcatctatccgtatcccagtggtaccaagcccgaaagcacgtcgtattgaagttcgcttcccagatccagcagctaacccatacttggcgtttgcagctatgctgatggcgggtcttgacggtatcaagaacaagatccacccaggagaagcgatggacaaagatctgtatgacttaccagcagaagaagcggcagagattccaaaagtagcggaatcactgcaacaagctctgcagtatctggatgcagaccgtgagttcctcactgccggtggcgtgttctcagatgacttcattgattcttacatcgcactgaagaccaaagatgttgagcgcgtgaacgttgctgttcatccacttgagtttgaactgtactactctgtgtaa

SEQ ID NO: 101330 - protein, 469 aa, Vibrio cholerae
MSVENVLSLIQENEVKFVDLRFTDTKGKEQHISIPAHQIDADFFEDGKMFDGSSVAGWKGINESDMVMMPDPSSAVLDPFTEDATLNIRCDILEPATMQGYDRDPRSIAKRAEEYMRSTGIADTVLVGPEPEFFLFDDVKFATNMSGSFFKIDDVEAAWNTGTEYEDGNKGHRPGVKGGYFPVAPVDSSQDIRSAMCLIMEEMGLVVEAHHHEVATAGQNEIATRFNTLTTKADEIQIYKYVVHNVAHAFGKTATFMPKPLVGDNGSGMHVHQSLAKDGVNLFAGDKYGGLSETALYYIGGIIKHARALNAITNPSTNSYKRLVPHYEAPVMLAYSARNRSASIRIPVVPSPKARRIEVRFPDPAANPYLAFAAMLMAGLDGIKNKIHPGEAMDKDLYDLPAEEAAEIPKVAESLQQALQYLDADREFLTAGGVFSDDFIDSYIALKTKDVERVNVAVHPLEFELYYSV

SEQ ID NO: 101331 - DNA, 2538 bp, Oryza sativa (japonica cultivar-group); identical to SEQ ID NO: 32043
  CDS (1)..(2538)

SEQ ID NO: 101332 - protein, 845 aa, Oryza sativa (japonica cultivar-group); identical to SEQ ID NO: 32044

SEQ ID NO: 101333 - DNA, 1410 bp, Mesorhizobium loti MAFF303099
  CDS (1)..(1410): transl_table=11
atgacgacagccaaagacatcatgaagcagatcaaggacaacgacgtgaaattcgtcgacctgcgcttcaccgacccgaagggcaagctgcagcacgtaacgatggatgtcgtcgaggtcgaggaagacatgttcgccgatggtgtcatgttcgacggctcctcgattgccggctggaaggccatcaacgagtccgacatggtgctcatgcccgatccggacacggtccacatggatccgttcttcgcgcagtcgaccatggtcatcctgtgcgacatcctcgatccggtctcgggcgaatcctacaaccgcgacccgcgcggcacggccaagaaggccgaagcctacatgaagtcggaaggcatcggcgaccagatcttcgtcggcccggaagccgaattcttcgtcttcgatgacgtcaagtacaaggccgacccgtacaacaccggcttcaagctcgactccaccgaactgccgtcaaacgacgacaccgactacgagaccggcaatctcggccatcgcccgcgcatcaagggcggctatttcccggtgccgccgatcgacagcgcgcaggacatgcgctccgagatgctgaccgtgctcgcggaaatgggcgtgcgcgtcgaaaagcatcaccacgaagtcgccgccgcgcagcacgaactcggcatcaagttcgacacgctggtccgcaacgccgacaagatgctgatctacaagtatgtcgtgcaccaggtcgccaacgcctatggcaagacggccaccttcatgccgaagcccatcttcggcgacaatggctcgggcatgcacgtccaccagtcgatctggaagggcggcaagccgaccttcgccggcaatgaatatgccggcctgtcggaaagctgcctgttctacatcggcggcatcatcaagcacgccaaggcgatcaacgcgttcaccaacccgctgacgaactcctacaagcgcctggtgcccggctatgaagcgccggtgctgctcgcctattccgcgcgcaaccgttcggcctcctgccgcatcccgttcggctcgtcgccgaaggccaagcgcgtcgaggtccgcttccccgatccgggcgcgaacccgtacctcgccttcgcagccatgctgatggccggcctcgacggcatcaagaacaagatccaccccggccagccgatggacaaggatctctacgacctgccgccgaaggagttgaagaagatcccgaccgtctgcggctcgctgcgtgaagctctccagagcctcgataaggatcgcggcttcctgaaggccggcggcgtcttcgacgacgaccagatcgacagctacatcgaactgaagatggccgaggtgatgcgctttgaaatgaccccgcatccggtggaatacgacatgtactattcggtgtaa

SEQ ID NO: 101334 - protein, 469 aa, Mesorhizobium loti MAFF303099
MTTAKDIMKQIKDNDVKFVDLRFTDPKGKLQHVTMDVVEVEEDMFADGVMFDGSSIAGWKAINESDMVLMPDPDTVHMDPFFAQSTMVILCDILDPVSGESYNRDPRGTAKKAEAYMKSEGIGDQIFVGPEAEFFVFDDVKYKADPYNTGFKLDSTELPSNDDTDYETGNLGHRPRIKGGYFPVPPIDSAQDMRSEMLTVLAEMGVRVEKHHHEVAAAQHELGIKFDTLVRNADKMLIYKYVVHQVANAYGKTATFMPKPIFGDNGSGMHVHQSIWKGGKPTFAGNEYAGLSESCLFYIGGIIKHAKAINAFTNPLTNSYKRLVPGYEAPVLLAYSARNRSASCRIPFGSSPKAKRVEVRFPDPGANPYLAFAAMLMAGLDGIKNKIHPGQPMDKDLYDLPPKELKKIPTVCGSLREALQSLDKDRGFLKAGGVFDDDQIDSYIELKMAEVMRFEMTPHPVEYDMYYSV

SEQ ID NO: 101335 - DNA, 1377 bp, Aeropyrum pernix K1
  CDS (1)..(1377): transl_table=11
atgcctgagaccggaccacagagagataaagacggtcaaagggagggacgcgtcctagttcactatacagatatagctgggtacctaagacaagtcgaggttccgctaaggaacgtcgagaaggagtttgtggcatcatttgacggtagcagcgtctacggcttcacccctgtagaggacagcgatcttcttctaaaacatgtgccggagaccctagtcagcgtcccttggaggagcgggctttggagggttatagctactgtctacaacgctactcgtgagagaagcccgagggatccgaggttagcagcagaaacagctgaaaagataatgtcgtctatgggctatagggtcaaggctggcgctgagatagagttcttcattttcgataagataggtgtcgacgttctaaacccggccagggggcttggctacattgttgagagtagggaacaacccggcgggcaggacggcatttttggccaggtcaagaagtcgtaccacatgccagaacctccagacagcctccttgactatagacttatgctcacagaaactctgcagaggttcaaagttgacgtggcagtctcccaccacgaggtggccgttagccaggtcgaggtctctatcggatctaggacgagcttggcaagacttggagatgacataatgacagtcaagtgggtttcaaaggttttagcccgcatggacgggagggtggctacatttatgccaaaacctatattcggcgacaacggctccggcatgcacatccacctgagtctatggagtccaggtggtgagaacctcttcgccggccatggagacagtgatctctcggaaacagcgctgcatttcatagccgggattctcgagcacgcgcgaagcctaagcgctattctatctcccacgaccaactcgtatcgcaggctagtagcaggctatgaggctccggtttatgttgcctggggttggagaaacaggagtgctatgattaggatacctgcgtccgctggcaatatagatgctgtaaggatcgaggtaaggagccccgatcccacagccaatccttacctggctttggcggcgctgtttatggcaggactcgacggtgtaaaaaagaagctcgctccgccagatccctatgagggcaacctctacaagattagccctgaggagcttagagaaaagggtataaagacgctacctaggaacctagatgaggcgctagacgagctggagtccgacaatgactatttgaagccagcattcactagggagatgctagagtcttatatagaggtaaagaggaaggaatcggaggatacgagactgtatccccatcccatcgaagtatataaatatttaaacctgtag

SEQ ID NO: 101336 - protein, 458 aa, Aeropyrum pernix K1
MPETGPQRDKDGQREGRVLVHYTDIAGYLRQVEVPLRNVEKEFVASFDGSSVYGFTPVEDSDLLLKHVPETLVSVPWRSGLWRVIATVYNATRERSPRDPRLAAETAEKIMSSMGYRVKAGAEIEFFIFDKIGVDVLNPARGLGYIVESREQPGGQDGIFGQVKKSYHMPEPPDSLLDYRLMLTETLQRFKVDVAVSHHEVAVSQVEVSIGSRTSLARLGDDIMTVKWVSKVLARMDGRVATFMPKPIFGDNGSGMHIHLSLWSPGGENLFAGHGDSDLSETALHFIAGILEHARSLSAILSPTTNSYRRLVAGYEAPVYVAWGWRNRSAMIRIPASAGNIDAVRIEVRSPDPTANPYLALAALFMAGLDGVKKKLAPPDPYEGNLYKISPEELREKGIKTLPRNLDEALDELESDNDYLKPAFTREMLESYIEVKRKESEDTRLYPHPIEVYKYLNL

SEQ ID NO: 101337 - DNA, 1431 bp, Campylobacter jejuni subsp. jejuni NCTC 11168
  CDS (1)..(1431): transl_table=11
atgggaaaatttgttaataatatagatgattttttcaaattttgcaaacaaaatgaagtgctttttgttgattttcgttttacagatatgataggaacttggcatcatattacctataatcttcatgcaatcaatgaagaaacatttcaaactggcattccatttgatggaagctcaattcatggatggcaacctatagaaaaatcagatatgattttaaaacctgatgctcaaagtgcttttttagatccttttacggctgatcctactatcatagtattttgtgatgtgtatgatatttacaaaggacaaatgtatgaaaaatgtccaagaagcatagcaaaaaaagcaatagaacaccttaaaaatagtggcatagctgatactgcttactttggaccagaaaatgaattctttgtttttgatagtgtaaaaatagttgatactactcattgttctaagtatgaagttgataccgaagaaggagagtggaatgatgatagagaatttaccgatagctacaatactggacacaggccaagaaacaaaggtggatattttccagttcagccaattgattctttagtagatattcgttctgaaatggttcaaacccttgaaaaagtaggtcttaaaacttttgttcatcatcatgaagttgcacaaggacaagctgaaataggagtaaattttggcacgcttgtagaagcagctgacaatgttcaaatttataaatatgttgtaaaaatggtagctcatttaaatggcaaaactgccacttttatgccaaaacctttatacggagataatggcaatggtatgcatgttcatatgagcttatggaaaaatggagtaaatttattttacgataaagatggatacagtggacttagtcaaactgctataaattatataggtggaattttaaaaaatgctagaagtgttgcagcttttacaaatccaagttccaactcttacaaaagaatagttcctggctttgaagctccttgtattttaacttattcttgccaaaacagatcagcaagttgtcgcgttccttatggcataggtaaaaattcagctcgtatagaaattcgcttccctgatagcactgctaatccttatttagcttttgttagtcttttaatggcaggtcttgatggaatcaaaaataaaaccattcctgtgggtcctatggatgaaaatttatttgatcttactttggatgaaatacgtgaaaaagggatagagcaattaccacatactctaagaggaagtttggaagctttaatccgacataattcttatttaaaacctgtaatgagcgatatttttatcgatgactatcagcatttaaaatttgaaacacaagtttggccagtagaagctcgtccaactgcttatgaatttaaaacttgctactcttgctaa

SEQ ID NO: 101338 - protein, 476 aa, Campylobacter jejuni subsp. jejuni NCTC 11168
MGKFVNNIDDFFKFCKQNEVLFVDFRFTDMIGTWHHITYNLHAINEETFQTGIPFDGSSIHGWQPIEKSDMILKPDAQSAFLDPFTADPTIIVFCDVYDIYKGQMYEKCPRSIAKKAIEHLKNSGIADTAYFGPENEFFVFDSVKIVDTTHCSKYEVDTEEGEWNDDREFTDSYNTGHRPRNKGGYFPVQPIDSLVDIRSEMVQTLEKVGLKTFVHHHEVAQGQAEIGVNFGTLVEAADNVQIYKYVVKMVAHLNGKTATFMPKPLYGDNGNGMHVHMSLWKNGVNLFYDKDGYSGLSQTAINYIGGILKNARSVAAFTNPSSNSYKRIVPGFEAPCILTYSCQNRSASCRVPYGIGKNSARIEIRFPDSTANPYLAFVSLLMAGLDGIKNKTIPVGPMDENLFDLTLDEIREKGIEQLPHTLRGSLEALIRHNSYLKPVMSDIFIDDYQHLKFETQVWPVEARPTAYEFKTCYSC

SEQ ID NO: 101339 - DNA, 1515 bp, Xylella fastidiosa 9a5c
  CDS (1)..(1515): transl_table=11
atgcttacccgaaaaaaatcaatggattgcaaggttggcagacttggtatgccaattgctttagctgtttctgactgttaccccaatcctaaaaggtttcctctgatgtcgctggaaaatgttgaaaagcttgtcaaggataaaaagatcgaattcgtcgatttgcgctttgttgatatgcgcggcgtgcaacagcacgtcacctttccggtgaacattcttgaaccatcgctgttcaaggatggaaagatgttcgacggtagctcgattgccggttggaaggggatcaatgagtcggacatggtactgctgcctgacgctaacaccgcctatctggatcctttttacgctgatccaacgctggtcatgacatgcgacatcctcgatccagcgacgatgcagagttatgtgcgtgatccccgaggcatcgccaaacgtgccgaaatctacttaaattctttgggtattgctgaccaagcatttttcggtccggaacctgaattttttatcttcgattcagtccgttttgctaatgatatgggtcatgcttttttccaaattgcttccgaagaggctgcctggaacacaggcgctgagtttgagggaggtaacggtggttaccgcccggcggtaaagggtggatacttcccagttccaccgactgactcgctgcacgatttgcgtgccgagatggtgaagaccctggagcaggttggtattgagaccgaggtgcatcatcacgaagtcgccactgctggacaatgtgagatcggcactaagttcaactcattggtcaaaaaggctgatcagctgatgacgatgaaatacatccttaaaaacgttgcttaccgcaatggaaagactgtcacctttatgcctaagccgatggttggtgataacggttctggcatgcatgtgcatcagtcgctctctaaaggaggggtcaacttgttctccggtgacgaccatgctggtttgtcgcagcttgcactgtattacatcggcggtattttcaagcatgctcatgcgatcaacgcgttttccaattcgggcacaaatagctataagcgtttggttccgggcttcgaagcacccgtgatgttggcttattcggcacgtaaccgctcggcctcgtgccgtattccatgggtttctagcccgaaggcacgccgcattgaaatgcgtttccccgatccattgcagtctggttacctcacctttactgcgctgatgatggctgggctggatggcattaaaaacaagatccatccaggcccacccaatgacaaagatctgtatcacctgccgcctgaagaggaaaaattgatcccgcaggtttgttcaagtttggatcaggctcttgaagcattggacaaagaccgcgatttcttgaaggcagggggtgtgatgagtgacgattttattgacggctatattgcgctgaagatgcaggaagtgacgcagttccgcgcggccacacatccgctggaataccagatgtactacgccaactaa

SEQ ID NO: 101340 - protein, 504 aa, Xylella fastidiosa 9a5c
MLTRKKSMDCKVGRLGMPIALAVSDCYPNPKRFPLMSLENVEKLVKDKKIEFVDLRFVDMRGVQQHVTFPVNILEPSLFKDGKMFDGSSIAGWKGINESDMVLLPDANTAYLDPFYADPTLVMTCDILDPATMQSYVRDPRGIAKRAEIYLNSLGIADQAFFGPEPEFFIFDSVRFANDMGHAFFQIASEEAAWNTGAEFEGGNGGYRPAVKGGYFPVPPTDSLHDLRAEMVKTLEQVGIETEVHHHEVATAGQCEIGTKFNSLVKKADQLMTMKYILKNVAYRNGKTVTFMPKPMVGDNGSGMHVHQSLSKGGVNLFSGDDHAGLSQLALYYIGGIFKHAHAINAFSNSGTNSYKRLVPGFEAPVMLAYSARNRSASCRIPWVSSPKARRIEMRFPDPLQSGYLTFTALMMAGLDGIKNKIHPGPPNDKDLYHLPPEEEKLIPQVCSSLDQALEALDKDRDFLKAGGVMSDDFIDGYIALKMQEVTQFRAATHPLEYQMYYAN

SEQ ID NO: 101341 - DNA, 1437 bp, Mycobacterium leprae TN
  CDS (1)..(1437): transl_table=11
gtgacggaaaagacgtccgacgacgtattaaaactcgccaaggacgagaacatcgaatttgtcgacgttcagttctgtgacctgcccggcataatgcagcatttcactattccggcttcggccttcgataagagcgtgttcgaggacgggctggcctttgacggctcgtcgattcgcgggttccagtcgatccacgagtccgacatgctgctgtttcccgacccggacaccgcacgcatcgatccgttccgtgcggccaagacgctgaatgtcaacttcttcgtccatgacccgttcaccctcgagccatactcccgcgacccgcgcaacatcgctcgcaaggctgaaaactacttgatcagcactggtatcgctgacaccgtgtacttcggtgccgaggccgaattttacatcttcgactcggtgagtttcgactcacgctcgaacggttcgttttaccaagtcgatgccatttcggggtggtggaacaccggcgcggcgaccgagtccgatggcagccccaaccgtggctacaaggttcgccacaagggtgggtactttccagtggctcccaacgaccagtacgtcgacttgcgcgacaagatgcttaccaacctgactaacgctggcttcgttttggagaagggccaccacgaggtgggcaccggtgggcagggtgagatcaactaccagttcaacacgctgctgcatgcggccgatgacatgcaactgtacaaatacattgtcaaaaacaccgcgtggcagaacggcaagacagtcaccttcatgcccaagccgctgttcggtgacaacggctccggtatgcatactcaccaatcgttgtggaaaggcggcaccccgctgatgtacgacgagatcggctatgccggtttgtcagacaccgcacggcattacatcggaggcctgctgcaccatgcaccgtcgttgctggcgttcaccaacccgaccgtaaactcctacaagcgtttggttcccggctatgaggccccgattaaactagtttacagccagcgcaaccggtccgcatgtgtgcgtatccctatcaccggcaaaaacccgaaggccaagcgactggagttccgctgccccgatgcatcgggcaacccctacctggcgttttccgccatgttgatggcgggcctggacggcatcaagaacaagatcgagcctcaagccccggttgacaaagacctctacgaactgcctccggaggaggccgcagacattccgcaagcgcccacccagctggctgcggtgatcgaccgtctcgaggaagaccacgactacctcactgagggaagcgtgttcacacccgacttgatcgagacgtggatcaacttcaaacgcgagaacgaaatcgaaccggtcaacattcgaccgcatccgtacgagtttgcgctgtactacgatgtctaa

SEQ ID NO: 101342 - protein, 478 aa, Mycobacterium leprae TN
MTEKTSDDVLKLAKDENIEFVDVQFCDLPGIMQHFTIPASAFDKSVFEDGLAFDGSSIRGFQSIHESDMLLFPDPDTARIDPFRAAKTLNVNFFVHDPFTLEPYSRDPRNIARKAENYLISTGIADTVYFGAEAEFYIFDSVSFDSRSNGSFYQVDAISGWWNTGAATESDGSPNRGYKVRHKGGYFPVAPNDQYVDLRDKMLTNLTNAGFVLEKGHHEVGTGGQGEINYQFNTLLHAADDMQLYKYIVKNTAWQNGKTVTFMPKPLFGDNGSGMHTHQSLWKGGTPLMYDEIGYAGLSDTARHYIGGLLHHAPSLLAFTNPTVNSYKRLVPGYEAPIKLVYSQRNRSACVRIPITGKNPKAKRLEFRCPDASGNPYLAFSAMLMAGLDGIKNKIEPQAPVDKDLYELPPEEAADIPQAPTQLAAVIDRLEEDHDYLTEGSVFTPDLIETWINFKRENEIEPVNIRPHPYEFALYYDV

SEQ ID NO: 101343 - DNA, 1410 bp, Agrobacterium tumefaciens str. C58; identical to SEQ ID NO: 74193
  CDS (1)..(1410): transl_table=11

SEQ ID NO: 101344 - protein, 469 aa, Agrobacterium tumefaciens str. C58; identical to SEQ ID NO: 74194

SEQ ID NO: 101345 - DNA, 1308 bp, Agrobacterium tumefaciens str. C58; identical to SEQ ID NO: 32055
  CDS (1)..(1308): transl_table=11

SEQ ID NO: 101346 - protein, 435 aa, Agrobacterium tumefaciens str. C58; identical to SEQ ID NO: 32056

SEQ ID NO: 101347 - DNA, 1422 bp, Sulfolobus tokodaii str. 7; identical to SEQ ID NO: 32057
  CDS (1)..(1422): transl_table=11

SEQ ID NO: 101348 - protein, 473 aa, Sulfolobus tokodaii str. 7; identical to SEQ ID NO: 32058

SEQ ID NO: 101349 - DNA, 1347 bp, Thermoplasma acidophilum DSM 1728
  CDS (1)..(1347): transl_table=11
ttggctgctatgccagaggatcttgtttctaaaacgctgaaaagaattgaggaggataaagtagaatttttgcagatgcagttcacagatataatcgggaatgtaaagagcctgacagtgccgaagaacaggttcgaaaatgcgctgacagaaggcgttgtatttgatgggagctctgttgcaggatacgcacagatagaagagagcgatatgcgtgccattccgaacctcgagagctatacccttctgccggacgagttcggaaaaaacaagattgccaggtttgtatgtagtgtttattcaccagacggcacaaggtttccaggtgaccctagatacgtactggaacgcatactcgaccaagttcacaaggaaggcaacgagttcttcgttggccctgaatttgagttcttcctgttcaagcgggacgagcatggaaacccaaccacagaacccagcgattacgggggatactttgacaataccccgcttgattctgcaagcgacataaggcagcagataatgaaggagctgtacgatcttggctaccagccagaggcagcgcatcacgaggttgcctatgggcagcaggaggtggatctcagatacgccccagctctcaaaatggcagacaggatcgtcatgctcaagagcataatcaaaaatatagccgaaagaaacggtctctatgcatcattcatgccgaagccaataaacggcgttaacggatctggtatgcacatacaccagagcataatgagcgctgacgaaaagacgaacaggttctatgacaagaacgcgaagtacggcctgagcgattacgcaatgcattatctcggtggaattctgaaatacataaacgaggcttctgccgtacttgcatcaacggtaaactcctacaagaggctcatacctggatacgaagccccagtctacatatcatgggcaaacaagaacagatccgcgctggtaaggatacctgccggtgaaggtgtcagaaagaggatggagctcagatgcccggatcctgcaggcaatccatacctccagttcgcagtagtacttgggatgggccttgagggcataaagaacagaatagaaccgccggaacctgtcgagaaggatatattccatatgacgccggaggagaggcaggccgaaggcataatgtccatgccagagagccttggggaggcccttcatcacctgagatccagcaagctgatgagaaacgttctcggagaccacgtttacgagaacttcataacagtaaagcagagggaatgggatcagttcagatcctatgtcggagaatgggagataaagagatacctgccaactctgtga

SEQ ID NO: 101350 - protein, 448 aa, Thermoplasma acidophilum DSM 1728
MAAMPEDLVSKTLKRIEEDKVEFLQMQFTDIIGNVKSLTVPKNRFENALTEGVVFDGSSVAGYAQIEESDMRAIPNLESYTLLPDEFGKNKIARFVCSVYSPDGTRFPGDPRYVLERILDQVHKEGNEFFVGPEFEFFLFKRDEHGNPTTEPSDYGGYFDNTPLDSASDIRQQIMKELYDLGYQPEAAHHEVAYGQQEVDLRYAPALKMADRIVMLKSIIKNIAERNGLYASFMPKPINGVNGSGMHIHQSIMSADEKTNRFYDKNAKYGLSDYAMHYLGGILKYINEASAVLASTVNSYKRLIPGYEAPVYISWANKNRSALVRIPAGEGVRKRMELRCPDPAGNPYLQFAVVLGMGLEGIKNRIEPPEPVEKDIFHMTPEERQAEGIMSMPESLGEALHHLRSSKLMRNVLGDHVYENFITVKQREWDQFRSYVGEWEIKRYLPTL

SEQ ID NO: 101351 - DNA, 1410 bp, Yersinia pestis CO92
  CDS (1)..(1410): transl_table=11
atgtccgctgaacatgttttgacgatgctgaatgagcacgaagtgaaatttgttgatttacgtttcactgataccaaagggaaagagcagcacatcacgatccctgctcatcaagtcaacgctgacttcttcgaagaaggcaaaatgtttgatggctcctcgattggtggctggaaaggcattaacgaatccgacatggtactgatgccagacgccagcactgccgttatggacccgttcttcgcagattcaacactgattatccgttgtgacattcttgagccaggcaccatgcagggctatgaccgcgatccacgttctatctccaaacgtgctgaagacttcctgaaatcttcaggtatcgctgataccgtgttgttcgggccagaaccagaattcttcctgtttgacgatatccgttttggtagcagcatcaatgggtcacacgtatccatcgatgacgtcgaaggcgcatggaactccagcaccaaatacgaaggcggcaacaaaggccaccgtcctgcagtaaaaggcggttacttccctgttcctccggtcgactctgcacaagacctccgttctgccatgtgtctgacgatggaagagatgggcttggtggtagaagcacaccaccacgaagtggctaccgcgggtcaaaacgaagtggctacccgcttcaataccatgaccaagaaagcagatgagatccagatttacaaatacgtcgtacacaacgtggcgcacgcatttggtaaaacagcgacctttatgccaaaaccgatgttcggcgataacggctcaggtatgcactgccatatgtctttgtccaagaacggtaataacctgttcgctggcgacaaatacggcggcctgtctgaaatcgccctgttctacatcggcggtatcatcaaacatgcgaaagccattaatgccttggctaacccgaccaccaactcctacaagcgtctggtcccaggttatgaagcaccggtcatgctggcatattcagcccgtaaccgttcagcttctatccgtattcctgttgttgccagcccgaaagctcgccgtattgaagcgcgtttccccgatcctgcggctaacccgtacctgtgcttcgccgcgctgttgatggctggccttgatggcatcatcaacaaaattcacccaggtgatgcgatggacaaaaacctgtatgacttgccgccggaagaagaagctgagattccaaaagttgccggttcactggacgaagccatggccgcattgaacgaagatcgcgagttcctgactcgtggtggcgtgttcaccgatgatgctatcgatgcgtatatcgagctacgtagagaagaaatggatcgcgtgcgtatgactccgcatcctgttgagttcgaactgtattacagcgtttaa

SEQ ID NO: 101352 - protein, 469 aa, Yersinia pestis CO92
MSAEHVLTMLNEHEVKFVDLRFTDTKGKEQHITIPAHQVNADFFEEGKMFDGSSIGGWKGINESDMVLMPDASTAVMDPFFADSTLIIRCDILEPGTMQGYDRDPRSISKRAEDFLKSSGIADTVLFGPEPEFFLFDDIRFGSSINGSHVSIDDVEGAWNSSTKYEGGNKGHRPAVKGGYFPVPPVDSAQDLRSAMCLTMEEMGLVVEAHHHEVATAGQNEVATRFNTMTKKADEIQIYKYVVHNVAHAFGKTATFMPKPMFGDNGSGMHCHMSLSKNGNNLFAGDKYGGLSEIALFYIGGIIKHAKAINALANPTTNSYKRLVPGYEAPVMLAYSARNRSASIRIPVVASPKARRIEARFPDPAANPYLCFAALLMAGLDGIINKIHPGDAMDKNLYDLPPEEEAEIPKVAGSLDEAMAALNEDREFLTRGGVFTDDAIDAYIELRREEMDRVRMTPHPVEFELYYSV

SEQ ID NO: 101353 - DNA, 1410 bp, Caulobacter crescentus CB15
  CDS (1)..(1410): transl_table=11
atgagcaccgccaaggacatcctgaacctgatcaaggaaaaggacgtgaagtacgtcgacgtccgtttcacggacgtgcgcggcaagatgcagcacgtgaccttcgacatcgacctcgtcgacgacgacttcctgaacgacggcaccatgttcgacggttcgtcgatcgccggctggaaggccatcaacgagtcggacatgaagctgcgccccgacctgtcgagcgcgatcatcgacccgttctaccagcagaccacgctggcgctgttctgcgacgtcgtgaaccccgacaccggcacgccctacaaccgcgacccgcgttcgatcgccaaggccgcgctgaactacctgaagtcggccggcgtgggcgacaccgtctacttcggccctgaagccgagttcttcatcttcgacgacgtgcgctggtcgaccgccccgcacgacaccagctactcgttcgattcgaccgaactgccggtcaactcgaacaagcagtacgccgaaggcaacatgggccaccgcccgggcccgaagggcggctacttcccggtgaacccggtcgacagctgccaagacctgcgcggcgaaatgctggccgtcatgggcgagctgggcatgaagccggaaaagcaccaccacgaagtggcgccggcccagcacgagcttggcctgaagttcgacaccatggtcaccatggccgaccggatgcagctctataagtacgtcatccacaacgtcgcggccgcctacggcaagaccgccaccttcatggccaagccgatgttcgccgacaacggttcgggcatgcacgtgcaccagtcgatctggcaggacggcaagccgctgttcgccggcgacaagtatgctggcctgtcgcaggaatgcctgtggtacatcggcggcatcatcaagcacgccaaggccatcaacgcgttctcgaactcgacgacgaactcgtacaagcgcctggtgcccggctacgaagccccggtgaagctggcctacagctcgcgcaaccgctcggcctcgatccgcatcccgcacgtcgactcgccgaaggctaagcgtctggaagcccgcttccccgacccgatgggcaacccctacctgacgttcgtcgctctgctgatggccggcctggacggcatcatcaacaagatcgatccgggcgctccggccgacaagaacctgtacgatctgccgccccgcgagcagaagaagatcccggaagtctgcggctcgctgcgcgaagccctggaaaacctcgacaaggaccgcgccttcctgaaggccggcggtgtcatggatgacgacttcatcgacagctacatcgagctgaagatggaagaggtgatgcgcctgcaactgcacccgcacccggtcgaattcgagatgtactacaagtgctaa

SEQ ID NO: 101354 - protein, 469 aa, Caulobacter crescentus CB15
MSTAKDILNLIKEKDVKYVDVRFTDVRGKMQHVTFDIDLVDDDFLNDGTMFDGSSIAGWKAINESDMKLRPDLSSAIIDPFYQQTTLALFCDVVNPDTGTPYNRDPRSIAKAALNYLKSAGVGDTVYFGPEAEFFIFDDVRWSTAPHDTSYSFDSTELPVNSNKQYAEGNMGHRPGPKGGYFPVNPVDSCQDLRGEMLAVMGELGMKPEKHHHEVAPAQHELGLKFDTMVTMADRMQLYKYVIHNVAAAYGKTATFMAKPMFADNGSGMHVHQSIWQDGKPLFAGDKYAGLSQECLWYIGGIIKHAKAINAFSNSTTNSYKRLVPGYEAPVKLAYSSRNRSASIRIPHVDSPKAKRLEARFPDPMGNPYLTFVALLMAGLDGIINKIDPGAPADKNLYDLPPREQKKIPEVCGSLREALENLDKDRAFLKAGGVMDDDFIDSYIELKMEEVMRLQLHPHPVEFEMYYKC

SEQ ID NO: 101355 - DNA, 1416 bp, Ralstonia solanacearum GMI1000
  CDS (1)..(1416): transl_table=11
atgtcccaaagcattgcagacgtgatgaagctcgtgaaggaaaacgacgtcaagttcgtcgatttccgcttcaccgataccaagggtaaagagcagcacgtctcggttcccgtgtcgcatttcggcgaagacaagttcgaaagcggccacgcattcgacggctcgtcgatcgccggctggaagggcatcgaagcttcggacatgctgctgatgccggatgcgaacaccgcccacatcgacccgttctacgaagagccgaccctggtcatgacctgcgacgtgatcgaaccatcggacggcaagggctacgaccgcgacccgcgctcgatcgccaagcgcgctgaagcctacctgaagagcaccggcctgggcgacaccgcctacttcggtccggaacccgaattcttcatcttcgacggcgtgacctggaacgtcgacatgcaaggctccttcgtgaagatccattccgaagaagcgccgtggtcgtcgggcaaggaattcgagcacggcaactccggccaccgtccgggcaagaagggcggctacttcccggtcgccccgatcgacacgttccaggacatccgctcggaaatgtgcctgatcctggaatcgctgggcattccggttgaagtgcatcaccacgaagtggcgggccaaggccagaacgaaatcggcacgaagttcagcacgctggtgcagcgcgccgactggacccagctgcaaaagtacgtgatccagaacgtcgcgcacacctacggcaagaccgccacgttcatgccgaagccggtcgtgggcgacaacggttcgggtatgcacgtgcaccagtccgtgtggaaggacggccagaacctgttcgcaggcaacggctacgccggcctgtcggaattcgcgctgtactacatcggcggcatcatcaagcacgctcgcgcgctgaacgccatcaccaacccgggcacgaactcgtacaagcgtctggtgccgggcttcgaagcaccggtcaagctggcttactcggctcgcaaccgttcggcttcgatccggatcccgtacgttgccaacccgaagggtcgccgcatcgaaacgcgcttcccggatccgctgtgcaacccgtacctgggctttgccgcgctgctgatggccggcctggacggcgtgcagaacaagatccacccgggcgaagccgccgacaagaacctgtacgacctgccgccggaagaggacgcaaagatcccgaccgtgtgctcgagcctggatcaggccctcgagtacctggacaaggatcgcgagttcctgacccgcggcggcgtgttcaccaactcgatgatcgacgcctacatcgagctgaagatggaagaagtcacccgcttccgcatgaccacgcacccggtcgagttcgagatgtactactcgctgtaa

SEQ ID NO: 101356 - protein, 471 aa, Ralstonia solanacearum GMI1000
MSQSIADVMKLVKENDVKFVDFRFTDTKGKEQHVSVPVSHFGEDKFESGHAFDGSSIAGWKGIEASDMLLMPDANTAHIDPFYEEPTLVMTCDVIEPSDGKGYDRDPRSIAKRAEAYLKSTGLGDTAYFGPEPEFFIFDGVTWNVDMQGSFVKIHSEEAPWSSGKEFEHGNSGHRPGKKGGYFPVAPIDTFQDIRSEMCLILESLGIPVEVHHHEVAGQGQNEIGTKFSTLVQRADWTQLQKYVIQNVAHTYGKTATFMPKPVVGDNGSGMHVHQSVWKDGQNLFAGNGYAGLSEFALYYIGGIIKHARALNAITNPGTNSYKRLVPGFEAPVKLAYSARNRSASIRIPYVANPKGRRIETRFPDPLCNPYLGFAALLMAGLDGVQNKIHPGEAADKNLYDLPPEEDAKIPTVCSSLDQALEYLDKDREFLTRGGVFTNSMIDAYIELKMEEVTRFRMTTHPVEFEMYYSL

SEQ ID NO: 101357 - DNA, 1395 bp, Agrobacterium tumefaciens str. C58; identical to SEQ ID NO: 32065
  CDS (1)..(1395): transl_table=11

SEQ ID NO: 101358 - protein, 464 aa, Agrobacterium tumefaciens str. C58; identical to SEQ ID NO: 32066

SEQ ID NO: 101359 - DNA, 1410 bp, Brucella melitensis 16M
  CDS (1)..(1410): transl_table=11
atgacgactgccaacgatattctgaaacagatcaaagataacgacgtcaagttcgtcgaccttcgcttcaccgatccgaagggcaagctccatcacgttacgatggatatcggcctcgtggacgaagacatgttcgtcgacggtgtcatgttcgacggctcttcgatcgcaggctggaaggccatcaacgaatccgacatggttttgatgcccgatccggaaacggctcatatcgacccgttcttcgcccagtccacgcttgtcattctctgcgatatccttgagccgctttccggcgaaagctacagccgtgatccgcgtacgactgccaagaaggccgaagcctatctgaaatcgctcggcattggcgatacggtctatgtcggcccggaagccgaattcttcgtcttcgacgatgtgaagttcaaggccgatccgttcaatacgggcttcaagctcgatagcgccgaattgccatccaacgacgacaccgattatgaaaccggcaatctcggccatcgtccgcgcgtcaagggcggctatttccccgttccgccaatcgacagcttgcaggacatgcgttccgaaatgctgaccgtgctctcggaaatgggtgtgacggttgaaaagcaccaccatgaagtcgcttccgcgcagcacgaactgggcacgaaattcgacacgctggtgcgcaacgccgacaagatgcagattcagaaatatgtcgtgcatcaggttgccaatgcctatggcaaaacggcaaccttcatgccgaagccggtctttggcgacaatggctccggcatgcatgttcacttctcgatctggaaagacggcaagccgaccttcgcaggcaatgaatatgctggtctgtcggaaaactgcctctacttcattggcggcgtcatcaagcacgcaaaagctgtgaatgccttcaccaacccgtccaccaactcctacaagcgtctggtgccgggctatgaagcgcctgttctgctggcctattccgcacgcaaccgttcggcttcctgccgcattccattcggctcctcgccgaaatcgaagcgtctcgaattccgcttcccggatccgtccgccaacccttatctctgcttctcggcccttctgatggcgggccttgacggcatcaagaacaagatccatccgggccaggccatggacaaggatctctacgacctgccgccgaaggaactgaagcagattccgaccgtctgcggctccctgcgtgaagctctacagtcgctcgacaaggatcgtgaattcctcaaggctggcggcgtgttctccgacgaccagatcgacagcttcatcgagctgaaaatggctgaagtgatgcgttttgaaatgacgccgcacccggtcgagttcgatatgtattactcggtataa

SEQ ID NO: 101360 - protein, 469 aa, Brucella melitensis 16M
MTTANDILKQIKDNDVKFVDLRFTDPKGKLHHVTMDIGLVDEDMFVDGVMFDGSSIAGWKAINESDMVLMPDPETAHIDPFFAQSTLVILCDILEPLSGESYSRDPRTTAKKAEAYLKSLGIGDTVYVGPEAEFFVFDDVKFKADPFNTGFKLDSAELPSNDDTDYETGNLGHRPRVKGGYFPVPPIDSLQDMRSEMLTVLSEMGVTVEKHHHEVASAQHELGTKFDTLVRNADKMQIQKYVVHQVANAYGKTATFMPKPVFGDNGSGMHVHFSIWKDGKPTFAGNEYAGLSENCLYFIGGVIKHAKAVNAFTNPSTNSYKRLVPGYEAPVLLAYSARNRSASCRIPFGSSPKSKRLEFRFPDPSANPYLCFSALLMAGLDGIKNKIHPGQAMDKDLYDLPPKELKQIPTVCGSLREALQSLDKDREFLKAGGVFSDDQIDSFIELKMAEVMRFEMTPHPVEFDMYYSV

SEQ ID NO: 101361 - DNA, 1434 bp, Corynebacterium glutamicum ATCC 13032; identical to SEQ ID NO: 32071
  CDS (1)..(1434): transl_table=11

SEQ ID NO: 101362 - protein, 477 aa, Corynebacterium glutamicum ATCC 13032; identical to SEQ ID NO: 32072

SEQ ID NO: 101363 - DNA, 1341 bp, Corynebacterium glutamicum ATCC 13032; identical to SEQ ID NO: 32073
  CDS (1)..(1341): transl_table=11

SEQ ID NO: 101364 - protein, 446 aa, Corynebacterium glutamicum ATCC 13032; identical to SEQ ID NO: 32074

SEQ ID NO: 101365 - DNA, 1344 bp, Methanosarcina acetivorans C2A
  CDS (1)..(1344): transl_table=11
atggtgcagatgaaaaagtgtacaactaaagaagatgtattagaggctgtaaaagaacgagacgtaaagtttatccggactcagttcacggatacactcggcatcatcaaaagctgggcaattcctgcagaacaactggaagaagcttttgaaaacggtgtaatgtttgatggttcttcgattcagggttttacaaggatcgaagagtccgatatgaaactcgtgcttgacccttcaacgttcaggatcctaccctggagacctgcaacaggcgcagtcgccagaattctcggagacgtataccttcccgatgggaaacccttccagggagacccaaggtatgtcctgaagaccgcaatcagcgaagctgagaagatgggtttctcaatgaacgtaggaccagaacttgaatttttccttttcaaacttgatgcaaatggaaacccgacaacggaacttaccgaccagggcggatacttcgacttcgctccccttgaccgtgcacaggatgtacgcagagacattgactatgccctggagcatatgggattccagatcgaagcttctcatcatgaagtcgcaccttcgcagcatgaaatcgacttcagattcagcgatgtacttaacacggccgataacgtcgtgaccttcaaatacgtggtaaagtcaatcgcctaccacaagggatactatgcaacctttatgccaaagcccctcttcggagaaaatggttcaggtatgcacagcaaccagtccctcttcaaaaatgggaaaaatgccttctacgacccggacactcctatgcagctttcccaggatgcaatgtattacatcggagggctgatgtcccacatcaaagagtttacagctattacaaacccggtgataaactcctacaagaggcttgtcccaggatatgaagctcctatctacattacctggtcctcaaagaacagaagttcccttatccgtatccctgcaacccgcggagaaggaaccagagtggaactcagatgtccggacccctcatgtaacccctatctggcttttgctcttatgctgagagccgggcttgacggaattaagagcaagatcgacccaggagaggcgacaaacgttaacattttccacctaacggaaaaagaacgtgcagaaagaagcattcactccctcccaggagacctcaaagaagcaatcgatgagatgaaaggcagccagttcgtaaaggaagtactcggagaacacgtctttagccattacctctgtgcaaaagaaatggaatgggacgaatataaggcaatcgttcatccctgggaacttgaaaaatacctccctatgctgtaa

SEQ ID NO: 101366 - protein, 447 aa, Methanosarcina acetivorans C2A
MVQMKKCTTKEDVLEAVKERDVKFIRTQFTDTLGIIKSWAIPAEQLEEAFENGVMFDGSSIQGFTRIEESDMKLVLDPSTFRILPWRPATGAVARILGDVYLPDGKPFQGDPRYVLKTAISEAEKMGFSMNVGPELEFFLFKLDANGNPTTELTDQGGYFDFAPLDRAQDVRRDIDYALEHMGFQIEASHHEVAPSQHEIDFRFSDVLNTADNVVTFKYVVKSIAYHKGYYATFMPKPLFGENGSGMHSNQSLFKNGKNAFYDPDTPMQLSQDAMYYIGGLMSHIKEFTAITNPVINSYKRLVPGYEAPIYITWSSKNRSSLIRIPATRGEGTRVELRCPDPSCNPYLAFALMLRAGLDGIKSKIDPGEATNVNIFHLTEKERAERSIHSLPGDLKEAIDEMKGSQFVKEVLGEHVFSHYLCAKEMEWDEYKAIVHPWELEKYLPML

SEQ ID NO: 101367 - DNA, 1389 bp, Streptomyces coelicolor A3(2); identical to SEQ ID NO: 32075
  CDS (1)..(1389): transl_table=11

SEQ ID NO: 101368 - protein, 462 aa, Streptomyces coelicolor A3(2); identical to SEQ ID NO: 32076

SEQ ID NO: 101369 - DNA, 1362 bp, Streptomyces coelicolor A3(2); identical to SEQ ID NO: 32077
  CDS (1)..(1362): transl_table=11

SEQ ID NO: 101370 - protein, 453 aa, Streptomyces coelicolor A3(2); identical to SEQ ID NO: 32078

SEQ ID NO: 101371 - DNA, 1410 bp, Xanthomonas campestris pv. campestris str. ATCC 33913
  CDS (1)..(1410): transl_table=11
atgtccgtggaaaatgttgaaaagctgatcaaggacaacaaggtcgagtttgtcgacctgcgcttcgtcgatatgcgtggcgtgcagcagcacatcacctttccggccagcatcatcgagccggcgttgttcgaagaaggcaagatgttcgacggcagctccatcgcgggttggaagggcatcaacgagtcggacatggtcctgctcccggacgcgggcaccgcttacctggatccgttcttcgccgatccgaccatcgtgctgacctgcgacatcctcgacccggccaccatgcagagctacgagcgcgatccgcgcggcattgcaaagcgtgccgaggcctatctgaagtcgtccggcaccgccgatcaggcgttctttggcccggagccggaattcttcatcttcgattcggtgcgcttcgccaatgacatgggccacaccttcttccaggtgggttcggaagaggcggcctggaacaccggcgccaagtacgacggcggcaacagcggttaccgtcccggcgtgaagggtggctacttcccggtgccgccgaccgacaccctgcatgacctccgtgcggaaatgatcaagacgctggagcaggtcggcatcgagaccgaggtgcaccaccacgaggtggcgaccgccggccagtgcgagatcggcaccaagttcagctcgctggtgcaaaaagccgacgaactgctgacgatgaagtacatcatcaagaacgtcgcctaccgcaacggcaagaccgccaccttcatgccgaagccgatcgtcggcgacaacggctcgggcatgcacgtgcaccagtcgctgaccaagggcggcgtgaacctgttctccggcgacggctacggcggcctgtcgcagatggcgctgtggtacatcggcggcatcttcaagcacgcccgcgccatcaatgccttcgccaactccggtaccaacagctacaagcgtttggttcctggttacgaagctccggtgatgctggcctattcggcgcgtaaccgatcggcctcgtgccgcattccgtgggtgaccaacccgaaggcgcgccgcatcgaaatgcgcttccccgatccgttgcagtccggctacctgaccttcaccgcgctgatgatggccggcctggacggcatcaagaaccagatcgacccgggcgcaccgagcgacaaggatctgtacgacctgccgccggaagaagagaagctgatcccgcaggtctgctccagcctggaccaggccctggaggcgctggacaaggatcgcgagttcctcaaggccggcggcgtgatgagcgacgacttcatcgacggctacatcgcattgaagatgcaggaagtcaccaagttccgcgccgcaacgcatccgctggagtaccagctgtactacggcaactga

SEQ ID NO: 101372 - protein, 469 aa, Xanthomonas campestris pv. campestris str. ATCC 33913
MSVENVEKLIKDNKVEFVDLRFVDMRGVQQHITFPASIIEPALFEEGKMFDGSSIAGWKGINESDMVLLPDAGTAYLDPFFADPTIVLTCDILDPATMQSYERDPRGIAKRAEAYLKSSGTADQAFFGPEPEFFIFDSVRFANDMGHTFFQVGSEEAAWNTGAKYDGGNSGYRPGVKGGYFPVPPTDTLHDLRAEMIKTLEQVGIETEVHHHEVATAGQCEIGTKFSSLVQKADELLTMKYIIKNVAYRNGKTATFMPKPIVGDNGSGMHVHQSLTKGGVNLFSGDGYGGLSQMALWYIGGIFKHARAINAFANSGTNSYKRLVPGYEAPVMLAYSARNRSASCRIPWVTNPKARRIEMRFPDPLQSGYLTFTALMMAGLDGIKNQIDPGAPSDKDLYDLPPEEEKLIPQVCSSLDQALEALDKDREFLKAGGVMSDDFIDGYIALKMQEVTKFRAATHPLEYQLYYGN

SEQ ID NO: 101373 - DNA, 1434 bp, Yersinia pestis KIM
  CDS (1)..(1434): transl_table=11
atgacaaatccgggagatataagtatgtccgctgaacatgttttgacgatgctgaatgagcacgaagtgaaatttgttgatttacgtttcactgataccaaagggaaagagcagcacatcacgatccctgctcatcaagtcaacgctgacttcttcgaagaaggcaaaatgtttgatggctcctcgattggtggctggaaaggcattaacgaatccgacatggtactgatgccagacgccagcactgccgttatggacccgttcttcgcagattcaacactgattatccgttgtgacattcttgagccaggcaccatgcagggctatgaccgcgatccacgttctatctccaaacgtgctgaagacttcctgaaatcttcaggtatcgctgataccgtgttgttcgggccagaaccagaattcttcctgtttgacgatatccgttttggtagcagcatcaatgggtcacacgtatccatcgatgacgtcgaaggcgcatggaactccagcaccaaatacgaaggcggcaacaaaggccaccgtcctgcagtaaaaggcggttacttccctgttcctccggtcgactctgcacaagacctccgttctgccatgtgtctgacgatggaagagatgggcttggtggtagaagcacaccaccacgaagtggctaccgcgggtcaaaacgaagtggctacccgcttcaataccatgaccaagaaagcagatgagatccagatttacaaatacgtcgtacacaacgtggcgcacgcatttggtaaaacagcgacctttatgccaaaaccgatgttcggcgataacggctcaggtatgcactgccatatgtctttgtccaagaacggtaataacctgttcgctggcgacaaatacggcggcctgtctgaaatcgccctgttctacatcggcggtatcatcaaacatgcgaaagccattaatgccttggctaacccgaccaccaactcctacaagcgtctggtcccaggttatgaagcaccggtcatgctggcatattcagcccgtaaccgttcagcttctatccgtattcctgttgttgccagcccgaaagctcgccgtattgaagcgcgtttccccgatcctgcggctaacccgtacctgtgcttcgccgcgctgttgatggctggccttgatggcatcatcaacaaaattcacccaggtgatgcgatggacaaaaacctgtatgacttgccgccggaagaagaagctgagattccaaaagttgccggttcactggacgaagccatggccgcattgaacgaagatcgcgagttcctgactcgtggtggcgtgttcaccgatgatgctatcgatgcgtatatcgagctacgtagagaagaaatggatcgcgtgcgtatgactccgcatcctgttgagttcgaactgtattacagcgtttaa

SEQ ID NO: 101374 - protein, 477 aa, Yersinia pestis KIM
MTNPGDISMSAEHVLTMLNEHEVKFVDLRFTDTKGKEQHITIPAHQVNADFFEEGKMFDGSSIGGWKGINESDMVLMPDASTAVMDPFFADSTLIIRCDILEPGTMQGYDRDPRSISKRAEDFLKSSGIADTVLFGPEPEFFLFDDIRFGSSINGSHVSIDDVEGAWNSSTKYEGGNKGHRPAVKGGYFPVPPVDSAQDLRSAMCLTMEEMGLVVEAHHHEVATAGQNEVATRFNTMTKKADEIQIYKYVVHNVAHAFGKTATFMPKPMFGDNGSGMHCHMSLSKNGNNLFAGDKYGGLSEIALFYIGGIIKHAKAINALANPTTNSYKRLVPGYEAPVMLAYSARNRSASIRIPVVASPKARRIEARFPDPAANPYLCFAALLMAGLDGIINKIHPGDAMDKNLYDLPPEEEAEIPKVAGSLDEAMAALNEDREFLTRGGVFTDDAIDAYIELRREEMDRVRMTPHPVEFELYYSV

SEQ ID NO: 101375 - DNA, 1416 bp, Thermosynechococcus elongatus BP-1
  CDS (1)..(1416): transl_table=11
atggcaacaccccaagaaatcttgaatttgatcgacagcaagtacgagctcatcgacttgaaatttactgacatgcccggtacgtggcaacacctcacggttcacaaaagccaaatcagtgaaagctcatttactgagggtgtgcccttcgacggctcaagtattcgtggttggaaagccatcaacgaatccgacatggtaatggtgccggatccaaataccgcgtgggaagaccccttcatgaaagaacccacccttagcctgatttgcaccatcaaagatccacgcaccggcgaactctacgatcgctgcccgcgctccattgccacccgtgccattgagtacctaaaagcaacaggcattggcgatacagcttactttggccccgaagctgagttctttgttttcgatgacgttcgctacgaccaaaaccaaaagtctggctactactacattgatagtattgaaggtgtttggaacagtggccgcgaagaagaagggggcaaccttggctacaaaatccgtggtaaagagggttacttccccgttgcccccacagacacgctgcaagacctgcgcacagaaatgctcttgacgatggccaagtgcggcgtgcccattgaaaagcatcaccacgaagtggccaccgccggtcagtgcgagttgggtttccgctttggcaccctcgttcaagctgctgactggctaatgacctataagtactgcgtcaagaatgttgcccgcaagcacggtaaagtggccacctttatgcccaagccggttttcaacgacaacggttcagggatgcacacccaccagtcgatttggaaagatggccagcccctgttctggggagacggctacgccaatttgagccagattgccctctggtatataggtggtatcctcaagcacgctccagcgctattggcgtttaccaacccaacaacgaactcctacaaacgactggttcccggctttgaggcccccgtgaaccttgcctattcccaaggcaaccgctccgcctctgtgcggattcccctcacgggtcccaatcccaaagcgaagcgcctagagttccgctgtcccgatgccaccagtaacccctaccttgcctttgcggcgatgctgtgcgctggcattgatggcattaagaatcaaattgatcccggtagcccccttgatgtcgatatttacgacctcagccctgaagaactggccaagattccctcgactcctggttcgctgatggcggctttggaaaacctgcaaaaggatcatagcttcctcacagcggggggtgtctttagcgaagactttatcctcaactggattcagtacaagctggacacagaagtcattcccatgtcactgcgtcctcacccctatgaatttgccctctactttgatgcctag

SEQ ID NO: 101376 - protein, 471 aa, Thermosynechococcus elongatus BP-1
MATPQEILNLIDSKYELIDLKFTDMPGTWQHLTVHKSQISESSFTEGVPFDGSSIRGWKAINESDMVMVPDPNTAWEDPFMKEPTLSLICTIKDPRTGELYDRCPRSIATRAIEYLKATGIGDTAYFGPEAEFFVFDDVRYDQNQKSGYYYIDSIEGVWNSGREEEGGNLGYKIRGKEGYFPVAPTDTLQDLRTEMLLTMAKCGVPIEKHHHEVATAGQCELGFRFGTLVQAADWLMTYKYCVKNVARKHGKVATFMPKPVFNDNGSGMHTHQSIWKDGQPLFWGDGYANLSQIALWYIGGILKHAPALLAFTNPTTNSYKRLVPGFEAPVNLAYSQGNRSASVRIPLTGPNPKAKRLEFRCPDATSNPYLAFAAMLCAGIDGIKNQIDPGSPLDVDIYDLSPEELAKIPSTPGSLMAALENLQKDHSFLTAGGVFSEDFILNWIQYKLDTEVIPMSLRPHPYEFALYFDA

SEQ ID NO: 101377 - DNA, 1437 bp, Bifidobacterium longum NCC2705
  CDS (1)..(1437): transl_table=11
gtgaccgagctcaagtccaaggaagacgtcgaggcccttatcaacaaggaaggcatcgagtatgtctccgtccgtttcaccgatcttatcggcgttcagcagcacttcaccgtgccggctagcgaattcctgaaggacgctttcaccgacggcatgccgttcgatggttcctccgttcagggcttccaggccatcaacgagtccgacatgaagctggtcccggacgttgagacctctttcgttgacccgttccgcaagcacaagacccttgacgtggccttctccatcgtcgacccgctgaccgacgagccgtactcccgcgacccgcgtcaggtcgccggcaaggccgaggcctacctgaagtccaccggcatcgccgacaccgcatccttcgctcctgaggccgagttcttcatcttcgacaaggtccgcttcgagaacggcatgaaccgctccttctacgaggtcgactccatcgaagctccgtggaactccggcgttgacgttgaggaagacggcaccccgaacatcggtttcaagaatcgcgtcaagaagggctacttcccggttccgccgattgaccacacccaggatctgcgcgacgatatggtcgccaacctgcagaaggtcggcctgatcctcgagcgttcccaccacgaggtcgccggcgctggccagcaggagatcaactaccgcttcaacaccctgcagcacgcaggcgatgacctgatgaagtacaagtacgtcgtccacgagaccgccgctctggccggcaaggctgcgaccttcatgccgaagccgatcgccgacgacaacggcactggcatgcactgccaccagtccctgtggaaggacggcaagccgctgttctacgacgagaagggctacgctggtctgtccgatctggctcgctggtacatcggcggtctgatcaagcactcctcctccgtgctggccttcaccaacccatccctgaactcctaccaccgtctggtcccgggcttcgaggctccggtcaacctggtgtactccgctcgtaaccgttctgccgccatccgtattccgctggccggcacctccccggctgccaagcgcatcgagttccgcgctccggatccgtcctgcaacccgttcctggccttctccgctcagctgatggctggcctggacggcatcctgaaccacatcgagccgccggagccggtcgacaaggacctctacgagctgccgccggaagagcacgctggcatcaagcaggtgccaagctccctggccgaggctatggacgccctggaagaggaccacgacttcctcaccgccggcgacgtgttcaccgacgacctgatcgagacctggattggcctcaagcgcgacgagatcgaccaggctcgcctgtctccgaccccgctcgagtacgagctctacttccacatctga

SEQ ID NO: 101378 - protein, 478 aa, Bifidobacterium longum NCC2705
MTELKSKEDVEALINKEGIEYVSVRFTDLIGVQQHFTVPASEFLKDAFTDGMPFDGSSVQGFQAINESDMKLVPDVETSFVDPFRKHKTLDVAFSIVDPLTDEPYSRDPRQVAGKAEAYLKSTGIADTASFAPEAEFFIFDKVRFENGMNRSFYEVDSIEAPWNSGVDVEEDGTPNIGFKNRVKKGYFPVPPIDHTQDLRDDMVANLQKVGLILERSHHEVAGAGQQEINYRFNTLQHAGDDLMKYKYVVHETAALAGKAATFMPKPIADDNGTGMHCHQSLWKDGKPLFYDEKGYAGLSDLARWYIGGLIKHSSSVLAFTNPSLNSYHRLVPGFEAPVNLVYSARNRSAAIRIPLAGTSPAAKRIEFRAPDPSCNPFLAFSAQLMAGLDGILNHIEPPEPVDKDLYELPPEEHAGIKQVPSSLAEAMDALEEDHDFLTAGDVFTDDLIETWIGLKRDEIDQARLSPTPLEYELYFHI

SEQ ID NO: 101379 - DNA, 1410 bp, Brucella suis 1330
  CDS (1)..(1410): transl_table=11
atgacgactgccaacgatattctgaaacagatcaaagataacgacgtcaagttcgtcgaccttcgcttcaccgatccgaagggcaagctccatcacgttacgatggatatcggcctcgtggacgaagacatgttcgtcgacggtgtcatgttcgacggctcttcgatcgcaggctggaaggccatcaacgaatccgacatggttttgatgcccgatccggaaacggctcatatcgacccgttcttcgcccagtccacgcttgtcattctctgcgatatccttgagccgctttccggcgaaagctacagccgtgatccgcgtacgactgccaagaaggccgaagcctatctgaaatcgctcggcattggcgatacggtctatgtcggcccggaagccgaattcttcgtcttcgacgatgtgaagttcaaggccgatccgttcaatacgggcttcaagctcgatagcgccgaattgccatccaacgacgacaccgattatgaaaccggcaatctcggccatcgtccgcgcgtcaagggcggctatttccccgttccgccaatcgacagcttgcaggacatgcgttccgaaatgctgaccgtgctctcggaaatgggtgtgacggttgaaaagcaccaccatgaagtcgcttccgcgcagcacgaactgggcacgaaattcgacacgctggtgcgcaacgccgacaagatgcagattcagaaatatgtcgtgcatcaggttgccaatgcctatggcaaaacggcaaccttcatgccgaagccggtctttggcgacaatggctccggcatgcatgttcacttctcgatctggaaagacggcaagccgaccttcgcaggcaatgaatatgctggtctgtcggaaaactgcctctacttcattggcggcgtcatcaagcacgcaaaagctgtgaatgccttcaccaacccgtccaccaactcctacaagcgtctggtgccgggctatgaagcgcctgttctgctggcctattccgcacgcaaccgttcggcttcctgccgcattccattcggctcctcgccgaaatcgaagcgtctcgaagtccgcttcccggatccgtccgccaacccttatctctgcttctcggcccttctgatggcgggccttgacggcatcaagaacaagatccatccgggccaggccatggacaaggatctctacgacctgccgccgaaggaactgaagcagattccgaccgtctgcggctccctgcgtgaagctctacagtcgctcgacaaggatcgtgaattcctcaaggctggcggcgtgttctccgacgaccagatcgacagcttcatcgagctgaaaatggctgaagtgatgcgttttgaaatgacgccgcacccggtcgagttcgatatgtattactcggtataa

SEQ ID NO: 101380 - protein, 469 aa, Brucella suis 1330
MTTANDILKQIKDNDVKFVDLRFTDPKGKLHHVTMDIGLVDEDMFVDGVMFDGSSIAGWKAINESDMVLMPDPETAHIDPFFAQSTLVILCDILEPLSGESYSRDPRTTAKKAEAYLKSLGIGDTVYVGPEAEFFVFDDVKFKADPFNTGFKLDSAELPSNDDTDYETGNLGHRPRVKGGYFPVPPIDSLQDMRSEMLTVLSEMGVTVEKHHHEVASAQHELGTKFDTLVRNADKMQIQKYVVHQVANAYGKTATFMPKPVFGDNGSGMHVHFSIWKDGKPTFAGNEYAGLSENCLYFIGGVIKHAKAVNAFTNPSTNSYKRLVPGYEAPVLLAYSARNRSASCRIPFGSSPKSKRLEVRFPDPSANPYLCFSALLMAGLDGIKNKIHPGQAMDKDLYDLPPKELKQIPTVCGSLREALQSLDKDREFLKAGGVFSDDQIDSFIELKMAEVMRFEMTPHPVEFDMYYSV

SEQ ID NO: 101381 - DNA, 1422 bp, Leptospira interrogans serovar Lai str. 56601
  CDS (1)..(1422): transl_table=11
atgtccagaacacctagtgaagttattgcctatgcaaaggcgaataacgttctattctatgatttccgttttacggatatcaaaggagcttggcaccacgtatcatatcacgccggttccattaacgaagattctttcaaaggcttaccgtttgacggaagttctatcccagcttggcaaccgattgatcggtccgatatgcagttgattccggatacaagcgcgatctttttagatccttttactgctgattctacacttgtagttttctgcgacgtattcgatatttataaaggtacactttacgaaaaatgtcctagatctatcgcgaaaaaagctctcaaataccttgagtcttctggtcttgcggataccgcttatttcggacctgaaaatgaatttttcatctttgataatatcaaagtaagagacgcgatcaatgttcaatattatgaaattgattcttccgaaggaatttggaattctcatactgattttcctggttctacaaacactggtcaccgtcctggtactaagggaggttattttccggtagctccagttgattctcaagtggatttgagagcggacattgtgaaaactcttcaccagatcggtatggaaacttttgttgttcaccatgaagtggctcaaggtcagggcgagatcggagtgaaatttggtactttgattgaagcggcggataacgttcaaaaattgaaatatgttgtaaagatggtcgcccacaaatatggtaaaacggctacttttatgcctaaacctctttatggagacaatggtaacggtatgcactgtcaccaatccatttggaaaaatggtgtgaacctttttgcaggtaaaggttatcaaaatttaagtgatactgcaatgcattatatcggtggggttctttctcacgctaagtcttgtgctgcttttacaaatgcttctacaaattcttataagagacttcttcctggttttgaagctccttctattttagcttattcggctcagaaccgttctgcttcttgtagaattcctttcgtaaacggagacaaggcaagaagagttgagttccgttttcctgattcttccgctaatccttatcttgcttttgcggcgatgcttatggcgggtatcgacggggttcaaaagaaaatcgatccggggcctcctcgggaagaagatctttttgaactctctttagatgaaattcgtgaaaaaggaattcagcaaatgcctcatactctcagggaatctgtggagcatatgcttcttgataaagaatttctgaagaaaggtgacgtgtttacggaagagtttatccagacttataaagcgtataagtttgaaacggaaatttggccttgggaaggaagacctcatccgttcgaatttttgactacttattcctgctaa

SEQ ID NO: 101382 - protein, 473 aa, Leptospira interrogans serovar Lai str. 56601
MSRTPSEVIAYAKANNVLFYDFRFTDIKGAWHHVSYHAGSINEDSFKGLPFDGSSIPAWQPIDRSDMQLIPDTSAIFLDPFTADSTLVVFCDVFDIYKGTLYEKCPRSIAKKALKYLESSGLADTAYFGPENEFFIFDNIKVRDAINVQYYEIDSSEGIWNSHTDFPGSTNTGHRPGTKGGYFPVAPVDSQVDLRADIVKTLHQIGMETFVVHHEVAQGQGEIGVKFGTLIEAADNVQKLKYVVKMVAHKYGKTATFMPKPLYGDNGNGMHCHQSIWKNGVNLFAGKGYQNLSDTAMHYIGGVLSHAKSCAAFTNASTNSYKRLLPGFEAPSILAYSAQNRSASCRIPFVNGDKARRVEFRFPDSSANPYLAFAAMLMAGIDGVQKKIDPGPPREEDLFELSLDEIREKGIQQMPHTLRESVEHMLLDKEFLKKGDVFTEEFIQTYKAYKFETEIWPWEGRPHPFEFLTTYSC

SEQ ID NO: 101383 - DNA, 1434 bp, Corynebacterium efficiens YS-314
  CDS (1)..(1434): transl_table=11
gtggcgtttaacaccccggaagaagtaaccaagttcatcaaggatgaaaacgttgagttcgtcgatgtccgattcaccgaccttcccggaatcgagcagcacttcagcatccccgcatccgctcttgatgaggacgccatcgaggagggcctcgccttcgacggttcctccatccgtggtttcaccaccattgatgaatccgacatgaacctgctgccggatctggccaccgcgaagatcgatccgttccgcaaggcgaagaccctgaacatcaagttcttcgtccatgaccccttcacccgtgaggcgttctcccgcgacccccgcaatgtggcacgtaaggccgagcagttcctggcctccaccggcatcgccgacacctgcaacttcggcgccgaggccgagttctatctcttcgactccgtccgttactccaccgacatcaactccggtttctaccatgtggacaccaacgagggttggtggaaccgtggccgtgagaccaacctcgatggcacccccaacaccggttccaagaaccgcctcaagggcggttacttccccgtcgcaccctacgaccagaccgtggacgtccgcgatgagatggtccgcaacctgcgtgacgccggtttccacctggagcgtttccaccacgaggtcggtggcggccagcaggagatcaactaccgcttcaacaccctcctgcacgcagccgatgacattcagaccttcaagtacatcgtgaagaacaccgcagccctgcacggcaaggctgccaccttcatgcccaagccgctggccggtgacaacggctccggcatgcacgcccaccagtccctgtggaaggacggcaagccactcttccacgacgagtccggctacgccggcctgtccgacatcgcccgttactacatcggtggcatcctccaccacgccggtgcggtcctggcgttcaccaacccgaccctgaactcctaccatcgcctggtgccgggcttcgaggcccccatcaacctggtctactcccagcgcaaccgctccgcggccgtgcgtatcccgatcaccggttccaacccgaaggccaagcgcatcgagttccgcgcaccggacccatccggcaacccctacctgggcttcgccgccatgatgatggccggcctggacggtgtgaagaaccgcatcgagccgcacgcaccggtggacaaggacctctacgagctcccaccggaggaggccgcctccatcccgcaggcaccgacctccctggaggcatccctgaaggccctgcaggaggactccgacttcctcaccgagtccgacgtgttcaccgaggacctcatcgaggcctacatccagtacaagtacgacaacgagatcaccccggtccgcctgcgccccaccccgcaggagttcgagctgtacttcgactgctag

SEQ ID NO: 101384 - protein, 477 aa, Corynebacterium efficiens YS-314
MAFNTPEEVTKFIKDENVEFVDVRFTDLPGIEQHFSIPASALDEDAIEEGLAFDGSSIRGFTTIDESDMNLLPDLATAKIDPFRKAKTLNIKFFVHDPFTREAFSRDPRNVARKAEQFLASTGIADTCNFGAEAEFYLFDSVRYSTDINSGFYHVDTNEGWWNRGRETNLDGTPNTGSKNRLKGGYFPVAPYDQTVDVRDEMVRNLRDAGFHLERFHHEVGGGQQEINYRFNTLLHAADDIQTFKYIVKNTAALHGKAATFMPKPLAGDNGSGMHAHQSLWKDGKPLFHDESGYAGLSDIARYYIGGILHHAGAVLAFTNPTLNSYHRLVPGFEAPINLVYSQRNRSAAVRIPITGSNPKAKRIEFRAPDPSGNPYLGFAAMMMAGLDGVKNRIEPHAPVDKDLYELPPEEAASIPQAPTSLEASLKALQEDSDFLTESDVFTEDLIEAYIQYKYDNEITPVRLRPTPQEFELYFDC

SEQ ID NO: 101385 - DNA, 1377 bp, Pseudomonas putida KT2440; identical to SEQ ID NO: 32099
  CDS (1)..(1377): transl_table=11

SEQ ID NO: 101386 - protein, 458 aa, Pseudomonas putida KT2440; identical to SEQ ID NO: 32100

SEQ ID NO: 101387 - DNA, 1383 bp, Pseudomonas putida KT2440; identical to SEQ ID NO: 32101
  CDS (1)..(1383): transl_table=11

SEQ ID NO: 101388 - protein, 460 aa, Pseudomonas putida KT2440; identical to SEQ ID NO: 32102

SEQ ID NO: 101389 - DNA, 1431 bp, Bradyrhizobium japonicum USDA 110
  CDS (1)..(1431): transl_table=11
atggttgcgaaatgtacgacagccgaagacctcgtgaaggcgatcacggacgagaaagtccagatgatcgatttgcggttcaccgacctgccgggggtgtggcaacatttttccgtccccccgagcgcggtgaatgccgatgcactcaatgagggcattggattcgatggctcatcgatccgaggcttccaggagatccaggaaagcgacatgctggtcgtcgccgatccgacgacggcattcgtcgacccctatagtccggccaaaacgctggttctcatctgcaacatccgcgaccccgtgaccggccagtcctacagccgggatgcccgctacatcgcccagaaagccgaaatccaccttaagggcaccgggcgcgccgatacgagctatttcggcccggaagcggagttcttcgtcttcgacgaggtgcgctacgcacagggcatcaactacgccatgcacgcagtcgactccagcgaaggcagctggaacaccggctctgaggaagggccgaacctcggccacaaaccgcgcccgaaggagggatactttcccgttcccccgaccgacagcatgcaggcgctacgcaccgaaatggtgctgacaatggaatctctggggatccagatcgaggcccatcaccatgaagtcgcaaccggcggccaaaacgagatcgacatgcgcttcaccaccctcacccggatggccgacaacctgatgatctacaaatacgtggtgaagaacaccgcgcatcagcacggcaagaccgcgacattcatgccgaagccgctgttcgaggacaacgcttcgggcatgcacgttcaccaatcgctctggaagggtgagaccaatctgttctacgacaaaggtgactacgccgagttgagccagctcggccgctactatatcggcgggctattgagccacgcctgggcgttgtgcgggctttgcgcccccacgacgaattcctatcggcgtctggtgccgggctatgaagctccgatcaacctcgtctactcccagcgcaatcgctccgcctgctgccggattccaatgtattcgccgaatccgcgcgccaagcgcgtcgagtttcgttcgccggatccgtcctgcaatccctacctggccttcgcggcaatgctgatggctggcctcgacggtatcgacaagcagatcgaccccggcagcccgatcgacaagaatctctacgacctcccgcctactgaggcgaaggaggtgaagtccacgccaggatcgctggaccaggcgctcgacgcgctcgagcgcgatcacgcattcctgctacgcggcgacgtcttcaccgccgacgtgatcgaaacctggctcgactacaagcgcaagaaggaggtcgacccgatccgcctgcgacctcatccctacgagttccatctctactacgacatctag

SEQ ID NO: 101390 - protein, 476 aa, Bradyrhizobium japonicum USDA 110
MVAKCTTAEDLVKAITDEKVQMIDLRFTDLPGVWQHFSVPPSAVNADALNEGIGFDGSSIRGFQEIQESDMLVVADPTTAFVDPYSPAKTLVLICNIRDPVTGQSYSRDARYIAQKAEIHLKGTGRADTSYFGPEAEFFVFDEVRYAQGINYAMHAVDSSEGSWNTGSEEGPNLGHKPRPKEGYFPVPPTDSMQALRTEMVLTMESLGIQIEAHHHEVATGGQNEIDMRFTTLTRMADNLMIYKYVVKNTAHQHGKTATFMPKPLFEDNASGMHVHQSLWKGETNLFYDKGDYAELSQLGRYYIGGLLSHAWALCGLCAPTTNSYRRLVPGYEAPINLVYSQRNRSACCRIPMYSPNPRAKRVEFRSPDPSCNPYLAFAAMLMAGLDGIDKQIDPGSPIDKNLYDLPPTEAKEVKSTPGSLDQALDALERDHAFLLRGDVFTADVIETWLDYKRKKEVDPIRLRPHPYEFHLYYDI

SEQ ID NO: 101391 - DNA, 1449 bp, Tropheryma whipplei str. Twist
  CDS (1)..(1449): transl_table=11
gtgggacgtggtcagaggtgctgtgtgtttgaaaatgcaaaagaggcagctgagtatataaaatcgaatcaaattgaagtgcttgatgttcgcttctgtgattttctcggcgctcaacatcattttgccgtccctgctcacgcagtggatgatgagttttttcagtcaccccaggtctttgatgcttcctctctgaggggctatgcggatataaaccattcagatatgcttcttgtcgcagatccatcgacgtcctatattgacccgtttagacaccacaaaacccttgcgatgatctttgatgtgcacgatccacgcacgggggacgtttacgagcgcgactcacgtaatgtggctaaaaaggcagaaaagtacctcgcggggtgccgttttgcagatacagcgtatttcgcagccgaagctgagtttttcatctttgatgacgttcggttcaagatcagcaatcactcatcatcctattctgttgattcagaggaaggtatttggaactcatcacgcaggaaagggggtgggaaccttggtaatcagctcaaacacaagggaggatacgccccccttccccctgcggatcaacacgccgacctgcgcgatgacataatgaatgccctaacaaaggttggtctgcgtgttgaaaaaggtcatcatgaagctggctccgcgggtcaaggtgagataaattacagatttaacacactcgtcaatgcagcagatgatttgctgaaattcaaatatgtcgtcaaaaacacagcacatgaatggggaaaaagcgctacctttatgccaaagccaattgccggagacaatgggtccgggatgcacactcatcagtcactgtggaaaaatggaaaacccctgttctacagtgaaaccgggtatgccaatttgagcgatatcgccctgtggtacataggtggcctgctaaaacatggccctgctctagcagcatttacgaacccgtcaacgaactcatacaagagacttgttgccggatttgaagcaccaaccagtctcgtttactctgcgggcaaccgttcggctgctatcaggatccccccaacaatcggagctgaaggcagtaaaagaattgaatacagagtgccggactcctcttcaaatccatatctcgcgttttctgccttgcttatggcaggaatagacggaataaagaataaaatacacccgggcagcccggttgagcagaatatgtacgagctcacaaaggagcagtcaagggacctgcgatatctaccaagctcactcagcgatgcactgcgtgctcttgagcaagactgtgatttcctccttgaggggaatgtattcacccgtgaattcattagcgcatggattgattacaagaggaagaatgagcttaaccggattgcgcagtatcctcatccacttgaatttgggatgtattatggggtgtga

SEQ ID NO: 101392 - protein, 482 aa, Tropheryma whipplei str. Twist
MGRGQRCCVFENAKEAAEYIKSNQIEVLDVRFCDFLGAQHHFAVPAHAVDDEFFQSPQVFDASSLRGYADINHSDMLLVADPSTSYIDPFRHHKTLAMIFDVHDPRTGDVYERDSRNVAKKAEKYLAGCRFADTAYFAAEAEFFIFDDVRFKISNHSSSYSVDSEEGIWNSSRRKGGGNLGNQLKHKGGYAPLPPADQHADLRDDIMNALTKVGLRVEKGHHEAGSAGQGEINYRFNTLVNAADDLLKFKYVVKNTAHEWGKSATFMPKPIAGDNGSGMHTHQSLWKNGKPLFYSETGYANLSDIALWYIGGLLKHGPALAAFTNPSTNSYKRLVAGFEAPTSLVYSAGNRSAAIRIPPTIGAEGSKRIEYRVPDSSSNPYLAFSALLMAGIDGIKNKIHPGSPVEQNMYELTKEQSRDLRYLPSSLSDALRALEQDCDFLLEGNVFTREFISAWIDYKRKNELNRIAQYPHPLEFGMYYGV

SEQ ID NO: 101393 - DNA, 1410 bp, Vibrio parahaemolyticus RIMD 2210633
  CDS (1)..(1410): transl_table=11
atgtcagtagaaaacgttctatcgctgatccaagaaaacgaagtaaagtttgttgacctacgcttcactgatacaaaaggtaaagagcagcacatttcgattcctgctcaccaaatcgatgcagacttcttcgaagaaggtaaaatgttcgatggttcatcagttgctggctggaaaggcatcaacgagtcagacatggtaatgatgccagacgcatcttcagctgtgcttgacccattcacggaagatgcaacgctaaacatccgttgtgacatcctagaacctgcaacaatgcaaggttacgaccgtgacccacgctctatcgcaaaacgcgctgaagactacatgcgctcaacaggtatcgcagatacagtgcttgttggtccagagccagaattcttcctattcgatgacgtgaagttctctaacgacatgtcaggttctttcttcaagattgacgacatcgaagcagcatggaacacaggcagcgacatcgaaggcggtaacaaaggtcaccgtccaggcgttaaaggcggttacttcccagtagctcctgttgactcttctcaagacatccgctctgcaatgtgtctaatcatggaagaaatgggcctagttgttgaagcgcaccaccacgaagtggcgactgcgggtcaaaacgaaatcgcaactcgttttaatacgctaacaacgaaagctgacgaaatccaaatttacaaatacgtagtacataacgttgctcacgcatttggtaaaacagcgacattcatgcctaaaccactcgttggcgacaacggctctggcatgcacgttcaccaatctctagcaaaagacggcgttaacctgtttgctggcgacaagtacggcggtctatctgaaacagcgctttactacatcggcggtatcatcaaacacgctcgtgcaatcaacgcgtttgctaacccatcaacaaactcgtacaagcgtcttgtacctggatttgaagcaccagttatgcttgcttactctgcacgtaaccgttcagcttctatccgtatcccagtggtaccaagcccgaaagcacgtcgtatcgaagctcgcttcccagatccagcagcaaacccatacctagcgtttgcttgtctactgatggctggtcttgacggtatcaagaacaagatccacccaggcgaagcgatggacaaagacctttacgatctaccagcagaagaagcagctgagattcctaaagtggctgagtctctagaagtggctctaaatgcactaaacgaagaccgtgagttcttaacagcgggcggcgtattctctgacgactttatcgattcttacatcgcacttaagtcaaaagacgttgagcgcatcaacatggcaactcacccacttgagttcgaactttactactctgtataa

SEQ ID NO: 101394 - protein, 469 aa, Vibrio parahaemolyticus RIMD 2210633
MSVENVLSLIQENEVKFVDLRFTDTKGKEQHISIPAHQIDADFFEEGKMFDGSSVAGWKGINESDMVMMPDASSAVLDPFTEDATLNIRCDILEPATMQGYDRDPRSIAKRAEDYMRSTGIADTVLVGPEPEFFLFDDVKFSNDMSGSFFKIDDIEAAWNTGSDIEGGNKGHRPGVKGGYFPVAPVDSSQDIRSAMCLIMEEMGLVVEAHHHEVATAGQNEIATRFNTLTTKADEIQIYKYVVHNVAHAFGKTATFMPKPLVGDNGSGMHVHQSLAKDGVNLFAGDKYGGLSETALYYIGGIIKHARAINAFANPSTNSYKRLVPGFEAPVMLAYSARNRSASIRIPVVPSPKARRIEARFPDPAANPYLAFACLLMAGLDGIKNKIHPGEAMDKDLYDLPAEEAAEIPKVAESLEVALNALNEDREFLTAGGVFSDDFIDSYIALKSKDVERINMATHPLEFELYYSV

SEQ ID NO: 101395 - DNA, 1341 bp, Enterococcus faecalis V583
  CDS (1)..(1341): transl_table=11
atgacaagaaaagccaaaacggcagaagagattaaacatattgcagaagaggaaaacgtacgttttttacgactaatgtttaccgacattatgggaacaattaaaaatgttgaagttcctgtgagtcagctagataaagtattagataataaaatgatgtttgatgggtcatccattgaaggattcgttcgtatcgaagaaagtgacatgtatttataccctgacctatctacatggatgatttttccgtgggaaagcgaccatggaaaagttgcgcgcttaatttgtgatatttacaatcctgatggtaccccttttgccggagatccccgcggtaatttaaaacgcgccttagcagatatgaaagaattaggctttacttcttttaacttaggaccagaaccagaatttttcctatttaaattagatgagaatggtgaaattaccactgacttgaatgataaaggtggctattttgattttgcaccaaccgatttaggtgaaaattgtcgccgtgatattgttttagagttagaaagtttaggctttgaagtggaagcttcacatcatgaagtagcacctggtcaacatgaaattgactttaaatatgctgatgtagttgatgcttgtgacaatattcaaacgttcaaattagttgtgaaaactattgcgcgtaaacatggcttgcatgcaacatttatgccaaaacctttgtttggaattaatggttctggtatgcactgcaatatgtcattatttaatgaagaaggtaatgttttttatgacgagtcaggagagatgggcttaagccaaactgcgtatcatttcttaggtggtttattaaaacatgcccgtgcctatactgcggtatgtaacccaacagtgaactcttataaacgcttggtaccaggttatgaagcacctgtttatgtagcttggagcggcagaaatcgttcaccactcattcgagttcctgaatctcgtggtttatcgactcgtttagaattacgttctgtcgatccttcagcgaatccgtatttaacaatggctgtcttattacaagcaggtttggatggtattcgtaatgaacttacaccaccgccagcagttgatcgtaacatttatgtgatgaatgaggaagaacgtcaacatgcacaaattgaagatttgccatcaaccttacacaatgccatcaaagaattacgtaaagatcaagtaatgattgatgcattaggtcgtcatatttttgccaattttgtagaagcgaaacgaatggaatgggcagccttccgtcaaaccgtttctgaatgggaaagagaacaatatttggagttgtactaa

SEQ ID NO: 101396 - protein, 446 aa, Enterococcus faecalis V583
MTRKAKTAEEIKHIAEEENVRFLRLMFTDIMGTIKNVEVPVSQLDKVLDNKMMFDGSSIEGFVRIEESDMYLYPDLSTWMIFPWESDHGKVARLICDIYNPDGTPFAGDPRGNLKRALADMKELGFTSFNLGPEPEFFLFKLDENGEITTDLNDKGGYFDFAPTDLGENCRRDIVLELESLGFEVEASHHEVAPGQHEIDFKYADVVDACDNIQTFKLVVKTIARKHGLHATFMPKPLFGINGSGMHCNMSLFNEEGNVFYDESGEMGLSQTAYHFLGGLLKHARAYTAVCNPTVNSYKRLVPGYEAPVYVAWSGRNRSPLIRVPESRGLSTRLELRSVDPSANPYLTMAVLLQAGLDGIRNELTPPPAVDRNIYVMNEEERQHAQIEDLPSTLHNAIKELRKDQVMIDALGRHIFANFVEAKRMEWAAFRQTVSEWEREQYLELY

SEQ ID NO: 101397 - DNA, 1410 bp, Streptomyces avermitilis MA-4680
  CDS (1)..(1410): transl_table=11
atgttccagaacgccgacgaggccaagaagtacatcgcggacgaggacgtcaagttcgtcgacgtccggttctgcgacctgccgggcgtgatgcagcacttcacgattccggcggaggccttcgacccggccgaggagctggccttcgacggctcctcgatccgcggcttccaggccatccacgagtccgacatggcgctccgcgccgacctgtccaccgcgcgcgtcgaccccttccgccgcgacaagacggtcaacatcaacttcttcatccacgacccgatcacgggcgagcagtactcccgtgacccgcgcaacgtggcgaagaaggccgaggcctacctcgcgtcgaccggcatcgccgacaccgcgtacttcggccccgaggccgagttctacgtcttcgacagcgtgcgcttcaagaccgcggagaacgagtccttctaccacatcgactccgaggccggcgcctggaacaccggtgcgatcgaggacaaccgcggctacaaggtccgctacaagggcggttacttcccgaccccgccggtcgaccacttcgccgacctgcgtgccgagatctccctggagctggccaactccggcctccaggtcgagcgccagcaccacgaggtgggcaccgccggccaggccgagatcaactacaagttcaacacgctgctcgccgcggccgacgacctccagctcttcaagtacatcgtgaagaacgtcgcctggcgcaacggcaagaccgcgaccttcatgccgaagccgatcttcggtgacaacggctcgggcatgcacgtccaccagtcgctgtgggccaatggcgacccgctgttctacgacgaggccggttacgcgggcctctcggacaccgcccgctactacatcggcggcatcctcaagcacgccccgtcgctgctggccttcaccaacccgacggtgaactcgtaccaccgtctggtcccgggcttcgaggccccggtcaacatggtctactcgcagcgcaaccgctcggccgcgatgcgtatcccgatcaccggctcgaacccgaaggccaagcgcgtcgagttccgcgccccggactcctccggcaacccgtacctcgccttctcggcgctgctgctcgcgggcctcgacggcatcaagaacaaggtcgagccggccgagccgatcgacaaggacctctacgagctggcccccgaggagcacgcgagcgtcgcgcaggtcccgacctcgctcccggccgtgctcagcgccctcgaggccgaccacgagtacctgctccagggcaacgtcttcacgcccgacctgatcgagacgtggatcgactacaagcgcacgaacgagatcgccccgctccagctgcgcccgcacccgcacgagttcgagctctacttcgacgtctaa

SEQ ID NO: 101398 - protein, 469 aa, Streptomyces avermitilis MA-4680
MFQNADEAKKYIADEDVKFVDVRFCDLPGVMQHFTIPAEAFDPAEELAFDGSSIRGFQAIHESDMALRADLSTARVDPFRRDKTVNINFFIHDPITGEQYSRDPRNVAKKAEAYLASTGIADTAYFGPEAEFYVFDSVRFKTAENESFYHIDSEAGAWNTGAIEDNRGYKVRYKGGYFPTPPVDHFADLRAEISLELANSGLQVERQHHEVGTAGQAEINYKFNTLLAAADDLQLFKYIVKNVAWRNGKTATFMPKPIFGDNGSGMHVHQSLWANGDPLFYDEAGYAGLSDTARYYIGGILKHAPSLLAFTNPTVNSYHRLVPGFEAPVNMVYSQRNRSAAMRIPITGSNPKAKRVEFRAPDSSGNPYLAFSALLLAGLDGIKNKVEPAEPIDKDLYELAPEEHASVAQVPTSLPAVLSALEADHEYLLQGNVFTPDLIETWIDYKRTNEIAPLQLRPHPHEFELYFDV

SEQ ID NO: 101399 - DNA, 1407 bp, Nitrosomonas europaea ATCC 19718
  CDS (1)..(1407): transl_table=11
gtggcagctgatgttttaaaaatgattcaggatcatgaagtcaagttcgttgatctgcgcttcaccgacaccaacggcaaagaacatcatgtcacggtccccgcacataccttcgataccgataaatttgaagatggccacgcattcgacggatcctctattgccggctggaaaaacattcacgcgtccgacatgctgctcatgcccgacccggaaaccgccgcactggatcctttcatggaagaaaccacactgctgctgacctgcgatgtcgtcgatcctgctgacgggcagggatacaaccgtgatccgcgctcactggccaaacgcggtgagacttatctgaaatccaccggtatcggcgatatcgcctactttggcccggagctggaatttttcatttttgattcggtccgctggcataccgacatgtccggatgtttcgtcaaaatcgaatcggaagaagctgcctggagctccaaaaaacgctacgaaaaaagcaataacggttatcggcccgcagtcaaaggcggatacatgccggtaccgccagtggattccctgcacgacatccgctcggctatgtgcatggtgcttgatgaactgggcattcccgtcgaagttcatcaccatgaagtcgccaatgccgggcagtgcgagattggtacccgtttcagcagcctggtaaaacgtgccgactggaaccaattgatgaaatacgtcatccacaatatcgccgtttcctatggcaaaacagcgacattcatgcccaaaccgatcgtcggtgacaatggttccggcatgcacgtccatcagtcgatctggaaagaaggcaaaaatctgtttgccggtaacggctatgccggtatgtcggaaaccgcgctgtattacatcggcggcattatccggcacgccaaggcactgaatgcctttgccaatcccggtaccaattcgtataaaagactggtggccggtttcgaagcgccggtcaacatcgcctactccgccagcaaccggtcagccgctgttcgcatcccctatgccagcagcccgaagcagcgccgtatcgaaatccgtttcccggatcccagcgccaacccttatctcacctttactgctctgctgatggcgggactggatggtattcaaaacaaaatccatcctggcgaccccatggataaaaacctttatgacctgcccccggaagaagcttcgatggtgcccaatacctgtgcttcactggaagaagcgctggcaagcttggatagcgatcgtgaattcctgacacgcggcaacgtattctccaacgacatgatcgatgcttttatcaagctcaagtcggaagaagcgacattattgcgtaccacgacacaccctgttgaatttgccctgtattacagtctgtaa

SEQ ID NO: 101400 - protein, 468 aa, Nitrosomonas europaea ATCC 19718
MAADVLKMIQDHEVKFVDLRFTDTNGKEHHVTVPAHTFDTDKFEDGHAFDGSSIAGWKNIHASDMLLMPDPETAALDPFMEETTLLLTCDVVDPADGQGYNRDPRSLAKRGETYLKSTGIGDIAYFGPELEFFIFDSVRWHTDMSGCFVKIESEEAAWSSKKRYEKSNNGYRPAVKGGYMPVPPVDSLHDIRSAMCMVLDELGIPVEVHHHEVANAGQCEIGTRFSSLVKRADWNQLMKYVIHNIAVSYGKTATFMPKPIVGDNGSGMHVHQSIWKEGKNLFAGNGYAGMSETALYYIGGIIRHAKALNAFANPGTNSYKRLVAGFEAPVNIAYSASNRSAAVRIPYASSPKQRRIEIRFPDPSANPYLTFTALLMAGLDGIQNKIHPGDPMDKNLYDLPPEEASMVPNTCASLEEALASLDSDREFLTRGNVFSNDMIDAFIKLKSEEATLLRTTTHPVEFALYYSL

SEQ ID NO: 101401 - DNA, 1440 bp, Helicobacter hepaticus ATCC 51449
  CDS (1)..(1440): transl_table=11
atgagtagagtaagcatagataaacaagcggtagcagagttttttagattctgtgatgaaaatgaagtagaatttattgatttccgttttagtgacattaaaggcgtatggcatcatttgagcttttctcgcaatgcaattaacgaagaaagctttgagggcataccttttgatggtagctctatccctgcttggcagcccgtagataaatccgatatgatgcttatccctgaacctgtgcggtatttcattgacccatttactgctgataccactgcggtagtcttttgcgatatttgggacatttacaacaataagccttatgagaaatgtccgcgctccattgttaaacgtgcaatgaaatatctcaaagaaagcggtattggcgatatcgcctactatggaccagagaatgagttttttgtatttgattctattaagattaaagattctgtgaattgtcaatattatgagatagattccgaagagggcgaatggaatcgtgcgcgtgagtttgaaggcggtgtaaatatggggcatcgtcccggcacaaaaggtgggtattttcctgtgccacctgtagattctatggtggatttacgcgctgaaatcgtcaaagtgcttaatcaagtaggattagaaactttcgtgcttcaccacgaagtcgcacaagggcaaaatgaaattggtgtgaaatttggcgatatgcttgaagcagcagataatgtacaaaaactcaaatatgttgtcaaaatggttgctcatctcaatggcaaaaccgcgacttttatgccaaagccactttatggagataatggcagtggtatgcacgtgcatattagtatttggaaagatgggcataatctctttgcaggagaagcataccaaggcttaagcgaaatggctctacatttcttaggcggtgtgcttaaacacgcacgcgcattagccgcctttacaaatcctagcacaaactcatataaacgccttataccgggatttgaagcaccaagtatcctcacttattccgcacaaaaccgctctgcaagtatcagaatcccatataatagcggcgagaaagcaaaacgaatggaatttagattcccagatagctctgcaaatccttatcttgcatttgcaagcctcttactcgcaggaattgatgggataaaaaacaaaattgacccgggcgcgcctatggaaatcaatctttttgaacttactttagatgaaattcgcgaaaaaggcattaaacaactaccacacactttgcgccacgctattgaggaaatgcttgttgataaagcatatcttaaagaaggcggtgtatttagtgaagaatttatccaaacttataaagcatataagtttgaaacagagatttggccttgggaggcacgccctcacccatttgagttccttactacttatagttgctag

SEQ ID NO: 101402 - protein, 479 aa, Helicobacter hepaticus ATCC 51449
MSRVSIDKQAVAEFFRFCDENEVEFIDFRFSDIKGVWHHLSFSRNAINEESFEGIPFDGSSIPAWQPVDKSDMMLIPEPVRYFIDPFTADTTAVVFCDIWDIYNNKPYEKCPRSIVKRAMKYLKESGIGDIAYYGPENEFFVFDSIKIKDSVNCQYYEIDSEEGEWNRAREFEGGVNMGHRPGTKGGYFPVPPVDSMVDLRAEIVKVLNQVGLETFVLHHEVAQGQNEIGVKFGDMLEAADNVQKLKYVVKMVAHLNGKTATFMPKPLYGDNGSGMHVHISIWKDGHNLFAGEAYQGLSEMALHFLGGVLKHARALAAFTNPSTNSYKRLIPGFEAPSILTYSAQNRSASIRIPYNSGEKAKRMEFRFPDSSANPYLAFASLLLAGIDGIKNKIDPGAPMEINLFELTLDEIREKGIKQLPHTLRHAIEEMLVDKAYLKEGGVFSEEFIQTYKAYKFETEIWPWEARPHPFEFLTTYSC

SEQ ID NO: 101403 - DNA, 1404 bp, Wigglesworthia glossinidia endosymbiont of Glossina brevipalpis
  CDS (1)..(1404): transl_table=11
gtgtctattaatgaaattattaatataatagaaaaaaataatattaaatttattgattttagatttacagacatggttggaaaagaacaacacattactgtaccttttttaaaaaaagaaaaaataaataaaattttaaaaaatggaaaaatatttgatggatcttcaatattagggtggaaaaaaattcaaaattctgacgttttattgattccagatttaacaacggccgttttagatccattttataatgattctactttaattataaaatgtgatattttcgaatcaaataaatctgaaagttataacaaagatccaagatctatagcaaaaaacgcagaaaaatatttacaatattcaaaaataggagataaaatgtattttgggccggaacttgaattttttttgtttgatgatattagattttataccgctatacatggatctcaagtaataattaatgatatcgaatcatcttggaacagtggaaaatattattcacaaggaaacaaagggtatagaccatcagtaaaatctggttatttaccagtgcctcctgttgattcttctcaaaatataagatcttctatgtgtctatttatggaaaaaatgggaatagaagtagaagctcatcatcacgaagttgcaacttctggtcaaaacgaaatatctactaaatataatactttaacgaaaaaggcagatgaagttcaaatttataaatatatagttcataatacagcttatttttttaaaaaaactgctacttttatgcctaaaccaattagaggagacaatggatcaggaatgcattgccatatttccatagaaaaagaaggaaaaaatatattctttggaaaagaatatggaaatctatctaaatatgcattgttctctataggtggaataataaaacatgcaaaatctataaatgcatttgcaaatcccaccactaattcttataaaagattaatccctggatttgaagctccagtttctttgtcttattctttaaataatagatctgcagctataagaattccaacttttaatgatgataaatcatgtagatttgaaataagatttccagattcttcctctaatccttatttgttattttctgcaattttaatggcgtctatagatggtataaataataaaatttttccaggaaatcctatagaaaaaaatttatacaaatttaaagaaaaaaatttaaataaaatgtcttcctctttagaggaatctatttatcatttagataaagatagagaatttttaactaagaacaatgtatttactaatgacttcattgattcttacatagaattaaaacaaaaagaaataaatatagtaaaatctactccccatcctgtagagtttgaattatattatatgtaa

SEQ ID NO: 101404 - protein, 467 aa, Wigglesworthia glossinidia endosymbiont of Glossina brevipalpis
MSINEIINIIEKNNIKFIDFRFTDMVGKEQHITVPFLKKEKINKILKNGKIFDGSSILGWKKIQNSDVLLIPDLTTAVLDPFYNDSTLIIKCDIFESNKSESYNKDPRSIAKNAEKYLQYSKIGDKMYFGPELEFFLFDDIRFYTAIHGSQVIINDIESSWNSGKYYSQGNKGYRPSVKSGYLPVPPVDSSQNIRSSMCLFMEKMGIEVEAHHHEVATSGQNEISTKYNTLTKKADEVQIYKYIVHNTAYFFKKTATFMPKPIRGDNGSGMHCHISIEKEGKNIFFGKEYGNLSKYALFSIGGIIKHAKSINAFANPTTNSYKRLIPGFEAPVSLSYSLNNRSAAIRIPTFNDDKSCRFEIRFPDSSSNPYLLFSAILMASIDGINNKIFPGNPIEKNLYKFKEKNLNKMSSSLEESIYHLDKDREFLTKNNVFTNDFIDSYIELKQKEINIVKSTPHPVEFELYYM

SEQ ID NO: 101405 - DNA, 1422 bp, Candidatus Blochmannia floridanus
  CDS (1)..(1422): transl_table=11
atgaatgttgattattttatttcttttataaataaaaataaagtaaagtttattgatttacgttttactgatataatgggtaaagaacagcattttactattccacaatcacagattgataatcatttttttgagaatggtaaagtttttgatggttcttctatggtaggttggaaaaatgttcatgaatcggatatgatactgattccagatttaactaatgatcatataatagttgatccattttatcaagatactactgtaatattacgttgtgatgtacttgaccctcatagtatgcaaaattatgataaagatccgagatatatatcaaaaaaatcagaaaagtttttacaagattctggtattgctgatttcgctatgtttggtccagaactagagttttttgtatttgatgatgttagatttaaaacatctatgtcaggttgtcatgtaatgattgatgatccagaagcatcatggaatagtgataaagtttatttttacggaaataaaggacatagaccaaaaataaaaggtggatattctccagttccaccgattgattcttctcaaaatttaaggtctatgatgtctattatgatggaaaaaatgggattaattgtagaaactcatcatcatgaagtagcaactgctggtcaaaatgaaataataactagatttaattctttaactaggaaagcagatgaagtacaaatatataaatatatagtacataatgtttcgaataaattcggaaaaactgctacttttatgccaaagcctattataaaagataatggttcaggtatgcattgccatatatctttgtataagaacaaagttaatttattttcaggtgatcagtatggaaatctttcggaaattgctttattttatataggaggtattttaaaacatactaaagcattaaatgctataactaatcctactaccaattcatataaacgattaatccctggttatgaagctccaacatttttaacttattctttatctaatcgttctagtgctattcgtattcctgcaataattaataataatccaaatttatgtagaatagaagttcgatttcctgatccatcagctaatccttatttggcttttcctgcgttattgatggctggtatagatggtattattaatgaaatccatcctggaaatcctgtaaataaaaatttatatactttatctgatttagaaaaagaacatacattgtacacgtctcaatctttaaatgaatcattacaatatttaagtgaagattatgaatttttaataagaaataatgtgtttagtaaaaattttattgattcgtatatattaatacataaaaaaatggatagcttagtaagatcagttccacatccgatggaatttgaattatattatagtatataa

SEQ ID NO: 101406 - protein, 473 aa, Candidatus Blochmannia floridanus
MNVDYFISFINKNKVKFIDLRFTDIMGKEQHFTIPQSQIDNHFFENGKVFDGSSMVGWKNVHESDMILIPDLTNDHIIVDPFYQDTTVILRCDVLDPHSMQNYDKDPRYISKKSEKFLQDSGIADFAMFGPELEFFVFDDVRFKTSMSGCHVMIDDPEASWNSDKVYFYGNKGHRPKIKGGYSPVPPIDSSQNLRSMMSIMMEKMGLIVETHHHEVATAGQNEIITRFNSLTRKADEVQIYKYIVHNVSNKFGKTATFMPKPIIKDNGSGMHCHISLYKNKVNLFSGDQYGNLSEIALFYIGGILKHTKALNAITNPTTNSYKRLIPGYEAPTFLTYSLSNRSSAIRIPAIINNNPNLCRIEVRFPDPSANPYLAFPALLMAGIDGIINEIHPGNPVNKNLYTLSDLEKEHTLYTSQSLNESLQYLSEDYEFLIRNNVFSKNFIDSYILIHKKMDSLVRSVPHPMEFELYYSI

SEQ ID NO: 101407 - DNA, 1413 bp, Bordetella bronchiseptica RB50
  CDS (1)..(1413): transl_table=11
atggcaagccccaaagacgttctcaagcagatcgccgacaacgaagtcaagttcgtggatttccgcttcaccgatacgctcgggcgcgagcaccacgtttccgttcccacctcggctgtcgacgaggacaagctggagagcgggcaggcgttcgacgggtcgtcgatcccgggctggaagggcatcgaagcctccgacatgctgttgattcccgacctggacacggccaacctggacccgttccgcgaagagccgaccttgatcctgagctgcgacgtggtcgagccgtcggacctgaagggttatgaccgcgacccgcgttcgctggccaagcgcgccgaagcctacctgaagtcctccggcctgggcgataccgcctacttcggtccggaacccgagttcttcgtgttcgacggcgtgacctggaacaccgacatgtcgggcaccttcgtcaagatcaagtcggaagaggcgccgtggtccagcggcctggaattcgaaggcggcaacatgggccatcgtccgggccccaagggcggctacttccccgtgccgccggtcgattcgttccaggacatgcgttccgaaatgtgcctgctgctcgagcagatgggcgtgccggtcgaagtgcaccaccatgaagtggccgcgcccggccagctggaaatcggcaccaagttcagcacgctggtgcaacgcgcggactggaaccaggtcatgaagtacgtgatccacaacgtggcgcacgtatacggcaagaccgcgacgttcatgcccaagcccatcgtcggcgacaacggctcgggcatgcacgtgcaccaatcgatctggaaggacggccagaacctgttcgcgggcaacggctacgccggcctgtcggagttcgcgctgtactacatcggcggcatcatcaagcacgcccgcgcgctcaatgccatcaccaatccgggcaccaactcgtacaagcgcctggtgccgcacttcgaggcgccggtgaagctggcctattcggcccgcaaccgctcggcctcgatccgcatcccgtacgtcggcaaccccaaggcgcgccgcatcgagacgcgcttcccggatccgctggccaacccgtacctggcgttctcggccctgatgatggccggcctggacggcgtgcagaacaagatccacccgggcgacccggccgacaagaacctgtacgacctgccgccggaagaagacgccaagatcccgaccgtctgcgcgtcgctggaagaggccctggccgcgctggacaaggatcgcgagttcctgacccgtggcggcgtgttcagcaacgacatgctcgacgcctacatcgaactgaagatgggcgaagtcacgcgtctgcgcatgaccacgcatccggtcgaattcgacatgtactacagcctgtaa

SEQ ID NO: 101408 - protein, 470 aa, Bordetella bronchiseptica RB50
MASPKDVLKQIADNEVKFVDFRFTDTLGREHHVSVPTSAVDEDKLESGQAFDGSSIPGWKGIEASDMLLIPDLDTANLDPFREEPTLILSCDVVEPSDLKGYDRDPRSLAKRAEAYLKSSGLGDTAYFGPEPEFFVFDGVTWNTDMSGTFVKIKSEEAPWSSGLEFEGGNMGHRPGPKGGYFPVPPVDSFQDMRSEMCLLLEQMGVPVEVHHHEVAAPGQLEIGTKFSTLVQRADWNQVMKYVIHNVAHVYGKTATFMPKPIVGDNGSGMHVHQSIWKDGQNLFAGNGYAGLSEFALYYIGGIIKHARALNAITNPGTNSYKRLVPHFEAPVKLAYSARNRSASIRIPYVGNPKARRIETRFPDPLANPYLAFSALMMAGLDGVQNKIHPGDPADKNLYDLPPEEDAKIPTVCASLEEALAALDKDREFLTRGGVFSNDMLDAYIELKMGEVTRLRMTTHPVEFDMYYSL

SEQ ID NO: 101409 - DNA, 1419 bp, Chromobacterium violaceum ATCC 12472
  CDS (1)..(1419): transl_table=11
atggcagtagccgacgtagtcaaactgatccaagaaaacgacgtcaaatttgtcgatctgcgctttaccgatacccgcggcaaagaacagcacgtctccatccctgcgcacgtgctgctggaagacgccgatgcctggttcgagcgcggccacgccttcgacggctcctccatcgccggctggaaaggcatccaggcctccgacatgctgctgatcgccgatccggccaccgcccgcatcgacccgttctttgacgagccgaccgtgttcatgcactgcgacgtgatcgatccggccgacggcaagggctacgaccgcgacccgcgctccatcgccaagcgcgccgaagcctacctgaaggcttccggccacggcgacaccgcctacttcggtccggaaccggaattcttcatcttcgacggcgtgacctggggcaccgacatgtccggctgcttcgtcaagatcaaggccgaggaagccgcctgggcgtccgccgaggaattcgaaggcggcaacatgggccaccgcccgggcatcaagggcggctacttcccggttccgccggtggactcttcgcaggacatccgctccgcgatggtgctgctgctggaagagctgggcgtgccggtcgaagtgcaccaccacgaagtggccaccgccggccagaacgaaatcggcaccaagttcagcacgctgacccagcgcgccgactggacccagatcctgaagtacgtggtgcacaacgtcgcccacagctacggcaagaccgccaccttcatgcccaagcccatcgtcggcgacaacggctccggcatgcacgtgcaccagtcgatctggaaggacggcaagaacctgttcgccggcgaaggctacgccggcctgtccgacaccgcgctgtactacatcggcggcatcatcaagcacgccaaggcgctgaacgccatcaccaacccgggcaccaactcctacaagcgcctggtgccgcattacgaagcgccggtgaagctggcttactccgccaagaaccgctccgcctcgatccgcattccgcacgtggccagcccgaaggcccgccgcatcgaggcccgcttcccggatccgctggccaacccgtacctgtgcttctccgcgctgctgatggccggcctggacggcatccagaacaagatccacccgggcgacgccgccgacaagaatctgtacgacctgccgccggaagaagacaagctgatcccgaccgtctgcgcctcgctggatgaagctctggccgcgctggacaaggaccgcgaattcctgacccgcggcggcgtgttctccaacgagtggatcgacgcctacatcgagctgaagatgcaggaagtcaacctgacccgcatgaccacccacccggtggaattcgcgatgtactactcgctgtaa

SEQ ID NO: 101410 - protein, 472 aa, Chromobacterium violaceum ATCC 12472
MAVADVVKLIQENDVKFVDLRFTDTRGKEQHVSIPAHVLLEDADAWFERGHAFDGSSIAGWKGIQASDMLLIADPATARIDPFFDEPTVFMHCDVIDPADGKGYDRDPRSIAKRAEAYLKASGHGDTAYFGPEPEFFIFDGVTWGTDMSGCFVKIKAEEAAWASAEEFEGGNMGHRPGIKGGYFPVPPVDSSQDIRSAMVLLLEELGVPVEVHHHEVATAGQNEIGTKFSTLTQRADWTQILKYVVHNVAHSYGKTATFMPKPIVGDNGSGMHVHQSIWKDGKNLFAGEGYAGLSDTALYYIGGIIKHAKALNAITNPGTNSYKRLVPHYEAPVKLAYSAKNRSASIRIPHVASPKARRIEARFPDPLANPYLCFSALLMAGLDGIQNKIHPGDAADKNLYDLPPEEDKLIPTVCASLDEALAALDKDREFLTRGGVFSNEWIDAYIELKMQEVNLTRMTTHPVEFAMYYSL

SEQ ID NO: 101411 - DNA, 1497 bp, Wolinella succinogenes DSM 1740
  CDS (1)..(1497): transl_table=11
gtgttaaaatgcccgcatcagtttacattttcgataagacaatcatcatcccattcaaggagaaaagacatggctgatcaatccaaagtgaaagagtttttccgtttttgtcaggaaaatgaagtggagtttgtggatttccgcttcaccgacatcaagggagtgtggcatcatgtgagctactccatggcctcaattgatgaggagagcttcaatggtcttccttttgatggtagctccatccctgcatggcagcccatcaaccgatcggatatgcaactcatccccgatcctgtctcctacttcctcgaccccttcacagcggacaccaccgtggtcgtattctgtgatgtttgggatatttacaaaaatcaaccctacgagaaatgcccccgaagtatcgccaaaaaagcgcttaaatacctcgaaagcactggtcttggtgatgtagcttactttggacctgagaatgagttttttgtatttgactccatcaaaatccaagattccatcaactgccaatcctacgaagtggatgttgaagagggtacatggaacagcaatcgcgcctatgagaatggttacaacctcggacaccgacctggaaccaagggtggctatttccccgttgctcccgttgattctatggttgacatccgcgctgaaatggtcaaagtcctcaatcaagtcggcctagagacattcgtggttcaccacgaagtagcccaagggcaaggcgagatcggagttcgatttggagatctcatcaaggctgctgacaatgtccaaaagctcaaatatgttgtcaagatggtcgctcacatgaatggtaaaaccgccactttcatgcccaagcccctctatggagacaatggtagcggtatgcacacccacatcagcatctggaacaagggcgaaaacaccttcgctggcgatgcctaccaaggcctaagcgaaaccgctcttcactttgtagggggcgtcctcaaccatgccaagagtgcggcggctttcactaacgcctccaccaactcctacaagcgacttatccctggctttgaagcacccagcattctcacctactccgctcaaaaccgaagcgctagcgtgagaatcccctacgttcaaggcgccaaagccaagcgtgttgagttccgattccccgatagctcggccaacccctacctcgctttctcagcacttcttatggcaggaatcgatggcatccagaccaaagccaaccctggagagcctatggaaatggatctctttgagctctctttggacgaaatcagagagaagggaatcaagcagatgccccacactttgcgaagcgctgttgaaaatatgctcgcggacaaagattatctcaaaaaaggcgatgtattctctgaggatttccttcaaacctataaagcctataagtttgagactgaaatttggccatgggaagcaagaccccatccttttgagttcatctctacctactcttgctaa

SEQ ID NO: 101412 - protein, 498 aa, Wolinella succinogenes DSM 1740
MLKCPHQFTFSIRQSSSHSRRKDMADQSKVKEFFRFCQENEVEFVDFRFTDIKGVWHHVSYSMASIDEESFNGLPFDGSSIPAWQPINRSDMQLIPDPVSYFLDPFTADTTVVVFCDVWDIYKNQPYEKCPRSIAKKALKYLESTGLGDVAYFGPENEFFVFDSIKIQDSINCQSYEVDVEEGTWNSNRAYENGYNLGHRPGTKGGYFPVAPVDSMVDIRAEMVKVLNQVGLETFVVHHEVAQGQGEIGVRFGDLIKAADNVQKLKYVVKMVAHMNGKTATFMPKPLYGDNGSGMHTHISIWNKGENTFAGDAYQGLSETALHFVGGVLNHAKSAAAFTNASTNSYKRLIPGFEAPSILTYSAQNRSASVRIPYVQGAKAKRVEFRFPDSSANPYLAFSALLMAGIDGIQTKANPGEPMEMDLFELSLDEIREKGIKQMPHTLRSAVENMLADKDYLKKGDVFSEDFLQTYKAYKFETEIWPWEARPHPFEFISTYSC

SEQ ID NO: 101413 - DNA, 1419 bp, Gloeobacter violaceus PCC 7421
  CDS (1)..(1419): transl_table=11
atggcgaagactcccgatgacgttctcaagatgatccaggatgaggacgtcaaaatagttgacttaaaattcatcgatttgccgggcacctggcagcattgttcgtttgccaccaaccagatcgatgcggatgcttttgccgagggcatcccctttgacggttcgagcatccgtggctggaaggccatcaacgagtcggacatgttgatggtgccggatccgagcacggcgttcatcgatccgttcttcaaagagacgactttgagccttacctgctcgatccgcgagccgcgcacgggcgaaccctacggccgcgatccgcgcacgattgccgcgaaggcacttgaatatctcaaaggcaccggcatcgccgacactgcctacttcggtcccgaggcggaatttttcatcttcgacgatgtgcggttcgatcagacccagaatgcgggctactactatctcgactcggtcgaaggcaactggaacaccggccgcaacgaaggtcccaatctaggctacaagccccgcaacaaagaagggtacttcccggttgcccccaccgattcgatgcaggatatccgcacggagatgctgctcaccatgggcagtctgggggtgcccatcgagaagcaccaccacgaagtggcctccggcggtcaggccgaacttggggtgcgctttttgtcgatggtggaggcggcggacgcgctgcagatctacaagtacgtgatcaaaaacgtcgcccgcaagcacggcaaggtagcgaccttcatgcccaagccaatctttaacgacaacggcaccggcatgcacacccaccagtcgctctggaaggacggccagccgctgttcgcaggcgacaagtacgccgacttgagcgaaatggcgctctactacatcggcggcctgctcaagcacgccccggcgattctggccttttccaacccgaccaccaactcctacaagcgcctggtgcccggtttcgaggcgccggtgaacttggcctactcccagggcaaccgctccgcttcgatccgcatcccgctgagcggcaagagccccaaggccaagcgtctggaattccgctgccccgacgccagctccaacgcctacatcgcctttgcggcgatgctgatggcgggtctggacggcatcaagaacaagatcgacccgggcgagcctctcgatgtcgatatttacgagctgtccgccgaggagttggccaaggtgccctccacccccggttcgctctccgaagccctcaaggcgctcgaagaggaccacgcttttctgaccgagggcggcgtcttcagcgaggagctgatcaacgtctggatcgagtacaagctcgaaaaagaagtgatcccgatgtcgctcaggccccacccctacgagttctcgctctacttcgacgtctaa

SEQ ID NO: 101414 - protein, 472 aa, Gloeobacter violaceus PCC 7421
MAKTPDDVLKMIQDEDVKIVDLKFIDLPGTWQHCSFATNQIDADAFAEGIPFDGSSIRGWKAINESDMLMVPDPSTAFIDPFFKETTLSLTCSIREPRTGEPYGRDPRTIAAKALEYLKGTGIADTAYFGPEAEFFIFDDVRFDQTQNAGYYYLDSVEGNWNTGRNEGPNLGYKPRNKEGYFPVAPTDSMQDIRTEMLLTMGSLGVPIEKHHHEVASGGQAELGVRFLSMVEAADALQIYKYVIKNVARKHGKVATFMPKPIFNDNGTGMHTHQSLWKDGQPLFAGDKYADLSEMALYYIGGLLKHAPAILAFSNPTTNSYKRLVPGFEAPVNLAYSQGNRSASIRIPLSGKSPKAKRLEFRCPDASSNAYIAFAAMLMAGLDGIKNKIDPGEPLDVDIYELSAEELAKVPSTPGSLSEALKALEEDHAFLTEGGVFSEELINVWIEYKLEKEVIPMSLRPHPYEFSLYFDV

SEQ ID NO: 101415 - DNA, 1410 bp, Photorhabdus luminescens subsp. laumondii TTO1
  CDS (1)..(1410): transl_table=11
atgtccgttgaacatgttttaaccatgattgaagagcatcaggtgaagtttattgatttgcgtttcactgataccaaaggcaaagaacaacatatgaccattcctgctcatcaggttaatgcagacttctttgaagatggcaaaatgtttgacggatcttcaatcagcggttggaaagggattaacgaatctgacatggtactgatgccagacccaagcacagccatgcttgatcccttctttgacgatgccacactgactctacgttgtgacattttggaaccaggcactatgcaaggctatgaccgtgatccccgttccatctccaagcgtgctgaaaacttcctacgttcaagcggcattgccgatactgtcctgtgcggaccagagcctgagtttttcctgtttgatgacgtgcgcttcagcagtgccatgtctcattcttactatcacatcgatgatatcgaagctgcatggaattccgggacgcagtacgaaggcggtaacaaaggccatcggcctgcggtaaaaggcggttatgctccgctgcctcctgttgattcttcgcaggatttacgttcagcgatgtgcctgacgatggaagagatggggttggttgtagaggctcaccatcatgaagtgggaacagcaggccaaaatgaaatcgccacccgctttaacaccatgaccaaaaaagcggacgaaacccaaatttacaaatacgtcgtacataatgtcgcgcacaattttggcaaaaccgcaacctttatgccaaaaccactggttggtgataatggttccggtatgcactgccatatgtctctgtctaaaaacggtactaacttgtttgctggtgacaaatacggcggtctatctgaactggcgctattctacattggcggtattatcaaacatgctcgtgcgctgaacgcgtttaccaacccgacaaccaactcttataaacgtttggttccgggctatgaagccccggtgatgctggcctactctgcccgtaaccgttcggcatctatccgtattccggttgttgccagcaccaaagctcgccgtattgaagtacgtttccctgatccggcggctaacccttatctggcattcgccgctcaattgatggctggccttgacggcatcatcaataaaatccatccgggtgatgcgatggataaaaacctgtatgacctaccaccggaagaagctaaagagatcccaactgtcgcctcttctctggatgaagcactggcagcactggatgccgaccgtgaattcttgactcgtggcggtgtattcaccgatgacgccattgatgcttatattgacttgaaaaacagtgaaatagagcgtgtccgtctgacaccacatccactggagtttgaactctattacagtgtgtaa

SEQ ID NO: 101416 - protein, 469 aa, Photorhabdus luminescens subsp. laumondii TTO1
MSVEHVLTMIEEHQVKFIDLRFTDTKGKEQHMTIPAHQVNADFFEDGKMFDGSSISGWKGINESDMVLMPDPSTAMLDPFFDDATLTLRCDILEPGTMQGYDRDPRSISKRAENFLRSSGIADTVLCGPEPEFFLFDDVRFSSAMSHSYYHIDDIEAAWNSGTQYEGGNKGHRPAVKGGYAPLPPVDSSQDLRSAMCLTMEEMGLVVEAHHHEVGTAGQNEIATRFNTMTKKADETQIYKYVVHNVAHNFGKTATFMPKPLVGDNGSGMHCHMSLSKNGTNLFAGDKYGGLSELALFYIGGIIKHARALNAFTNPTTNSYKRLVPGYEAPVMLAYSARNRSASIRIPVVASTKARRIEVRFPDPAANPYLAFAAQLMAGLDGIINKIHPGDAMDKNLYDLPPEEAKEIPTVASSLDEALAALDADREFLTRGGVFTDDAIDAYIDLKNSEIERVRLTPHPLEFELYYSV

SEQ ID NO: 101417 - DNA, 1410 bp, Vibrio vulnificus YJ016
  CDS (1)..(1410): transl_table=11
atgtcagtagaaaacgttttatcgctgatccaagaaaacgaagttaagtttgttgacctgcgttttaccgatactaaaggtaaagagcagcacatctctattccttctcaccaaatcgatgctgacttcttcgaagacggtaaaatgttcgatggttcatctgttgctggctggaaaggtattaacgaatcagacatggtgatgatgcctgacgcatcttcagctgttctagacccatttactgaagaagcaacgctaaacatccgttgtgacatcctagaacctgcaacgatgcaaggttacgaccgtgacccacgctctatcgcgaaacgcgctgaagagtacatgcgctctactggtcttgcagacaccgttctagttggtccagagccagagttcttcctatttgacgatgtaaaattcgccactgacatgtcgggttctttcttcaagatcgacgacgtagaagcggcatggaacacaggttctgactacgaaaacggtaacaaaggtcaccgtccaggcgtgaagggtggttacttccctgtagctccagtggattcttcacaagacctacgctcggcaatgtgtctagtgatggaagagatgggccttgttgttgaagcgcaccatcatgaagtagcgacagcgggtcaaaacgagatcgcaactcgctttaacacactaacgactaaagcagacgagatccaaatctacaagtacgtggtacacaacgttgcacacgcatttggtaaaacagcaacctttatgcctaagccactcgtcggcgacaacggttctggtatgcacgttcaccaatcactagcaaaagatggcgtgaacctatttgctggtgacaagtacggcggtctatctgaaatggcgctttactatatcggcggcatcatcaagcacgcacgtgcactaaacgcgttgactaacccatcaaccaactcgtacaagcgtctggttccacactacgaagcaccagttatgctagcttactctgcgcgtaaccgttctgcttctatccgtatcccagtggtaccaagcccgaaagcgcgtcgtatcgaagttcgcttcccagatccagcagcaaacccatacctagcgtttgcagccatgctgatggctggtcttgacggtatcaagaacaagatccacccaggcgaagcaatggacaaagatctgtacgatctaccagcagaagaagcggcagagattccaaaagtagcggaatcgctaaaacaagcgctagagtacctagacaacgaccgtgagttcctaactgcaggtggcgtattctctgatgatttcatcgattcttacatcgagctgaaaacaaaagaagttgagcgcgtaaacgttgcggttcacccactagagttcgaactatactactcagtataa

SEQ ID NO: 101418 - protein, 469 aa, Vibrio vulnificus YJ016
MSVENVLSLIQENEVKFVDLRFTDTKGKEQHISIPSHQIDADFFEDGKMFDGSSVAGWKGINESDMVMMPDASSAVLDPFTEEATLNIRCDILEPATMQGYDRDPRSIAKRAEEYMRSTGLADTVLVGPEPEFFLFDDVKFATDMSGSFFKIDDVEAAWNTGSDYENGNKGHRPGVKGGYFPVAPVDSSQDLRSAMCLVMEEMGLVVEAHHHEVATAGQNEIATRFNTLTTKADEIQIYKYVVHNVAHAFGKTATFMPKPLVGDNGSGMHVHQSLAKDGVNLFAGDKYGGLSEMALYYIGGIIKHARALNALTNPSTNSYKRLVPHYEAPVMLAYSARNRSASIRIPVVPSPKARRIEVRFPDPAANPYLAFAAMLMAGLDGIKNKIHPGEAMDKDLYDLPAEEAAEIPKVAESLKQALEYLDNDREFLTAGGVFSDDFIDSYIELKTKEVERVNVAVHPLEFELYYSV

SEQ ID NO: 101419 - DNA, 1410 bp, Rhodopseudomonas palustris CGA009
  CDS (1)..(1410): transl_table=11
atgacgaccgctaaagaagtcctgaaatccatcaaggacaacgacgtgaaatacgtcgatctgcgtttcaccgatccgcgcggcaagtggcagcatgtcaccttcgacgtgtcgatgatcgacgaggagatcttctccgaaggcaccatgttcgacggctcctcgatcgccggttggaaggcgatcaacgagtccgacatgacgctgatgcccgatccggcgaccgccacgatcgatccgttcttcgcagagaccaccatggtgatcacctgcgacatcctcgagccgtcgaccggcgagccctacaaccgcgacccgcgcggcatcgccaagaaggcggaagcccaggtcaaggcgctcggcatcggtgacagcgtgttcgtcggccccgaagccgagttcttcgtgttcgacgacgtgcgctattcggcgagcccgtacaacaccggcttcaagctggactcgtcggaactgccgaccaactcggacaccgagtacgaaggcggcaacctcggccaccgcatccgcaccaaggccggttacttcccggtgccgccgcaggactccgtgcaggacatgcgctcggagatgctcggcgcgatggccaagatgggcgtcaaggtcgagaagcatcaccacgaagtcgcttcggcccagcacgagctcggcatgaagttcgacaccctgacccacatggccgaccagatgcagatctacaagtactgcatccatcaggtcgcccacatctacggcaagaccgcgaccttcatgccgaagccggtgttcggcgacaacggctcgggcatgcacgtccaccagtcgatctggaaggacggcaagccgaccttcgccggcaacaagtacgccgacctgtcggaaacctgcctccactacatcggcggcatcatcaagcacgccaaggcgatcaacgccttcaccaacccgtcgaccaactcctacaagcgtctggtcccgggctatgaagcgccggtgctgctggcctactcggcccgcaaccgctcggcctcgtgccgtatcccctacaccacctcgccgaaggccaagcgcgtcgaagtccgcttcccggacccgatggccaatccgtatctcgccttcgcggcgatgctgatggccggcctcgacggcatcaagaacaagatcgatccgggtccggcgatggacaaggacctgtacgatctgccgaaggaagagctgaagcagatcccgaccgtttgcggcagcttgcgcgaagcgctcgagaacctcgacaaggaccgcgccttcctcaaggccggcggcgtgttcgatgacgacttcatcgacgccttcatcgagctgaagatgaccgaagtggcgcggttcgaaatgaccccgcacccggtcgagttcgagatgtactactcgtactaa

SEQ ID NO: 101420 - protein, 469 aa, Rhodopseudomonas palustris CGA009
MTTAKEVLKSIKDNDVKYVDLRFTDPRGKWQHVTFDVSMIDEEIFSEGTMFDGSSIAGWKAINESDMTLMPDPATATIDPFFAETTMVITCDILEPSTGEPYNRDPRGIAKKAEAQVKALGIGDSVFVGPEAEFFVFDDVRYSASPYNTGFKLDSSELPTNSDTEYEGGNLGHRIRTKAGYFPVPPQDSVQDMRSEMLGAMAKMGVKVEKHHHEVASAQHELGMKFDTLTHMADQMQIYKYCIHQVAHIYGKTATFMPKPVFGDNGSGMHVHQSIWKDGKPTFAGNKYADLSETCLHYIGGIIKHAKAINAFTNPSTNSYKRLVPGYEAPVLLAYSARNRSASCRIPYTTSPKAKRVEVRFPDPMANPYLAFAAMLMAGLDGIKNKIDPGPAMDKDLYDLPKEELKQIPTVCGSLREALENLDKDRAFLKAGGVFDDDFIDAFIELKMTEVARFEMTPHPVEFEMYYSY

SEQ ID NO: 101421 - DNA, 1602 bp, Strongylocentrotus purpuratus
  CDS (1)..(1602)
atgggtcgctcagcggcctcggcgacgctccgttgtttgatgagctctgaatggaaggggctagcgactaagggagaaagggctgcgatggcggtgacgatgctgtcaatgagacgctactcgagttttgagagatttgcttcgaagtcaaagtggagacaaggacaaacgctgtcacgatggccactcgcctcagcctcgctagacagtagcccgttacaggttttttcagttgggaatgtgaagaaaacgagtgtacatgaacttcatcgactcttaatggctcacaaatttgactatgtccgctttgagcagagcgacatgcatggactggcaaaatgcaaactggtgccaataaaccacttccggagcaagatgaacaaaggtatcaacttttcgttaagtcacatgattaaagatcccaacggaacaaaagtttgcgggacaggtctatggtatgagaaagggatgggagatgggataggagtgcccgatctatcgtcatttagggtgttaccttggtgtgacagtgctgccagagtcatcgttgatctcactgaggatggtgttcctctgaacgcgcatccccggaacatcgctcgccgacagattgaagagttggactccatggcgctgtctatcttggcagctcatgaatttgaatttgtcgtggaggacgagaaggatcgtatgcctatcttcgacggcatgaactgcggatacttgatgaatatctctcgcgcagagttgctcgttcaacagttcgcacgagacttgcctcagatggggctaaacgtagagaccctggagagtgaagcaggagcagggcaattggagatcacctaccgacccaccactggtctcaccataggggataacggatataccttgaaaacatccatcaaagagatctgccagagacaaggttacgtcgcgtctttccgctctaaacattccaaagattgtacatcgtcatcccacttttgccactccctgtgggacagcagcaacacgacgtctctcctctacgatccgcagcatccgcagaggctgtcaacacttggacagcattggttggcagggcttatccgccatgctcctgccttgacgcttctgatgtgccctaccatcaactgcatccaccgtctcggcaccaccgtagtaacacctacaacggcatcatggggtgtggacaaccgctcttgtgccttccgactgagtcagccgccgaaagacaacaacccggactcgtttttcatagagaatcggatgggtggggcagggagtaacccttacctcacaatggcggctaccatagctgctggtatcgacggcatccggaaccagatccctctcccagcaccagtccaaggcatggcgtccaccacggcaccatgcccccatgacaccaaccagaaccttccaaggaccatgcaggaatgcttggatgccttccaagctgatgacgtcatacttgacgccatgggaccagagtttgttcagtgtttcacggccctaaaggaggaggagatgagattacatcagaaagctgcagaaaatggtgatcattcgtggcattactcatttgtggagcatgtctaa

SEQ ID NO: 101422 - protein, 533 aa, Strongylocentrotus purpuratus
MGRSAASATLRCLMSSEWKGLATKGERAAMAVTMLSMRRYSSFERFASKSKWRQGQTLSRWPLASASLDSSPLQVFSVGNVKKTSVHELHRLLMAHKFDYVRFEQSDMHGLAKCKLVPINHFRSKMNKGINFSLSHMIKDPNGTKVCGTGLWYEKGMGDGIGVPDLSSFRVLPWCDSAARVIVDLTEDGVPLNAHPRNIARRQIEELDSMALSILAAHEFEFVVEDEKDRMPIFDGMNCGYLMNISRAELLVQQFARDLPQMGLNVETLESEAGAGQLEITYRPTTGLTIGDNGYTLKTSIKEICQRQGYVASFRSKHSKDCTSSSHFCHSLWDSSNTTSLLYDPQHPQRLSTLGQHWLAGLIRHAPALTLLMCPTINCIHRLGTTVVTPTTASWGVDNRSCAFRLSQPPKDNNPDSFFIENRMGGAGSNPYLTMAATIAAGIDGIRNQIPLPAPVQGMASTTAPCPHDTNQNLPRTMQECLDAFQADDVILDAMGPEFVQCFTALKEEEMRLHQKAAENGDHSWHYSFVEHV

SEQ ID NO: 101423 - DNA, 1332 bp, Strongylocentrotus purpuratus
  CDS (1)..(1332)
atggatgttcagaagatcgtctcaagtttcgaagctgatgatattgcctttgtaaggtttgagcagactgatctgtatggcattgccagatccaggacgatcccctcccgacatttcaaggagaaagctgtgaagggactccactttaaaggccatctaggatatgatccccagactaactttatagggaacagcgcttattctgcaggtgtaggtaagtttgatgctgtctgtttcccagaccttgatacctaccaagtgctgccttggagcaagagaactgctcggattctgattgagccaacgtacaaaggaaagttagttgaggcccaaccaagggtggttgcaaggagacaactggacaagctgacagagatgggatattctttgctgtcagcgcatgagcatgagttctatttagtggagaaggaatctcggaagaccatcgacgatgttgtcaacgtcaggtctacggttcgcctggctgcatgtgaagatatagtgtatacttttttggatgggttagcaggtgttggggtcgacgttgaatgtgcagagactgaacacggccctgggcaattagagatcacctacaaaccagcgtttgggatccgatcagcagacaacgcccatacttacaagacagggatcaaagagatggctgtaaagaatggcttcatagccacctttatgtccaaaccttaccctgacgtgagtgcatccggttgtcatttctgtcattctttatgggacagtcaaggtaagacgcctctcctctacgatgccagcagccatacaggtctgacactggtcggcgaacactgggttgcaggcctccttgagcacaccccagcaatctctttgctcatgggaccaaccatcaattgcctgaagcgatacctcgaggcctttactccatccaatgcaacatgggggatagataatcgctcatgtgctgtgcgagtgaaactcaatggcaaagagggtacctaccttgagaaccgactgggggccagtggctgcaatccttacatcgccctagctgctacggtggctgcaggtatggacggtatcaacagaaagctcccattgccaccttgtgtaaaagacatagacaatgcacacaacccagagcacatcccaccgggcactgcaaacgtcccaaccaatatgaaggaagctatggaaacgctccagatggatgatgtcattacttcaggtcttggggaagagtttatagattgcttcttggctgcaaagagacatgagattcttttgcaagaaaacaatgaagaaaattgggaacaaaatctcttctttgaaaccatgtag

SEQ ID NO: 101424 - protein, 443 aa, Strongylocentrotus purpuratus
MDVQKIVSSFEADDIAFVRFEQTDLYGIARSRTIPSRHFKEKAVKGLHFKGHLGYDPQTNFIGNSAYSAGVGKFDAVCFPDLDTYQVLPWSKRTARILIEPTYKGKLVEAQPRVVARRQLDKLTEMGYSLLSAHEHEFYLVEKESRKTIDDVVNVRSTVRLAACEDIVYTFLDGLAGVGVDVECAETEHGPGQLEITYKPAFGIRSADNAHTYKTGIKEMAVKNGFIATFMSKPYPDVSASGCHFCHSLWDSQGKTPLLYDASSHTGLTLVGEHWVAGLLEHTPAISLLMGPTINCLKRYLEAFTPSNATWGIDNRSCAVRVKLNGKEGTYLENRLGASGCNPYIALAATVAAGMDGINRKLPLPPCVKDIDNAHNPEHIPPGTANVPTNMKEAMETLQMDDVITSGLGEEFIDCFLAAKRHEILLQENNEENWEQNLFFETM

SEQ ID NO: 101425 - DNA, 1374 bp, Strongylocentrotus purpuratus; identical to SEQ ID NO: 32141
  CDS (1)..(1374)

SEQ ID NO: 101426 - protein, 457 aa, Strongylocentrotus purpuratus; identical to SEQ ID NO: 32142

SEQ ID NO: 101427 - DNA, 1449 bp, Strongylocentrotus purpuratus; identical to SEQ ID NO: 32125
  CDS (1)..(1449)

SEQ ID NO: 101428 - protein, 482 aa, Strongylocentrotus purpuratus; identical to SEQ ID NO: 32126

SEQ ID NO: 101429 - DNA, 1341 bp, Strongylocentrotus purpuratus; identical to SEQ ID NO: 32129
  CDS (1)..(1341)

SEQ ID NO: 101430 - protein, 446 aa, Strongylocentrotus purpuratus; identical to SEQ ID NO: 32130

SEQ ID NO: 101431 - DNA, 1422 bp, Prochlorococcus marinus str. AS9601
  CDS (1)..(1422): transl_table=11
atgtctaaatctcctcaagatgttttaagtcaaattaaagatgaaggaattgaactcatcgatttaaaattcactgatattcatggaaaatggcaacatttaactcttacatcagacatgatagaggaggattcttttacagaagggttagcatttgatggctcatcaataagaggttggaaagcaattaatgcctcggatatgtcaatggtgcccgatgcaagtacagcttggatagatcctttttataaacataaaactttaagtatgatttgctctattcaagagccaagaagcggggaaccttatgataggtgtccaagagctttagctcaaaaggcattaaaatatttagactcgactggtatagcagatactgcattttttgggccagaaccagaattctttttatttgatgatgttagatatgactctaaagaaggaggttgcttttatagtgtagatactattgaagctccatggaatacagggagaattgaagaagggggaaacttaggatacaaaatacaatataaagaaggatattttccagtagctccaaatgatactgcgcaagatatcagatctgagatgcttcttcttatgggtgaattaggtatccccactgaaaaacatcaccatgaagttgctggtgccggccaacacgagcttggaatgaaatttgattcgttaataaatgctgctgataacgttatgacttataaatacgttgtcagaaatgttgcaaaaaaatatggaaaaacagcaacatttatgcctaaacctgtttttaacgacaacggaacaggaatgcatgttcaccaaagtttatggaagagtggacagccactattctttggtgaaggatcatatgcaaatttatctcaaacagcaagatggtacatcggaggcatacttaaacatgcgccatcattcttagcatttactaacccaaccactaatagttataaacgattggttccaggatttgaagcacctgtaaatctagtttattctgagggtaatagatcagctgctgtaagaatacctttaacaggaccaagccccaaagctaaaagattagaattcagatcaggtgacgcacttgcaaatccttacttagcattctctgtaatgatgcttgccggtattgatggaattaaaaatcaaattgatcctggtgatggagtagatgtagatttatttgaacttccagctgatgaacttgcaaaaattgatacagtgccttcatctcttaatgattcacttaatgcgctaaaagcagacaaggattatctattagctggtggagtatttactgaagactttattgataactttatcgatataaaatacgaagaggtacaacaactaagacaaaggcctcatccacatgaattctttatgtattacgatgcataa

SEQ ID NO: 101432 - protein, 473 aa, Prochlorococcus marinus str. AS9601
MSKSPQDVLSQIKDEGIELIDLKFTDIHGKWQHLTLTSDMIEEDSFTEGLAFDGSSIRGWKAINASDMSMVPDASTAWIDPFYKHKTLSMICSIQEPRSGEPYDRCPRALAQKALKYLDSTGIADTAFFGPEPEFFLFDDVRYDSKEGGCFYSVDTIEAPWNTGRIEEGGNLGYKIQYKEGYFPVAPNDTAQDIRSEMLLLMGELGIPTEKHHHEVAGAGQHELGMKFDSLINAADNVMTYKYVVRNVAKKYGKTATFMPKPVFNDNGTGMHVHQSLWKSGQPLFFGEGSYANLSQTARWYIGGILKHAPSFLAFTNPTTNSYKRLVPGFEAPVNLVYSEGNRSAAVRIPLTGPSPKAKRLEFRSGDALANPYLAFSVMMLAGIDGIKNQIDPGDGVDVDLFELPADELAKIDTVPSSLNDSLNALKADKDYLLAGGVFTEDFIDNFIDIKYEEVQQLRQRPHPHEFFMYYDA

SEQ ID NO: 101433 - DNA, 1410 bp, Herminiimonas arsenicoxydans
  CDS (1)..(1410): transl_table=11
atgacggcagcagaggtcttgaagatggtgaaagacaacgaagttaaattcgttgattttcgctttgctgacacacgtggcaaagaacagcacgtcactgtgccagtttcgcatttcgatatggataaattcgagtccggtcatgcgtttgatggttcctccatcgcaggctggaaaggtatcgaatcgtcggacatgttgttgatgccggatccaaacaccgccaatatcgatccattctttgaagaaaccacattgttcatgcaatgtgacgtgatcgagccgtcggacggcaaaggttacgaccgtgatccgcgttcgatcgccaagcgcgcagaagcgtatttgaaatcgtccggcatgggcgacactgcttacttcggaccagaaccggaatttttcattttcgacagcatccgctggaaaatcggcatggatggctgctttgtcaagatcgaatcggaagaagcatcgtggagcaccggcgagaaattcgaaggcggcaacacaggtcaccgtcctacagtgaaaggcggctacttcccggtgccgccagtcgacagctttcaggacatgcgttcggaaatgtgcctgattctggaatcgctcggcattccggttgaagtgcatcaccacgaagtggcaggcgctggtcaaaatgaaatcggcagcaagttctcgaccctggtggagcgcgctgactggacccagaacatgaaatacgtgatctggaacgtggcgcacacctacggaaaaaccgcgaccttcatgccgaaacctatcgttggcgacaacggttcgggcatgcacgtgcatcaatcggtatggaaagacggcaaaaacctgttcgcaggcgacggctatgcaggcctgtccgatttcgcgctgtactacatcggcggcatcatcaagcatgccaaggcattgaacgcgatcaccaacccgggtaccaactcgtacaaacgtctggttccaggctttgaagcaccggtcaaactggcatactcggcacgtaaccgttcggcttcgatccgtatcccgcacgtatcgaatcctaaaggtcgccgcgttgaagcgcgtttcccggatccgctggctaacccatacctgtgcttctcggctttgctgatggcaggtctggacggcgtacagaacaagatccatccaggcgaagccgcctcgaaagatctgtaccatttgccaccggaagaagatgcgttgatcccaaccgtgtgcgcttcgctggaagaagcactggatgcattgaacaaggatcgtgaattcctgacccgcggtggcgtgttcagcgatgcaatgatcgatgcatacattgaactgaaaatgcaggaagtgcagcgtttccgcatgacagctcatccggtcgaatacgatatgtactattcgctgtaa

SEQ ID NO: 101434 - protein, 469 aa, Herminiimonas arsenicoxydans
MTAAEVLKMVKDNEVKFVDFRFADTRGKEQHVTVPVSHFDMDKFESGHAFDGSSIAGWKGIESSDMLLMPDPNTANIDPFFEETTLFMQCDVIEPSDGKGYDRDPRSIAKRAEAYLKSSGMGDTAYFGPEPEFFIFDSIRWKIGMDGCFVKIESEEASWSTGEKFEGGNTGHRPTVKGGYFPVPPVDSFQDMRSEMCLILESLGIPVEVHHHEVAGAGQNEIGSKFSTLVERADWTQNMKYVIWNVAHTYGKTATFMPKPIVGDNGSGMHVHQSVWKDGKNLFAGDGYAGLSDFALYYIGGIIKHAKALNAITNPGTNSYKRLVPGFEAPVKLAYSARNRSASIRIPHVSNPKGRRVEARFPDPLANPYLCFSALLMAGLDGVQNKIHPGEAASKDLYHLPPEEDALIPTVCASLEEALDALNKDREFLTRGGVFSDAMIDAYIELKMQEVQRFRMTAHPVEYDMYYSL

SEQ ID NO: 101435 - DNA, 1410 bp, Bradyrhizobium sp. ORS278
  CDS (1)..(1410): transl_table=11
atgaagaccgccaaggacgtcttgaaagcaatcaaagacaacgacgtcaaatacgtcgacctccgcttcaccgacccgcggggcaagtggcagcacgtcaccttcgacgtcagcatgatcgatgaagacattttcgctgaaggcaccatgttcgacggctcctcgatcgccggctggaaggcgatcaacgaatccgacatgtgcctgatgcccgacccggtgaccgcgacgatcgatccgttcttcgccgaaaccaccatgatcatcacctgcgacgtgctcgagccgaccaccggcgagccgtacaaccgcgacccccgcggcatcgccaagaaggccgaggcgatggtgaagtcgatgggcgtgggcgattccgtgttcgtcggccccgaggccgagtttttcgtgttcgacgacgtgcgctacagctcctcgccgtacaacaccggcttccgcctcgactcctcggagctgccgaccaactccgataccgagtatgagggcggcaacctcggccaccgcatccgcaccaaggccggctacttcccggtgccgccgcaggactcggtgcaggacatgcgctcggagatgctcggcgcaatggctcgcatgggcgtcaaggtcgagaagcaccatcacgaggtcgcctccgcccagcacgagctcggcatgaagttcgacacgctgaccctgatggccgaccagatgcagatctacaagtactgcatccagcaggtcgcgcacatctacggcaagaccgccaccttcatgccgaagccggtgtacggcgacaacggctcgggcatgcacgtccaccagtcgatctggaaggacggcaagccggtgttcgcgggcaacaaatattccgacctgtcggagacctgcctgtcctacatcgccggcatcatcaagcacgccaaggccatcaacgccttcaccaacccgtcgaccaactcctacaagcgtctggtgccgggctatgaggcgccggtgctgctcgcctactccgcgcgcaaccgctcggcctcgtgccgcatcccctacacctcctcgccgaaggccaagcgcgtcgaggtccgcttccccgatccgctcgccaacccgtatctcggcttcgccgcgatgctgatggccggcctcgacggcatcaagaacaagatggatccgggtccggcgatggacaaggacctctacgacctgccgaaggaggagctgaagcagatcccgaccgtttgcggttcgctccgcgaggcgctcgagaacctcgacaaggaccgcgccttcctgaaggccggcggcgtgttcgacgacgacttcatcgacagctacatcgaactgaagatgaccgaggtcgcgcgcttcgaaatgaccccgcacccggtcgagttcgacatgtactactcgggctga

SEQ ID NO: 101436 - protein, 469 aa, Bradyrhizobium sp. ORS278
MKTAKDVLKAIKDNDVKYVDLRFTDPRGKWQHVTFDVSMIDEDIFAEGTMFDGSSIAGWKAINESDMCLMPDPVTATIDPFFAETTMIITCDVLEPTTGEPYNRDPRGIAKKAEAMVKSMGVGDSVFVGPEAEFFVFDDVRYSSSPYNTGFRLDSSELPTNSDTEYEGGNLGHRIRTKAGYFPVPPQDSVQDMRSEMLGAMARMGVKVEKHHHEVASAQHELGMKFDTLTLMADQMQIYKYCIQQVAHIYGKTATFMPKPVYGDNGSGMHVHQSIWKDGKPVFAGNKYSDLSETCLSYIAGIIKHAKAINAFTNPSTNSYKRLVPGYEAPVLLAYSARNRSASCRIPYTSSPKAKRVEVRFPDPLANPYLGFAAMLMAGLDGIKNKMDPGPAMDKDLYDLPKEELKQIPTVCGSLREALENLDKDRAFLKAGGVFDDDFIDSYIELKMTEVARFEMTPHPVEFDMYYSG

SEQ ID NO: 101437 - DNA, 1332 bp, Dehalococcoides sp. BAV1
  CDS (1)..(1332): transl_table=11
atgacgagagcagaatccgtagagtacgttcttaaaacggccaaagatcataatgttcggtttattcgcctatggtttactgacattttgggttcactgaaaagtttttccattgcttataacgagcttgaaagagcgttggaagacggtatgggttttgatggttcatctatcgaaggttatgcccgcatagacgaatccgatatggtagccttgcccgatccggataccttcaagattataccttggtccaatggtgattatcaggttgggcgcatgttttgcgatatcaagaaaccgtcaggcgaacagtttgagggtgacccccgctatgtccttaagcgcaatcttaaaaaagcggctgagatgggttttaccttctatattggtcctgaactggagtatttttatttcaaaaatgaccattcaaccgaatttctggatgaaggcggctactttgacctgactccccgtgatttggctactgaccttcggcgtgaaaccattgtggctttgcaagatatgggcatcatcgttgaatatgctcaccatgaagttgctcccagccaacatgaaatagatatccgctatactgatgctctgaccatggcggacaatgttatgacctatcgcttgctggttaaagaagtggccatgcggcatggtctgcatgctagctttatgcccaagcccgtcggttccgtaaatggttccggcatgcatacccatcagagccttttcaagggtgacaggaacgctttctttgatgccaaagattcatattacctgtccaccatggccaagcaatatattgcaggcatactcaaatatgctcccgaatttacttcagttaccaatcagtggataaactcatacaagcgtcttgtacccggttttgaagcccctgtatatctttcttgggctcgccgtaaccgggctgacctggtaagagttcctgagtacaaaccgggacatgaaaagtccacccgtattgagcttcgctctgctgatccgggctgtaacccctacttggctttcagcgttatgctggccgccggtctcaagggtatcgaggaaaaactgacacctcctgctcctatagaagagaatgtttacgaaatgaacgaagctgaacgtgccaagcgcggtatcgggactttgcccggcagtttgctggaagccctgaagctgactgaaggcagttcactggtgcgtgaagctctgggtgaccatgtttttgatgcatttgtggctaacaagaaaatagaatggagccagtacagcatagctgttactgactgggaacttaagagatatctgcccgttctataa

SEQ ID NO: 101438 - protein, 443 aa, Dehalococcoides sp. BAV1
MTRAESVEYVLKTAKDHNVRFIRLWFTDILGSLKSFSIAYNELERALEDGMGFDGSSIEGYARIDESDMVALPDPDTFKIIPWSNGDYQVGRMFCDIKKPSGEQFEGDPRYVLKRNLKKAAEMGFTFYIGPELEYFYFKNDHSTEFLDEGGYFDLTPRDLATDLRRETIVALQDMGIIVEYAHHEVAPSQHEIDIRYTDALTMADNVMTYRLLVKEVAMRHGLHASFMPKPVGSVNGSGMHTHQSLFKGDRNAFFDAKDSYYLSTMAKQYIAGILKYAPEFTSVTNQWINSYKRLVPGFEAPVYLSWARRNRADLVRVPEYKPGHEKSTRIELRSADPGCNPYLAFSVMLAAGLKGIEEKLTPPAPIEENVYEMNEAERAKRGIGTLPGSLLEALKLTEGSSLVREALGDHVFDAFVANKKIEWSQYSIAVTDWELKRYLPVL

SEQ ID NO: 101439 - DNA, 1410 bp, Bartonella quintana str. Toulouse
  CDS (1)..(1410): transl_table=11
atgataaccgcatcagacattcttaaaaaaattacagacaatgacatacgttttgtcgatttacgctttactgatccaagagggaaattgcatcacgtcacaatcgataatgcagaaatcagtgaagatacatttaatgatggtgttctgtttgatggttcttcaatttctggatggaaaacaattaatgaatccgacatggttttgatgccagatccagaaacagcacatattgatcctttttttgctcaatcaactttggtcatattttgtgacgtgctcgatcctgtttctggagaattttatcgcagagatcctcgttctatcgccaaaagagctgaagtttatatgaaatctttaggaattggagatacaatcaatgtaggtccagaagcagaattttttatctttgatgatgtacgctataaaactgacccttacaatacaggatttaaactcgattcaggtgaatttccatcaaatgatgatactgaatatgagacgggcaatttcggccatcgcccacggataaaggggggatatcttccagttcctccagttgattcctgccaagacatacgctctgaaatgctgacagcactaaaagatatgggtgttcgcgttgagaaacatcatcacgaagtggctgcgggccagcatgaattgggtattcgctttgatactctcgttcgtgaagctgataagatacaaatttttaaatatgttgtgcatcaaatagcaaaaagctacggaaaaacagcaactttcatgccaaaaccggttttcggtgataacggctcaggtatgcatgttcacatgtccatctggaaagatggcaaaccaatctttgccggaaatgaatatgccggactatcagaaacctgcttattctttatcggtggtatcattaagcatgcaaaagcaatcaatgccttcaccaatccatctacaaactcctataagcgtttggttcctggttacgaagctcctgtccttcttgcttattccgcacgtaatcgttctgcatcttgccgtattcccatgggtttttcgccaaattcaaaacgcgtagaagttcgtttcccagacccaacagcaaatccgtattttgcgtttgcagcactcttaatggctggtcttgatggcattaaaaacaaaattcatcctggccatgctatggataaagacctttatgatcttccaccaaaagagctcaaagaaattcccacggtttcaggaagtctgcgcgaagcacttgaagaactcgataaagatcgtcgctttcttaaagctggtgacgtttttgatgatgatcaaattaattctttcattcaagtaaaaatgcaagaagtcttgcgctacgaaacaactccacatcctatcgaatttgatatgtactattccgtttaa

SEQ ID NO: 101440 - protein, 469 aa, Bartonella quintana str. Toulouse
MITASDILKKITDNDIRFVDLRFTDPRGKLHHVTIDNAEISEDTFNDGVLFDGSSISGWKTINESDMVLMPDPETAHIDPFFAQSTLVIFCDVLDPVSGEFYRRDPRSIAKRAEVYMKSLGIGDTINVGPEAEFFIFDDVRYKTDPYNTGFKLDSGEFPSNDDTEYETGNFGHRPRIKGGYLPVPPVDSCQDIRSEMLTALKDMGVRVEKHHHEVAAGQHELGIRFDTLVREADKIQIFKYVVHQIAKSYGKTATFMPKPVFGDNGSGMHVHMSIWKDGKPIFAGNEYAGLSETCLFFIGGIIKHAKAINAFTNPSTNSYKRLVPGYEAPVLLAYSARNRSASCRIPMGFSPNSKRVEVRFPDPTANPYFAFAALLMAGLDGIKNKIHPGHAMDKDLYDLPPKELKEIPTVSGSLREALEELDKDRRFLKAGDVFDDDQINSFIQVKMQEVLRYETTPHPIEFDMYYSV

SEQ ID NO: 101441 - DNA, 1416 bp, Acinetobacter sp. ADP1
  CDS (1)..(1416): transl_table=11
atgagcatggcgaacaaggtccttaaactcatacaagaaagtggcgcaaaatgggtcgattttcgctttacggatacaaaagggaaagagcagcacgtcacttacccagctgattcgattgatgaagatacatttgaagacggtaaaatgtttgacggttcttcaattgcgggctggaaaggtatcgaagcatctgacatgattttacgtccagatgcagaaactggttttatcgacccgttctttgctgagccaacagttgttgttacttgtgacgtaatcgagccatctactggccaaggttatgagcgtgacccacgttcgattgctcgtcgtgcagaagagtatttaaaatctacaggtatcggtgatactgcattctttggtccagaaccagaattcttcgtttttgacgaagtaaaatgggaaattgatatgtctggcgcgcgtcatacgttgatcgccgaagaagctgcatggtctacaggtaaagattacgagtctggtaactctggtcaccgtccacgtgttaaaggcggttatttcccagttcctccagttgattcttcgcatgatatgcgtgctgagatgtgtaacaaaatcgaagaaatcatggggcctggtcgtgtagaagtacaccaccacgaagttgcatcttgccagttagaaattggtgtaagcttcaacactatggttcgtaaagcagacgaagtacaacagtttaaatatgctgttcacaacgttgcgcatcaatatgcaaaaactgcaacttttatgcctaaaccaatggtaggtgataacggttctggtatgcacgttcacatgtcgatctctaaagacggcaagaacctgtttgctggtgatgaatatgcaggcctttcagaaatggcattgtacttcattggtggtgttatcaagcacgcgcgtgccttgaatgcaatcacaaacccatctacaaactcttataagcgtttggttccacacttcgaagcaccaatcatgcttgcttactcagcgcgtaaccgttctgcttctatccgtattccttacgtttctagcccgaaaggcaagcgtattgaagcgcgtttcccagatccaatgatgaacccgtacttaggtttcgctgcattgttgatggcgggtattgatggtattcaaaacaagatccatccaggtgaagctgccgacaagaacttgtacgatcttcctcctgaagaagaagcaaaaatcccaacagttgcacacagcctagatatggcgcttgaagctcttcaagctgaccatgaattcttgttaaaaggcggtgtgttcaccaaagaaatgcttgatgcttacatcgaacttaaaactgaagaagtacgccgtttaaatacgacgactcacccagttgaatttgatatgtattacagcttgtaa

SEQ ID NO: 101442 - protein, 471 aa, Acinetobacter sp. ADP1
MSMANKVLKLIQESGAKWVDFRFTDTKGKEQHVTYPADSIDEDTFEDGKMFDGSSIAGWKGIEASDMILRPDAETGFIDPFFAEPTVVVTCDVIEPSTGQGYERDPRSIARRAEEYLKSTGIGDTAFFGPEPEFFVFDEVKWEIDMSGARHTLIAEEAAWSTGKDYESGNSGHRPRVKGGYFPVPPVDSSHDMRAEMCNKIEEIMGPGRVEVHHHEVASCQLEIGVSFNTMVRKADEVQQFKYAVHNVAHQYAKTATFMPKPMVGDNGSGMHVHMSISKDGKNLFAGDEYAGLSEMALYFIGGVIKHARALNAITNPSTNSYKRLVPHFEAPIMLAYSARNRSASIRIPYVSSPKGKRIEARFPDPMMNPYLGFAALLMAGIDGIQNKIHPGEAADKNLYDLPPEEEAKIPTVAHSLDMALEALQADHEFLLKGGVFTKEMLDAYIELKTEEVRRLNTTTHPVEFDMYYSL

SEQ ID NO: 101443 - DNA, 1410 bp, Erwinia carotovora subsp. atroseptica SCRI1043
  CDS (1)..(1410): transl_table=11
atgtccgcagaacatgttttgacgatgctgaatgagcacgaagtgaagtttgttgatttacgcttcacggatactaaaggtaaagagcagcacgtcaccattccggctcatcaagtcaatgccgacttcttcgaagaaggtaaaatgtttgatggttcctcgattggcggctggaaaggtattaacgagtcagacatggttctgatgcctgatgccagcacagcgatgattgatccgttcttcgaagatactacgctgatcattcgttgtgacatccttgagccaggcaccatgcaaggctatgaccgtgacccgcgttctatcgcgaaacgtgcggaagatttcctgcgttcttccggtatcgccgacaccgtcctgttcgggcctgagccagaattcttcctgtttgatgacatccgtttcggcagcagcacttcaggttcccatgttgctatcgacgatgtcgaagcctactggaactccggtaaagcatacgaaggtggtaacaaaggtcaccgtccaggcctgaaaggcggctatttcccagttccacctgtcgattcatcacaggacatccgttctgctatgtgtctgaccatggagcaaatgggtctggttgttgaagctcaccaccatgaagtggctaccgctggtcagaacgaagtggctacccgcttcaataccatgaccaaaaaagctgacgaaattcagatctacaaatatgtcgtgcataacgtggctcacgcctacggtaaaacagcgaccttcatgccaaaacctatgttcggtgataacggttctggtatgcactgccacatgtctctgtctaaagacggcactaacctgttcgctggcgacaaatacggcggcctgtctgaaatggctctgttctacatcggcggtgttatcaagcacgctaaagccatcaacgccctggcgaacccgaccaccaactcctacaagcgtctggttccaggctacgaagcacctgttatgctggcttactctgcccgtaaccgttctgcttcaatacgtatcccagtggttgctagcccgaaagcacgtcgtatcgaagcgcgcttcccagatccagcagctaacccgtacctgtgcttcgctgcactgctgatggctggcctcgacggcatcatcaacaaaatccaccctggcgatgcgatggacaaaaacctgtacgacctgccgccggaagaagaagcagagattccaaaagttgcaggttctctggacgaggccctggctgcactgaacgaagaccgcgagttcctgacccgtggtggcgtgttcaccgacgacgctatcgaagcgtatatcgaactgcgtaaacctgagattgaccgcgttcgtatgacgccacacccagttgagttcgaactgtactacagcgtgtaa

SEQ ID NO: 101444 - protein, 469 aa, Erwinia carotovora subsp. atroseptica SCRI1043
MSAEHVLTMLNEHEVKFVDLRFTDTKGKEQHVTIPAHQVNADFFEEGKMFDGSSIGGWKGINESDMVLMPDASTAMIDPFFEDTTLIIRCDILEPGTMQGYDRDPRSIAKRAEDFLRSSGIADTVLFGPEPEFFLFDDIRFGSSTSGSHVAIDDVEAYWNSGKAYEGGNKGHRPGLKGGYFPVPPVDSSQDIRSAMCLTMEQMGLVVEAHHHEVATAGQNEVATRFNTMTKKADEIQIYKYVVHNVAHAYGKTATFMPKPMFGDNGSGMHCHMSLSKDGTNLFAGDKYGGLSEMALFYIGGVIKHAKAINALANPTTNSYKRLVPGYEAPVMLAYSARNRSASIRIPVVASPKARRIEARFPDPAANPYLCFAALLMAGLDGIINKIHPGDAMDKNLYDLPPEEEAEIPKVAGSLDEALAALNEDREFLTRGGVFTDDAIEAYIELRKPEIDRVRMTPHPVEFELYYSV

SEQ ID NO: 101445 - DNA, 1422 bp, Propionibacterium acnes KPA171202; identical to SEQ ID NO: 74277
  CDS (1)..(1422): transl_table=11

SEQ ID NO: 101446 - protein, 473 aa, Propionibacterium acnes KPA171202; identical to SEQ ID NO: 74278

SEQ ID NO: 101447 - DNA, 1416 bp, Symbiobacterium thermophilum IAM 14863
  CDS (1)..(1416): transl_table=11
atggcgaaggtcgatcgcgtgctggagatgattgccgaaaaggacattcggctgctggatctgaagtttgtggacgtgctcgggatgctgcaccacctcaccgtgccggtggaggtcgtggatgccgagcaactgagccagggtttcttcttcgacggttcgtcgatccggggcttccgcgggatcgccgagtccgacatgatcctgcggcctgacccggcgacggtggtctgcgatcccttcgtcgaggggccggcgctttccctgatggcggacgtgctggagcccgggctcagggagtacggccgcgatccccgcggagtcgcccgcagggccgaggagtacctccggcagaccggcatcgccgacacctcctactggggcgtcgagatcgagttcttcgtgttcgacaacgtccggttccagaccggcccggacgcctccttctactacgtggactccgcggaggcgcactggaactcaggccgggttcccaacggcgggtacaaggtgaagcaccagcaggggtacctgcgggccctgcccatcgacgaacagaccgacctgcgaaccgccatgacccggcagatgcaggcgctgggtctggtggtggagcggcaccaccacgaggtggcgtcggccgggcaaaacgagatcaacttccgcttctccacgctgacggacacggccgacaaggcgatgctgtacaagtacgcggtgaagaacgtcgccagggcgcacggcaagacggccaccttcatgcccaagccgctctaccgcaactccggcaacgggatgcactgcaaccagtcgctggccaaggacggcgtgaacctgttctacgatcccaacggttacgccaatctgagccagatcgccctctggtatatcggcgggctgctgacccacgcggacgcgctgctggccatcaccaacccgaccaccaactcctacaagcggctggttccgggctacgaggcccccaccaacctggccttctcccgggccaaccggtcggccgcgatccgcattccggtcagcctgtcgcccaagaccacccggatcgagttccgcacgccggatcccacggccaacccgtacctggccctggccgcccagctcatggccggcctcgacggcatccgccggcggatcgacccgacggcggcgggcttcggtcccgtggatatcgacatctaccaccacgccgggtcggccgcggtgcagctgaagcacgtgccttcttcgctgcgccaggcggtggaggcgctgaaggccgatcacgagttcctgctggagggcgacgtcttctcggaggacctgatcgagaccttcatcgccttgaaggaagacgagatccggaatctggagacgcatccccatccggtggagttcgagatgtatttcgacaactga

SEQ ID NO: 101448 - protein, 471 aa, Symbiobacterium thermophilum IAM 14863
MAKVDRVLEMIAEKDIRLLDLKFVDVLGMLHHLTVPVEVVDAEQLSQGFFFDGSSIRGFRGIAESDMILRPDPATVVCDPFVEGPALSLMADVLEPGLREYGRDPRGVARRAEEYLRQTGIADTSYWGVEIEFFVFDNVRFQTGPDASFYYVDSAEAHWNSGRVPNGGYKVKHQQGYLRALPIDEQTDLRTAMTRQMQALGLVVERHHHEVASAGQNEINFRFSTLTDTADKAMLYKYAVKNVARAHGKTATFMPKPLYRNSGNGMHCNQSLAKDGVNLFYDPNGYANLSQIALWYIGGLLTHADALLAITNPTTNSYKRLVPGYEAPTNLAFSRANRSAAIRIPVSLSPKTTRIEFRTPDPTANPYLALAAQLMAGLDGIRRRIDPTAAGFGPVDIDIYHHAGSAAVQLKHVPSSLRQAVEALKADHEFLLEGDVFSEDLIETFIALKEDEIRNLETHPHPVEFEMYFDN

SEQ ID NO: 101449 - DNA, 1428 bp, Mannheimia succiniciproducens MBEL55E
  CDS (1)..(1428): transl_table=11
atggcaaacccaaatgcaattcaacgcgttgcaaaattaattgaagacaatgacgtaaagttcgtccttcttcgttttaccgatattaaaggtaaagaacacggcgtttcattaccggttaatttagtagctgatgaattagaagacttttttgaagaaggtaaaatgttcgatggttcctcagttgagggttggaaagcaatcaataaagccgatatgcttttaatgccaatgccggaaaccgccgtaattgatcctttcgcacaaatcactaccctttccatccgctgtagcgtttacgaaccaaacaccatgcaaagctatgaccgagaccctcgttcaatcgcgactcgtgccgaaaactatttaaaatcaaccggtatcgcagaccaagcattattcggaccggaaccggaatttttcttatttgacgacgttcgtttcagtacggaaatgaataacgtttcttacaaaatcgacgatattgaagcggcatggaataccaaccgtaaatttgaagacggtaataacgcttatcgtccgttgaaaaaaggcggctattgcgcagtcgcaccaattgataacgcccatgacattcgttccgaaatgtgcttaattttagaagaaatgggattagttattgaagcgcaccaccatgaagttgccaccgccggtcaaaatgaaattgcgtcaaaattcaatacgctaaccttaaaagccgacgaaacgcaaatctataaatatgtggtacaaaatgttgcgttagaatacggtaaaaccgcctgctttatggcaaaaccttttgccggcgataacggttcgggtatgcactgtaatatgtcattaagcaaagacggtaaaaacgtattccaaggcgataaatatgccggtctttccgaaaccgcgctttattacatcggcggtattatcaaacacgctaaagcgttaaatgcgttcaccaacccgactactaactcatataaacgtttagtaccgggatttgaagcgcctgtattattagcttattcggcaagtaaccgttcggcttccatccgtattcctgcggtaaccagcccgaaagcaatccgtgttgaagcgcgattcccggatccgttggcaaacccgtatctggctttcgccgcgttattaatggcgggtatcgacggtattatcaataaaatccatccgggcgatgcgatggataaaaacctatacgacttaccgccggaagaattaaaagaaattccggcagtttgttcgtctttggaagaagcccttgattctttacaagccgaccatgaatttttaatccaaggcggcgtattcagtaaagagtttattgatgcctttgttgctatcaaacgtaaagaagtggaacgcgtaaatatgacgccgcatccggtagaatttgaaatgtattatgcttaa

SEQ ID NO: 101450 - protein, 475 aa, Mannheimia succiniciproducens MBEL55E
MANPNAIQRVAKLIEDNDVKFVLLRFTDIKGKEHGVSLPVNLVADELEDFFEEGKMFDGSSVEGWKAINKADMLLMPMPETAVIDPFAQITTLSIRCSVYEPNTMQSYDRDPRSIATRAENYLKSTGIADQALFGPEPEFFLFDDVRFSTEMNNVSYKIDDIEAAWNTNRKFEDGNNAYRPLKKGGYCAVAPIDNAHDIRSEMCLILEEMGLVIEAHHHEVATAGQNEIASKFNTLTLKADETQIYKYVVQNVALEYGKTACFMAKPFAGDNGSGMHCNMSLSKDGKNVFQGDKYAGLSETALYYIGGIIKHAKALNAFTNPTTNSYKRLVPGFEAPVLLAYSASNRSASIRIPAVTSPKAIRVEARFPDPLANPYLAFAALLMAGIDGIINKIHPGDAMDKNLYDLPPEELKEIPAVCSSLEEALDSLQADHEFLIQGGVFSKEFIDAFVAIKRKEVERVNMTPHPVEFEMYYA

SEQ ID NO: 101451 - DNA, 1335 bp, Bacillus licheniformis ATCC 14580; identical to SEQ ID NO: 32157
  CDS (1)..(1335): transl_table=11

SEQ ID NO: 101452 - protein, 444 aa, Bacillus licheniformis ATCC 14580; identical to SEQ ID NO: 32158

SEQ ID NO: 101453 - DNA, 1407 bp, Anaplasma marginale str. St. Maries; identical to SEQ ID NO: 74281
  CDS (1)..(1407): transl_table=11

SEQ ID NO: 101454 - protein, 468 aa, Anaplasma marginale str. St. Maries; identical to SEQ ID NO: 74282

SEQ ID NO: 101455 - DNA, 1407 bp, Silicibacter pomeroyi DSS-3
  CDS (1)..(1407): transl_table=11
atgagcaaggacgcagttcttcagctgatcaaggacgagggtgccgaatatgtcgacatccgcttcaccgacccgcgcggcaagctgcaacacgtgaccatcgtgtccgatctggtcgacgaggatttcctggaagaaggcttcatgttcgacggttcgtcgatcgccggctggaagtcgatcgaagcctcggacatgaaactgatgcccgacaccgaaagcgcctatgtcgatccgttctacgcggaaaagaccatctgcattcattgctcggtggtcgagcccgacaccggcgaggcctatgaccgcgacccgcgcggcaccgccgtcaaggccgaggcctatctgaaggcatcgggcatcggcgatgtggcctatatgggtcccgaggccgaattcttcctgttcgacgacgtgcgcttctcgaacacgatcaacaaggtctcctatgaggtcgacgcaaccgacgcttcgtggaattcggatgccgagttcgagaccggcaacatgggtcaccgtcccggcctgaagggcggctatttcccggtcaacccgatcgacgaggcgcaggacctgcgcgccgagatgctctcgaccatgaagcgcatgggcatgaaggtcgacaagcaccaccacgaagtggcctcgtgccagcacgagctgggcctgatcttcggcacgctgaccaagcaggccgacgagatccagaaatacaaatacgtgatccacaacgtggcgcatgcatatggcaagtcggcaaccttcatgcccaagccgatctatggcgacaacggttcgggcatgcatgtgaacatgtcgatctggaaagacggcaagccgctgtttgccggtgacaaatatgccgatctgagccaggaggcgctgtatttcatcggcggcatcctcaagcacgccaagacgctgaacgccttcaccaacccgggcaccaacagctacaagcgcctgatccccggtttcgaggcccccgttctgcgcgcctactcggcccgcaaccgctcgggctgcgtccgtatcccatggaccgaaagccccaaggccaagcgcgtcgaggcccgcttccccgatccgtcggcaaacccctatctgtgctttgccgcgctgctgatggccggcctcgacggcatcaagaacaagatcgatccgggcgaagccatggacaagaacctctacgacctgcccgccgaggaattggccgacatccccaccgtctgcggctcgctgcgcgaggcgctggaatgcctggcctccgatcacgacttcctgctgcagggcgacgtgttcaccaaggatcagatcgaaggctatatcgagctgaagatggaagaggtccacaaatacgaacacaccccgcacccggtggagttcggcatgtactacagctgctga

SEQ ID NO: 101456 - protein, 468 aa, Silicibacter pomeroyi DSS-3
MSKDAVLQLIKDEGAEYVDIRFTDPRGKLQHVTIVSDLVDEDFLEEGFMFDGSSIAGWKSIEASDMKLMPDTESAYVDPFYAEKTICIHCSVVEPDTGEAYDRDPRGTAVKAEAYLKASGIGDVAYMGPEAEFFLFDDVRFSNTINKVSYEVDATDASWNSDAEFETGNMGHRPGLKGGYFPVNPIDEAQDLRAEMLSTMKRMGMKVDKHHHEVASCQHELGLIFGTLTKQADEIQKYKYVIHNVAHAYGKSATFMPKPIYGDNGSGMHVNMSIWKDGKPLFAGDKYADLSQEALYFIGGILKHAKTLNAFTNPGTNSYKRLIPGFEAPVLRAYSARNRSGCVRIPWTESPKAKRVEARFPDPSANPYLCFAALLMAGLDGIKNKIDPGEAMDKNLYDLPAEELADIPTVCGSLREALECLASDHDFLLQGDVFTKDQIEGYIELKMEEVHKYEHTPHPVEFGMYYSC

SEQ ID NO: 101457 - DNA, 1413 bp, Haemophilus influenzae 86-028NP
  CDS (1)..(1413): transl_table=11
atgtcaaatgccattgcttccgtgtttaaattgatcgaagagaatgatattaggtttgtattgcttcgttttactgacattaaaggtaaagaacatggtgtttctatcccagttagccttgttgatgaagatatgtttgaagacggcaagatgtttgatggttcctctgttgaaggttggaaaaccattaataaagccgatatgttgcttatgccaatagctgaaaccgcagttgtcgatccattcgcgcaaattccgacactttctattcgttgtagtgtttatgaaccaacgacaatgcaaagctatgatcgcgatccgcgctctattgcaattcgtgcagaaaattatatgcgttcaacaggtattgcggatcaagctttttttggccctgaacctgaattcttcttatttgatgatgtgcgttttaatgtatcaatgaacaaagcgtctttttctattgatgatatagaagctgcttggaacacgaataaaaaatatgaagaaggcaataatgcttatcgcccattaaaaaaaggcggatattgtgccgttgcaccgattgatagtgcgcacgatattcgttctgaaatgtgcttgattttagaagaaatgggattagtcatcgaagcccatcatcatgaagtggctactgcagggcaaaacgaaattgcgactaaattcaatacgctcactttaaaagcggatgaaactcaaatctataaatatgtggtgcaaaatgtggcattggagcatggtaaaacggcgtgttttatgccaaaaccaattactggagataatggttcgggtatgcactgtaatatgtcgttaagtaaagacggaaaaaatattttccaaggcgataaatatgcaggcctttctgaaaccgcactttactacatcggcggtatcattaagcacgctaaagccttaaatgcgttcactaatccaagtactaattcatataaacgtttagtgcctggttatgaagcaccagtattgttggcttactctgcaagcaatcgttcagcctcaattcgtattcctgctgtaaccaatccgaaagcgattcgcgtagaagcgcgtttcccagatccattggcaaacccatatttagcatttgctgcattattaatggcaggtcttgatggcgtggtaaacaaaatccacccaggcgatgcgatggataaaaatctttacgatcttcctccagaagaattaaaagatattccagctgttgcaagctctttagaagaagcattgaattcattagaaaaagactatgaatttttaacccaaggtggcgtatttgctaaagattttattgatgcgtttatcagtatcaaacgtaaagaagtggaacgtttaaatatggcaccacatccagttgaatttgaaatgtattatgcgtaa

SEQ ID NO: 101458 - protein, 470 aa, Haemophilus influenzae 86-028NP
MSNAIASVFKLIEENDIRFVLLRFTDIKGKEHGVSIPVSLVDEDMFEDGKMFDGSSVEGWKTINKADMLLMPIAETAVVDPFAQIPTLSIRCSVYEPTTMQSYDRDPRSIAIRAENYMRSTGIADQAFFGPEPEFFLFDDVRFNVSMNKASFSIDDIEAAWNTNKKYEEGNNAYRPLKKGGYCAVAPIDSAHDIRSEMCLILEEMGLVIEAHHHEVATAGQNEIATKFNTLTLKADETQIYKYVVQNVALEHGKTACFMPKPITGDNGSGMHCNMSLSKDGKNIFQGDKYAGLSETALYYIGGIIKHAKALNAFTNPSTNSYKRLVPGYEAPVLLAYSASNRSASIRIPAVTNPKAIRVEARFPDPLANPYLAFAALLMAGLDGVVNKIHPGDAMDKNLYDLPPEELKDIPAVASSLEEALNSLEKDYEFLTQGGVFAKDFIDAFISIKRKEVERLNMAPHPVEFEMYYA

SEQ ID NO: 101459 - DNA, 1407 bp, Pseudomonas fluorescens Pf-5
  CDS (1)..(1407): transl_table=11
atgtcgaagtcggttcaactcatcaaagatcatgacgtcaaatggattgatctgcgcttcactgacaccaagggcactcaacatcacgtgaccatgccggctcgtgatgcgctggatgaagacttcttcgaagctggcaagatgttcgacggctcctccatcgctggctggaaaggcatcgaagcctccgacatgatcctgatgccggacgacgaaaccgccgtactggacccgttcaccgaagaaccgaccctgatcctggtgtgcgacatcatcgagccttcgagcatgcagggttacgatcgtgacccacgtgccatcgccaagcgcgccgaagagcacctgaaagccaccggtatcggcgacaccgtattcgccggcccagagccagagttcttcatcttcgaccaggtgaaattcaagtccgacatctccggctccatgttcaagatctactccgaacaaggttcgtggatgtccgaccaggacatcgaaggcggtaacaagggccaccgtccaggcgtcaagggcggctacttcccggttccaccgttcgaccacgaccacgaaatccgtacctccatgtgcaacgcactggaagaaatgggcctgaccgtcgaagttcaccaccacgaagtggcgactgccggccagaacgaaatcggcgtcaagttcaacaccctggtgaagaaggccgacgaaacccagaccctgaagtacgtggtgcacaacgtggctgacgcctacggccgcactgccaccttcatgcccaagcctctgtacggcgacaacggctcgggcatgcacgtccacatgtcgatctggaaagacggcaagaacaccttcgcaggtgaaggctatgccggcctgtccgataccgccctgtacttcatcggcggcatcatcaagcacggtaaggccctgaacggcttcaccaacccggcgaccaactcctacaagcgtctggtgccaggcttcgaagccccggtcatgctggcctactcggcgcgcaaccgttccgcttcgatccgtattccttacgtgtcgagccctaaggcccgccgtatcgaagcccgtttcccggacccggctgccaacccgtacctggccttcgctgccctgctgatggccggcctggacggtatccagaacaagatccaccctggcgacgctgctgacaaaaacctgtacgacctgccgcctgaagaggccaaagagatcccacaagtttgcggcagcctgaaggaagccctggaagagctggacaaaggtcgtgcgttcctgaccaaaggcggcgttttcagcgacgacttcatcgacgcctacatcgccctgaaaagcgaagaagaaatcaaggtacgtaccttcgtacacccactggaatacgagctgtactacagctgctga

SEQ ID NO: 101460 - protein, 468 aa, Pseudomonas fluorescens Pf-5
MSKSVQLIKDHDVKWIDLRFTDTKGTQHHVTMPARDALDEDFFEAGKMFDGSSIAGWKGIEASDMILMPDDETAVLDPFTEEPTLILVCDIIEPSSMQGYDRDPRAIAKRAEEHLKATGIGDTVFAGPEPEFFIFDQVKFKSDISGSMFKIYSEQGSWMSDQDIEGGNKGHRPGVKGGYFPVPPFDHDHEIRTSMCNALEEMGLTVEVHHHEVATAGQNEIGVKFNTLVKKADETQTLKYVVHNVADAYGRTATFMPKPLYGDNGSGMHVHMSIWKDGKNTFAGEGYAGLSDTALYFIGGIIKHGKALNGFTNPATNSYKRLVPGFEAPVMLAYSARNRSASIRIPYVSSPKARRIEARFPDPAANPYLAFAALLMAGLDGIQNKIHPGDAADKNLYDLPPEEAKEIPQVCGSLKEALEELDKGRAFLTKGGVFSDDFIDAYIALKSEEEIKVRTFVHPLEYELYYSC

SEQ ID NO: 101461 - DNA, 1410 bp, Psychrobacter arcticus 273-4
  CDS (1)..(1410): transl_table=11
atgtcaaataaactacttgatctgatcaaatcatccaacgctaaatgggtcgattttcgcttcactgatacccgcggtaaagagcatcatatgagctttccagctcatagcgttgatgaagaatcgatggaagatggcaaaatgtttgatggctcatcgattgctggttggaaagggattgaagcatcagacatgattttgcgtcctgatcctgagacggcgtttattgacccgttctttgatgcggttactgttgtcgtgacttgtgacatcattgagccatcaaccctacaaggttatgaccgtgatccacgctctattgcgcgccgtgctgaagagtatttaaaatctaccggtattggtgatacggctttttttggtcctgagcctgagttctttgtatttgatgaggtaaaatggtctgtgggcatgtctggtgtcagtcatgaaatcgtcgctgaagaagccgcatggtcaaccaataaagactatgagtggggcaacatgggtcatcgcccacgtgtcaaaggcggttatgtaccagtaccacctgttgatagctcacaagatatgcgtaccgtcatgtgtgatcgcatcgaagatatgattggtgaaggctgtatcgaagtacatcaccacgaagttgccccttgtcagttagaaattggcgttgcttttaacacgcttgtacgcaaggcagatgaagtacaaaagctcaaatatgccgtacataacgttgctcatcagtttggaaaaacagcaacctttatgccaaagcctatcgttggtgataatggttctggtatgcacgtgcatatctcaatctcaaaagatggggttaacaccttctctggcgatgaatatgcaggcttgtctgaaacggcattgtatttcgtaggcggtatcattaaacacgctcgtgcgcttaatgcgattaccaatccatcgaccaacagctacaagcgtctagtgccccattatgaagcgcctatcaagcttgcatactcagcatctaaccgctcagcatctatccgtattccacacgtcagcagcccaaaagcggtgcgtgttgaagcgagattccctgatccagcagccaacccatacttagcgtttgctgcactgttgatggcgggtcttgacggtattcaaaacaaaatgcatccaggtgaagccgctgacaaaaacttgtatgatttgccgccagaagaagaagcattgattccaacggtcgctgaaaatttagaagtggcattgcaagcactaaaagatgatcatgaatttttattaaaaggtgatgtattcaccaaagagatgttagaggcttatattgctctcaagcaagaagaagtacagcgcgtcaatatcacggtacatcccgttgagtttgacttgtattacagctgctaa

SEQ ID NO: 101462 - protein, 469 aa, Psychrobacter arcticus 273-4
MSNKLLDLIKSSNAKWVDFRFTDTRGKEHHMSFPAHSVDEESMEDGKMFDGSSIAGWKGIEASDMILRPDPETAFIDPFFDAVTVVVTCDIIEPSTLQGYDRDPRSIARRAEEYLKSTGIGDTAFFGPEPEFFVFDEVKWSVGMSGVSHEIVAEEAAWSTNKDYEWGNMGHRPRVKGGYVPVPPVDSSQDMRTVMCDRIEDMIGEGCIEVHHHEVAPCQLEIGVAFNTLVRKADEVQKLKYAVHNVAHQFGKTATFMPKPIVGDNGSGMHVHISISKDGVNTFSGDEYAGLSETALYFVGGIIKHARALNAITNPSTNSYKRLVPHYEAPIKLAYSASNRSASIRIPHVSSPKAVRVEARFPDPAANPYLAFAALLMAGLDGIQNKMHPGEAADKNLYDLPPEEEALIPTVAENLEVALQALKDDHEFLLKGDVFTKEMLEAYIALKQEEVQRVNITVHPVEFDLYYSC

SEQ ID NO: 101463 - DNA, 1407 bp, Colwellia psychrerythraea 34H
  CDS (1)..(1407): transl_table=11
atgtcacaagcagtattcgacttaattaaagaacacgacgtcaaatttattgaccttcgctttactgattcaaaaggtaaagaacagcacatttctattcctcatcatcaagtaactgaagactttttcgaagatggcaaaatgtttgacggttcatctattgaaggctggaaaggcattgacgaatctgacatggttatgatgcctgatgcatcaacagcgatcctagacccttttactgatgctgttactttaaatatccgttgtgatattttagagccaagcacaatgcaaggttacagccgtgatcctcgttctgttgctaatcgcgctgaagaatatctacgtagtactggtattgccgatgatgtattagttggtccagaaccagagttcttcgtatttgacgatgtacgtttccatactgatatgagtggttctttttataaaattgatgataaagaagcttcttggaactcaggtactgaatacgaagaaggcaatatgggtcatcgtcctggtgttaaaggcggttatttcccaacagctccagttgattcatcacaagatttacgttcagctatgtgcttagttatggaagatatgggcttaattgttgaagcacatcaccatgaagtagctacctgtggccaaaacgaaattgcttgtcgctttaatacactggttaaaaaagctgatgaagttcaaatttataagtatgttgttcataacgtagcacatgcttacggtaaaacagcgactttcatgcctaagcctttagttggtgataacggcactggtatgcacgtacatatgtctcttgctaaagatggtgttaacttattcgctggtgataagtacggcggtttgtctgaaacagcgctttactacattggtggtatcatcaaacatgctaaggcattaaacgcgtttactaaccctgcgactaactcatacaaacgtttagttccacattttgaagcacctgttatgcttgcatactctgcacgtaaccgctctgcatcaattcgtattccacttgtaccatcaccaaaagcaatgcgtattgaagcacgtttccctgatcctgcatgtaacccatacttagctttctctgctttattaatggcgggtcttgacggtattaaaaacaaaacccaccctggcgatgctatggataaggatttatacgacttaccagcagaagaagccgcatcaattccacaagtagcaacatctcttgatgacgcacttgataatttagaagcagattttgaattcttaaccgctggcggcgttatggataaagatatgattgatgcttatattgctattaagcgtgaagaatctcgacgtgtaaacatgactactcacccgttagagtttgaactttactacagcgtttaa

SEQ ID NO: 101464 - protein, 468 aa, Colwellia psychrerythraea 34H
MSQAVFDLIKEHDVKFIDLRFTDSKGKEQHISIPHHQVTEDFFEDGKMFDGSSIEGWKGIDESDMVMMPDASTAILDPFTDAVTLNIRCDILEPSTMQGYSRDPRSVANRAEEYLRSTGIADDVLVGPEPEFFVFDDVRFHTDMSGSFYKIDDKEASWNSGTEYEEGNMGHRPGVKGGYFPTAPVDSSQDLRSAMCLVMEDMGLIVEAHHHEVATCGQNEIACRFNTLVKKADEVQIYKYVVHNVAHAYGKTATFMPKPLVGDNGTGMHVHMSLAKDGVNLFAGDKYGGLSETALYYIGGIIKHAKALNAFTNPATNSYKRLVPHFEAPVMLAYSARNRSASIRIPLVPSPKAMRIEARFPDPACNPYLAFSALLMAGLDGIKNKTHPGDAMDKDLYDLPAEEAASIPQVATSLDDALDNLEADFEFLTAGGVMDKDMIDAYIAIKREESRRVNMTTHPLEFELYYSV

SEQ ID NO: 101465 - DNA, 1416 bp, Dechloromonas aromatica RCB
  CDS (1)..(1416): transl_table=11
atggcaaccccccaagacgtgatcaagatgatcaaggaaaacgacgctaaattcgtcgatttccgtttcaccgatacccgtggcaaggaacagcacgttaccgtgccggtttccgccttcagcgaagacaagttcgaaaacggccacgctttcgacggttcctccattgctggctggaagggcattcaagcctccgacatgcagttgaacccggatccggccaccgcctacatcgatccgttcttcgacgaaaccaccgtcgtcctgacctgcgacgtcgttgatccggccgatggccgtggttacgaccgcgacccgcgttccatcgccaagcgcgctgaagcctacctgaagtcctccggcattggcgacaccgcctacttcggcccggaaccggaattcttcatttttgacggcgtcgaatggaatgtcgacatgtccggctgctccctgaagatccactctgctgaagcagcttggggttctggcgagaagaacgacggcaatggctccaccggccatcgtccgaccgtcaagggcggctacttcccggttcccccggtcgatagcctgcacgacatccgttcggccatggtgctgaccctggaagccctcggctgcccggttgaagttcaccaccacgaagtcgccactgccggtcagtgcgaaatcggtaccgtgttcaacaccctggtcaagcgtgccgaccagacccagatcctgaagtacgtggtgcacaatgttgctcaccagtacggcaagaccgccaccttcatgccgaagcccatcgttggcgacaacggttccggcatgcacgttcaccagtccatctggaaggacggcaagaacctgttcgccggcgacggctatgcaggtctgtccgaactggccctgttctacatcggcggcatcatcaagcatgccaaggcactgaacgccatcaccaacccgggtaccaactcctacaagcgtctggttccgcactacgaagctccggtcaagctggcttactccgccaagaaccgttctgcttccatccgcattccgtacgttgcctccaccaaggctcgtcgtatcgagacccgtttcccggatccgatcgccaacccgtacctgtgcttcgccgcgctgctgatggccggcctggatggtatccagaacaagattcacccgggcgatccggctgacaagaacctgtacgatctgccgccggaagaagatgcaaagatcccgaccgtctgcgcatcgctcgaagaagccttggctgccctggacaaggatcgcgagttcctgacccgtggtggtgtcttctcgaacgactggatcgacgctttcatctccctgaagatggacgaagtgaacaaggttcgcatgacgacccacccggtcgaattcgatctgtactacagctgctaa

SEQ ID NO: 101466 - protein, 471 aa, Dechloromonas aromatica RCB
MATPQDVIKMIKENDAKFVDFRFTDTRGKEQHVTVPVSAFSEDKFENGHAFDGSSIAGWKGIQASDMQLNPDPATAYIDPFFDETTVVLTCDVVDPADGRGYDRDPRSIAKRAEAYLKSSGIGDTAYFGPEPEFFIFDGVEWNVDMSGCSLKIHSAEAAWGSGEKNDGNGSTGHRPTVKGGYFPVPPVDSLHDIRSAMVLTLEALGCPVEVHHHEVATAGQCEIGTVFNTLVKRADQTQILKYVVHNVAHQYGKTATFMPKPIVGDNGSGMHVHQSIWKDGKNLFAGDGYAGLSELALFYIGGIIKHAKALNAITNPGTNSYKRLVPHYEAPVKLAYSAKNRSASIRIPYVASTKARRIETRFPDPIANPYLCFAALLMAGLDGIQNKIHPGDPADKNLYDLPPEEDAKIPTVCASLEEALAALDKDREFLTRGGVFSNDWIDAFISLKMDEVNKVRMTTHPVEFDLYYSC

SEQ ID NO: 101467 - DNA, 1425 bp, Thermobifida fusca YX
  CDS (1)..(1425): transl_table=11
gtgttcagcaacgctgacgaggctcttgcctatatccgcaccgaaggcgttcagttcgtggacgtccggttcaccgacctgttcggtggtgtccaccacgtgacgcttccggccgagaaggttgacgaggacttcctcacgaacgggcagatgttcgacggctcgtcgatccgcggcttccaggcgatccacgagtccgacatgctgctcctgccggacctgagcaccgctgtcctcgaccccttccgcgaatacaagacgctgaacatcacgttcttcgtgcacgacccgctgacccgcgagtcctacagccgcgacccgcggaacgtggcccgcaaggccgaggcgtatctgaagagcacggggatcgcggacaccgcgtacttcggcccggaagccgagttctacattttcgacgacgtccagttcgcgaccgcgccgaacaccggtttctacgcgatcgactcggtggagggcgcgtggaacaccggcagcaagcgggagggcggcaacctcggctaccggccgcgctacaagggtggctacttcccggtggagccgagcgaccactacagcgacctgcggtcccgcatggtgcgcaccatgatcgaggtggggctgccggtggagctgcaccaccacgaggtgggcacggcgggccagtcggagatcggcatcaagttcggcacgctgctgcagcaggctgaccgggtccagttgtacaagtacatcgtcaagaacgtggcgaacgcggcgggcaagacggtgacgttcatgccgaagccgctgttcggcgacaacggctcggggatgcactgccaccagagcctgtggaaggacggcgctcccctgttcttcgacgagaacgggtacgcgcagttgtccgacatcgcccgctactacatcggcggcctgttgaagcacgccccgtcgctgctggcgttcaccaacccgacgatcaactcctaccaccgcctggtgcccggctacgaggcgccgatcaacctggtgtactcgcagcggaaccgttccgcgtgcatccgtatcccgctgaccgggtctgacccgaaggcgaagcggctggagttccgggtgccggacccgtcggccaacccgtacctggcgttctccgcgatgctgatggcggggatcgacgggatccagaacaagatcgagccgccggagccgctggacaaggacctctacgagctgccgccggaggaggccgcggagatcgagaaggtgccggcgtcgctggaggaggcgctggaccacttggaggaggaccacgagtacctggtggagggcggtgtcttcaccgaggacttgatcgagacgtacatcaactacaagcgcacggtggagatcgactcggtccggctgcgtccgcacccgcgcgagttcgagctctactacgacgtctga

SEQ ID NO: 101468 - protein, 474 aa, Thermobifida fusca YX
MFSNADEALAYIRTEGVQFVDVRFTDLFGGVHHVTLPAEKVDEDFLTNGQMFDGSSIRGFQAIHESDMLLLPDLSTAVLDPFREYKTLNITFFVHDPLTRESYSRDPRNVARKAEAYLKSTGIADTAYFGPEAEFYIFDDVQFATAPNTGFYAIDSVEGAWNTGSKREGGNLGYRPRYKGGYFPVEPSDHYSDLRSRMVRTMIEVGLPVELHHHEVGTAGQSEIGIKFGTLLQQADRVQLYKYIVKNVANAAGKTVTFMPKPLFGDNGSGMHCHQSLWKDGAPLFFDENGYAQLSDIARYYIGGLLKHAPSLLAFTNPTINSYHRLVPGYEAPINLVYSQRNRSACIRIPLTGSDPKAKRLEFRVPDPSANPYLAFSAMLMAGIDGIQNKIEPPEPLDKDLYELPPEEAAEIEKVPASLEEALDHLEEDHEYLVEGGVFTEDLIETYINYKRTVEIDSVRLRPHPREFELYYDV

SEQ ID NO: 101469 - DNA, 1473 bp, Ehrlichia canis str. Jake
  CDS (1)..(1473): transl_table=11
atgttgcaaaaacacaagaaacttgatatcctatctgtttttaagcttggtaaccttatcatgttcctttctacagaggatactttaaactacataaaaaaaaatgcaataaattttatagatttaagattcacagattctaacgggaggtggcatcatataacacgtagtgcagaaactacagatgcacaagtgcttttaacaggaattaattttgacagctcatcaatttctggatggcagtcaatagaaaaatctgacatgatattattaccagacatcagtacagcttttgtagatccattctctgctcaatcaacattagtcataatttgtaatatagtagatccgtacaatcaatctcaatacgctaaagatccacgatatacagcacaaaaagcatatgaatatatgctctctacaggaattgctgataagtgttattttggaccagaagtagagttttttgtcttcgacaatgttcaattttatacaggaatgtacgattcttactttaaaatagagtcagcagaacatgatatttcgtatcaaagaagagaattttctaacaataatcaccgtccaagagttaaaggaggatacatgccaactcctcctattgattcattacacgacatcagatcagaaatgttaacaatgttcaaagaagtaggtattacacctctaatacatcaccatgaagttgccgcatcacaatgtgaagtcgggtttcagtatgacgagttacttgctagtgcagataatgtacaaaaatgcaaatacatagtacatggagttacatcatcttatgggaaaactgcaacttttatgccaaaaccagttatcaaagataatggtagtggtatgcactgtcaccaatctctgtggaaagataacgtcaacctttttgtgaattctgatggaaatatatcagacacctgtttatactacataggtggtattataaaatatggaaaagcaattaatgcattcacgaatccttcaacaaacagttataaaagattagtaccacactttgaagccccaacttggttaacttactcatatgaaaataggtctgctgcaattcgtataccatacgtaccacaaaatgatgttaatgctaaaagaatagaggtacgttttccagacccacttgcaaatccttatttatgtttttctgcacagttaatggctggcttatatggtatacaaaataaaattcacccagggcctgcaatagataaaaacctatattcactaaataaagcagaattacaacaattaagttctgttgcaaattctcttgaagattctttagaatccttagataaggatagagaatttttactagcaggaaatgtgtttactaatgatcaaattgactcatatataaatcttaaaacactggaagtaaaagatctacaactacatccacatcctattgaatttataaattattatagttcataa

SEQ ID NO: 101470 - protein, 490 aa, Ehrlichia canis str. Jake
MLQKHKKLDILSVFKLGNLIMFLSTEDTLNYIKKNAINFIDLRFTDSNGRWHHITRSAETTDAQVLLTGINFDSSSISGWQSIEKSDMILLPDISTAFVDPFSAQSTLVIICNIVDPYNQSQYAKDPRYTAQKAYEYMLSTGIADKCYFGPEVEFFVFDNVQFYTGMYDSYFKIESAEHDISYQRREFSNNNHRPRVKGGYMPTPPIDSLHDIRSEMLTMFKEVGITPLIHHHEVAASQCEVGFQYDELLASADNVQKCKYIVHGVTSSYGKTATFMPKPVIKDNGSGMHCHQSLWKDNVNLFVNSDGNISDTCLYYIGGIIKYGKAINAFTNPSTNSYKRLVPHFEAPTWLTYSYENRSAAIRIPYVPQNDVNAKRIEVRFPDPLANPYLCFSAQLMAGLYGIQNKIHPGPAIDKNLYSLNKAELQQLSSVANSLEDSLESLDKDREFLLAGNVFTNDQIDSYINLKTLEVKDLQLHPHPIEFINYYSS

SEQ ID NO: 101471 - DNA, 1410 bp, Thiobacillus denitrificans ATCC 25259
  CDS (1)..(1410): transl_table=11
atggccgtggccgatgtgctcaagagaattcaggacgacgaagtgaagttcgtcgacctgcgcttcaccgatacgcgtggcaaggaacagcacgtttcgattcctgcccgcatcgtgaccgaggactggttcgaggacggccatcccttcgacggctcctcgatcgccggttggaaaggcatccaggcgtccgacatgctgctcaaggccgatcccgactcggcctacatggatcccttcttcgacgagcccacgctgatcctgacctgcgacgtgatcgagccgtccgacggcaagggctacgagcgcgatccgcgttcggtcgcgcgtcgcgccgaggcctacctcaagtcgacggggctggccgatacggcttacttcggacccgagcccgagttcttcattttcgattcgatcacctggcacgacgacatgtcgggctcgggcgtgaagatcaattcggaggaggccgcctggtcgtccgccgagaagttcgagaacggcaacaccggccaccgtccgggcatcaagggcggctacttcccggtgccgccggtcgacagcctgcaggacatccgcgctgcgatggtcgttgcgctggaagaagccggcgttccggtcgaagtcttccaccacgaagtcgcgaccgcgggccagtgcgagatcgggacccagttcagcacgctgaccaagcgcgccgactggacgcaggttctcaagtacatcgtgcacaacgtcgcccacgcctacggcaagacggcgaccttcatgcccaagcccatcgtcggcgacaacggttccggcatgcacgtgcacatgtcgctgtggaaggacggcaagaacaccttcgccggcaacggctacgccgggctgtccgagaccgcgctctattacatcggcggcatcatcaagcacgccaaggcactgaacgcgatcaccaatccgggcaccaactcgtataagcgtctggtgccgggcttcgaagcgccggtcatgctggcctactcggcccgcaaccgctcggcgtcgattcgcattccgatcgctgcgagcgagaaggcacgccgcatcgaggttcgtttcccggacccgctggccaacccctatctggcgttctccgcgctgatgatggcgggcctcgacggcatccagaacaagatccaccccggcgaccccggcgataaggacttgtacgacctgccgcccgaagaggatgcgaagattccgaaggtctgccacagcctcgaaatggcactcgacgagctcgacaaggaccgcgagttcctgactcgtggcggcgtgttcacgaacgacatgatcgatgcctacatcacgctgaagatggaagaggtcacgaagttccgcatgaccacgcacccggtcgagttcgcgatgtactactcgctgtaa

SEQ ID NO: 101472 - protein, 469 aa, Thiobacillus denitrificans ATCC 25259
MAVADVLKRIQDDEVKFVDLRFTDTRGKEQHVSIPARIVTEDWFEDGHPFDGSSIAGWKGIQASDMLLKADPDSAYMDPFFDEPTLILTCDVIEPSDGKGYERDPRSVARRAEAYLKSTGLADTAYFGPEPEFFIFDSITWHDDMSGSGVKINSEEAAWSSAEKFENGNTGHRPGIKGGYFPVPPVDSLQDIRAAMVVALEEAGVPVEVFHHEVATAGQCEIGTQFSTLTKRADWTQVLKYIVHNVAHAYGKTATFMPKPIVGDNGSGMHVHMSLWKDGKNTFAGNGYAGLSETALYYIGGIIKHAKALNAITNPGTNSYKRLVPGFEAPVMLAYSARNRSASIRIPIAASEKARRIEVRFPDPLANPYLAFSALMMAGLDGIQNKIHPGDPGDKDLYDLPPEEDAKIPKVCHSLEMALDELDKDREFLTRGGVFTNDMIDAYITLKMEEVTKFRMTTHPVEFAMYYSL

SEQ ID NO: 101473 - DNA, 1425 bp, Anabaena variabilis ATCC 29413
  CDS (1)..(1425): transl_table=11
atgacaacctcacaagaagtcttgaagagaattcaagatgaaaaaattgagctgattgacctcaagttcatcgacactgtaggtacttggcaacacctcaccttgtaccaaaaccaaatcgatgaaagctccttcaccgatggcgtaccttttgacggttccagcatccggggttggaaagcaatcaacgagtcagacatgacaatggttctcgatcctaatactgcttggatcgacccattcatggaagtaccaaccctaagtattgtttgtagcatcaaagaaccacgtacaggagaatggtacaaccgttgtccacgggttattgctcaaaaagcagttgattatttggttgccactggcattggtgatacagcattttttggccctgaagctgaattttttatcttcgatagcgcccgctttgcccaaaccgctaacgaaggttactacttcctcgactctgtagagggtgcttggaattctggtaaagaaggtacagcagacaaacccaacttggcttacaaaccacgttttaaagagggttatttccctgtttcccccacagattctttccaagacatccgcacagaaatgctgttgacgatggcgaaattaggcgtacccatcgaaaaacatcaccacgaagttgctactggtggtcagtgcgaacttggtttccgcttcggtaagttaatcgaagctgctgactggctgatgatttacaaatatgtcatcaagaacgttgccaaaaaatatggcaaaaccgtcaccttcatgccaaaaccaatttttggcgataacggttctggtatgcactgtcaccaatctatctggaaggatggtaaacccctctttgcaggtgaccagtatgctggtttaagtgaaatgggactgtactacattggtggtcttctcaagcacgccccagcactgttggcaatcaccaaccccagcaccaactcctacaaacgcctagttcccggttatgaagcgccagttaacttggcttactcccaaggtaaccgttctgcttccatccggattcctttgtctggcactaaccccaaagccaagcgtttagagttccgttgtccagatgctacctctaacccttatttggcatttgctgccatgctgtgcgctggtatcgatggtatcaagaacaaaattcatcctggtgagccattagataaaaatatctatgaactttctccagaagaattggcaaaggttccttccacacccggttctttagagctagcattggaagcactagaaaacgaccacgctttcttaacagatacaggcgtgttcaccgaagactttatccaaaactggattgactacaaactcgctaacgaagttaaacagatgcaactgcgtcctcatccttatgagttctctatctattacgacgtttaa

SEQ ID NO: 101474 - protein, 474 aa, Anabaena variabilis ATCC 29413
MTTSQEVLKRIQDEKIELIDLKFIDTVGTWQHLTLYQNQIDESSFTDGVPFDGSSIRGWKAINESDMTMVLDPNTAWIDPFMEVPTLSIVCSIKEPRTGEWYNRCPRVIAQKAVDYLVATGIGDTAFFGPEAEFFIFDSARFAQTANEGYYFLDSVEGAWNSGKEGTADKPNLAYKPRFKEGYFPVSPTDSFQDIRTEMLLTMAKLGVPIEKHHHEVATGGQCELGFRFGKLIEAADWLMIYKYVIKNVAKKYGKTVTFMPKPIFGDNGSGMHCHQSIWKDGKPLFAGDQYAGLSEMGLYYIGGLLKHAPALLAITNPSTNSYKRLVPGYEAPVNLAYSQGNRSASIRIPLSGTNPKAKRLEFRCPDATSNPYLAFAAMLCAGIDGIKNKIHPGEPLDKNIYELSPEELAKVPSTPGSLELALEALENDHAFLTDTGVFTEDFIQNWIDYKLANEVKQMQLRPHPYEFSIYYDV

SEQ ID NO: 101475 - DNA, 1410 bp, Rhodobacter sphaeroides 2.4.1
  CDS (1)..(1410): transl_table=11
atgagcaaagtagctgatgctctcaaactgatgaaagacgaggaggtcgaatatgtcgacatccgcttcaccgacccgcgcggcaagctccagcatgtgacgctggtggccgatctcgtcgacgaggacttcttcgaggaaggcttcatgttcgacggctcgtccatcgccggctggaagtcgatcgaccagtccgacatgaagctgatcccggatgcgggctcggtctacatcgacccgttctatgccgagaagacgctctgcgtgcattgcaacgtcgtcgagcccgacacgggcgaggcctacagccgcgacccgcgcggcacggccgtcaaggccgaagcctacctgaaggcttcgggcatcggtgacgtggcctatttcgggccggaagccgaattcttcatcttcgacgacgtgcgctactcggtgacgccggcgaaggtggcctaccagatcgacgccgatgcggcggcctggaacaccgactcggaatatgagatgggcaacctcgcccaccgcgccggccacaagggcggctacttcccggtgaacccgatcgacgaggcccaggacctgcgcggcgagatgctctcgaccatgaagcgcatgggcatgaaggtggacaagcaccaccacgaagtggcgacctgccagcacgaactcgggctgatcttcggcgggctgaccgagcaggccgacaacatcctgaaatacaagtatgtcatccacaacgtcgcggccgcctacggcaagaccgtgaccttcatgccgaagcccatgaagggcgacaacggctcggggatgcacgtcaacatgtcgatctggaaggacggcaagccgctcttcgctggcgacaaatatgccgacctgagccaggaagccctgtggttcatcggcggcatcctgaagcacgccaaggcgctgaacgcgctgacgaacccggccaccaacagctacaagcggctgatcccgggcttcgaggctccggtgctgcgcgcctactcggcccgcaaccgctcgggctgcgtccgtattccgtggaccgagtcgccgaaggccaagcgcgtcgaagcccgtttccccgatccgtcggcgaacccgtatctcgcctttgcggcgctgctgatggccggcctcgacggcatcaagaacaagatcgatccgggcccggcatcggacaaggacctctacgacctgccgccggaagaactggccgccatcccgaccgtctgcggctcgctccgcgaggcgctggaagagctggagaaggaccacgacttcctgctcgccggcgacgtgttcaccaaggaccaactcgagggctacatggcgctcaagtgggaagaggtctatgcctacgagcacacgccgcacccggtggaatatcagatgtactacagctgctga

SEQ ID NO: 101476 - protein, 469 aa, Rhodobacter sphaeroides 2.4.1
MSKVADALKLMKDEEVEYVDIRFTDPRGKLQHVTLVADLVDEDFFEEGFMFDGSSIAGWKSIDQSDMKLIPDAGSVYIDPFYAEKTLCVHCNVVEPDTGEAYSRDPRGTAVKAEAYLKASGIGDVAYFGPEAEFFIFDDVRYSVTPAKVAYQIDADAAAWNTDSEYEMGNLAHRAGHKGGYFPVNPIDEAQDLRGEMLSTMKRMGMKVDKHHHEVATCQHELGLIFGGLTEQADNILKYKYVIHNVAAAYGKTVTFMPKPMKGDNGSGMHVNMSIWKDGKPLFAGDKYADLSQEALWFIGGILKHAKALNALTNPATNSYKRLIPGFEAPVLRAYSARNRSGCVRIPWTESPKAKRVEARFPDPSANPYLAFAALLMAGLDGIKNKIDPGPASDKDLYDLPPEELAAIPTVCGSLREALEELEKDHDFLLAGDVFTKDQLEGYMALKWEEVYAYEHTPHPVEYQMYYSC

SEQ ID NO: 101477 - DNA, 1329 bp, Carboxydothermus hydrogenoformans Z-2901; identical to SEQ ID NO: 74313
  CDS (1)..(1329): transl_table=11

SEQ ID NO: 101478 - protein, 442 aa, Carboxydothermus hydrogenoformans Z-2901; identical to SEQ ID NO: 74314

SEQ ID NO: 101479 - DNA, 1413 bp, Geobacter metallireducens GS-15
  CDS (1)..(1413): transl_table=11
atgacaccgcaagaagtagtaagcttcgccaaggaaaacggcgcgctgatggttgatttcaagttcatggatttcgtggggacatggcagcacatttccgtacccatcacggagttcagcgaagataccttcgaagaggggcaggggtttgacggctcttccatccgtggctggcagccgatccacgcctccgacatgatccttctccccgatcccgacacggccaagatggaccccttcgtggcggtgccgaccctgtcgctgatctgcaatgtcttcgatccgatcaccaaggaagactacacccgcgatccccggaacatcgcccgcaaggccgaggcctacctcaagtccaccggcatcggcgaaatcgccttcttcggtccggaagccgagttcttcatcttcgacgaggtccgttacgattccagctccaatcagtccttctacatggtcgattccgtggaaggtgcctggaactccggccgtgaagagttcccgaacctgggctacaagccgcgccacaaggaagggtacttccccctctcccccaccgactcccagaacgatctccgcaacgagatggtgatggagctccagaaggtcggcatccgggtcgagtgccagcaccacgaggttgccactggcggccaggccgagatcgacatgcgtttctcttccctggtggacatggctgaccagctccagtggttcaagtatgtcatcaagaacgttgcctacagaaacagcaagaccgtaaccttcatgccgaagcccctgtacggcgacaacggttccggcatgcactgccaccagtccatctggaagaacggccagaacctcttcgccggcgacaagtacggcgggctctcccagatggccctctggtacatcggcggcatcatcaagcacgccaaggccctctgtgccatcaccaacccgaccaccaactcctacaagcgtctggtgccgggcttcgaggccccggttaacatggcatactccagccgtaaccgctcggcatccatccggatcccgatgctctccaccaacccgaaggccaagcggatcgaataccggacccctgacccctcctgcaacggctacctcgccttcgccgccatgctcatggccggcctcgacggcatcgagaacaagattgatccggggcagcctctcgataaggatatctacggactttcccccgaagagctcaaggacattccgtccgctcccgggacccttgaagacgccctcaacgccctcagggacgaccacgagtttcttctcaagggtgacgtcttcacccccgacgtcatcgagaagtggatcgagtacaagatggaggccgaagtcaacccggtccggatgcgtccggttccccttgagttcgccctctactacgacatctag

SEQ ID NO: 101480 - protein, 470 aa, Geobacter metallireducens GS-15
MTPQEVVSFAKENGALMVDFKFMDFVGTWQHISVPITEFSEDTFEEGQGFDGSSIRGWQPIHASDMILLPDPDTAKMDPFVAVPTLSLICNVFDPITKEDYTRDPRNIARKAEAYLKSTGIGEIAFFGPEAEFFIFDEVRYDSSSNQSFYMVDSVEGAWNSGREEFPNLGYKPRHKEGYFPLSPTDSQNDLRNEMVMELQKVGIRVECQHHEVATGGQAEIDMRFSSLVDMADQLQWFKYVIKNVAYRNSKTVTFMPKPLYGDNGSGMHCHQSIWKNGQNLFAGDKYGGLSQMALWYIGGIIKHAKALCAITNPTTNSYKRLVPGFEAPVNMAYSSRNRSASIRIPMLSTNPKAKRIEYRTPDPSCNGYLAFAAMLMAGLDGIENKIDPGQPLDKDIYGLSPEELKDIPSAPGTLEDALNALRDDHEFLLKGDVFTPDVIEKWIEYKMEAEVNPVRMRPVPLEFALYYDI

SEQ ID NO: 101481 - DNA, 1422 bp, Prochlorococcus marinus str. MIT 9312
  CDS (1)..(1422): transl_table=11
atgtctaaatctcctcaagatgttttaagtcaaattaaagacgaaggaattgaactcatcgatttaaaattcacagatattcatggaaaatggcaacatttaacacttacatcagacatgatagaagaggattcttttactgaaggcttagcgtttgatgggtcatcaataagaggttggaaagcaattaatgcatctgatatgtcaatggtgcctgattcaagtacagcttggatcgatcctttttataaacataaaacattaagtatgatttgctctattcaagagccaagaagcggtgagccttatgatagatgtccaagggctttagctcaaaaggcattaaaatatttagactctactggcatagcagatactgcattttttggacctgagccagaattctttttatttgatgatgttagatatgactctaaagaaggaggttgtttttatagtgtagatactattgaagcaccatggaatacagggagaatagaagaaggtgggaacttaggatacaaaatacaatataaagaaggatattttccagtagctccaaatgatactgcgcaagatatcagatctgagatgcttcttcttatgggtgaattaggtatccctacagaaaaacatcaccatgaagttgctggtgccggccaacacgagcttggaatgaaatttgattctttaataaaagctgctgataacgttatgacgtataaatacgtggttagaaacgtagctaaaaaatatgggaaaactgcaacatttatgcctaagcctgtatttaacgataatgggactggaatgcatgttcaccaaagtttatggaagagtggacagccactattctttggtgaaagtgcctatgcaaatttatcccaaacagctagatggtatatcggaggaatacttaaacatgccccttcattcctagcgtttactaatccaacaacaaatagttataaaagattggttccaggatttgaagcacctgtaaatctagtttattctgagggtaatagatcggctgcagtaagaatacctttaactggtccaagtccaaaagctaaaagattagaatttagatcaggtgacgcacttgctaacccatatttagctttctctgtaatgatgctcgctggtattgatgggatcaaaaatcaaatagatcctggtgatggtgtagatgttgatttattcgaacttcctgcagaagaacttgcaaaaattgatacagtaccttcatctcttaatgattcacttaatgcactcaaagcagacaaggattatctattagctggtggagtatttacagaagattttattgataactttatcgatataaaatacgaagaggtacaacaattaagacagaggcctcatccacatgaattctttatgtattacgatgcataa

SEQ ID NO: 101482 - protein, 473 aa, Prochlorococcus marinus str. MIT 9312
MSKSPQDVLSQIKDEGIELIDLKFTDIHGKWQHLTLTSDMIEEDSFTEGLAFDGSSIRGWKAINASDMSMVPDSSTAWIDPFYKHKTLSMICSIQEPRSGEPYDRCPRALAQKALKYLDSTGIADTAFFGPEPEFFLFDDVRYDSKEGGCFYSVDTIEAPWNTGRIEEGGNLGYKIQYKEGYFPVAPNDTAQDIRSEMLLLMGELGIPTEKHHHEVAGAGQHELGMKFDSLIKAADNVMTYKYVVRNVAKKYGKTATFMPKPVFNDNGTGMHVHQSLWKSGQPLFFGESAYANLSQTARWYIGGILKHAPSFLAFTNPTTNSYKRLVPGFEAPVNLVYSEGNRSAAVRIPLTGPSPKAKRLEFRSGDALANPYLAFSVMMLAGIDGIKNQIDPGDGVDVDLFELPAEELAKIDTVPSSLNDSLNALKADKDYLLAGGVFTEDFIDNFIDIKYEEVQQLRQRPHPHEFFMYYDA

SEQ ID NO: 101483 - DNA, 1422 bp, Synechococcus elongatus PCC 7942
  CDS (1)..(1422): transl_table=11
atgcctgagaccgctcaagaggtccttcagcttattcaagagaagggtatccagcttgtcgatttgaaatttatcgacatgccggggatttggcagcacttgacactacacgtcagccaaatcgacgaaaacagctttgttgagggcgttcccttcgacggttccagcatccggggctggaaagcgatcaacgagtcggacatgacgatggtgcccgatccaaccactgcttggatcgacccattcatgaaagagccgacgctcagcatgatctgtacgatctacgagccgcgcactaacaccccctacgagcgctgcccccgggcgatcgctcaaaaagcggtggattacctcaaagctagcgggatcggtgacacggcttacttcggccccgaagcagaattcttcatctttgatgacgttcgcttcgatcaggctgagaacaagagctactactacgtcgattcgatcgaaggccgctggaactccggccgcgaagaagaaggcggtaacctcggctacaagcctcgctacaaagagggctacttcccagtggccccgaccgacaccagccaagatatgcgtagcgaaatgctgctgaccatggctgattgtggcgtgccaattgagaagcaccaccacgaagtggcgaccggcggccagtgtgagctaggcttccgcttcggcaagctgatcgaagcagcggactggctgatgacctacaagtacgtgatcaaaaacgtgggtcgtcgctacggcaaaacgattaccttcatgcccaaaccgctgttcaacgacaacggttctggtatgcatacccaccagtcgatttggaatgatggtcagccgctgtttgcgggcgaccagtatgctggcctgagccaaatggcgctctggtacatcggcggtatcctcaagcacgcgccggccttgttggctctcaccaaccccaccaccaactcctacaagcgccttgtgcctggctttgaagcgccggtcaacttggcctactcccaaggcaaccgctcggcttcggtgcggattcccctttcaggcaccaacccgaaagcgaagcgcttggagttccgttgtcctgacgcgacctccaacccctacttggcgtttgcggcgatgctctgcgctggtatcgacggcatcaagaaccaaattgatccgggcgaaccgctggatgtggacatctacgacctcagccccgaagagctggctaaaatccccagcaccccgggttcactcaaggatgcgctgaaagcactagaggccgatcacgacttcctgactgtgggcggcgtcttcacggaagacttcatccagaactggatcgagtacaagctcgacaacgaagtgattccgatcagcctgcgtccgcacccctacgaattcgcgctctactacgactgctaa

SEQ ID NO: 101484 - protein, 473 aa, Synechococcus elongatus PCC 7942
MPETAQEVLQLIQEKGIQLVDLKFIDMPGIWQHLTLHVSQIDENSFVEGVPFDGSSIRGWKAINESDMTMVPDPTTAWIDPFMKEPTLSMICTIYEPRTNTPYERCPRAIAQKAVDYLKASGIGDTAYFGPEAEFFIFDDVRFDQAENKSYYYVDSIEGRWNSGREEEGGNLGYKPRYKEGYFPVAPTDTSQDMRSEMLLTMADCGVPIEKHHHEVATGGQCELGFRFGKLIEAADWLMTYKYVIKNVGRRYGKTITFMPKPLFNDNGSGMHTHQSIWNDGQPLFAGDQYAGLSQMALWYIGGILKHAPALLALTNPTTNSYKRLVPGFEAPVNLAYSQGNRSASVRIPLSGTNPKAKRLEFRCPDATSNPYLAFAAMLCAGIDGIKNQIDPGEPLDVDIYDLSPEELAKIPSTPGSLKDALKALEADHDFLTVGGVFTEDFIQNWIEYKLDNEVIPISLRPHPYEFALYYDC

SEQ ID NO: 101485 - DNA, 1410 bp, Rhodospirillum rubrum ATCC 11170
  CDS (1)..(1410): transl_table=11
atgtccgacgttaagaccattctcgaaatgattaaggaaaacgacgttaagttcgtcgatttccgcttcaccgatcccaagggcaagtggcagcataccgcccagtacgtgaccaccatcgacgaggaaagcctggtcgaaggcatcatgttcgacggttcgtcgatcgccgggtggaaggacatcaacgagtccgacatgatcctgaagcccgacctgaagtcggccttcatggatccgttctcggctcagccgcagctcgtcttgttctgcgacgtgctcgagccctcgaccgggcagccctatgagcgttgcccgcgctcgatcgccaagaaggccctgtcctatctggcctcgaccggcatcggcgacacctcgtacttcggcccggaagccgagttcttcgtgttcgacgacgtgcgcttcgacgtgtcgatgaaccgcgtcatgtacgaagtcgacagcgaagaaggcccctacgtcaccggcaagatcttcgacgagggcaactacggccaccgtccgccgatcaagggcggctatttcccggttccgccggtggacagcgcccaggacctgcgcgccgaaatgctctcgaccatggccgagatcggcatgcccgtcgaaaagcaccaccacgaagtggcgccgtcgcagcatgaactgggtgttcgcttcaacaccctgatcgaagccgccgacgacatgcagaagtacaagtatgtcgttcacatggtcgcccatgcctatggcaagaccgcgaccttcatgcccaagccgatcgccggcgacaacgggtcgggcatgcacgtccatcagtcgatctggaaggatggcaagccgctgttcgccggttcgggctatgccgacctgtcggaaatggccctttactacatcggcggcatcatcaagcatgccaaggcgctgaacgccttcaccaatccgtcgaccaactcgtacaagcgcctgatccccggcttcgaagccccggttctgctggcctattcggcccgcaaccgctcggcctcctgccgtatcccctatgtggcgagcccgaagggcaagcgcgtcgaggttcgtttccccgatgccgccgccaacccctatctggctttcgccgccatgatgatggccggcatcgacgggatcgagaacaagatccatccgggcgacccgatggacaagaacctctacgacctgccccccgaagaactgatgggcatccccacggtttgcggctctctgcgcgaagcgcttgacagcctgaacgccgaccgtgacttcctgaagaagggtggcgtcttcaccgacgacatgatcgatggctatgtcgccctgaagtgggaagaggtttacaacctcgagcatgctccccacccgatcgaatacaagatgtactactcggtctga

SEQ ID NO: 101486 - protein, 469 aa, Rhodospirillum rubrum ATCC 11170
MSDVKTILEMIKENDVKFVDFRFTDPKGKWQHTAQYVTTIDEESLVEGIMFDGSSIAGWKDINESDMILKPDLKSAFMDPFSAQPQLVLFCDVLEPSTGQPYERCPRSIAKKALSYLASTGIGDTSYFGPEAEFFVFDDVRFDVSMNRVMYEVDSEEGPYVTGKIFDEGNYGHRPPIKGGYFPVPPVDSAQDLRAEMLSTMAEIGMPVEKHHHEVAPSQHELGVRFNTLIEAADDMQKYKYVVHMVAHAYGKTATFMPKPIAGDNGSGMHVHQSIWKDGKPLFAGSGYADLSEMALYYIGGIIKHAKALNAFTNPSTNSYKRLIPGFEAPVLLAYSARNRSASCRIPYVASPKGKRVEVRFPDAAANPYLAFAAMMMAGIDGIENKIHPGDPMDKNLYDLPPEELMGIPTVCGSLREALDSLNADRDFLKKGGVFTDDMIDGYVALKWEEVYNLEHAPHPIEYKMYYSV

SEQ ID NO: 101487 - DNA, 1428 bp, Moorella thermoacetica ATCC 39073
  CDS (1)..(1428): transl_table=11
atgagtaagacaccaggcgaagtacttgagatggcccgaaagaacaatatccagatggtcgatctcaaatttatcgacctgccagggacctggcagcacttcagtgtgcccttagacgaattcgatgaaggcgcttttaccagcggcgtgggttttgacggctccagcattcgcggttttaaaaccattaacgagagcgatatgatcttagttcccgaccccgataccgcctttatcgatcccttctgtgatgtgcccaccctcagcctggtatgcaatgtctacgaccctatgaccgggcagaattacaaccgcgatccccggtttgtggccaaaaaggctgaagcctatctaaaggagaccggcattgccgataccagttactggggacccgaggccgagttctttatcctcgatcatgtccgctttgaccagagccagtacgctggttactatttcctggattctgatgaaggcttctggaactcgggcgtggaaatgaacggtcatcccaacctcggctaccggccgcgctataaagaaggttatttcccggtaccacctaccgacaccctgcaaaacttgcggacggagatggtcctgctgctgaagcagatgggcatcgccgtggaagcccatcaccacgaggtggctactgccggccagggcgagatcgatatgaagtacgcccccctgacccggatggccgaccagctgatgatgttcaaatatgtggtcaagaatgtggccatcaagcataataagacggctaccttcatgcccaaaccggttttccaggacaacggctcgggcatgcacgtccaccagagcctgtggaagggtaacgaacccctcttctacgatgccaatggttatgcggggcttagcgaactggccctgtattatatcggcggtttgttaaaacacgcccccgtcctgacggccttctgcagcccgaccaccaactccttcaaacgattggtgcccggctttgaagcccccgtcaacctggtttactcccagcgtaaccgcagcgcggccatccgcattcccatgtactccagcagcccggccgccaagaggatcgaataccggccgcccgatccttcctgcaacccgtacctggcctttgccgccctgttaatggccggcctggacggtattaagaacaagatccaccccggcgagcccctggataaagatatctatgacctgccgccggaagaagcggccagggtgaagtccctgcccgactccctggaggaagccatcgccgccctggaaaaagaccacgagttcctgcttcagggaggcgtcttcgacgaggacctcatcaacgcctggattgaatacaagcaaaagcgggagatcaaccagatcaagctgcgtccccatccctatgagttcgttttgtattatgatgtttaa

SEQ ID NO: 101488 - protein, 475 aa, Moorella thermoacetica ATCC 39073
MSKTPGEVLEMARKNNIQMVDLKFIDLPGTWQHFSVPLDEFDEGAFTSGVGFDGSSIRGFKTINESDMILVPDPDTAFIDPFCDVPTLSLVCNVYDPMTGQNYNRDPRFVAKKAEAYLKETGIADTSYWGPEAEFFILDHVRFDQSQYAGYYFLDSDEGFWNSGVEMNGHPNLGYRPRYKEGYFPVPPTDTLQNLRTEMVLLLKQMGIAVEAHHHEVATAGQGEIDMKYAPLTRMADQLMMFKYVVKNVAIKHNKTATFMPKPVFQDNGSGMHVHQSLWKGNEPLFYDANGYAGLSELALYYIGGLLKHAPVLTAFCSPTTNSFKRLVPGFEAPVNLVYSQRNRSAAIRIPMYSSSPAAKRIEYRPPDPSCNPYLAFAALLMAGLDGIKNKIHPGEPLDKDIYDLPPEEAARVKSLPDSLEEAIAALEKDHEFLLQGGVFDEDLINAWIEYKQKREINQIKLRPHPYEFVLYYDV

SEQ ID NO: 101489 - DNA, 1425 bp, Frankia sp. CcI3
  CDS (1)..(1425): transl_table=11
atgttcacaaaagcagaagacgtgcttcgctatatccgggacgaagacgttcagttcatcgatgtcaggttctgcgatcttcccgggatcatgcagcacttcaccatcccgacccaggtcttcgcggagtcggtgttcaccgaaggcctgatgttcgacggctcgtcgatccgcggcttccaggccatccacgagtccgacatgctgctgctaccggacccgcacaccgctttcgtggaccccttccgcgagcacaagaccctcgccatgacgttcttcatccatgacccgatcaccaaggaacagtactcccgggacccgcgcaacatcgccaagaaggcggaggcctatctccggggcaccggcgtcgcggacaccgcgtatttcggtccggaggcggagttctacatcttcgacgatgtccgttatgactacaacccctacgggtcgatgcaccaggtcgactcggtcgaggccgcctggaacaccgcccggaaggaagagggcggaaacctcgggtacaagccgaggttcaagggcggctacttcccggtgccgcccacggaccacttcaccgacctgcgttccgagatgacccgggtgctctacgagacgggtatcaccgtcgagatgcagcaccacgaggtcggcaccgcgggccaggcggagatcgacatcaggtacgacacgctcctgaagaccgccgacaacctgatgctctacaagtacgtcatccgcaacgtcgcccgcggccgcggcaagaccgtcaccttcatgccgaagccgctgttcgaggacaacggatccggtatgcacgtccactccagcctgtggaaggacggggagccactcttctacagcccgaacgggtacggcggtctctcggacaccgcccgctactacatcggggggctgctgcaccacgccccggcgctgctggccttcaccaaccccaccacgaactcctaccgtcggctcgtgcccggctacgaggcacccgtcaacctggtctactcggcccgcaaccggtcagcgtgctgccgcatcccgctcagcggtgactcgccgaaggccaagcgggtcgagttccgcgtgccggatccgagctgcaacccgtatctcgccttcgccgcgattctgatggcgggactcgacggcgtgcggaacaagattgatccgccggacccgatcgacaaggatctctacgacctcccgccggacgagttggccgcggttccccaggtcccgggttcgctggagaaggtgctcgatgcgctggaggcggacaacgagttcctgcgggagggcgacgtcttcaccgcggatctgatcgagacctggctggactacaagcgggtcaacgaggtcgacgccatccgcctgcggccgcatccatacgagttcaccctctactacgacatctga

SEQ ID NO: 101490 - protein, 474 aa, Frankia sp. CcI3
MFTKAEDVLRYIRDEDVQFIDVRFCDLPGIMQHFTIPTQVFAESVFTEGLMFDGSSIRGFQAIHESDMLLLPDPHTAFVDPFREHKTLAMTFFIHDPITKEQYSRDPRNIAKKAEAYLRGTGVADTAYFGPEAEFYIFDDVRYDYNPYGSMHQVDSVEAAWNTARKEEGGNLGYKPRFKGGYFPVPPTDHFTDLRSEMTRVLYETGITVEMQHHEVGTAGQAEIDIRYDTLLKTADNLMLYKYVIRNVARGRGKTVTFMPKPLFEDNGSGMHVHSSLWKDGEPLFYSPNGYGGLSDTARYYIGGLLHHAPALLAFTNPTTNSYRRLVPGYEAPVNLVYSARNRSACCRIPLSGDSPKAKRVEFRVPDPSCNPYLAFAAILMAGLDGVRNKIDPPDPIDKDLYDLPPDELAAVPQVPGSLEKVLDALEADNEFLREGDVFTADLIETWLDYKRVNEVDAIRLRPHPYEFTLYYDI

SEQ ID NO: 101491 - DNA, 1410 bp, Novosphingobium aromaticivorans DSM 12444
  CDS (1)..(1410): transl_table=11
atggcaactgcaaaggacatcctcgcccgcatcaaggacgaggaaatcgaatgggtcgatctccgtttcaccgacccgaagggcaagtggcagcacctgaccatggtgtcgaccgtcctcggcgaggatgaactcgaggacggcctcatgttcgacggttcgtcgatcgaaggctggaaggccatcaacgagtcggacatgatcctcaagcccgacctcgacgcggtctacgtcgatccgttctcggccagcccgatgctgatcatctgctgcgacatcgtcgagccttcgaccggcgaactctacgcccgcgacccgcgctcgaccgcgaagcgcgccgaagccttcgtcaagacggccggccttggcgacaccgtctacgtcggcccggaagcagagttcttcctcttcgacgacgtcaagttctacgacggctatgacggcaacggtttccgcatcgacgacatcgagctgccgaccaactcgaacaaggacatcgaaggcggcaacctcgcccaccgtccgcgcgccaagggcggctacttccccgtcgcgccggtcgacagctgcgtcgacatccgcggcgagatggtccgcaccatgctcgacatgggcctgccctgcgacaagcaccaccacgaagtggcctcggcccagcacgagctcggcctgaccttcggcacgctcgtccagaccgccgaccgcatgcaggtctacaagtacgtcgtgcagcaggtcgcccatgcctatggcaagaccgccacgttcatgccgaagccgatcaagggcgacaacggctcgggcatgcacacccacatctcgatctgggatagcggcaagcccctgttcgccggtaatggctatgccggcctgtcggacatgtgcctgtacttcatcggcggcgtgatcaagcacgccaaggcgctgaacgccttcaccaacccgaccaccaacagctacaagcgcctggtgccgggctacgaagcccccgttctgctggcctactcggcccgcaaccgttcggcttcgtgccgcatcccctatggcgctggcgccaaggcaaagcgcgtggaattccgtttccccgacgcgatggccaacccctacctgtgctacgctgcgctgctcatggccggcatcgacgggatcaagaacaagatccatccgggcgaagccatggacaagaacctctacgacctgccgccggcagagctcgccgaagttccgaccgtgtgcggatcgctccgtgaagcgctggaaagcctcgaagccgaccacgacttcctgctgcagggcggcgtgttcaccaaggaacagatcgaaagctacatcgaactgaagtggccggaagtgctgcgttgggaaaccacgccgtcggccgtcgagttcgacatgtactactcgctctga

SEQ ID NO: 101492 - protein, 469 aa, Novosphingobium aromaticivorans DSM 12444
MATAKDILARIKDEEIEWVDLRFTDPKGKWQHLTMVSTVLGEDELEDGLMFDGSSIEGWKAINESDMILKPDLDAVYVDPFSASPMLIICCDIVEPSTGELYARDPRSTAKRAEAFVKTAGLGDTVYVGPEAEFFLFDDVKFYDGYDGNGFRIDDIELPTNSNKDIEGGNLAHRPRAKGGYFPVAPVDSCVDIRGEMVRTMLDMGLPCDKHHHEVASAQHELGLTFGTLVQTADRMQVYKYVVQQVAHAYGKTATFMPKPIKGDNGSGMHTHISIWDSGKPLFAGNGYAGLSDMCLYFIGGVIKHAKALNAFTNPTTNSYKRLVPGYEAPVLLAYSARNRSASCRIPYGAGAKAKRVEFRFPDAMANPYLCYAALLMAGIDGIKNKIHPGEAMDKNLYDLPPAELAEVPTVCGSLREALESLEADHDFLLQGGVFTKEQIESYIELKWPEVLRWETTPSAVEFDMYYSL

SEQ ID NO: 101493 - DNA, 1407 bp, Neorickettsia sennetsu str. Miyayama
  CDS (1)..(1407): transl_table=11
gtgacaaataacagggctgcttccatactcgagttcgttgccaaaaacgagattaggtttattgatttcagatttacctcgatcaccgggaaatttttacatatcacgcgtcatagcgatagcatcactgcagatgctctcacgcatggtatttcgctcgacagctcattgattcaaggctggcatgatgtggatagatccgatgtagtgctcgtaccggatctcgagtcgtgtagttctttcttggatccattcgccgcacagccgacattgtgcgttgtttgtgacattgttgagccgcacggacgtggttcgtatgagcatagtccacgcgcaacaacgaagaaagctatggaatttttacgcagcattggaatagctgacaaggctttttttggtctcgagatggagtttttcgtactggatgatgctaggtttgccgtcaaagaaaatggagctttctttgaactggattcatcagaagggatctataactctggcagacggtatgaatataataatcacgctcacagagaaggcagcagaaactgctatctggcaagtcaaccttcggattctctaaatgacataagggcagagattctagaaacactcagagaagtaaaaataaaaccattactgcaccatcacggagctgcatcgtcccagtgcagaatatgcttccaccatggggaggctttagagacttctgataatatgcaaaagtgtaagtacatcacacgcaacgttgccagttcttatggaaagtcggctactttcatgcctaagccattcaaggactacaacggcaatggaatgcgcttacacgtatcgctctggaaggatgagcaaaatttgttcgtaccacaagatccaagagaggagatttcacagttgtgtaaatactacattggtggaatcataaagcataggaaagcgctgaacgctattttgaacccgcttgctaatagctacaagcgcctcgcagatatccataatgcatcttacgggctaggttattcgcctgaaaatcgtctagcagtggtaaggattccacactgcaggaagggtaatccttccggaaaaagaatagagattaggtttcctgatgcgggtactaacccctatatcggaaccgccgctttgattatggcaggtatagcgggtatacgggaaaaagtactaccggaagctgctgtggaactcgaaaagtcttcaaaagtttctttgtgtaggtctttggaggaggcactcctcgcactcgacactgatagacaattcctgacagaaggtgatgtgttcacgaatgatcagcttgatacctatataaagctcctaagtgatgactctgaggaggtatcaaaacatcccgtaccgattgaatttatcaaatactataacgtttag

SEQ ID NO: 101494 - protein, 468 aa, Neorickettsia sennetsu str. Miyayama
MTNNRAASILEFVAKNEIRFIDFRFTSITGKFLHITRHSDSITADALTHGISLDSSLIQGWHDVDRSDVVLVPDLESCSSFLDPFAAQPTLCVVCDIVEPHGRGSYEHSPRATTKKAMEFLRSIGIADKAFFGLEMEFFVLDDARFAVKENGAFFELDSSEGIYNSGRRYEYNNHAHREGSRNCYLASQPSDSLNDIRAEILETLREVKIKPLLHHHGAASSQCRICFHHGEALETSDNMQKCKYITRNVASSYGKSATFMPKPFKDYNGNGMRLHVSLWKDEQNLFVPQDPREEISQLCKYYIGGIIKHRKALNAILNPLANSYKRLADIHNASYGLGYSPENRLAVVRIPHCRKGNPSGKRIEIRFPDAGTNPYIGTAALIMAGIAGIREKVLPEAAVELEKSSKVSLCRSLEEALLALDTDRQFLTEGDVFTNDQLDTYIKLLSDDSEEVSKHPVPIEFIKYYNV

SEQ ID NO: 101495 - DNA, 1413 bp, Ehrlichia chaffeensis str. Arkansas
  CDS (1)..(1413): transl_table=11
atgttcctttctatagaggatactttaaactacataaaaaaaaatgcaataaattttattgatctaaggtttacagattctaatggtaaatggcatcacataacacgtagtgcagaaactataaatgcacaagtgcttttagcaggagttaactttgatagttcatcaattcctgggtggcaatcaatagaaaaatcagacatgatattactaccagatgttagtacagctttcatggatccattttctgctcaatcaacattggttatattgtgtaatatagtagatccttataagcaatctcagtactctaaagatccacggtatatagcacaaaaagcatataaatatatgctatctacaggtattgctgataagtgttatttcggcccagaagtagagttctttatatttgataacgcacagttttatgcaggaatgtataactcttacttcaaaatagattctgcagaacacgatattttatttcaaaaaagagaattttccaacaatagccatcgcccaaaagttaaaggtggttatatgcctactcctcctattgattcgttacatgacattcgatcagaaatgttaacaatgttcaaagaagtaggtattatacctttaatacatcaccatgaagttgctgcatcacaatgtgaagttggatttcaacatgatgaattactactcagtgcagacaatgtgcaaaagtgtaagtatatagtacatggagttgcatcatcttatggtaaaactgcaacctttatgccaaaaccagttataaaagataacggtagcggtatgcattgtcatcaatctttgtggaaagacaacgttaacatttttgtcaatcctgatggtagtatatcagaaacctgtttatactacataggtggaattattaaatatggaaaagctattaatgcattcacaaatccttcaacaaatagttataaaaggttagtacctcattttgaagctccaacttggttgacttattcatatgaaaacagatcttctgccatccgcataccgtatgtaccaaaaaatgacctcaatgctaaaagaatagaagcacggttcccagatccactggcaaatccatacctatgtttctctgcacagctaatggctgggttatacggaatacaaaataaaattcatcctggaccagcaatagacaaaaatctgtactcactagataaggaggagctacaacaattcacttctgtagcaagctctcttgaagaggcactggactccctagataataatagagaatttctgctagtaggagatgtgtttaccaatgatcaaattgatgcatatataaatctcaaaatgctagaagtaaaggacctacagctgcatccacaccctatcgaatttataaattactatagctcttaa

SEQ ID NO: 101496 - protein, 470 aa, Ehrlichia chaffeensis str. Arkansas
MFLSIEDTLNYIKKNAINFIDLRFTDSNGKWHHITRSAETINAQVLLAGVNFDSSSIPGWQSIEKSDMILLPDVSTAFMDPFSAQSTLVILCNIVDPYKQSQYSKDPRYIAQKAYKYMLSTGIADKCYFGPEVEFFIFDNAQFYAGMYNSYFKIDSAEHDILFQKREFSNNSHRPKVKGGYMPTPPIDSLHDIRSEMLTMFKEVGIIPLIHHHEVAASQCEVGFQHDELLLSADNVQKCKYIVHGVASSYGKTATFMPKPVIKDNGSGMHCHQSLWKDNVNIFVNPDGSISETCLYYIGGIIKYGKAINAFTNPSTNSYKRLVPHFEAPTWLTYSYENRSSAIRIPYVPKNDLNAKRIEARFPDPLANPYLCFSAQLMAGLYGIQNKIHPGPAIDKNLYSLDKEELQQFTSVASSLEEALDSLDNNREFLLVGDVFTNDQIDAYINLKMLEVKDLQLHPHPIEFINYYSS

SEQ ID NO: 101497 - DNA, 1329 bp, Desulfitobacterium hafniense Y51
  CDS (1)..(1329): transl_table=11
atggggtttaccaaagaagagtgccttaagtatgtgcaggaaaatgatgtccgctttatccgtatgcaattcacagatatttttggccagatgaaaaatattgccataacccacaaccagcttgctcaggctttggacgagggagtgctgtttgacggctcggcgatcaaaggatttgcgggagttgaggcttcggatatgcttcttcttcctgatcccagtacatttacccttattccctggcgtcctcagcaggggaaggtagccaggatcatctgcgatgttaagaatcacgatggctctcaattcgagggggatccgcgctatattcttaagcgaaccctgcaaaaagcccacgacttaggctatgtatttcaggtaggcccagagtgtgaattctttttattccatacggatgaggaaggacagcctaccacaataactcatgatgctgccggctattgtgatctggctcctatcgatcagggagaaaatacccggcgggaaatttgtttggtgctggaagagatggggtttgaaatcgagacatcccaccatgaatccgcagcggggcagcatgaaatcgactttaaatataccgatgccttgacggcggcggatcatatcatgaccttcaaatatgtggtgaaaattgtctcccaaaggaatggtcttcatgccacctttatgcctaagcctctccacggcgtcaatggttcggggatgcacatcaatatgtccttagccaaagaggggaggaatgtatttattcacccggaaaatcccggagagctctcggaaacagcgaagcaattcattgccggattgctggagcatatcaaggggatcaccgccgtggccaatcccttggtgaactcttataaacgcttgaccccgggttatgaagcaccggtccatattgcctggtcaccgatgaaccgcagtccgctgctgcgggtgccgtcccccaggggagcaggaacccgccttgaactgcgcagcccggaccccagctgcaatccctacctgactttggccctgcttctggaagccggtctggatgggctccaacgggaaatgaaggtgcctgagcctgttaatgaaaacatttataatctcactcccgaacaggaaaaggccctgagcctggagcgcttaccctctaatctgctgctggctcttgaagagatggaaaaggatcctttgattcaagctactttaggcaggcatatctttaccaagtatatcgcggccaaagccagagagtggaaagcttatgacgagatggtccatcaatgggagattgacagctatctcaaaatctattga

SEQ ID NO: 101498 - protein, 442 aa, Desulfitobacterium hafniense Y51
MGFTKEECLKYVQENDVRFIRMQFTDIFGQMKNIAITHNQLAQALDEGVLFDGSAIKGFAGVEASDMLLLPDPSTFTLIPWRPQQGKVARIICDVKNHDGSQFEGDPRYILKRTLQKAHDLGYVFQVGPECEFFLFHTDEEGQPTTITHDAAGYCDLAPIDQGENTRREICLVLEEMGFEIETSHHESAAGQHEIDFKYTDALTAADHIMTFKYVVKIVSQRNGLHATFMPKPLHGVNGSGMHINMSLAKEGRNVFIHPENPGELSETAKQFIAGLLEHIKGITAVANPLVNSYKRLTPGYEAPVHIAWSPMNRSPLLRVPSPRGAGTRLELRSPDPSCNPYLTLALLLEAGLDGLQREMKVPEPVNENIYNLTPEQEKALSLERLPSNLLLALEEMEKDPLIQATLGRHIFTKYIAAKAREWKAYDEMVHQWEIDSYLKIY

SEQ ID NO: 101499 - DNA, 1407 bp, Saccharophagus degradans 2-40
  CDS (1)..(1407): transl_table=11
atgtcagagaagactctgaatttgatcaaagaaagcgaagcaacgtggttagatcttcgttttaccgacactaaaggtaaagaacagcacgttaccatcccagcatcatacgttgacgaagaattcttcgaaaacggtcaaatgttcgatggttcatccattgctggctggaaaggcatcaacgagtccgacatgattcttatgccagacgacagcactgcaatgcttgacccgttcaccgacgaagcaaccgttatcttgcgttgtgacattgttgagccttctaccggtcaaggctacgagcgcgatccacgctctgttgctaagcgcgctgaagaattcttgaagtctactggtttgggcgacactgcattctttggtcctgagccagaattcttcgtatttgacgatgttaaatggggcgccgacatgagcggtagcttcgttaaaattaactctgaagaagcagcttggtcatcaggcagcaaattcaccgacggcaacctaggtcaccgtccacgcgttaaaggcggctacttcccagtaccaccagttgactcactacacgacatccgcgcgtcaatgtgtaacgcaatgatgcaaatgggtctagacgttgaagttcaccaccacgaagttgctactgctggtcagtgtgaaatcggcgtgaaattcaacaccctagttaagaaagctgacgaagttcagattttaaagtactgcgtacacaacgttgctcacgcatacggcaaaacagctacctttatgcctaagccaatcgttggcgacaacggttctggcatgcacgttcaccagtcttactggaaagacggcgtaaaccaatttgctggtgacggctatgcaggcctaagcgaaactgctttgtactacatcggcggtatcatcaagcacgccaaagcaattaacgcattctctaacccgggcaccaactcttacaagcgtttgattcctggtttcgaagctcctgttatgttggcttactctgctcgtaaccgttctgcttctatccgtattccttacgtaccttctccaaaaggtaagcgtatcgaagcgcgttttgctgacccaattgccaacccatacctatgcttcgcagcaatgttgatggctggtattgacggcgttaagaacaaaatccaccctggcgatgcagctgataaagacttgtacgatcttcctaaagaagaagcggacaagattccacaagtatgtggcagcttgcgcgaagcgttggacaacttggacaaggatcgcgagttccttacccaaggcggcgtattcactgacgacatgatcgacgcgtacatcgagttgaaaatggaagacgtattcaaaattgagcacactactcacccgcttgagttcgacttgtactactccgtataa

SEQ ID NO: 101500 - protein, 468 aa, Saccharophagus degradans 2-40
MSEKTLNLIKESEATWLDLRFTDTKGKEQHVTIPASYVDEEFFENGQMFDGSSIAGWKGINESDMILMPDDSTAMLDPFTDEATVILRCDIVEPSTGQGYERDPRSVAKRAEEFLKSTGLGDTAFFGPEPEFFVFDDVKWGADMSGSFVKINSEEAAWSSGSKFTDGNLGHRPRVKGGYFPVPPVDSLHDIRASMCNAMMQMGLDVEVHHHEVATAGQCEIGVKFNTLVKKADEVQILKYCVHNVAHAYGKTATFMPKPIVGDNGSGMHVHQSYWKDGVNQFAGDGYAGLSETALYYIGGIIKHAKAINAFSNPGTNSYKRLIPGFEAPVMLAYSARNRSASIRIPYVPSPKGKRIEARFADPIANPYLCFAAMLMAGIDGVKNKIHPGDAADKDLYDLPKEEADKIPQVCGSLREALDNLDKDREFLTQGGVFTDDMIDAYIELKMEDVFKIEHTTHPLEFDLYYSV

SEQ ID NO: 101501 - DNA, 1410 bp, Methylobacillus flagellatus KT
  CDS (1)..(1410): transl_table=11
atggcggtggccgatgtattgaaactcgtgaaggaaaacgacatcaaatttgtcgattttcgctttactgacaccaagggcaaggaacagcacgtaaccgtgccaatttctgcattcgacgaagacaaatttaccgaaggccatgctttcgacgggtcttccattgcaggctggaaaggtatccaggcatccgacatgctcctgattccggacccgaacacagccaacatcgacccgttcatggatgaacccaccctgttcctgacctgtgacgttgtggatcctaccgacggcaagggatatgatcgttgcccacgcagcattgccaagcgtgctgaagcctacttaaagtccagcggcatcggtgacgcagccttcttcggtcccgaaccagagttcttcattttcgactccatcaactggtccgtggacatgagcggcagctcggtcaagatcaactccgaagaagccgcatgggcctccaacgagaagtttgaaggcggcaacaccggccaccgccccggcgtcaagggcggctacttccctgtgcccccgatcgactccctgcacgacattcgttccgccatggttgtggcgctggaagaactaggcgtgcccgtcgaagttcaccaccatgaagtagcaaccgctggccaatgtgaaatcggcaccaagttcagcaccctggttcaacgcgccgactggacacagattctcaaatatgtcgtcctgaatactgctcacgcatacggcaagacagccaccttcatgcccaagcccatctctggcgacaatggttccggcatgcacgtgcaccaatccgtatggaaggacggcaagaacctgtttgcaggcaacggctacgccggcctgagtgagtttgccctttactacatcggtggcatcatcaagcacgcacgtgcgctgaacgccatcaccaacccgggcaccaactcctacaagcgcctggttcccggctttgaggcccctgtgaagctggcctattccgcgaaaaaccgttccgcctccatccgtgtcccattcgtgcaatccgacaaggcacgccgcattgaggcacgcttccccgatccaaccgccaacccatacctggcattcagcgcattgctgatggcaggcctggacggcgtgcagaacaagatccatcctggcgaacctgctaccaaggatctctaccacctgccaccagaagaagatgcagcgatcccaaccgttgcctcctctctggagcaagcgctggaagccctggacaaggatcgcgagttcctgacccgcggcggcgtgttctccgatgactggatcagcgcttatatcgatctgaagatggaagaggtaaccaagctacgccagactccacacccgatcgagttcagcatgtactacagcgtttaa

SEQ ID NO: 101502 - protein, 469 aa, Methylobacillus flagellatus KT
MAVADVLKLVKENDIKFVDFRFTDTKGKEQHVTVPISAFDEDKFTEGHAFDGSSIAGWKGIQASDMLLIPDPNTANIDPFMDEPTLFLTCDVVDPTDGKGYDRCPRSIAKRAEAYLKSSGIGDAAFFGPEPEFFIFDSINWSVDMSGSSVKINSEEAAWASNEKFEGGNTGHRPGVKGGYFPVPPIDSLHDIRSAMVVALEELGVPVEVHHHEVATAGQCEIGTKFSTLVQRADWTQILKYVVLNTAHAYGKTATFMPKPISGDNGSGMHVHQSVWKDGKNLFAGNGYAGLSEFALYYIGGIIKHARALNAITNPGTNSYKRLVPGFEAPVKLAYSAKNRSASIRVPFVQSDKARRIEARFPDPTANPYLAFSALLMAGLDGVQNKIHPGEPATKDLYHLPPEEDAAIPTVASSLEQALEALDKDREFLTRGGVFSDDWISAYIDLKMEEVTKLRQTPHPIEFSMYYSV

SEQ ID NO: 101503 - DNA, 1416 bp, Burkholderia xenovorans LB400
  CDS (1)..(1416): transl_table=11
atgagtaaatccgtggccgacgtcgttcaactcgtcaaagacgaagacgtcaagtttgtcgacttccgtttcaccgacacgcgcggcaaggagcaacacgtttcggtgccggtgtcggcattcgatgaagacaagttcgaaagcggccatgcgtttgacggttcgtcgattgccggctggaaaggcatcgaagcatcggacatgttgctggtcccggacgcgaacacggccttcatcgacccgttctacgaagaatcgaccctcgtgctgacctgcgacgtcgttgaaccggcggacggcaagggctacgagcgcgacccgcgctcgctggcaaagcgcgccgaagcgtacctgaagagcacgggcctcggcgacacggcattcttcggtccggaacccgaattcttcattttcgactcggtcaagtggggcacggatcagtcgggcacgttcgtcaagatcggttcggaagaagcaccgtggtcgtcggcactcgacttcgaaggcggcaacaccggccaccgtccgggcacgaagggcggctatttcccggtcgcgccggtcgacacgttccaggacatccgttcggaaatgtgtctgctgctcgaacagatcggcattccggtcgaagtgcatcaccacgaagtcgcgggccagggccagaatgaaatcggcacgaagttctcgacgctggtgcaacgcgccgactggctgcagcagatgaagtacatcatccacaacgtcgcgcacacgtacggcaagacggcaacgttcatgccgaagccggtggtcggcgataacggttcgggcatgcacgttcaccagtcgatctggaaagacggcacgaacctgttcgcaggcaacggttacgcgggtctgtcggaattcgcgctgttctacatcggcggcatcatcaagcatgctcgcgcgctgaacgcgatcacgaacccgtcgaccaactcgtacaagcgcctcgtgccgcacttcgaagcaccggtcaagctggcttactcggctcgcaaccgctcggcctcgatccgtattccgcacgtgtcgaacccgaagggccgccgtatcgaaacgcgcttcccggatccgatggcgaatccatacctgtgcttctccgcgctgatgatggcgggtctggacggcgtgcagaacaagattcacccgggcgaagccgccgacaagaacctgtacgacctgccgccggaagaggatgcaaagatcccgaccgtgtgcgccggcctcgaccaggctctggactcgctcgacgcggaccgcgaattcctgacgcgcggtggcgtgttcacggattcgatgctcgacgcgtacatcgaactgaagacgggcgagctgcaacgctatcgtcagtcggtgcacccgatcgaattcgaaatgtactactcgctgtaa

SEQ ID NO: 101504 - protein, 471 aa, Burkholderia xenovorans LB400
MSKSVADVVQLVKDEDVKFVDFRFTDTRGKEQHVSVPVSAFDEDKFESGHAFDGSSIAGWKGIEASDMLLVPDANTAFIDPFYEESTLVLTCDVVEPADGKGYERDPRSLAKRAEAYLKSTGLGDTAFFGPEPEFFIFDSVKWGTDQSGTFVKIGSEEAPWSSALDFEGGNTGHRPGTKGGYFPVAPVDTFQDIRSEMCLLLEQIGIPVEVHHHEVAGQGQNEIGTKFSTLVQRADWLQQMKYIIHNVAHTYGKTATFMPKPVVGDNGSGMHVHQSIWKDGTNLFAGNGYAGLSEFALFYIGGIIKHARALNAITNPSTNSYKRLVPHFEAPVKLAYSARNRSASIRIPHVSNPKGRRIETRFPDPMANPYLCFSALMMAGLDGVQNKIHPGEAADKNLYDLPPEEDAKIPTVCAGLDQALDSLDADREFLTRGGVFTDSMLDAYIELKTGELQRYRQSVHPIEFEMYYSL

SEQ ID NO: 101505 - DNA, 1329 bp, Methanococcoides burtonii DSM 6242
  CDS (1)..(1329): transl_table=11
atgaatatcaatactaaagaagatgttctcaaagcaattgagaataacaatgttaagtttataaggttgcagttcacggacattcagggtgtcgtgaaagatgtggaaattcctgtaacacagatagaaaaggctcttagtgtgggcatatccttcgatggttcctccattgaaggttttgttcgtatcaatgagtcagatatggttttaaaaccagatacatcttccttcgccatacttccatggaaccagaagaagggtgttgttgcaaggatgatctgtgatatctatcttcccgatggaacaccatttgaaggggatcctcgctacacactcaagaaggtcatgaaagaggcgaaagaaatgggcttctcacttaatgtgggtcctgaactcgaatttttcctgttcgagaggcatgatggaaaagcaacaactattcctcacgattttggcaggtatttcgaatttgcacctgcagaccttgcagaggatattcgtcgtgatattgtcttaactctcatggatcttggatttgagattgaagcttcacaccacgaagttgcattcggtcagcatgagatcgatttcaagtatggggatgcccttaccactgctgacaatgtaactactttcaagtatgtgacccgtaccatcgcaaagctcaatggcttacacgcaactttcatgccaaaaccgatctttggtgagaacggctcaggtatgcatgtaaacctctctctttctaagaatggggagaatatattctatgatgctgatggcgatatgcagataagtgatgaagcacgctactttattggcggtcttctcaaacacgtaaaggctataacagcaatttccaatccacttataaactcctacaagcgccttgttccgggatatgaagctccggtctacattgcatggtcaggtgctaacagaagctctctcatccgtatccctgcggcaaggggtaagggcactcgtgtagaacttagaagcccggacccatcatgtaacccctatatcacattcgctgccgttcttgcagcagggcttgatggtatcaggaacaagatcgatcccggggataacagggaagagaacatctttgagcttactgataaaggactcagggactttggtatcgaaacccttccatcaacactgaacgattctgcaaagtatctggcagatgatgagctcttaaaagaagcacttggtgctcatgtgcacaatagtgtcctgagtcttgcaaaggctgaatgggattcttatcgtattcaggttcatgattgggagatcgaaaggtatctcaatactgtgtga

SEQ ID NO: 101506 - protein, 442 aa, Methanococcoides burtonii DSM 6242
MNINTKEDVLKAIENNNVKFIRLQFTDIQGVVKDVEIPVTQIEKALSVGISFDGSSIEGFVRINESDMVLKPDTSSFAILPWNQKKGVVARMICDIYLPDGTPFEGDPRYTLKKVMKEAKEMGFSLNVGPELEFFLFERHDGKATTIPHDFGRYFEFAPADLAEDIRRDIVLTLMDLGFEIEASHHEVAFGQHEIDFKYGDALTTADNVTTFKYVTRTIAKLNGLHATFMPKPIFGENGSGMHVNLSLSKNGENIFYDADGDMQISDEARYFIGGLLKHVKAITAISNPLINSYKRLVPGYEAPVYIAWSGANRSSLIRIPAARGKGTRVELRSPDPSCNPYITFAAVLAAGLDGIRNKIDPGDNREENIFELTDKGLRDFGIETLPSTLNDSAKYLADDELLKEALGAHVHNSVLSLAKAEWDSYRIQVHDWEIERYLNTV

SEQ ID NO: 101507 - DNA, 1416 bp, Ralstonia metallidurans CH34
  CDS (1)..(1416): transl_table=11
atggcgcagagcgttgcagatgtgatgaagctcgtgaacgaaaacgacgtgaagttcgtcgatttccgtttcacggataccaagggcaaagaacagcacgtctcggtgccggtgtcgcacttcgacgaagacaagttcgagagcggccacgcctttgatggttcgtccatcgccggctggaagggtatcgaggcctccgacatgctgctcatgccggattcgggtaccgcctacatcgacccgttctacgaagagccgacgctggtgctgagctgcgacgtgatcgagccgtcggacggcaagggctacgaccgcgatccgcgctcgatcgccaagcgcgctgaagcctacctgaagagcaccggcctgggcgacaccgccttcttcggtccggaacccgagttcttcatcttcgacggcgtgacctggaacatcgacatgcaaggctgctcggtgaagatccagtcggaagaagcaccgtggtcgtcgggcaaggaattcgagcacggcaacagcggtcaccgtccgggcaagaagggcggctatttcccggttgccccgatcgacacgttccaggacatgcgttcggaaatgtgcctgattctggaatcgctgggcatccccgttgaagtgcaccaccacgaagtggctggccagggccagaacgaaatcggcacgcgcttcagcacgctggtgcaacgcgccgactggacccagctgcagaagtacgtgattcagaacgtcgcgcacacctacggcaagacggccacgttcatgccgaagccgatcgtgggcgataacggttcgggcatgcacgttcaccagtcgatctggaaggacggtcagaacctgttcgcgggcaacggctacgccggcctgtcggaattcgcgctgtactacatcggcggcatcatcaagcacgctcgcgcgctgaacgccatcaccaatccgggtacgaactcgtacaagcgtctggtgccgggcttcgaggcaccggtgaagctggcctactcggctcgcaaccgttcggcttcgatccgtattccgtacgtgtccaacccgaagggtcgccgtatcgaaacgcgcttcccggatccgctgatgaacccgtacctgggcttctcggcactgatgatggccggtctggatggcgtgatgaacaagatccacccgggcgaagctgccgacaagaacctgtacgatctgccgcccgaagaagacgcgaagatcccgaccgtctgctcgagcctggatcaggccttggagtacctggacaacgaccgtgagttcctgacccgcggtggtgtgttctcgaactcgatgctcgacgcctacatcgaactgaagatggaagaagtcacgcgtttccgcatgacgactcacccgattgagttcgacatgtactactcgctgtaa

SEQ ID NO: 101508 - protein, 471 aa, Ralstonia metallidurans CH34
MAQSVADVMKLVNENDVKFVDFRFTDTKGKEQHVSVPVSHFDEDKFESGHAFDGSSIAGWKGIEASDMLLMPDSGTAYIDPFYEEPTLVLSCDVIEPSDGKGYDRDPRSIAKRAEAYLKSTGLGDTAFFGPEPEFFIFDGVTWNIDMQGCSVKIQSEEAPWSSGKEFEHGNSGHRPGKKGGYFPVAPIDTFQDMRSEMCLILESLGIPVEVHHHEVAGQGQNEIGTRFSTLVQRADWTQLQKYVIQNVAHTYGKTATFMPKPIVGDNGSGMHVHQSIWKDGQNLFAGNGYAGLSEFALYYIGGIIKHARALNAITNPGTNSYKRLVPGFEAPVKLAYSARNRSASIRIPYVSNPKGRRIETRFPDPLMNPYLGFSALMMAGLDGVMNKIHPGEAADKNLYDLPPEEDAKIPTVCSSLDQALEYLDNDREFLTRGGVFSNSMLDAYIELKMEEVTRFRMTTHPIEFDMYYSL

SEQ ID NO: 101509 - DNA, 1407 bp, Silicibacter sp. TM1040
  CDS (1)..(1407): transl_table=11
atgagcaaagatgctgttctcaagctgatcaaggatgaagaggcagaatatgtcgacatccgcttcaccgacccgcgcggcaagctccagcacgtcaccctgatgtcggatcaggtcgacgaggacttcctcgacgagggcttcatgttcgacggctcttccatcgcaggctggaaatccattgaagcctccgacatgaagctgatccccgacaccgaatccgcctatgtcgaccccttctacgccgaaaaaaccatctgcattcactgctccgtggtcgagcccgacaccggcgaagcctatgagcgcgacccgcgcggcactgccgaaaaagcagaagcctacctcaaggcctccggcatcggtgacgtcgcctacatgggccccgaagcagaattcttcctgtttgacgatgtacgtttctccaactccatcaacaaagtgtcctacgaggtcgatgcaaccgacgcctcctggaacaccgatgctgagtatgaaaccggcaacatgggccaccgcccgggcgtcaaaggcggctacttcccggtaaacccggtcgacgagtcccaggacctgcgctccgagatgctctccaccatgaagcgtctgggcatgaaagtggacaagcaccaccacgaggttgcgtcctgtcagcacgagctgggtctgatctttgacagcctgaccaaacaggccgacgagctgcagaagtacaaatacgtgatccacaacgtggcccacgcctatggcaaatccgcgaccttcatgcccaagccgatcgcaggcgacaacggcaccggcatgcacgtcaacatgtccatctggaaagacggcaagccgctctttgcaggtgacaaatacgcggacctgtcgcaggaagcgctgtacttcatcggtggtatcctgaagcacgcaaaaaccctgaatgctttcaccaacccgtccaccaactcctacaagcgtctgatcccgggctttgaagcccccgttctgcgcgcgtattccgctcgtaaccgttccggctgcgtgcgtattccgtggaccgaatccccgaaggcaaagcgcgtcgaggcccgcttccccgatccggcggcaaacccctacctggcgtttgcagcgcttctgatggccggccttgacggcatcaagaacaagatcgatccgggcgaagccatggataagaacctctatgacctgcccgcagaagagctggccgacatcccgaccgtctgtggctccctgcgcgaagcgctcgagtcgctcgcggccgaccacgacttcctgctgcagggcgacgtgttcaccaaagaccagatcgaaggctacatcgccctcaagatggaagaggtggaaacctacgagcacaccccgcatccggtcgaataccagatgtactacagctgctga

SEQ ID NO: 101510 - protein, 468 aa, Silicibacter sp. TM1040
MSKDAVLKLIKDEEAEYVDIRFTDPRGKLQHVTLMSDQVDEDFLDEGFMFDGSSIAGWKSIEASDMKLIPDTESAYVDPFYAEKTICIHCSVVEPDTGEAYERDPRGTAEKAEAYLKASGIGDVAYMGPEAEFFLFDDVRFSNSINKVSYEVDATDASWNTDAEYETGNMGHRPGVKGGYFPVNPVDESQDLRSEMLSTMKRLGMKVDKHHHEVASCQHELGLIFDSLTKQADELQKYKYVIHNVAHAYGKSATFMPKPIAGDNGTGMHVNMSIWKDGKPLFAGDKYADLSQEALYFIGGILKHAKTLNAFTNPSTNSYKRLIPGFEAPVLRAYSARNRSGCVRIPWTESPKAKRVEARFPDPAANPYLAFAALLMAGLDGIKNKIDPGEAMDKNLYDLPAEELADIPTVCGSLREALESLAADHDFLLQGDVFTKDQIEGYIALKMEEVETYEHTPHPVEYQMYYSC

SEQ ID NO: 101511 - DNA, 1410 bp, Mesorhizobium sp. BNC1
  CDS (1)..(1410): transl_table=11
atgaccacagcacaggatattctgaagcagatcaaggacaacgacgttaagttcgttgacctgcgctttacggatccgaagggcaaactacagcatgtgacgatggacgtcgtcgccgtagacgaggacatgttcgccgacggtgtcatgttcgacggctcatcgatcggcggctggaaggccatcaacgaatccgacatggtgctgatgccagatcctgagacggctcatgtggatcccttcttcgcccagtccacaatggtggtctactgcgatattctggacccgatctccggggaagcctataaccgtgatccgcgcggcattgccaaaaaggccgaggcctatttgcgcgcagaaggcatcggggacaccgtcttcataggtccggaagccgagttcttcgtgttcgatgacgtgaagtacaaggctgatccctacaataccggcttcaagctcgactcctcggagctgccgtccaacgacgataccgattacgagacgggaaacttgggccatcggccgcgtgttaagggcgggtacttcccggtaccgcctgtcgactctctgcaggatatgcgctcagagatgctctctgtgctgaccgagatgggtgtggtcgttgagaagcaccatcacgaggtggccgcagcccagcatgagcttggcctcaagttcgacacgctggtgcgcaacgccgacaagatgcagatctacaagtatgttgtgcaccaggttgcaaatgcctacggcaaaacggccaccttcatgccgaagcccatctatggcgataacggctcgggcatgcatgtgcacttgtcgatctggaaggacggcaagcccaccttcgccggcaacgagtatgccggactttccgagtcctgcctctacttcatcggcggcattatcaagcatgccaaggcgatcaacgccttcaccaacccgaccaccaactcctacaagcgtctggtgccgggcttcgaggcgccggttctgcttgcctattcggcccgcaaccgctcggcctcctgccgtatccccttcggcacttcgcccaagtcgaagcgcgtcgaggtccggttccctgacccgacggcgaacccctatctctgcttctcggccctgctgatggccggtctggacggcattaagaacaagatccatccgggccaggccatggacaaggatctttatgacctgccgccgaaggagctgaagaaggtcccgactgtctgcggcagcctgcgcgaagcgctgatgagcctcgacaaggatcgcggcttcctcaaagccggcggcgtcttcgatgacgaccagatcgatgcctatatcgagctcaagatggctgaggtgctgcgctttgacatgaccccgcatccggtcgaattcgacatgtactactcggtgtaa

SEQ ID NO: 101512 - protein, 469 aa, Mesorhizobium sp. BNC1
MTTAQDILKQIKDNDVKFVDLRFTDPKGKLQHVTMDVVAVDEDMFADGVMFDGSSIGGWKAINESDMVLMPDPETAHVDPFFAQSTMVVYCDILDPISGEAYNRDPRGIAKKAEAYLRAEGIGDTVFIGPEAEFFVFDDVKYKADPYNTGFKLDSSELPSNDDTDYETGNLGHRPRVKGGYFPVPPVDSLQDMRSEMLSVLTEMGVVVEKHHHEVAAAQHELGLKFDTLVRNADKMQIYKYVVHQVANAYGKTATFMPKPIYGDNGSGMHVHLSIWKDGKPTFAGNEYAGLSESCLYFIGGIIKHAKAINAFTNPTTNSYKRLVPGFEAPVLLAYSARNRSASCRIPFGTSPKSKRVEVRFPDPTANPYLCFSALLMAGLDGIKNKIHPGQAMDKDLYDLPPKELKKVPTVCGSLREALMSLDKDRGFLKAGGVFDDDQIDAYIELKMAEVLRFDMTPHPVEFDMYYSV

SEQ ID NO: 101513 - DNA, 1437 bp, Rhodococcus sp. RHA1; identical to SEQ ID NO: 32197
  CDS (1)..(1437): transl_table=11

SEQ ID NO: 101514 - protein, 478 aa, Rhodococcus sp. RHA1; identical to SEQ ID NO: 32198

SEQ ID NO: 101515 - DNA, 1422 bp, Trichodesmium erythraeum IMS101
  CDS (1)..(1422): transl_table=11
atggtaaaaacagcccaagatgtattgaactggattaagagtcaagacattcaagttattgacttgaagtttattgacttacctggtatttggcagcatttaacagttcatcaaagtcaaattgatgaaagctcttttacagatggagttgcttttgatggttctagtattcgtggttggaaaagtattaacgagtcagacatgatgatggtgctcgatccaactactgcttggattgaaccttttatggccgaacctacactaagtatcacctgtagtattaaagaacctcgaactggtgaatggtacagtcgttgcccaagagttatagctcagaaagcagttgattttttaaaaactcaaggtattggggatactgtatattttggtccagaagctgaattttttgtgtttgaggatgctcgtttcgaccaaacagaaaataaagcatactattatgttgatagtatagagggtcgttggaactctggaagagaggaagatggaggtaacaaagcttataaacctgactacaaaggaggttatttcccagtacctcctacagatactatgcaagacttacgcacagagatgctattaacaatggctaagtgtggagtccctattgagaagcatcaccacgaagtagctacaggtggtcagaatgaattaggcttccgctttggtaaattggtagaagctgcagataacttgatgatttataagtatgttatcaagaatgtgggtagaaagtatggcaagactattacttttatgcctaagccaatctttaatgataatggttctggaatgcatgttcaccagtcaatttggaaagacggagagcctctattctggggtgatggttatgctaatttgagtaagatggctcttcattatatcggtggtatcctgaagcacgctccagcaatattaggtttctctaatccttctactaattcttataagcgattagttcctggatttgaagctccagtaaatttggcctattctcaaggaaaccggtccgcttctgtccgaattcctttaactggtactaatcctaaggcaaaacgcttagaatttcgttgtcctgatgctacttgtaacccatatcttgcttttgcggctatgctttgtgctggtattgatgggatattgaatgaaattgaccctggtccatctttggatgtggatatttatgacctaagtcctgaagagttgagtaagattccttctactcctggttccctagaaggtgctttggaagctttggaaaaagatcatgagtttttgactgctggtggggtatttacggaagatttgattcaaacttggattgattacaagatggagaatgaggttaaaccgatgcgtctgcgacctcatccctatgagttttctatgtactatgattgctaa

SEQ ID NO: 101516 - protein, 473 aa, Trichodesmium erythraeum IMS101
MVKTAQDVLNWIKSQDIQVIDLKFIDLPGIWQHLTVHQSQIDESSFTDGVAFDGSSIRGWKSINESDMMMVLDPTTAWIEPFMAEPTLSITCSIKEPRTGEWYSRCPRVIAQKAVDFLKTQGIGDTVYFGPEAEFFVFEDARFDQTENKAYYYVDSIEGRWNSGREEDGGNKAYKPDYKGGYFPVPPTDTMQDLRTEMLLTMAKCGVPIEKHHHEVATGGQNELGFRFGKLVEAADNLMIYKYVIKNVGRKYGKTITFMPKPIFNDNGSGMHVHQSIWKDGEPLFWGDGYANLSKMALHYIGGILKHAPAILGFSNPSTNSYKRLVPGFEAPVNLAYSQGNRSASVRIPLTGTNPKAKRLEFRCPDATCNPYLAFAAMLCAGIDGILNEIDPGPSLDVDIYDLSPEELSKIPSTPGSLEGALEALEKDHEFLTAGGVFTEDLIQTWIDYKMENEVKPMRLRPHPYEFSMYYDC

SEQ ID NO: 101517 - DNA, 1410 bp, Shewanella sp. MR-4
  CDS (1)..(1410): transl_table=11
atgtcagttgaatcagttttaaagcaacttgaagaattagaagttaagtttgttgatttacgttttaccgacaccaaaggtaaagagcagcacgtatctatccctgctcatcaggtagacgctgacttcttcgaagacggcaaaatgtttgacggttcgtcaatcgctggctggaaaggcattaacgaatcagacatggtgctgatgccagacccaaccacgtttgtattagacccattcaccgaagaaaccactgccctgatccgctgtgacattctcgagccaggcactatgactggttatgaccgcgacccacgttctatcgcgaaaaaagcggaagaatacttacgctctaccggtatcgctgacactgtattagttggaccagaaccagaattcttcctgttcgacgacgtacgtttcggtactgacatgtctggttgtttcgtgaaaatcgacgctaaagaagcggcatggaactctggcactagctacgaaggtggtaacactggtcaccgtccattcgtgaaaggcggttacttcccagtagctccagttgactcatcacaagacttacgtagcgctatgtgtttagtgctcgaagaaatgggtcaagtcgttgaagctcaccaccacgaagtagcgactgcgggtcaaaacgaaatcgcaactcgcttcaacactctgactaagaaagcggacgaaatccaaattctgaagtacgtagtacacaacatggctcacgcctacggtaagactgcgactttcatgcctaagccaatcgttggcgacaacggtagcggtatgcacgttcaccaatctctgtctaaagacggtgtgaacctgttcgcaggcgacaaatacgctggtttaagtgaaactgcactgtactacatcggtggtatcatcaagcacgctcgcgcgctgaacgctttcactaacccaagcactaactcttacaagcgtttagtaccacacttcgaagcgccagtgatgttagcttactcagcacgtaaccgcagcgcttcaatccgtattccagtggtaccaagccctaaaggccgtcgtatcgaaactcgcttccctgatccacatgcaaacccatacttaggtttcgcagcactgctgatggcgggtctcgacggtatccaaaacaagatccatcctggcgaagctatggataaagacttgtacgatctgccagctgaagaagcggctgaaatcccacaagtagcgacttcattagaaaacgcgcttgaaaacctgcaagctgaccacgagttcttaactcgcggcggtgtattcagcgaagatttcatccagtcttacattgcactgaaatctgcagaagctgagcgtgtaagccgtacaactcacccattagagttcgagatgtactacagcctgtaa

SEQ ID NO: 101518 - protein, 469 aa, Shewanella sp. MR-4
MSVESVLKQLEELEVKFVDLRFTDTKGKEQHVSIPAHQVDADFFEDGKMFDGSSIAGWKGINESDMVLMPDPTTFVLDPFTEETTALIRCDILEPGTMTGYDRDPRSIAKKAEEYLRSTGIADTVLVGPEPEFFLFDDVRFGTDMSGCFVKIDAKEAAWNSGTSYEGGNTGHRPFVKGGYFPVAPVDSSQDLRSAMCLVLEEMGQVVEAHHHEVATAGQNEIATRFNTLTKKADEIQILKYVVHNMAHAYGKTATFMPKPIVGDNGSGMHVHQSLSKDGVNLFAGDKYAGLSETALYYIGGIIKHARALNAFTNPSTNSYKRLVPHFEAPVMLAYSARNRSASIRIPVVPSPKGRRIETRFPDPHANPYLGFAALLMAGLDGIQNKIHPGEAMDKDLYDLPAEEAAEIPQVATSLENALENLQADHEFLTRGGVFSEDFIQSYIALKSAEAERVSRTTHPLEFEMYYSL

SEQ ID NO: 101519 - DNA, 1416 bp, Alkalilimnicola ehrlichei MLHE-1
  CDS (1)..(1416): transl_table=11
atggctcgcaccgctgctgacgtactcaagctgatccaggacgaggacgtgaagttcgtcgacctgcgcttcaccgacacccgtggcaaggaacagcacgtgaccatccccgcccacgaactggacgaggacatgttcgaggacggcaagatgttcgacggctcctcaatcgcgggctggaagggcatcaacgagtccgacatgatcatgatgccggacccggagaccgccaccctggatccctttttcgacgatcccaccatcaacctcacctgcgacatcatcgagcccagcaccatgcagggctacgagaaggacccccgctccgtggcccgccgggcagaggcctacctgaagtccaccggactgggtgagagcgcgctgttcggcccggagaacgagtttttcgtgttcgatgacgtgcgctggggcgccgacatgagcggctccttctacaagatcgattcggaggaggccggctggaactccgagcgggtctacggtgacggcaacatgggtcaccggccgaaggtaaagggcgggtacttcccggtaccgccggtggactcgctgcacgatctgcgcgcggccatgtgcgaggccctcgaggacctgggtctgaccgtcgaggtgcaccaccatgaggtggccacggccggtcagtgtgagatcggcgtcggtcccaacaccctggtgaagaaggccgacgagattcagaaactcaagtacgccgtgcacaacgtcgcccacgcctacggcaagaccgccaccttcatgcccaagcccctggtaggcgacaacggcagcggcatgcacgtgcaccagtcggtgatgaaggacggcaacaacgtcttcggtggcgacagctacggtggcctgtccgagttcgccctgtactacatcggcggcatcatcaagcatgcccgtgctatcaacgccttcgccaacgccagcaccaacagctacaagcggttggtcaagggcttcgaggcgccggtgctgctcgcctactcggcccgcaaccgctccgcctccattcgcgtgccctacgtgcccaaccccaaggcgcgccggatcgaggtccgtttcccggactccaccgccaacccctacttcgccttcgccgcgatgctgatggccggtctggacggggtgcagaacaagatccatcccggcgaggccatggacaaggatctctacgatctgcccccggaggaggagcgcgacatcccgaaggtggccctgtcgctgaatgaggcgctggaggccctggatcaggatcgcgagttcctcaaacagggcggggtgttcaccgacgacaccatcgacgcctacatcgagctgaagatggaagaggtggagcggttgaacatgaccacccacccggtggagttcgacctttactacagtgtctga

SEQ ID NO: 101520 - protein, 471 aa, Alkalilimnicola ehrlichei MLHE-1
MARTAADVLKLIQDEDVKFVDLRFTDTRGKEQHVTIPAHELDEDMFEDGKMFDGSSIAGWKGINESDMIMMPDPETATLDPFFDDPTINLTCDIIEPSTMQGYEKDPRSVARRAEAYLKSTGLGESALFGPENEFFVFDDVRWGADMSGSFYKIDSEEAGWNSERVYGDGNMGHRPKVKGGYFPVPPVDSLHDLRAAMCEALEDLGLTVEVHHHEVATAGQCEIGVGPNTLVKKADEIQKLKYAVHNVAHAYGKTATFMPKPLVGDNGSGMHVHQSVMKDGNNVFGGDSYGGLSEFALYYIGGIIKHARAINAFANASTNSYKRLVKGFEAPVLLAYSARNRSASIRVPYVPNPKARRIEVRFPDSTANPYFAFAAMLMAGLDGVQNKIHPGEAMDKDLYDLPPEEERDIPKVALSLNEALEALDQDREFLKQGGVFTDDTIDAYIELKMEEVERLNMTTHPVEFDLYYSV

SEQ ID NO: 101521 - DNA, 1404 bp, Hyphomonas neptunium ATCC 15444
  CDS (1)..(1404): transl_table=11
atggcagacgatcttctcaagcttatgaaggaccaggacgtccagtatgtggacctgcgcttcaccgacacgcgcggcaagctgcagcacgtgtccttccacaaggacatggtggacaagagcttcttcgaagatggccagatgtttgacggctcctcgattgctggctggaaagccatcaacgagtccgacatgcttctgaaaccggacgcgaaaggcgcgttcatcgacccgttcttccaacagaccacccttgttgtgttctgtgacattctcgacccgatctcgggccaggcttacagccgcgacccgcgcacgaccgccaagaaggcagaggcttacctcgccgcctccggcgttggcgacaccgcattcttcggcccggaagctgagttcttcatctttgacgacgtgcgctggtcaaccgacccgcacaacacgggctactcgttcgattcgaccgaactgccggcgaattccggccgcgaatatccgatgggcaacctcggccaccgccccggcccgaagggcggctatttccccgttccgccaatcgactccgagcaggacatgcgcggcgagatgctgtcgatcatgggtgacatcggccttgagccagagaagcaccaccatgaagtggccccggcccagcacgagcttggcctgaaattctcgacgctcacggtcatggctgaccggatgcagctctacaaatacgtgatccaccaggtcgccgcctcttacggcaaaaccgcgaccttcatgcccaaaccgatgttcaaggacaacggctcgggcatgcacgttcaccagtcgatctggaaaggcggcaagccgctcttcgcaggcgacaagtatgctgatctctccgagatgtgcctctactatatcggcggcatcatcaaacacgccaaggctctgaacgcgatcaccaacccatcgaccaactcgtacaagcgactggtccccggctatgaagcgcctgtgatgctggcttattcggcacgcaaccgttcggcctcgatccgtattccttacggctcgaacccgaaagcaaagcgtatcgaaacccgcttccctgacccgatggcgaacccctacctcgccttcgcagccctgctgatggctggcctcgacgggatcgagaacaagatccatccgggcgacgcgatggacaaggacctctacgacctgccaccggcagaagccaagcagatcccgcaggtctgcggctcgctgcgtgaagccctggcggccctcgatgccgaccgcgccttcctcaagaaaggcggcgtgttcgacgacgaccagatcgatgcctacatcgaactgaagatggaagagaacatgcgttacgagcttcatccgcacccggttgagttcgacatgtactacaagaactag

SEQ ID NO: 101522 - protein, 467 aa, Hyphomonas neptunium ATCC 15444
MADDLLKLMKDQDVQYVDLRFTDTRGKLQHVSFHKDMVDKSFFEDGQMFDGSSIAGWKAINESDMLLKPDAKGAFIDPFFQQTTLVVFCDILDPISGQAYSRDPRTTAKKAEAYLAASGVGDTAFFGPEAEFFIFDDVRWSTDPHNTGYSFDSTELPANSGREYPMGNLGHRPGPKGGYFPVPPIDSEQDMRGEMLSIMGDIGLEPEKHHHEVAPAQHELGLKFSTLTVMADRMQLYKYVIHQVAASYGKTATFMPKPMFKDNGSGMHVHQSIWKGGKPLFAGDKYADLSEMCLYYIGGIIKHAKALNAITNPSTNSYKRLVPGYEAPVMLAYSARNRSASIRIPYGSNPKAKRIETRFPDPMANPYLAFAALLMAGLDGIENKIHPGDAMDKDLYDLPPAEAKQIPQVCGSLREALAALDADRAFLKKGGVFDDDQIDAYIELKMEENMRYELHPHPVEFDMYYKN

SEQ ID NO: 101523 - DNA, 1410 bp, Rhizobium leguminosarum bv. viciae 3841
  CDS (1)..(1410): transl_table=11
atggcgaccgcaagcgaaattctgaagcagatcaaggagaacgacgtaaagttcgtcgatctgcgtttcaccgacccgaagggcaagctgcagcatgtgacgatggacgttgtctgcgtcgacgaagacatgttcgctgacggcgtgatgttcgacggctcctcgatcggtggctggaaggccatcaatgagtccgacatggtgctgatgcccgataccgaaacggtgcatatggacccgttcttcgctcagtcgaccatggtcatcgtctgcgacatcctcgatccggtctccggcgaggcctataaccgcgatccgcgcggcaccgccaagaaggccgaagcctacctcaaggcatccggcatcggcgatacggtcttcgtcggccctgaagccgaattcttcgtcttcgacgacgtcaagtacaaggccgatccttacaataccggcttcaagctcgattcgaccgaactgccgtcgaacgacgacaccgattacgagaccggcaacctcggccatcgcccgcgcgtcaagggcggctatttcccggttccccccgtcgacagcgctcaggacatgcgttcggaaatgctgacggtgctttccgagatgggcgtcgttgtcgaaaagcatcaccacgaagtcgctgccgcccagcacgaactcggcatcaagttcgatacgctggtgcgcaacgccgacaagatgcagatctacaaatatgtcgtgcaccaggtggccaacgcttacggcaagacggcgaccttcatgccgaagccgatcttcggcgacaatggctcgggcatgcatgtgcaccagtcgatctggaagggcggcaagccgacctttgccggcgacgaatatgcaggcctttccgagagctgcctgttttacatcggcggcatcatcaaacatgccaaggcgatcaacgccttcaccaacccgtcgacgaactcctacaagcgtctcgttccgggttacgaagcccctgtgctgctggcctattcggcccgcaaccgctcggcttcctgccgcattccgttcggctccaacccgaaggccaagcgcgtcgaagtccgcttcccggatccgaccgccaacccctatctcgcctttgccgccatgctgatggccggcctcgacggcatcaagaacaagatccatcccggcaaggccatggacaaggatctctacgacctgccgccgaaggaattgaagaagatcccgaccgtctgcggctcgttgcgcgaagcactcgaaagcctcgacaaggaccgcaagttcctgacagccggcggcgtcttcgacgacgaccagatcgatgccttcatcgagctgaagatggctgaggtgatgcgtttcgaaatgacgccgcatccggtcgaatacgacatgtactattcggcctga

SEQ ID NO: 101524 - protein, 469 aa, Rhizobium leguminosarum bv. viciae 3841
MATASEILKQIKENDVKFVDLRFTDPKGKLQHVTMDVVCVDEDMFADGVMFDGSSIGGWKAINESDMVLMPDTETVHMDPFFAQSTMVIVCDILDPVSGEAYNRDPRGTAKKAEAYLKASGIGDTVFVGPEAEFFVFDDVKYKADPYNTGFKLDSTELPSNDDTDYETGNLGHRPRVKGGYFPVPPVDSAQDMRSEMLTVLSEMGVVVEKHHHEVAAAQHELGIKFDTLVRNADKMQIYKYVVHQVANAYGKTATFMPKPIFGDNGSGMHVHQSIWKGGKPTFAGDEYAGLSESCLFYIGGIIKHAKAINAFTNPSTNSYKRLVPGYEAPVLLAYSARNRSASCRIPFGSNPKAKRVEVRFPDPTANPYLAFAAMLMAGLDGIKNKIHPGKAMDKDLYDLPPKELKKIPTVCGSLREALESLDKDRKFLTAGGVFDDDQIDAFIELKMAEVMRFEMTPHPVEYDMYYSA

SEQ ID NO: 101525 - DNA, 1410 bp, Solibacter usitatus Ellin6076
  CDS (1)..(1410): transl_table=11
atgactccacaggaagtgctggattacgcgaaaacgaatggtgcgcagcaactggatctccggttcaccgatattccgagcctgcagcatcatgtctcttatcccatgaaccaggtggatgagagcagcttcgaagagggcttcggcatggacggatcgagcatccgcggctgggcggcgatccacgagagcgacatgctcctcatccccgactccaccaccgccttcatggatcccttcgccgaggtacccaccctggtgatgtacggcgatgtgaaggaccccatcaccaagcagcgctacgagcgcgacccgcgctggatcgctcaaaaggccgagctctatttgaagaatagcggggtcgccgacacgtcctatttcggcgctgaggcggagttcttcatcttcgataacgtcagcttcgatcagaaccagcactccggcttctactacatcgatgccgaagagggccgctggaattccggccgccgcgaaaacaatctgggctaccgcccgcgctacaaggaaggctacttcccggtgccgcccacggaccactaccaggacctgcgcagcgagatggtccgcaccatgatcgagtgcggcctcaatatcgagtgccaccaccacgaagtcgccaccggcggacagtgcgagatcgatcagaagtatgacacgcttgtgcgcagcgcggacaacatgatgctgtacaaatatgtggtccgcaacgtggccaaccagtatggcaagacagtcaccttcatgcccaagcccatcttcggcgataacggcagcggcatgcactgccaccagagcctgtggcgcgagggcaagccgctcttcgccggcgatagctacgccgggctcagccagatggcgctccactacatcggcggactgctcaagcacgcgcgcgcgctttccgccatcattgcccccaccaccaacagctataagcgcctggtgcccggttacgaagcgccggtcaacctcgcctattcgcgccgcaatcgcagcgccgcggtgcgcatcccgatgtactccgcgagtcccaagaccaagcgcgtggaattccgtccgccggacgcctccgccaatccgtacctggcctttgccgcgatgctgatggccgggctcgatggcgtgatgaaccgcatcaatcccggcgagccgctcgacaaagacatctacgacctctcgcccgaggaaatgaagagcgtgccctctatgccaggttcgctcgacgaagcgctcacctgtctggaagacgaccacggtttcctgatgcgcggcgacgtttttaccgaagagctgctcgagaccttcatcgattacaaacgcaagaacgaagccgaggccgtgcgtctgcgcccgcacccctacgagttcgccctctactacgacatctga

SEQ ID NO: 101526 - protein, 469 aa, Solibacter usitatus Ellin6076
MTPQEVLDYAKTNGAQQLDLRFTDIPSLQHHVSYPMNQVDESSFEEGFGMDGSSIRGWAAIHESDMLLIPDSTTAFMDPFAEVPTLVMYGDVKDPITKQRYERDPRWIAQKAELYLKNSGVADTSYFGAEAEFFIFDNVSFDQNQHSGFYYIDAEEGRWNSGRRENNLGYRPRYKEGYFPVPPTDHYQDLRSEMVRTMIECGLNIECHHHEVATGGQCEIDQKYDTLVRSADNMMLYKYVVRNVANQYGKTVTFMPKPIFGDNGSGMHCHQSLWREGKPLFAGDSYAGLSQMALHYIGGLLKHARALSAIIAPTTNSYKRLVPGYEAPVNLAYSRRNRSAAVRIPMYSASPKTKRVEFRPPDASANPYLAFAAMLMAGLDGVMNRINPGEPLDKDIYDLSPEEMKSVPSMPGSLDEALTCLEDDHGFLMRGDVFTEELLETFIDYKRKNEAEAVRLRPHPYEFALYYDI

SEQ ID NO: 101527 - DNA, 1422 bp, Magnetococcus sp. MC-1
  CDS (1)..(1422): transl_table=11
atggctaataaggaagcggtaaataaagttctgggcatgatcgatgccaacaatgtgcgctttgttgattttcgattcaccgattttaaaggcaagtggcaacacattacggcccccgctcgcatgttgaccgaagatgtttttgaaaccggactcggtttcgatggctcatccatcacggggtggtgtgagatcaacaactccgacatggcctatgtacccgatcctgaatcggctgtcatggatcccttctccgaggacgctaccctgatcctcgcttgtaacatcatcgaccccttcaccggtgaagattacagccgtgacccccgctccgtggccaaacgcgccgaggcttacctggcctataccggtattgctgacaccgcctatgtgggtcccgaagctgagtttttcgtgttcgactccgtgcgttacaatgtgggcatgaacaacgtctcttaccacattgattccgaagagggcgcttggaacaccggcaccgagtatgaggatggcaacaccggccaccgtcctggcatcaagggtggttatttccccgtaccacctgtggactctctgcaagagatgcgtaatgagatgtccaacctgatggaagagatgggtctaaccatcgaattccaccaccacgaagtggccaccgccggtcagtgtgaaattgacatgcgttttggtaccatgctgcacaccgctgacaacattcagaaatataaatatgttgttcacaatgtggcccaccagtatggcaagaccgcaacctttatgcccaagcctatggcgggtgacaacggttctggcatgcactgccacatgtcgatctggaaagatggcaagcccctgtttgccggcaaccagtatgccgacctctctgagatggctctgcacttcatcggcggcatcaagaagcacgcgaaggctctgaacgctttcaccaacccctccaccaactcctataagcgtctgatccccggctttgaagctcccgtgctgttggcccactccagccgcaaccgttctgcttcgatccgtattcccgcttctaatagccctgcgggcaagcgttgtgaaatccgcttccccgatccctctgccaacccctacttggcttttgcggccctgttgatggcgggtatggacggtgtggagaacaagattgatccaggtccttccatggacaaaaacctctatgatctgccccccgaggagctcaaggatatcccaaccgtatgtggttccttgcgtgaagctcttgaggagctttctaaagatcgtgagttcttgctcaagggtgacgttttctccaacgacctgattgatgcttacatcaagatgaagatggatgaggtctatgccgttgagcattgcccccaccccatcgagttccaaaactactacagcgtctaa

SEQ ID NO: 101528 - protein, 473 aa, Magnetococcus sp. MC-1
MANKEAVNKVLGMIDANNVRFVDFRFTDFKGKWQHITAPARMLTEDVFETGLGFDGSSITGWCEINNSDMAYVPDPESAVMDPFSEDATLILACNIIDPFTGEDYSRDPRSVAKRAEAYLAYTGIADTAYVGPEAEFFVFDSVRYNVGMNNVSYHIDSEEGAWNTGTEYEDGNTGHRPGIKGGYFPVPPVDSLQEMRNEMSNLMEEMGLTIEFHHHEVATAGQCEIDMRFGTMLHTADNIQKYKYVVHNVAHQYGKTATFMPKPMAGDNGSGMHCHMSIWKDGKPLFAGNQYADLSEMALHFIGGIKKHAKALNAFTNPSTNSYKRLIPGFEAPVLLAHSSRNRSASIRIPASNSPAGKRCEIRFPDPSANPYLAFAALLMAGMDGVENKIDPGPSMDKNLYDLPPEELKDIPTVCGSLREALEELSKDREFLLKGDVFSNDLIDAYIKMKMDEVYAVEHCPHPIEFQNYYSV

SEQ ID NO: 101529 - DNA, 1410 bp, Shewanella sp. ANA-3
  CDS (1)..(1410): transl_table=11
atgtcagttgaatcagttttaaagcaacttgaagaattagaagttaagtttgttgatttacgttttaccgacaccaaaggtaaagagcagcacgtatctattcctgctcatcaggtagacgctgatttcttcgaagacggcaaaatgtttgacggttcgtcaatcgctggctggaaaggcattaacgaatcagacatggtgctgatgccagacccaaccacgtttgtattagacccattcaccgaagaaaccactgcactgatccgctgtgacattctcgagccaggcactatgactggttatgaccgtgacccacgttctatcgcgaaaaaagcggaagaatacttacgctctaccggtatcgctgacactgtattagttggaccagaaccagaattcttcctgttcgacgacgtacgtttcggtactgacatgtctggttgtttcgtgaaaatcgacgctaaagaagcggcatggaactctggcactagctacgaaggtggtaacactggtcaccgtccattcgtgaaaggcggttacttcccagtagctcctgttgactcttcacaagacttacgtagcgctatgtgtttagtgctcgaagaaatgggtcaagtagttgaagctcaccaccacgaagtggcgactgcgggtcaaaacgaaatcgcaactcgcttcaacactctgactaagaaagcggacgaaatccaaattctgaagtacgtagtacacaacatggctcacgcctacggtaagactgcgactttcatgcctaagccaatcgttggcgacaacggtagcggtatgcacgttcaccaatctctgtctaaagacggtgtgaacctgttcgctggcgacaaatacgctggtttaagtgaaactgcactgtactacatcggtggtatcatcaagcacgctcgcgcactgaacgccttcactaacccaagcactaactcttacaagcgtttagtaccacactttgaagcgccagtgatgttagcttactcagcacgtaaccgcagcgcttcaatccgtattccagtggtaccaagccctaaaggccgtcgtatcgaaactcgcttcccagatccacatgcaaacccatacttaggtttcgcagcgctgctgatggcgggtatcgacggtatccaaaacaagatccatccaggcgaagctatggataaagacttgtacgatctgccagcggaagaagcggctgaaatcccacaagtagcgacttcattagaaaacgcacttgagaacctgcaagctgaccacgagttcttaactcgcggcggtgtattcagcgaagatttcatccaatcttacattgcactgaaatctgcagaagctgagcgtgtaagccgtacaactcacccattagagttcgagatgtactacagcctgtaa

SEQ ID NO: 101530 - protein, 469 aa, Shewanella sp. ANA-3
MSVESVLKQLEELEVKFVDLRFTDTKGKEQHVSIPAHQVDADFFEDGKMFDGSSIAGWKGINESDMVLMPDPTTFVLDPFTEETTALIRCDILEPGTMTGYDRDPRSIAKKAEEYLRSTGIADTVLVGPEPEFFLFDDVRFGTDMSGCFVKIDAKEAAWNSGTSYEGGNTGHRPFVKGGYFPVAPVDSSQDLRSAMCLVLEEMGQVVEAHHHEVATAGQNEIATRFNTLTKKADEIQILKYVVHNMAHAYGKTATFMPKPIVGDNGSGMHVHQSLSKDGVNLFAGDKYAGLSETALYYIGGIIKHARALNAFTNPSTNSYKRLVPHFEAPVMLAYSARNRSASIRIPVVPSPKGRRIETRFPDPHANPYLGFAALLMAGIDGIQNKIHPGEAMDKDLYDLPAEEAAEIPQVATSLENALENLQADHEFLTRGGVFSEDFIQSYIALKSAEAERVSRTTHPLEFEMYYSL

SEQ ID NO: 101531 - DNA, 1425 bp, Nocardioides sp. JS614; identical to SEQ ID NO: 32209
  CDS (1)..(1425): transl_table=11

SEQ ID NO: 101532 - protein, 474 aa, Nocardioides sp. JS614; identical to SEQ ID NO: 32210

SEQ ID NO: 101533 - DNA, 1410 bp, Azoarcus sp. BH72
  CDS (1)..(1410): transl_table=11
atgaacgctcaagacgtcatgaagatgatccaggaaaacgaagtgcgcttcgtggacctgcgctttacggatacccgcggcaaggaacagcacgtcggcctgccggtgtcggccttcgaagaagatcacttcgagcacggccacccgttcgacggctcctcgatcgccggctggaagggcatccaggcttccgacatgatcctgatgccggatgcggcttccgcctacatcgatcccttcttcgacgaaaccaccctggtgctggcttgcgacgtcatcgagccgtccgacggcaagggctacgaccgcgacccgcgctccatcgccaagcgcgccgaggcctacctgaagagcaccggcatcggcgacaccgccttcttcggcccggaacccgagttcttcatcttcgacgcggtcgaatggtcggtcgacatgtcgggcgtctatagcaagatcatctccgaagaagcggcctggtccaccgccgacaagttcgaaggcggcaacaccggccaccgtccgaaggtcaagggcggctacttcccggttcccccggtcgacagcctgaacgacatccgtgccgccatggtgctggcactcgaagccgccggcatcccggtcgaagttcaccaccacgaagtggcgaacgccggccagtgcgaaatcggcaccaagttcagcacgctgaccaagcgcgccgactggacgcagaccctgaagtacatcgtccacaacgtggcccaccagtacggcaagaccgccaccttcatgccgaagccgatcgtcggcgacaacggctcgggcatgcacgtgcaccagtcgatctggaaggacggccagaacctgttcgcgggcaacggctatgccggcctgtcggaaaccgcgctgtactacatcggcggcatcatcaagcacgcccgcgcgctgaacgccatcaccaacccggccaccaactcctacaagcgtctggtgccgcactacgaagcgccgaccaagctggcctactccgcccgcaaccgttccgcctcgatccgcatcccgtacgtggccaacccgaagggtcgccgcatcgagtcgcgcttcccggatccggctgccaacccgtacctgtgcttcgccgcgctgctgatggccggcctggatggcatccagaacaagatccacccgggcgacccggccgacaagaacctgtacgacctgccgccggaagaagacgcgctgatcccgaccgtgtgtaccagcctcgaccaggcgctggaatacctggacaaggatcgcgagttcctgacccgtggcggcgtgttctccaatgacttcatcgacgcttacatcgagctgaagatggaagaagtgaaccgcctgcgcgtcaccacccacccggtggaattcgacctgtactacagcctgtaa

SEQ ID NO: 101534 - protein, 469 aa, Azoarcus sp. BH72
MNAQDVMKMIQENEVRFVDLRFTDTRGKEQHVGLPVSAFEEDHFEHGHPFDGSSIAGWKGIQASDMILMPDAASAYIDPFFDETTLVLACDVIEPSDGKGYDRDPRSIAKRAEAYLKSTGIGDTAFFGPEPEFFIFDAVEWSVDMSGVYSKIISEEAAWSTADKFEGGNTGHRPKVKGGYFPVPPVDSLNDIRAAMVLALEAAGIPVEVHHHEVANAGQCEIGTKFSTLTKRADWTQTLKYIVHNVAHQYGKTATFMPKPIVGDNGSGMHVHQSIWKDGQNLFAGNGYAGLSETALYYIGGIIKHARALNAITNPATNSYKRLVPHYEAPTKLAYSARNRSASIRIPYVANPKGRRIESRFPDPAANPYLCFAALLMAGLDGIQNKIHPGDPADKNLYDLPPEEDALIPTVCTSLDQALEYLDKDREFLTRGGVFSNDFIDAYIELKMEEVNRLRVTTHPVEFDLYYSL

SEQ ID NO: 101535 - DNA, 1419 bp, Neisseria meningitidis FAM18
  CDS (1)..(1419): transl_table=11
atgtctattaaaaacgccgtaaaattgattgaagaaagcgaagcccgctttgtcgatttgcgctttaccgataccaaaggcaagcagcaccactttaccgtgcctgcgcgcatcgtgttggaagaccccgaagagtggttcgaaaacggtcaggcgtttgacggttcgtctatcggcggctggaaaggcattcaggcttccgatatgcagttgcgtcccgatgcgtctacagccttcgtcgatcctttttatgatgatgttaccgtcgtcattacctgcgacgtcatcgaccctgccgacggtcagggttacgaccgcgacccgcgctccatcgcccgccgcgccgaagcctatttgaaatcttccggcatcggcgacacggcatacttcggccccgaacccgaattcttcgtcttcgacggcgtagaatttgaaaccgacatgcacaaaacccgttacgaaatcacgtccgaaagcggcgcgtgggcaagcggcctgcatatggacggtcaaaacaccggccaccgtcccgccgtcaaaggcggctacgcgcccgtcgcgccgattgactgcggtcaggatttgcgttccgcgatggtaaacattttggaaggactcggcatcgaagtcgaagtccaccacagtgaagtcggtaccggcagccaaatggaaatcggcacgcgtttcgccaccttggtcaaacgcgccgaccaaacccaagacatgaaatatgtgattcaaaacgttgcccacaacttcggcaaaacagccacctttatgcccaaaccgattatgggcgacaacggcagcggtatgcacgttcaccaatccatttggaaagacggtcaaaacctgttcgcaggcgacggctatgccggcttgagcgacaccgcgctctactacatcggcggcatcatcaaacacgccaaagccctgaacgcaattaccaatccgtccaccaactcctacaaacgcctcgtgccgcactttgaagcaccgaccaaactggcatattccgccaaaaaccgttccgcttccatccgcattccgtccgtgaacagcagcaaggcgcgccgcatcgaagcgcgtttccccgatccgaccgccaacccgtatttggcatttgccgccctgttgatggcgggtttggacggtattcaaaacaaaatccatccgggcgatcctgccgataaaaacctgtacgacctgccgccggaagaagacgcgctcgtcccgaccgtttgcgcctctttggaagaagccctcgccgccctcaaagccgaccacgaattcctcctgcgcggcggcgtgttcagcaaagactggatcgacagctatatcgcctttaaagaggaagatgtccgccgcatccgcatggcaccgcatccgctggaatttgaaatgtattacagcctgtaa

SEQ ID NO: 101536 - protein, 472 aa, Neisseria meningitidis FAM18
MSIKNAVKLIEESEARFVDLRFTDTKGKQHHFTVPARIVLEDPEEWFENGQAFDGSSIGGWKGIQASDMQLRPDASTAFVDPFYDDVTVVITCDVIDPADGQGYDRDPRSIARRAEAYLKSSGIGDTAYFGPEPEFFVFDGVEFETDMHKTRYEITSESGAWASGLHMDGQNTGHRPAVKGGYAPVAPIDCGQDLRSAMVNILEGLGIEVEVHHSEVGTGSQMEIGTRFATLVKRADQTQDMKYVIQNVAHNFGKTATFMPKPIMGDNGSGMHVHQSIWKDGQNLFAGDGYAGLSDTALYYIGGIIKHAKALNAITNPSTNSYKRLVPHFEAPTKLAYSAKNRSASIRIPSVNSSKARRIEARFPDPTANPYLAFAALLMAGLDGIQNKIHPGDPADKNLYDLPPEEDALVPTVCASLEEALAALKADHEFLLRGGVFSKDWIDSYIAFKEEDVRRIRMAPHPLEFEMYYSL

SEQ ID NO: 101537 - DNA, 1416 bp, Acidovorax sp. JS42
  CDS (1)..(1416): transl_table=11
atggccaagaccgttgcagacgtgatgaagatggtgaaggaaaacgaagtcaagttcgtggacttccgcttcacggatacccgcggcaaggaacagcacgtcaccgtgccgatctcgcacttcgacgaagacaagttcgcctcgggccatgcgttcgacggctcgtcggtcgccggctggaagggtatcgaggcgtcggacatgctgctcatgcccgatccgaacaccgccaacatcgacccgttcttcgaagaaaccaccatgatcatggcgtgtgacgtggtggagccggccgacggcaaggcctacgaccgcgacccgcgctccatcgccaagcgtgccgaggcgtacctgaaagcctccggcatgggcgacacggcctacttcggcccggagcccgagttcttcatcttcgacggcgtgcgctggagcaccgatcccaaccacaccttctacgagatcgaagagtacgaagccccctggaacaccggcgccaagctcgaaggtagcaaccgcggccaccgtcccaccaccaagggcggctatttccccgtgcctccggtcgacagcacgcaggacatgcgcgccgagatgtccctgatccttgaatccctgggcattccggtcgaggtgttccaccacgaagtggccggtgccggccagaacgagatcggcacccggttcagcacgctggtggagcgtgccgactggaccatgctgcagaagtacgtgatccacaacgtggccaacgcctacggcaagaccgccaccttcatgcccaagccctaccacggcgacaacggctcgggcatgcacgtgcaccagtcggtctggaaggacggcaagaacctgttcgccggcgacggctatgcgggtctgtcggacttcgcgctgtactacattggcggcatcatcaagcacgctcgcgcactgaacgccatcacgaacccgggcaccaatagctacaagcgcctggtgccgcacttcgaggcgccggtgaagctggcctactcggccaagaaccgctcggcctccatccgcatcccgttcgtggccaacccgaagggccgccgcgtggaagcgcgcttccccgatccgctgatgaacccctacctgggctttgcggccctgctgatggcgggtctggacggcgtggaaaacaagatccacccgggcgaagccgctaccaaggacctgtaccacctgccgccggaggaagacaagctggtgcccaccgtgtgccacagcctggaccaggcgctggaagcgctggacaaggaccgcgcgttcctgaccaagggcggcgtgttcaccgactccatgctcgacgcctacatcgagctgaagatgcaggaagtcacgcgcttccgcatggccgtgcatcccgtcgagtacgacatgtactactcgctgtga

SEQ ID NO: 101538 - protein, 471 aa, Acidovorax sp. JS42
MAKTVADVMKMVKENEVKFVDFRFTDTRGKEQHVTVPISHFDEDKFASGHAFDGSSVAGWKGIEASDMLLMPDPNTANIDPFFEETTMIMACDVVEPADGKAYDRDPRSIAKRAEAYLKASGMGDTAYFGPEPEFFIFDGVRWSTDPNHTFYEIEEYEAPWNTGAKLEGSNRGHRPTTKGGYFPVPPVDSTQDMRAEMSLILESLGIPVEVFHHEVAGAGQNEIGTRFSTLVERADWTMLQKYVIHNVANAYGKTATFMPKPYHGDNGSGMHVHQSVWKDGKNLFAGDGYAGLSDFALYYIGGIIKHARALNAITNPGTNSYKRLVPHFEAPVKLAYSAKNRSASIRIPFVANPKGRRVEARFPDPLMNPYLGFAALLMAGLDGVENKIHPGEAATKDLYHLPPEEDKLVPTVCHSLDQALEALDKDRAFLTKGGVFTDSMLDAYIELKMQEVTRFRMAVHPVEYDMYYSL

SEQ ID NO: 101539 - DNA, 1419 bp, Haemophilus somnus 2336
  CDS (1)..(1419): transl_table=11
atgtcaaacacaacagctattacgaatgtattcaagttaatcgaagaaaatgatattaagtttgttcttcttcgttttaccgacgttaagggtaaagaacatggcgtttccctgccggtcagtttagttgatgaggacttgtttgaagacggtaaaatgtttgatggctcctcagttgaaggttggaaagccataaataaggcagatatgttattgatgccaattgctgaaaccgccgttgttgatccttttgctcaaattccgacactttcaatccgttgcagtatttttgaaccgactaccatgcaaagttatgacagagatccacgctcaattgccatgcgtgcagaaaattatatgcgttcaacaggcgttgcggatgatgtattttttggccctgaaccagagtttttcttatttgatgatgtgcgttttgatgtctcgatgaacggtaactcttatactgtcgacgatattgaggcagcatggaatacaaataaacactatgaaggtggaaataaagcctatcgtcctttgaagaaagggggatattgtgcagttgcaccgaatgatatcgcacatgatattcgctcggaaatgtgtttgttaatggaagaaatgggattagtgattgaagcccatcaccacgaagttgcaacagcggggcaaaatgaaattgccactaaatttaatacacttacgttaaaagcagacgaaacgcaaatttataaatatattgtgcaaaatgttgcgtatgaacatggcaagacagcttgctttatgccaaagccgattataaacgacaacggttcaggtatgcattgcaacatgtctttgagtaaggacgggaaaaatattttccaaggtgataaatatgcagggctttctgagaccgcactttatttcattggggggattattaagcatgccaaagccttaaatgcgtttaccaacccatcaaccaactcttataaacgcttagttccggggtttgaagcacctgttttattggcttattcagcaagtaaccgctctgcatcaattcgtattccggcggttactaatcctaaggctattcgtattgaagcacgtttccccgatccgttggctaacccatacttagcgttttcagcattattaatggctggtttagacggtattcaaaacaaactttatcccggtgatgcaatggacaaaaacctctatgatttaccgccggaagaactgaaagacattcctgccgttgcaagttcattgagtgaagcgttagataatttagaaaaagattatgaattcttaacgcatggtaaagtgttcagcaaagaatttattgatacgtttattgcaatgaaacgtaaagaagtggaacgtttaaatatgacaccacatccagtagaatttgaaatgtactacgcttaa

SEQ ID NO: 101540 - protein, 472 aa, Haemophilus somnus 2336
MSNTTAITNVFKLIEENDIKFVLLRFTDVKGKEHGVSLPVSLVDEDLFEDGKMFDGSSVEGWKAINKADMLLMPIAETAVVDPFAQIPTLSIRCSIFEPTTMQSYDRDPRSIAMRAENYMRSTGVADDVFFGPEPEFFLFDDVRFDVSMNGNSYTVDDIEAAWNTNKHYEGGNKAYRPLKKGGYCAVAPNDIAHDIRSEMCLLMEEMGLVIEAHHHEVATAGQNEIATKFNTLTLKADETQIYKYIVQNVAYEHGKTACFMPKPIINDNGSGMHCNMSLSKDGKNIFQGDKYAGLSETALYFIGGIIKHAKALNAFTNPSTNSYKRLVPGFEAPVLLAYSASNRSASIRIPAVTNPKAIRIEARFPDPLANPYLAFSALLMAGLDGIQNKLYPGDAMDKNLYDLPPEELKDIPAVASSLSEALDNLEKDYEFLTHGKVFSKEFIDTFIAMKRKEVERLNMTPHPVEFEMYYA

SEQ ID NO: 101541 - DNA, 1425 bp, Crocosphaera watsonii WH 8501
  CDS (1)..(1425): transl_table=11
atggccgaaacgccccaagaagtcttgaaaatgattcaagacaacaacattcaaattattgacctcaaattcattgatttaccagggatttggcaacattgctctttttatcataaccaaattgacgaggattcctttgacgctggggttcccttcgatggttccagtattcggggatggaaagccatcaacgaatcggatatgtgtatggttcccgaccccaagacagcttggatcgatcctttctatgaggaacctaccctaagtttaatttgtagcattaaagagcctcgtacaggggaatggtacagtcgtgaccctcgcaccattgccaaaaaagcagtagagtatctccaaagcaccggtatcggtgacactgccttttttggaccagaagcagagttctttgtttttgatgacgttcgcttcgaccaaacagagaacaaagcttattattccgttgatagtgtagaaggtcgttggaatactggccgagaagaagaaggcggtaacttagcctataaacctggttataaacagggttatttccccgtttctcccaccgataccctccaggatatgcggacggaaatgttgctgactatggctaaatgtggggttcccatcgagaaacatcaccacgaagtagcaaccgggggacaaaatgaattagggttccgttttgctaccttaattgacgctgctgattatttgctgacatacaagtacgtaatcaaaaacgtggctaaaaaatatggtaaaaccgtaacatttatgcccaagcccttatttaatgataatgggtcaggaatgcacgtccaccaatctatttggaagggaggacaacccttattctgggaagaaggtacttatgccgatctcagtaaactggccactcactatatcggtggtattttaaaacacgctccagctttattggcatttagcaaccccaccaccaactcttataagcgtttggttcctgggtttgaagcaccggttaacttggtttattctcaaggaaatcgttccgcttccattcgtattcctttgacagggagtaaccccaaggccaaaagattagagttccgttgtcctgatgctacttcgaacccctatctagcttttgctgccatgctttgtgcaggtattgatggcattaaaaacaaaatagagccagcagagcctttggacgtagatttttatgagctttcacctgaagaattgagtaaaattccttctactcctggttctttagaacaagcattagaatgcttaggaaaagatcatgctttcttaaccgatggtggtgttttcacagaagacttcatcacaaattggatcgaatataaactggataatgaagttaatcctttacgtttacgccctcatccttatgagtttgcgttgtattatgatgtctaa

SEQ ID NO: 101542 - protein, 474 aa, Crocosphaera watsonii WH 8501
MAETPQEVLKMIQDNNIQIIDLKFIDLPGIWQHCSFYHNQIDEDSFDAGVPFDGSSIRGWKAINESDMCMVPDPKTAWIDPFYEEPTLSLICSIKEPRTGEWYSRDPRTIAKKAVEYLQSTGIGDTAFFGPEAEFFVFDDVRFDQTENKAYYSVDSVEGRWNTGREEEGGNLAYKPGYKQGYFPVSPTDTLQDMRTEMLLTMAKCGVPIEKHHHEVATGGQNELGFRFATLIDAADYLLTYKYVIKNVAKKYGKTVTFMPKPLFNDNGSGMHVHQSIWKGGQPLFWEEGTYADLSKLATHYIGGILKHAPALLAFSNPTTNSYKRLVPGFEAPVNLVYSQGNRSASIRIPLTGSNPKAKRLEFRCPDATSNPYLAFAAMLCAGIDGIKNKIEPAEPLDVDFYELSPEELSKIPSTPGSLEQALECLGKDHAFLTDGGVFTEDFITNWIEYKLDNEVNPLRLRPHPYEFALYYDV

SEQ ID NO: 101543 - DNA, 1425 bp, Kineococcus radiotolerans SRS30216
  CDS (1)..(1425): transl_table=11
atgttcagcaacgccgaagaggtcctcgcgttcatcgcgcaggaggacgtgaagttcgtcgacatccggttctgcgacctgccgggcgtcatgcagcacttcacgatccccgcgaagtcgctggacctcgacgccctctccgaaggccagatgttcgacgggtcctcgatccgcggcttccaggccatccacgagtcggacatgaagctcatcgcggacccgacgtcggccttcctggacccgttccgcaaggagaagaccctcgtcatcaaccactcgatcgtggacccgttcacgaacgaggcgtacagccgcgacccgcgcaacatcgcggcgaaggcggagtcctacctcaagacgacgggcatcgcggacacggtgttcttcggccccgaggccgagttctacatcttcgacgacgtgcggttcgagacgaaccagcgcgagtcgtactaccacatcgactccatcgaggccgcgtggaacaccggccgcaaggaggagggtggcaacctcgggtacaagacccggtacaagggcggctacttccccgtcgccccgatcgaccacttctccgacctgcgcgacgagatggtcgtggagctggagaaggccggtctgcaggtcgagcgcgcgcaccacgaggtgggcaccgccggccaggccgagatcaactacaagttcgacaccctgaagaacgccggcgaccagctgctgctcttcaagtacatcatcaagaacgtggcgctgcgcaacggtcacaccgtgaccttcatgcccaagccgctgttcggcgacaacgggtcgggcatgcactgccaccagtcgctctggaaggacggcgagcccctcttctacgacgagaagggctacggcggcctgtccgacctcgcgcgctggtacatcggcggcctgctgcaccacgcgccgtcgctgctggccttcaccaacccgacggtgaactcctaccaccgcctggtccccggctacgaggccccggtcaacctggtctactcggcccgcaaccgctcggcgtgcatccgcatcccgatcaccgggagctcgccgaaggccaagcgcatcgagttccgcgtgccggacccgtcggcgaacccgtacctggcgttcgcggcccagctgatggccggcctggacggcatcaagaaccgcatcgagccggccgacccggtcgacaaggacctctacgagctcccgcccgaggagcacgcgaacatcaagacggtcccctacgacctgggttccgtgctcgacgcgctcgaggccgaccacgactacctcctcgagggcggcgtgttcacgccggacctcatcgagacctggatcgactacaagcgcaccaacgagatcgacccgatccggctgcgtccgcacccgcacgagttcgagctgtactacgacatctga

SEQ ID NO: 101544 - protein, 474 aa, Kineococcus radiotolerans SRS30216
MFSNAEEVLAFIAQEDVKFVDIRFCDLPGVMQHFTIPAKSLDLDALSEGQMFDGSSIRGFQAIHESDMKLIADPTSAFLDPFRKEKTLVINHSIVDPFTNEAYSRDPRNIAAKAESYLKTTGIADTVFFGPEAEFYIFDDVRFETNQRESYYHIDSIEAAWNTGRKEEGGNLGYKTRYKGGYFPVAPIDHFSDLRDEMVVELEKAGLQVERAHHEVGTAGQAEINYKFDTLKNAGDQLLLFKYIIKNVALRNGHTVTFMPKPLFGDNGSGMHCHQSLWKDGEPLFYDEKGYGGLSDLARWYIGGLLHHAPSLLAFTNPTVNSYHRLVPGYEAPVNLVYSARNRSACIRIPITGSSPKAKRIEFRVPDPSANPYLAFAAQLMAGLDGIKNRIEPADPVDKDLYELPPEEHANIKTVPYDLGSVLDALEADHDYLLEGGVFTPDLIETWIDYKRTNEIDPIRLRPHPHEFELYYDI

SEQ ID NO: 101545 - DNA, 1410 bp, Xylella fastidiosa Dixon
  CDS (1)..(1410): transl_table=11
atgtcgctggaaaatgttgaaaagcttgtcaaggataaaaagatcgaattcgtcgatttgcgctttgttgatatgcgcggcgtacaacagcacgtcacctttccggtgaacattcttgaaccatcgctgttcaaggatggaaagatgttcgacggtagctcgattgctggttggaaggggatcaatgagtcggacatggtactgctgcctgacgctagcaccgcttatctggatcctttttacgctgatccaacgctggtcatgacatgcgacatcctcgatccagcgacgatgcatagttatgtgcgtgatccccgaggtatcgccaaacgtgccgaaatctacttaaattctttgggtattgctgaccaagcatttttcggtccggaacctgaattttttatcttcgattcagtccgttttgctaatgatatgggccattcttttttccaaattgcttccgaagaggctgcctggaacacaggcgctgagtttgagagatgtaacagtggttaccgcccggcggtaaagggtggatatttcccagttccaccgactgactcgctgcacgatttgcgtgccgagatggtgaagaccctggagcaggttggcattgagaccgaagtgcatcatcacgaagtcgccactgctggacaatgtgagatcggcactaagttcgactcattggtcaaaaaggctgatcagctgatgacgatgaaatacatccttaaaaacgttgcttaccgcaatggaaagactgtcacctttatgcctaaaccgatcgttggtgataacggttctggcatgcatgtacatcagtcgctctctaaaggaggggtcaacttgttctccggtgacgaccatgctggtttgtcgcagctggcactgtattacatcggcggtattttcaagcacgctcatgcgatcaacgcgttttccaattcgggaacaaatagctataagcgtttggttccgggcttcgaagcacccgttatgttggcttattcggcacgtaaccgctcggcctcgtgtcgtattccatgggtttctagcccgaaggcacgccgcattgaaatgcgtttccccgatccattgcagtctggttacctcacctttactgcgctgatgatggctggactggatggcattaaaaacaagatccatccaggcccacccaatgacaaagatctgtatcacctgccgcctgaagaggaaaaattgatcccgcaggtttgttcaagtttggatcaggctcttgaagcattggacaaagaccgcgatttcttgaaggcaggcggtgtgatgagtgacgattttattaacggctatattgcgctgaagatgcaggaagtgacgcagttccgcgcggccacacatccgctggaataccagatgtactacgccaactaa

SEQ ID NO: 101546 - protein, 469 aa, Xylella fastidiosa Dixon
MSLENVEKLVKDKKIEFVDLRFVDMRGVQQHVTFPVNILEPSLFKDGKMFDGSSIAGWKGINESDMVLLPDASTAYLDPFYADPTLVMTCDILDPATMHSYVRDPRGIAKRAEIYLNSLGIADQAFFGPEPEFFIFDSVRFANDMGHSFFQIASEEAAWNTGAEFERCNSGYRPAVKGGYFPVPPTDSLHDLRAEMVKTLEQVGIETEVHHHEVATAGQCEIGTKFDSLVKKADQLMTMKYILKNVAYRNGKTVTFMPKPIVGDNGSGMHVHQSLSKGGVNLFSGDDHAGLSQLALYYIGGIFKHAHAINAFSNSGTNSYKRLVPGFEAPVMLAYSARNRSASCRIPWVSSPKARRIEMRFPDPLQSGYLTFTALMMAGLDGIKNKIHPGPPNDKDLYHLPPEEEKLIPQVCSSLDQALEALDKDRDFLKAGGVMSDDFINGYIALKMQEVTQFRAATHPLEYQMYYAN

SEQ ID NO: 101547 - DNA, 1407 bp, Sulfitobacter sp. EE-36
  CDS (1)..(1407): transl_table=11
atgagcaccaaggacttcctgaagaagatcaaggacgaggacatcgaatacgttgatgtacgtttcaccgatacacgcggtaaactgcagcacgtgacaatcgtctccgatcttgttgacgaagattttgtcgaagaagggttcatgtttgacggctcctccatcgcgggttggaaaagcatcgaagcctccgacatgaagctgatgctcgacacggacaccgcttatgtcgatccgttctatgccgaaaaaaccatctgcgtgcactgctctgttgtagagcccgacacaggcgaagcctatgagcgtgacccccgtggcaccgcgcaaaaagccgaagcctacctgaaagcctccggtattggtgatgtggcctatatgggtccggaagccgaattcttcctgttcgataacgtcaaattctcgaactcgatcaacaaggtatcctacgaagttgatgcgtccgacgcgtcctggaacaccgacaccgactatgaaatgggcaacatgggccaccgcccgggcctcaagggcggctacttccctgtgaaccccacggacgaagcccaggacctgcgcgccgaaatgctgtcgaccatgaaacgtcttggcatgaaggtcgacaaacaccaccacgaagtggcgtcctgccagcacgaactgggcctgatcttcggcacgctgaccgaacaggcggacgagctgcagaaatacaaatacgtgatccacaacgtggcacacgcctatggtaaatccgcaaccttcatgcccaagccgatctatggcgacaacggctccggcatgcacgtgaacatgtcgatctggaaagacggcaagcccctcttcgcaggcgacaaatatgccgacctgagccaggaagcgctgtatttcatcggcggtatcctgtcccacgcgaaatcgctgaacgccttcaccaacccggcaacaaacagctacaagcgtctgatccccggtttcgaagcccccgttctgcgcgcctattccgcacgcaaccgctcgggctgtgtccgtatcccatggaccgaatcccccaaggcaaaacgcgtagaggcccgcttccccgatccggcggcaaacccctacctgtgctttgccgcgctgctgatggccggccttgacgggatcaagaacaagatcgatccgggcgaagccatggataaaaacctctatgatctgcccgccgaagaactggccgatatcccgaccgtttccggttccctgcgcgaagcgctggaagagctgcagtcggatatggattacctgctggccggtgacgtcttcaccaaagaccagatcgaaggctatatcgaactcaagatggaagaagtgcacaaatacgagcacaccccccaccctgttgaattcggcatgtactacagctgctaa

SEQ ID NO: 101548 - protein, 468 aa, Sulfitobacter sp. EE-36
MSTKDFLKKIKDEDIEYVDVRFTDTRGKLQHVTIVSDLVDEDFVEEGFMFDGSSIAGWKSIEASDMKLMLDTDTAYVDPFYAEKTICVHCSVVEPDTGEAYERDPRGTAQKAEAYLKASGIGDVAYMGPEAEFFLFDNVKFSNSINKVSYEVDASDASWNTDTDYEMGNMGHRPGLKGGYFPVNPTDEAQDLRAEMLSTMKRLGMKVDKHHHEVASCQHELGLIFGTLTEQADELQKYKYVIHNVAHAYGKSATFMPKPIYGDNGSGMHVNMSIWKDGKPLFAGDKYADLSQEALYFIGGILSHAKSLNAFTNPATNSYKRLIPGFEAPVLRAYSARNRSGCVRIPWTESPKAKRVEARFPDPAANPYLCFAALLMAGLDGIKNKIDPGEAMDKNLYDLPAEELADIPTVSGSLREALEELQSDMDYLLAGDVFTKDQIEGYIELKMEEVHKYEHTPHPVEFGMYYSC

SEQ ID NO: 101549 - DNA, 1407 bp, Roseovarius nubinhibens ISM
  CDS (1)..(1407): transl_table=11
atgagcgcaactgacctgctcaagatgatcaaggacgaggacatcgaatatgtcgacgttcgtttcaccgacccgcgcggcaagcttcagcacgtgacgctgatgtccgaccaggtggacgaagacttcctcgaggaaggctttatgttcgacggctcgtcgatcgctggctggaaaagcatcgaagcctccgacatgaagctgatgatcgacaccgacagcgcctatgtcgatcccttctatgccgagaaaaccctctgcgtgcattgctcggtggtcgagcccgacaccggcgaagcctatgagcgcgacccgcgcggcaccgccgaaaaggccgaagcctatctcaaggcctcgggcatcggcgacgtggcctacatgggccccgaggcggagtttttcctcttcgacgacgtgcgcttctcgaacacgatcaacaaggtctcctatgaggtcgacgcccaggacgcttcctggaactcggacaccgaatacgagatgggcaacatgggccatcgtcccggcgtcaagggcggctacttcccggtgaacccgatcgacgacgcgcaggacatccgttcggaaatgctctcgacgatgaaacgtctgggcatgaaggtcgacaagcatcaccacgaagtggcctcgtgccagcacgagcttggcctgatcttcgacagcctgaccaaacaggccgacgagctgcagaaatacaaatacgtgatccacaacgtggcccacgcctatggcaagacggcaaccttcatgcccaagccgatcgccggcgacaacggcaccggcatgcatgtgaacatgtcgatctggaaagacggcaagccgctctttgctggcgacaaatatgccgacctgagccaagaggcgctgtatttcatcggcggtatcctcaagcacgccaagtcgctcaacgccttcaccaacccggcgaccaacagctacaagcgtctgatccccggtttcgaagcccccgttctgcgcgcctattcggcccgcaaccggtcgggctgcgtccggatcccatggaccgagagccccaaggcaaaacgcgtcgaggcccgcttccccgatccggcggcgaacccctacctcgcctttgccgcgctgctgatggccggcctcgacggtatcaagtccaagatcgaccccggcgaagccatggacaagaacctctacgacctgccggccgaagagctcgaaggcatccccaccgtctgtggcagcctgcgcgaagccatggaagagctgaaggccgatcacgactatctgctcgccggtgacgtgttcaccaaagaccagatcgacggctatatcgctctgaagatggaagagatcgagctttacgaacacacgccgcacccggtcgagttcggcatgtactacagctgctaa

SEQ ID NO: 101550 - protein, 468 aa, Roseovarius nubinhibens ISM
MSATDLLKMIKDEDIEYVDVRFTDPRGKLQHVTLMSDQVDEDFLEEGFMFDGSSIAGWKSIEASDMKLMIDTDSAYVDPFYAEKTLCVHCSVVEPDTGEAYERDPRGTAEKAEAYLKASGIGDVAYMGPEAEFFLFDDVRFSNTINKVSYEVDAQDASWNSDTEYEMGNMGHRPGVKGGYFPVNPIDDAQDIRSEMLSTMKRLGMKVDKHHHEVASCQHELGLIFDSLTKQADELQKYKYVIHNVAHAYGKTATFMPKPIAGDNGTGMHVNMSIWKDGKPLFAGDKYADLSQEALYFIGGILKHAKSLNAFTNPATNSYKRLIPGFEAPVLRAYSARNRSGCVRIPWTESPKAKRVEARFPDPAANPYLAFAALLMAGLDGIKSKIDPGEAMDKNLYDLPAEELEGIPTVCGSLREAMEELKADHDYLLAGDVFTKDQIDGYIALKMEEIELYEHTPHPVEFGMYYSC

SEQ ID NO: 101551 - DNA, 1404 bp, Oceanicola batsensis HTCC2597
  CDS (1)..(1404): transl_table=11
atgagcaacaaggttctcaaactcatcaaggacgaggaggcggcctacgttgacatccgcttcaccgatccccgcggcaggcttcagcacgtgacggtgatggaagaccaggtcgacgaggatttcctcgaagagggcttcatgttcgacggctcctcgatcgcgggctggaagtccatcgaagcctccgacatgaagctgatgccggatctggacagcgcgtatatcgatcccttctatgccgagaagaccgtcgccgtgcattgttcggtggtcgagccggacaccggcgaggcctatgaccgcgacccgcgcggcaccgccgaaaaggccgaggcctacctcaagtcctccgggatcggcgatcaggccttcttcggccccgaagcggaattcttccttttcgacgacgtgaaatattccatggcgccgaacaaggtctccttcgaggtcgatgccgatcacgccgcctggaacacagacgccgaattcgaaatgggcaacctgggccatcgcccgacctacaagggcggctatttcccggtgaacccctcggacgacggccaggacatccgctccgagatgctgtcgaccatgaaacgcctcggcatgaaggtcgacaagcaccaccacgaggtcgcgacctcgcagcacgagctgggcctgatcttcgacagcctgaccaaacaggccgacgagctgcagaagtacaagtacgtcatccacaacgtggcgcatgcctacggccgttcggccaccttcatgcccaagccgctcaagggcgacaacggctcggggatgcacgtgaacatgtcgatctggaaggacggcaagccgctcttcgccggcgacaagtacgccgacctcagccaggaggcgctgtggtacatcggcggcatcctcaagcacgccaaggcgctgaacgccttcaccaacccggcgaccaactcgtacaagcgcctggtgccgggcttcgaggcccccgtcctgcgcgcctattcggcccgcaaccgctcgggctgcgtgcgcatcccctggaccgaatcccccaaggccaagcgcgtcgaggcccgtttccccgatccgtccgcaaacccgtacctctgcttctcggccctgctgatggccggtctcgacgggatcaagaacaagatcgatccgggcgaagccatggacaagaacctctacgacctgccgcccgaagagctggccgacatcccgaccgtctgcggatcgctgcgcgaggcgatggccgaactcgaggccgacatggacttcctgctggccggcgatgtcttcaccaaggaccagatcggcggctacatcgatctcaagatggaagagatcgaaacctacgagatgacgccgcacccggccgagttcttcctgtattattcctgctga

SEQ ID NO: 101552 - protein, 467 aa, Oceanicola batsensis HTCC2597
MSNKVLKLIKDEEAAYVDIRFTDPRGRLQHVTVMEDQVDEDFLEEGFMFDGSSIAGWKSIEASDMKLMPDLDSAYIDPFYAEKTVAVHCSVVEPDTGEAYDRDPRGTAEKAEAYLKSSGIGDQAFFGPEAEFFLFDDVKYSMAPNKVSFEVDADHAAWNTDAEFEMGNLGHRPTYKGGYFPVNPSDDGQDIRSEMLSTMKRLGMKVDKHHHEVATSQHELGLIFDSLTKQADELQKYKYVIHNVAHAYGRSATFMPKPLKGDNGSGMHVNMSIWKDGKPLFAGDKYADLSQEALWYIGGILKHAKALNAFTNPATNSYKRLVPGFEAPVLRAYSARNRSGCVRIPWTESPKAKRVEARFPDPSANPYLCFSALLMAGLDGIKNKIDPGEAMDKNLYDLPPEELADIPTVCGSLREAMAELEADMDFLLAGDVFTKDQIGGYIDLKMEEIETYEMTPHPAEFFLYYSC

SEQ ID NO: 101553 - DNA, 1419 bp, Erythrobacter sp. NAP1
  CDS (1)..(1419): transl_table=11
atggctagtgcgaaagacgtcgtaaaacagatcaaggatggcgacatcgagtgggtggaccttcgcttcaccgacccgaagggcaagtggcagcacctgaccatggcagcgagcgtcatggacgaagacgcgcttgacgacggcctgatgtttgacggctcctcgatcgaaggctggaaagcgatcaacgaaagcgacatgatcctcaagccggacatggatgcggtctatcccgatcccttctccgaaaccccgatgctcagcatcttctgtgacattgtcgagccttccgacggtcagctttacgctcgcgacccgcgttcgaccgcaaaacgcgccgaagcctatctcgcatcgaccggcatcggcgacacggtctacgtcgggccagagcctgagttcttcatgttcgacgatgtccgcttcgaagacggctatgctggctcaggctaccgcatcgacgatattgagctgccgaccaacaccggcaccgattacactgaattgggtggtggcaatatgggccaccgtccgcgcgccaagggcggctatttccccgtcgctccggtcgacagcgcaatggacatccgcggcgagatggtttccacgatgatggaaatgggtctcaacatggacaagcaccaccacgaggtggccgctgcccagcacgagcttggcatcaccttctcgacgctcaccaagaccgccgaccaggtgcaggtctacaaatatgtcgtgcagcaggtcgcccacgcttacggcaagaccgcgaccttcatgcccaagcctatcaaggacgataacggttcgggcatgcacacgcacatgtcgatctggaatgacggcaagccgacctttgccggcaacgaatatgcaggcctttcggaaacttgcctccactatatcggcggcgtcatcaagcacgccaaggcgatcaatgccttcaccaacgcgacgaccaactcgtacaagcgtctggttccgggcttcgaagcgccagtgctgctcgcttactcagcgcgcaaccgttcggcatcgtgccgtatcccgtatggcgcaggcgaaaaggccaagcgcgtcgagttccgcttccccgatgcgatctgcaatccgtatctcgccttctcggcgctgctgatggcgggcctcgacgggatcgagaacaagattcacccgggcgatgccatggacaagaacctttacgacctgccgccggcagagctcgccgaagttccgaccgtgtgcggcagcttgcgcgaagcactcgaagcgctcgaggaagatcacgagttcctgctcaagggcgatgtgttctcgatggaccagatcgaagcttacgcagaactcaagtgggaagagcagctgcgtctcgaaacgacaccgagcccggttgaattcgacatgtactactccagctga

SEQ ID NO: 101554 - protein, 472 aa, Erythrobacter sp. NAP1
MASAKDVVKQIKDGDIEWVDLRFTDPKGKWQHLTMAASVMDEDALDDGLMFDGSSIEGWKAINESDMILKPDMDAVYPDPFSETPMLSIFCDIVEPSDGQLYARDPRSTAKRAEAYLASTGIGDTVYVGPEPEFFMFDDVRFEDGYAGSGYRIDDIELPTNTGTDYTELGGGNMGHRPRAKGGYFPVAPVDSAMDIRGEMVSTMMEMGLNMDKHHHEVAAAQHELGITFSTLTKTADQVQVYKYVVQQVAHAYGKTATFMPKPIKDDNGSGMHTHMSIWNDGKPTFAGNEYAGLSETCLHYIGGVIKHAKAINAFTNATTNSYKRLVPGFEAPVLLAYSARNRSASCRIPYGAGEKAKRVEFRFPDAICNPYLAFSALLMAGLDGIENKIHPGDAMDKNLYDLPPAELAEVPTVCGSLREALEALEEDHEFLLKGDVFSMDQIEAYAELKWEEQLRLETTPSPVEFDMYYSS

SEQ ID NO: 101555 - DNA, 1407 bp, Pseudoalteromonas tunicata D2
  CDS (1)..(1407): transl_table=11
atgtctcaatcagttttacagtttattaaagataacgatgttaaatttattgatttacgttttaccgatactaaaggtaaagaacaacacgtttcaattccacaccaccaagttgacgaagatttctttgaagacggtaaaatgtttgatggttcatcaattgctggctggaaaggcatcaatgaatcagacatggtattaatgcctgatgcaagctctgtaaaattagatccgttcactgaagaagtaactttaattgttcgttgtgacgtagtagaaccaggtacgttaatcggttatacacgcgacccacgttctgttgcaaaacgcgctgaagaatatatgcgttcaacaggcatcgccgacacagtattatttggcccagagccagagttcttcgtatttgatgatgttaaatacaaaacagacatgtctggctcaatgttcaaaattgattctaagcaagcagcttggaactcagataaagaatatgaaggcggcaatacaggtcaccgtccaggcgtaaaagggggttatttcccagttgctccagttgatgatttccaagattggcgttcagctacttgtttagtattagaagaaatgggtcacgtagttgaagcacatcaccatgaagttgcaacagcaggacaaaatgagatcgcaactcgcttcaataccatggtaacaaaagccgacgaaatccaagaaatgaaatatgttatccacaacatggctcatttatacggcaaaacagcgactttcatgccaaaacctatcgttggcgacaacggttcagggatgcactgtcaccaatcattagcaaaagatggcgttaacttatttgctggtgataaatatgctggtctttctgaagaagctatttactacatcggcggtatcattaagcatgctaaagcaatcaatgcattcgcaaatccagcaactaactcatacaaacgtttagtgcctcatttcgaagcgccagtaatgcttgcatactctgcacgtaaccgttcggcgtctatccgtatccctgttgtaccatcagctaaaggtcgtcgtatcgaagttcgcttcccagatccagcggcaaatccatatttagcattctctgcaatgttaatggctggtcttgacggtatcaaaaacaagatccacccaggcgatgcaatggataaagatttatacgatttaccagctgaagaagcagcagaaatcccacaagttgcaggttcattacaagaagctttagattgcctaagtgctgaccgtgaattcttaactcaaggtggcgttttcactgatgatttaatcgatgcctatatcgacttaaaaacaaaagaagtacaaaaattaaatacttcaactcatccagttgaatttgaaatgtactacagctgttaa

SEQ ID NO: 101556 - protein, 468 aa, Pseudoalteromonas tunicata D2
MSQSVLQFIKDNDVKFIDLRFTDTKGKEQHVSIPHHQVDEDFFEDGKMFDGSSIAGWKGINESDMVLMPDASSVKLDPFTEEVTLIVRCDVVEPGTLIGYTRDPRSVAKRAEEYMRSTGIADTVLFGPEPEFFVFDDVKYKTDMSGSMFKIDSKQAAWNSDKEYEGGNTGHRPGVKGGYFPVAPVDDFQDWRSATCLVLEEMGHVVEAHHHEVATAGQNEIATRFNTMVTKADEIQEMKYVIHNMAHLYGKTATFMPKPIVGDNGSGMHCHQSLAKDGVNLFAGDKYAGLSEEAIYYIGGIIKHAKAINAFANPATNSYKRLVPHFEAPVMLAYSARNRSASIRIPVVPSAKGRRIEVRFPDPAANPYLAFSAMLMAGLDGIKNKIHPGDAMDKDLYDLPAEEAAEIPQVAGSLQEALDCLSADREFLTQGGVFTDDLIDAYIDLKTKEVQKLNTSTHPVEFEMYYSC

SEQ ID NO: 101557 - DNA, 1410 bp, Photobacterium sp. SKA34
  CDS (1)..(1410): transl_table=11
atgtcagtagaaaacgtactagcgctgatccaggaaaatgaagttaagtttattgacctacgttttaccgatacaaaaggtaaagaacagcatatctcgatcccatctcatcaaattgatgctgatttcttcgaagaaggtaaaatgtttgatggctcttcagttgcaggttggaagggtatcaacgaatcagacatggtaatgatgcctgacgcgtcaagcgcggtactagacccattcactgaagacgctacgcttaatatccgttgtgatattttagagccagcaacaatgcaaggttacgaccgtgatccccgctctatcgcgaagcgtgcagaagagttcatgcgttcaacaggtatcgcagacacggttcttatcggtcctgagccagaattcttcctatttgacgatgttaagtttaacactgacatgtctggctctttcttcaaaattgatgatgtagaagcggcatggaacacaggttctgatttcgaaggcggtaacaaaggtcaccgtcctggcgttaaaggcggttacttcccagtagcacctgtcgattcatcacaagacatccgttctgctatgtgtttaatcatggaagaaatgggtctcgttgttgaagctcaccaccacgaagtagcaacagcaggtcaaaacgaaattgcaacacgtttcaacacgctaacaacaaaagcggatgaaattcagatctacaagtatgtagttcataacgttgcacacgcatttggtaaaacagcaacctttatgcctaagccactagtaggtgataacggttctggtatgcacgttcaccaatcactagcgaaagacggtgtaaacctgttctctggtgataagtacggcggcctttctgaaatggcgctttactacatcggtggtatcatcaagcatgcacgtgcaatcaacgcatttgctaaccctgcaacgaactcatacaagcgtctagttccaggctttgaagctccagtaatgctagcttactctgcacgtaaccgttcagcgtctatccgtattcctgtagtaccaagtcctaaagcacgtcgtatcgaagtgcgtttcggtgatccagcagctaacccatatctagcctttgctgcaatgctaatggctggccttgacggtatccagaacaagatccacccaggcgaagcgatggataaagacttgtacgacctaccagcagaagaagcggctgaaatcccaacagttgcagaatcgctacaaggcgcactacaagcactaagcgacgaccgtgagttcttaacttctggcggcgtattctctgatgacttcatcgattcttacatcgcactgaaatctcaagatgttgagaaagtaaacatgacaactcatccattagagtttgaactttactactcagtttaa

SEQ ID NO: 101558 - protein, 469 aa, Photobacterium sp. SKA34
MSVENVLALIQENEVKFIDLRFTDTKGKEQHISIPSHQIDADFFEEGKMFDGSSVAGWKGINESDMVMMPDASSAVLDPFTEDATLNIRCDILEPATMQGYDRDPRSIAKRAEEFMRSTGIADTVLIGPEPEFFLFDDVKFNTDMSGSFFKIDDVEAAWNTGSDFEGGNKGHRPGVKGGYFPVAPVDSSQDIRSAMCLIMEEMGLVVEAHHHEVATAGQNEIATRFNTLTTKADEIQIYKYVVHNVAHAFGKTATFMPKPLVGDNGSGMHVHQSLAKDGVNLFSGDKYGGLSEMALYYIGGIIKHARAINAFANPATNSYKRLVPGFEAPVMLAYSARNRSASIRIPVVPSPKARRIEVRFGDPAANPYLAFAAMLMAGLDGIQNKIHPGEAMDKDLYDLPAEEAAEIPTVAESLQGALQALSDDREFLTSGGVFSDDFIDSYIALKSQDVEKVNMTTHPLEFELYYSV

SEQ ID NO: 101559 - DNA, 1407 bp, Oceanospirillum sp. MED92
  CDS (1)..(1407): transl_table=11
atgtcagagaagactctgaatctgatcaaagaaagcaacgctaagtggatcgacctgcgtttcaccgattctcacggtaaagagcagcacgtaactatccctgtttccgacatgggcgatgacttctttgaagaaggtaaaatgtttgatggttcatccatctctggttggaaaggtattaatgactccgacatgattcttatgccggacgacagtgcatctctgctggatccattctctgaagcaacaactgtaatcgttcgttgtaacatcgttgagccagcaacaggccagggttacgagcgtgatccacgttctgtagctaagcgtgctgaagagtacctgaaatctacaggtattgctgacactgctatgtttggtcctgagccagagttcttcgtatttgacgaagttaaatggcacgcagacatctctggttgcggttacacaatcgcttctgaagaagcatcttgggcttctagccacaagatcgaaggtggtaacacgggtcaccgtccacgcgttaaaggcggttacttcccagtaccaccaattgattctttgcatgacctgcgtggcgctatgtgtgacgcgatggaagcaatggatcttgagattgaagtacaccaccacgaagtagcaactgctggtcagtgtgaaattggtgttggtgctaacactctgactgctaaagcggacgaagttcaggttcttaagtactgtgtacacaacgttgcacacgcttacggcaaaacagctacattcatgcctaagccactagttggtgacaacggttctggtatgcacgttcacatgtctctgtctaaagacggtgttaacctgtttgctggtgatgcatacgcaggcatgtctgaaactgctctgtactacatcggcggtatcatcaagcacgctaaagcgcttaacgctctgactaactcttctactaacgcttacaagcgtctggtaccaggtttcgaagcgccagttatgcttgcttactcagcacgtaaccgttctgcttcaatccgtatcccatacgtgactagccctaaagcacgtcgtgtagaagctcgtttccctgatccatctgctaacccatacctgtgcttctctgcactgatgatggctggccttgacggtatcaagaacaagatccaccctggcgatgctgctgataaagacttgtatgatctgccagctgaagaagctgctgagatcccacaggttgcttcatctctggaagaagctctgaacgcgctggaagaagatcgtgagttcctgactcagggtggcgtattcactgacgacatgctggatgcattcatcgagctgaagcgtgaagaagttgagaaagttaacatgactactcacccagttgaatttgacctgtactactctgtataa

SEQ ID NO: 101560 - protein, 468 aa, Oceanospirillum sp. MED92
MSEKTLNLIKESNAKWIDLRFTDSHGKEQHVTIPVSDMGDDFFEEGKMFDGSSISGWKGINDSDMILMPDDSASLLDPFSEATTVIVRCNIVEPATGQGYERDPRSVAKRAEEYLKSTGIADTAMFGPEPEFFVFDEVKWHADISGCGYTIASEEASWASSHKIEGGNTGHRPRVKGGYFPVPPIDSLHDLRGAMCDAMEAMDLEIEVHHHEVATAGQCEIGVGANTLTAKADEVQVLKYCVHNVAHAYGKTATFMPKPLVGDNGSGMHVHMSLSKDGVNLFAGDAYAGMSETALYYIGGIIKHAKALNALTNSSTNAYKRLVPGFEAPVMLAYSARNRSASIRIPYVTSPKARRVEARFPDPSANPYLCFSALMMAGLDGIKNKIHPGDAADKDLYDLPAEEAAEIPQVASSLEEALNALEEDREFLTQGGVFTDDMLDAFIELKREEVEKVNMTTHPVEFDLYYSV

SEQ ID NO: 101561 - DNA, 1416 bp, Xanthobacter autotrophicus Py2
  CDS (1)..(1416): transl_table=11
atgaccatcaagacggccaaggacgtcctcgacctgatcaagagcgaggacgtgaaatacgtcgatctgcgcttcaccgacccgcgcggaaaatggcagcatgttaccttcgacatttccatggtcgacgatgagttcctgaccgaaggcaccgccttcgacggctcgtccatcgccggctggaaggccatcaacgaatccgacatgctgctgatgccggatccggccaccacctgcattgacccgttcttcgccgagaccacgctctccatcgtctgcgacgtgctggagccgaccaccaaccagccctacggccgcgacccccgctccatcgcccgcaaggccgaggcctatgcgaagtccaccggcatcggcgatgccgtctatttcggccccgaggccgagttcttcatcttcgacgacgtgcgcttcaaggcggacccgtacaacacgggcttcaagctcgactcggtcgagctgcccaccaacggcgacaccgaatatgagggtggcaacctcggccaccgggtgaagaccaagggcggctacttccccgtgccgccgatcgattcggcgcaggacatgcgctccgagatgctcgccgccatggccaagatgggcgccaaggtggagaagcaccaccacgaggtggcctccgcccagcacgagctcggcctcaagttcggctcgctggtgaccatggccgaccacctgcaggtctataagtactgcatccaccaggtggccaacatctacggcaagaccgcgaccttcatgccgaagcccgtcttcggcgacaacggctcgggcatgcacgtccaccagtccatctggaaggacggcaagccgctcttcgccggcgacaagtatgcggacctgtccgactactgcctgtggtacatcggcggcatcatcaagcatgccaagtcgctgaacgccttcaccaacccgctgaccaactcctacaagcgcctggtcccgggctatgaggctccggtgctgctggcctattcggcccgcaaccgctcggcgtcctgccgcatcccctacaccaacaacccgaaggccaagcgcgtcgaggtccgcttccccgatcccggcgcgaacccctacctcgccttcgcggccctgttcatggccggcatggacggcatcctcaaccggatcgaccccggccaggccatggacaaggacctgtacgacctgccccccgctgagctgaagcagatccccacggtctgcggctcgctgcgcgaggccctggattcgctcgccgccgaccacgagtatctgctcaagggcgacgtgttccagaaggacttcatcgagtcctacatcgagctgaagatgaccgaagtgatgcgtttcgaaatgacgccgcacccggtcgagttcgagatgtactactcggtctga

SEQ ID NO: 101562 - protein, 471 aa, Xanthobacter autotrophicus Py2
MTIKTAKDVLDLIKSEDVKYVDLRFTDPRGKWQHVTFDISMVDDEFLTEGTAFDGSSIAGWKAINESDMLLMPDPATTCIDPFFAETTLSIVCDVLEPTTNQPYGRDPRSIARKAEAYAKSTGIGDAVYFGPEAEFFIFDDVRFKADPYNTGFKLDSVELPTNGDTEYEGGNLGHRVKTKGGYFPVPPIDSAQDMRSEMLAAMAKMGAKVEKHHHEVASAQHELGLKFGSLVTMADHLQVYKYCIHQVANIYGKTATFMPKPVFGDNGSGMHVHQSIWKDGKPLFAGDKYADLSDYCLWYIGGIIKHAKSLNAFTNPLTNSYKRLVPGYEAPVLLAYSARNRSASCRIPYTNNPKAKRVEVRFPDPGANPYLAFAALFMAGMDGILNRIDPGQAMDKDLYDLPPAELKQIPTVCGSLREALDSLAADHEYLLKGDVFQKDFIESYIELKMTEVMRFEMTPHPVEFEMYYSV

SEQ ID NO: 101563 - DNA, 1407 bp, marine gamma proteobacterium HTCC2207
  CDS (1)..(1407): transl_table=11
atgtctgagaagactttgaatcttattaaagaaagtggcgctcgttgggtcgacatgcgctttactgataccaaaggtaaagagcagcatgtttctatacctacaggtgaagtcggtgatgattttttcgttgaaggaaaaatgtttgacggatcatctatcgctggatggaagggtatcaacgaatcagacatgattttgatgccagacgacagcactgctgttctcgatcctttcactgatgagcctactgttatcattcgctgtggcattgttgagccttcaactatgcagggctacgaacgtgatccacgctccatcgctgaacgcgctgagcaatatcttcagtctactggccttggcgataccgcattctttggaccagagcctgaattcttcgtttttgacgacatcaaatggggtgtcgacatgagcggcgctttctacaaaatcaactccgatgaagccgcttgggcttcaggtagcgattttactgatggcaacatgggtcaccgccctggcgttaaaggtggttacttccccgtaccaccagttgatagcctgcacgatctgcgtgctgctatgtgtaatgccatggagcagatgggacttgatatcgaagtgcatcaccacgaagtaggcactgctggtcagtgtgagattggtgttcgctttgacacattggttgcgaaagctgaccaggttcagatcctcaagtactgtgtacacaacgttgcgcacgcctacggcaagacagcaacctttatgcctaagccaatcgttggcgacaacggttctggtatgcactgtcacatgtctttcgctaaagacggcgtgaaccagtttgctggcgatgcctatgctggactgagcgaaatggctctgtactacatcggtggcatcatcaagcacgccaagtcactcaacgcctttgccaacgcttcgactaactcttacaagcgtttgattccaggttttgaagcaccggtaatgctggcttactcagcgcgtaaccgttctgctgcgatccgtatcccatacgttgctagcccacgtggcaagcgtgtagaagtgcgctttggtgatccaactgctaacccatacctgatgtttgcttctatgctgatggctggtctggacggcatcaagaacaagatccaccctggcgatgcagcggacaaagatctctatgatctgcctgctgaagaagctgcagctattcctcaggttgctggcagcctgcgtgaagcactcgacgagttgaatgctgaccgtgagtacttgactgctggtggtgtattcaccgacgacatgatcgatgcatacattgagctgaagatggaagaagtctaccgcgttgagcacaccactcacccggttgagtttgatatgtactacagcgtataa

SEQ ID NO: 101564 - protein, 468 aa, marine gamma proteobacterium HTCC2207
MSEKTLNLIKESGARWVDMRFTDTKGKEQHVSIPTGEVGDDFFVEGKMFDGSSIAGWKGINESDMILMPDDSTAVLDPFTDEPTVIIRCGIVEPSTMQGYERDPRSIAERAEQYLQSTGLGDTAFFGPEPEFFVFDDIKWGVDMSGAFYKINSDEAAWASGSDFTDGNMGHRPGVKGGYFPVPPVDSLHDLRAAMCNAMEQMGLDIEVHHHEVGTAGQCEIGVRFDTLVAKADQVQILKYCVHNVAHAYGKTATFMPKPIVGDNGSGMHCHMSFAKDGVNQFAGDAYAGLSEMALYYIGGIIKHAKSLNAFANASTNSYKRLIPGFEAPVMLAYSARNRSAAIRIPYVASPRGKRVEVRFGDPTANPYLMFASMLMAGLDGIKNKIHPGDAADKDLYDLPAEEAAAIPQVAGSLREALDELNADREYLTAGGVFTDDMIDAYIELKMEEVYRVEHTTHPVEFDMYYSV

SEQ ID NO: 101565 - DNA, 1407 bp, Oceanobacter sp. RED65
  CDS (1)..(1407): transl_table=11
atgtcagagaacactctgaagctgattaaagacaacgatgtgaagtgggttgatttacgcttcaccgacaccaaaggtaaagagcagcacgttaccattcctgctaaggatgttgatgaggagttctttgaagtaggtcaaatgttcgatggctcttcaatttctggttggaaaggcatcaacgaatctgacatgattcttttgccagacgacaccactcctttcctagatccgttcactgaagatgctactttgtgtctacgttgtgacatcatcgagccttctaccatgcaaggttacgagcgtgatcctcgttctgtagcgaaacgcgcagaagagtacctacaatcgacaggtcttggtgatactgcgttcttcggtccagagccagaattcttcatctttgatgatgtacgttggggtgctgatatgtctggcactttctacaaaatcaactctgaagaagctgcttggaacacagaggcagtaatggaaggcggcaacatgggtcaccgtccatctgttaaaggcggttacttcccagtaccacctgttgatagctctcacgacatgcgtgcagctatgtgtaacaccatgatggctatcggtcttgatgttgaagtacatcaccacgaagtagctacagctaaccaaaacgaaatcggtgttaaattcaacactctagttaagaaagctgacgaagttcaaatgcttaagtacgttgttcacaacgttgctcatgcttacggtaaaacagcgactttcatgcctaagccagtggttggtgataacggttctggtatgcacgttcaccaatctttctggaaagacggtgaaaaccaattcgctggtgacagctactctggtctaagcgaaacggctctttactacatcggcggtatcatcaagcacgctaaagcgttgaatgcgttcactaacccttcaactaactcttacaagcgtctgatccctggtttcgaagcacctgtaatgcttgcgtactctgcacgcaaccgttctgcttctatccgtattccatacgttgcatctccaaaaggtaagcgtgttgaagctcgtttccctgatccaactgctaacccatacctagcgtttgctgcaatgctaatggctggtatcgatggtgttaagaacaagatccaccctggcgatgcagctgataaagacttgtacgacctacctgctgaagaagcagctcagatcccacaagttgctggtagcctacgtgaagctctaggtgctctagaagctgacatggacttcttggttgaaggtggcgtgttcactaaagacatgatcgaagcttacatcgaacttaagatggaagatgtgtatcgtgtagaacacacgactcacccagctgagttcgacatgtactactctctataa

SEQ ID NO: 101566 - protein, 468 aa, Oceanobacter sp. RED65
MSENTLKLIKDNDVKWVDLRFTDTKGKEQHVTIPAKDVDEEFFEVGQMFDGSSISGWKGINESDMILLPDDTTPFLDPFTEDATLCLRCDIIEPSTMQGYERDPRSVAKRAEEYLQSTGLGDTAFFGPEPEFFIFDDVRWGADMSGTFYKINSEEAAWNTEAVMEGGNMGHRPSVKGGYFPVPPVDSSHDMRAAMCNTMMAIGLDVEVHHHEVATANQNEIGVKFNTLVKKADEVQMLKYVVHNVAHAYGKTATFMPKPVVGDNGSGMHVHQSFWKDGENQFAGDSYSGLSETALYYIGGIIKHAKALNAFTNPSTNSYKRLIPGFEAPVMLAYSARNRSASIRIPYVASPKGKRVEARFPDPTANPYLAFAAMLMAGIDGVKNKIHPGDAADKDLYDLPAEEAAQIPQVAGSLREALGALEADMDFLVEGGVFTKDMIEAYIELKMEDVYRVEHTTHPAEFDMYYSL

SEQ ID NO: 101567 - DNA, 1410 bp, Vibrio sp. Ex25
  CDS (1)..(1410): transl_table=11
atgtcagtagaaaacgttctatcgctgatccaagaaaacgaagttaagtttgttgacctacgcttcactgatacaaaaggtaaagagcagcacatttcgatccctgctcaccaaatcgacgcagacttcttcgaagaaggtaaaatgttcgatggttcatcagttgctggctggaaaggtatcaacgaatcagacatggtaatgatgcctgacgcatcttctgctgtgcttgacccattcacggaagacgcaacactaaacatccgttgtgacatcttagagccggcaacaatgcaaggctacgaccgtgacccacgttctatcgcaaaacgcgctgaagacttcatgcgctctactggcgttgcagatactgtacttatcggtcctgagccagaattcttcctatttgacgacgtgaaattcgcgactgacatgtcaggctctttcttcaagatcgatgacgtagaagcagcatggaacacaggttctgattacgaagaaggtaacaaaggtcaccgtccaggcgttaaaggtggttacttccctgtagctccagtggattcatctcaagatatccgttctgctatgtgtctagtaatggaagagatgggtcttgttgttgaagcacaccaccacgaagtggcaacagcgggtcaaaacgaaatcgcaactcgtttcaacacgctaacaaccaaagctgacgaaatccaaatctacaagtacgttgtacacaacgttgctcacgcgtttggtaaaacagcgacgttcatgcctaaaccacttgttggtgacaacggtagcggtatgcacgttcaccaatctctagcgaaagatggtgtaaacctatttgctggtgacaagtacggcggtctatctgaaatggcgctttactacattggcggtatcatcaaacacgctcgtgcaatcaacgcatttgctaacccatcaacaaactcgtacaaacgtcttgtaccaggcttcgaagcgccagttatgcttgcttactctgcacgtaaccgctctgcttcaatccgtatcccagtggtaccaagcccgaaagcacgtcgtatcgaagttcgctttggtgacccagcggctaacccatacctatgctttgcatcaatgctaatggctggtcttgacggtattaagaacaagatccacccaggcgaagcaatggataaagacctttacgatctaccagcagaagaagcagcagaaatcccaacggttgcatactcactgaaagacgcactagcagagctagatgctgaccgtgaattcctaacagcgggtggtgtattctctgacgacttcatcgactcttacatcgagctgaaatctcaggacgtagagcgcgtgaacatgacaactcacccagttgagttcgaactttactactctgtataa

SEQ ID NO: 101568 - protein, 469 aa, Vibrio sp. Ex25
MSVENVLSLIQENEVKFVDLRFTDTKGKEQHISIPAHQIDADFFEEGKMFDGSSVAGWKGINESDMVMMPDASSAVLDPFTEDATLNIRCDILEPATMQGYDRDPRSIAKRAEDFMRSTGVADTVLIGPEPEFFLFDDVKFATDMSGSFFKIDDVEAAWNTGSDYEEGNKGHRPGVKGGYFPVAPVDSSQDIRSAMCLVMEEMGLVVEAHHHEVATAGQNEIATRFNTLTTKADEIQIYKYVVHNVAHAFGKTATFMPKPLVGDNGSGMHVHQSLAKDGVNLFAGDKYGGLSEMALYYIGGIIKHARAINAFANPSTNSYKRLVPGFEAPVMLAYSARNRSASIRIPVVPSPKARRIEVRFGDPAANPYLCFASMLMAGLDGIKNKIHPGEAMDKDLYDLPAEEAAEIPTVAYSLKDALAELDADREFLTAGGVFSDDFIDSYIELKSQDVERVNMTTHPVEFELYYSV

SEQ ID NO: 101569 - DNA, 1407 bp, Alteromonadales bacterium TW-7
  CDS (1)..(1407): transl_table=11
atgtcacaatcggttttagattttattaaagaaaatgacgttaagttcattgatttacgctttactgatacaaagggtaaagagcaacatgtatctattcctcatcaccaagttgatgaagattttttcgaagacggtaaaatgttcgacggttcttcaattgctggttggaaaggcataaacgaatcagacatggtattaatgcctgttgctgaatcagtaaaacttgaccctttcactgaagaaacaacattaatcgtacgttgtgacgttgtagagccttctacacttcaaggttacgagcgcgacccgcgttcagttgctaaacgtgctgaagattacatgcgctctacaggtattgctgataccgtattatttggcccagagccagagttcttcctttttgacgatgttaaatacaaatcagacatgtctggttcaatgtacaaagttgacgctgtagaagcggcatggaactcagataaagattatgaaggcggtaacactggtcaccgtccaggtgttaaaggcggttacttcccttgttcacctgttgattcttcacaagattggcgttcagctacctgtttagtacttgaagaactaggtcaagtagtagaagcacatcaccacgaagtagcaacagcaggccaaaacgaaattgctacgcgttttaacagcatggttttaaaagcagatgaaatccaagaaatgaaatatgttattcataacatggctcatttatacggaaaaacagctacattcatgcctaagccaattgtgggtgataacggttctggtatgcactgtcaccagtctttagctaaagacggtgttaacttgtttgctggcgataaatacggcggtctttctgaagaagcgctttattacattggcggtattatcaagcatgctaaagctattaacgcatttgctaacgcatcaactaactcgtacaaacgtttagtaccaggctttgaagcacctgtaatgcttgcatactctgcacgtaaccgttctgcttcaatccgtattccagtggtaccatctgcgaaaggtcgtcgtattgaagtacgcttcccagatccaacagctaacccataccttgctttctcagcaatgcttatggctggccttgacggtatcaaaaacaagatccaccctggtgatgcaatggataaagatttatacgacttaccagcagaagaagcagcagaaattccacaagttgcatcttcacttggtgaagcactagatgcattaagtgctgaccgcgagttcttaactcaaggtggtgttttcactgacgacctaatcgatgcttacattgcacttaaaggtcaagaagttgaaaaacttaacatgacaactcacccagttgagttcgaaatgtactacagctgttaa

SEQ ID NO: 101570 - protein, 468 aa, Alteromonadales bacterium TW-7
MSQSVLDFIKENDVKFIDLRFTDTKGKEQHVSIPHHQVDEDFFEDGKMFDGSSIAGWKGINESDMVLMPVAESVKLDPFTEETTLIVRCDVVEPSTLQGYERDPRSVAKRAEDYMRSTGIADTVLFGPEPEFFLFDDVKYKSDMSGSMYKVDAVEAAWNSDKDYEGGNTGHRPGVKGGYFPCSPVDSSQDWRSATCLVLEELGQVVEAHHHEVATAGQNEIATRFNSMVLKADEIQEMKYVIHNMAHLYGKTATFMPKPIVGDNGSGMHCHQSLAKDGVNLFAGDKYGGLSEEALYYIGGIIKHAKAINAFANASTNSYKRLVPGFEAPVMLAYSARNRSASIRIPVVPSAKGRRIEVRFPDPTANPYLAFSAMLMAGLDGIKNKIHPGDAMDKDLYDLPAEEAAEIPQVASSLGEALDALSADREFLTQGGVFTDDLIDAYIALKGQEVEKLNMTTHPVEFEMYYSC

SEQ ID NO: 101571 - DNA, 1407 bp, marine gamma proteobacterium HTCC2143
  CDS (1)..(1407): transl_table=11
atgtcagagaacaccctgaatatgatcaaagaaaacgatgtgaaatgggtagatttacgtttcaccgacactaaaggtaaagaacagcacgttactattcccgtaaaggaaattgacgaagggtttttcgaagacggcaagatgttcgacggttcatctatatctggatggaagggcatcaacgaatccgacatgatattaatgcctgatgattcgactgcggttatcgaccccttcaccgatgacacaacgatgaaccttcgctgtgatattgttgaacctacaaccatgcaaggctacagccgcgatcctcgttcaattgccgagcgcgcagaaggttatatgagatctaccggtatcgccgacagctgtttgttcggtcctgagcccgagtttttcgtatttgacgacgtcaaatggcatgcagatatgagcggcgctggctacgaaatcaattccgaagaagcagcatggtcttctaaccacagctatgacgacggtaataccggtcaccgccctggtgtgaaaggcggctatttcccagttcctccagtcgattcactgcatgacctgcgcggcgccatgtgtaatgccatggaagctatgggcctcgacattgaagttcatcaccacgaagttggaacggccggccaatgcgaaattggcgttgggcccaacaccgctgttaaaaaagcggatgaaatccaaatcttcaagtactgcgttcacaatgtcgctcatgcctatggcaaaacagcgactttcatgcctaaaccactggttggcgacaacggttccggcatgcacgtgcaccagtctttgagcaaagatggtaccaacatcatggcgggcgatgtctatggcggtctgtctgaaacagcgctttattacataggcggcatcatcaaacatgctcgtgcgctaaatgcttttgccaacgcttctaccaactcttacaagcgcctggttccaggttttgaagcacccgttatgctggcatactctgctcgtaaccgttcggcgtctattcgtattcctttcgttccgaatccaaaagcacgtcgtatcgaagttcgtttcggtgatcctacggcaaacccttacttaatgtttgccagtatgttgatggcgggccttgatggaatccagaacaagattcatcctggggatgctgcagacaaagatttgtatgacttgcccgctgaagaagccgctgaaatacccaccgtggcctcaagtctcgagcaggcacttgcagctcttgatgcggatcgagcattcttaactgccggcggcgtaatggatgacgatatgatcgacgcttacatcgcgctcaagagtgaagaagtggaaaaattgaacatgactactcatcccgttgagtttgacatgtactactcagtctaa

SEQ ID NO: 101572 - protein, 468 aa, marine gamma proteobacterium HTCC2143
MSENTLNMIKENDVKWVDLRFTDTKGKEQHVTIPVKEIDEGFFEDGKMFDGSSISGWKGINESDMILMPDDSTAVIDPFTDDTTMNLRCDIVEPTTMQGYSRDPRSIAERAEGYMRSTGIADSCLFGPEPEFFVFDDVKWHADMSGAGYEINSEEAAWSSNHSYDDGNTGHRPGVKGGYFPVPPVDSLHDLRGAMCNAMEAMGLDIEVHHHEVGTAGQCEIGVGPNTAVKKADEIQIFKYCVHNVAHAYGKTATFMPKPLVGDNGSGMHVHQSLSKDGTNIMAGDVYGGLSETALYYIGGIIKHARALNAFANASTNSYKRLVPGFEAPVMLAYSARNRSASIRIPFVPNPKARRIEVRFGDPTANPYLMFASMLMAGLDGIQNKIHPGDAADKDLYDLPAEEAAEIPTVASSLEQALAALDADRAFLTAGGVMDDDMIDAYIALKSEEVEKLNMTTHPVEFDMYYSV

SEQ ID NO: 101573 - DNA, 1407 bp, marine gamma proteobacterium HTCC2080
  CDS (1)..(1407): transl_table=11
atgtcggagcgcacgctcactttaatcaaagacaatgatattcgctgggtagacctgcgtttcaccgataccatgggtaaagagcaacacgtctctattcccgccacagaggtgggagaggactttttcgaagagggcaagatgtttgacggctcgtccatttccggttggaagggcattaatgagtcagacatgattttgatgccagacgattccagctcaattttagatccctttacggatgacgccacagtgattcttcgttgcgacattattgagcccacaacgatgcaagggtatgaacgcgacccccgcagcgttgcaaaacgtgcagaagcctacctaacttcaacgggcatcggcgataccgctttctttggcccagaacctgaatttttcgtgtttgacgacgtaaaatggcacgctgatatgagtggtgcgggttatagcattaactcagaggaggccgcatggtcatcttcagcgcactatgacgatggcaatactggccaccggcccagggttaaaggtggttatttccctgtgccccctgtcgatagtctccacgacatccgagcagccatgtgctctgccatggagcagatgggcttagatgttgaagtgcatcaccatgaagtcggtacagctggccagtgcgaaattggcatccgtttcaatacgttggtcaaaaaagcagacgaagtgcagatcctcaagtactgcgtccacaatgtggcgcacgcctatggaaagaccgctacgttcatgccaaagcccctagtcggtgacaacggctccggtatgcatgtgcaccaatctgtagctaaagatggcgataatacctttgccggcgacggttactcaggactctcagaaacagcgctttattacattggcggtatcatcaagcacgccagggcattaaatgcctttgccaacgcgtcaaccaatagctacaagcgattggtgcccggttttgaagcgccagtaatgctggcttactctgcgcgcaaccgctcagcgtcgatccgcattccctatgagccatcaccacgtggcaagcgtgtcgaagtccgcttccctgacccaactgcgaacccctacctagcctttgctgcgatgcttatggctggcctagatggcattcagaacaagatccaccccggcgaagccgcagacaaggatctttatgaccttccagcggaagaagccaaagctatcccaacggtggcttcaagccttgagatggcactcgatgctctcgatcaggatcgcgacttcctcacccgaggcgaggtttttaccgacgatatgatagatgcctacatcgatctgaagcgcgaagagattcaacgcctcgacatgacaactcaccccgttgagttcgacatgtactactcagtttaa

SEQ ID NO: 101574 - protein, 468 aa, marine gamma proteobacterium HTCC2080
MSERTLTLIKDNDIRWVDLRFTDTMGKEQHVSIPATEVGEDFFEEGKMFDGSSISGWKGINESDMILMPDDSSSILDPFTDDATVILRCDIIEPTTMQGYERDPRSVAKRAEAYLTSTGIGDTAFFGPEPEFFVFDDVKWHADMSGAGYSINSEEAAWSSSAHYDDGNTGHRPRVKGGYFPVPPVDSLHDIRAAMCSAMEQMGLDVEVHHHEVGTAGQCEIGIRFNTLVKKADEVQILKYCVHNVAHAYGKTATFMPKPLVGDNGSGMHVHQSVAKDGDNTFAGDGYSGLSETALYYIGGIIKHARALNAFANASTNSYKRLVPGFEAPVMLAYSARNRSASIRIPYEPSPRGKRVEVRFPDPTANPYLAFAAMLMAGLDGIQNKIHPGEAADKDLYDLPAEEAKAIPTVASSLEMALDALDQDRDFLTRGEVFTDDMIDAYIDLKREEIQRLDMTTHPVEFDMYYSV

SEQ ID NO: 101575 - DNA, 1332 bp, Candidatus Desulfococcus oleovorans Hxd3
  CDS (1)..(1332): transl_table=11
atgatctgtaagaccgcggacgatgtgagaaaaatcgtcaaggaaaaaaatgtcagctttatccagttctggttcaccgacgtgctgggcgcgttaaaaagctttgccatcaccccggatgaactggaagaggggattgaggagggtatggggtttgacggttcgtccatccagggattctgccggattcatgaaagcgacatgatcgcaaagcccgaccccaccaccttccagtttgttccctggcggggcgagggagaccggcccgtggcccgcatgttctgtgatattcttcagccggacggcaccccctacgagggcgacccccgttatgtgctcaagcggctgctcgggcaggtggcggaaaagggctacaccttttacgtgggcccggaactggagtatttttatttcaagaacgaccaggggaccggaatcctcgacaaggccggttactttgacgcccggcccatggacatgggcggagacctgcggcggcagaccatcttcgcgcttcaggccatgggtatccaggtggagtacagccaccacgaagtggcccccagccagcatgagatcgacctgcgctacgccgaggccctgaatatggccgacatcaccatgacctaccgcatgacggtcaaggagatcgcccatagaaacggggtctacgccaccttcatgcccaagcccatattcggtgaaaacggcagcggcatgcatgtccaccagtcccttttcaaggacgggaaaaacgcatttcacagcaaggatgccaaattcaacctctctgacatcgccaagcactatatcgccggcattctcaagcatgcgccggaaattgtttccattaccaaccagtgggtcaactcctacaaacggctggttcccggttatgaagccccggtctacgtctcctgggccaacagaaaccggtcggccatggtgcgggtgcccatgtacaagccgggcaaagaggcggcaacccgcatggagttccgggcacccgacccgtcatgcaacccctacctggcctttgccgtgatgctgggcgcgggcatggagggcatcgaaaacaagtacccgctgcccgaccccattgaagaggacatctttgaaatgacgccggcggagcggcacaacaagggcattaccgagctgccgggcaacctctactcggccattctggaaaccgaaaagagcgggctggtaaaaaaggtgctgggagaacatatcttcaaggagtttatcgacaataaaaaagtggagtgggaccgttaccggacccatgtcagcacttttgagctggagaactacctgccaaagctctag

SEQ ID NO: 101576 - protein, 443 aa, Candidatus Desulfococcus oleovorans Hxd3
MICKTADDVRKIVKEKNVSFIQFWFTDVLGALKSFAITPDELEEGIEEGMGFDGSSIQGFCRIHESDMIAKPDPTTFQFVPWRGEGDRPVARMFCDILQPDGTPYEGDPRYVLKRLLGQVAEKGYTFYVGPELEYFYFKNDQGTGILDKAGYFDARPMDMGGDLRRQTIFALQAMGIQVEYSHHEVAPSQHEIDLRYAEALNMADITMTYRMTVKEIAHRNGVYATFMPKPIFGENGSGMHVHQSLFKDGKNAFHSKDAKFNLSDIAKHYIAGILKHAPEIVSITNQWVNSYKRLVPGYEAPVYVSWANRNRSAMVRVPMYKPGKEAATRMEFRAPDPSCNPYLAFAVMLGAGMEGIENKYPLPDPIEEDIFEMTPAERHNKGITELPGNLYSAILETEKSGLVKKVLGEHIFKEFIDNKKVEWDRYRTHVSTFELENYLPKL

SEQ ID NO: 101577 - DNA, 1335 bp, Pseudomonas putida GB-1; identical to SEQ ID NO: 32233
  CDS (1)..(1335): transl_table=11

SEQ ID NO: 101578 - protein, 444 aa, Pseudomonas putida GB-1; identical to SEQ ID NO: 32234

SEQ ID NO: 101579 - DNA, 1383 bp, Pseudomonas putida GB-1; identical to SEQ ID NO: 32235
  CDS (1)..(1383): transl_table=11

SEQ ID NO: 101580 - protein, 460 aa, Pseudomonas putida GB-1; identical to SEQ ID NO: 32236

SEQ ID NO: 101581 - DNA, 1377 bp, Pseudomonas putida GB-1; identical to SEQ ID NO: 32237
  CDS (1)..(1377): transl_table=11

SEQ ID NO: 101582 - protein, 458 aa, Pseudomonas putida GB-1; identical to SEQ ID NO: 32238

SEQ ID NO: 101583 - DNA, 1407 bp, Pseudomonas putida GB-1; identical to SEQ ID NO: 74395
  CDS (1)..(1407): transl_table=11

SEQ ID NO: 101584 - protein, 468 aa, Pseudomonas putida GB-1; identical to SEQ ID NO: 74396

SEQ ID NO: 101585 - DNA, 1323 bp, Pseudomonas putida GB-1; identical to SEQ ID NO: 32241
  CDS (1)..(1323): transl_table=11

SEQ ID NO: 101586 - protein, 440 aa, Pseudomonas putida GB-1; identical to SEQ ID NO: 32242

SEQ ID NO: 101587 - DNA, 1404 bp, Marinobacter sp. ELB17
  CDS (1)..(1404): transl_table=11
atgtccaagaccattgatttgatcacccagcacgatgtgaagtggatcgacttacgttttaccgatacccacggcaaagaacaccacgtaaccataccagccaccgaagcctctgaagactttttcatcgacggcaagatgttcgatggttcttcgatttctggctggaaaggcatcaacgaatccgacatgattctgatgccagatgacaccagcgcagtggttgacccgttcaccgaagagtccaccgtcaacatcagctgcgacattgtggaacccaccaccatgcaaggctacgaacgcgaccctcgttcagtagcgcgccggaccgaggaatacctgaagtctaccggcatcgccgacagcgctttgtttggccctgagcccgagttctttgtgttcgattcggtgaaatggaagactgatatgcagggctccatgtacgaaattcattctgaagaggctgcctggtcgtccgacaaagattttgatggcaataacactggccatcgcccgcgcgtaaaaggcggctacttcccggtgcctccggtagacagcctgcacgacctgcgtggtgccatgtgcggcgccatggcgtctatgggcctggaaattgaagtgcatcaccatgaagtgggtactgctggccagtgcgaaattggcgttggcgcggcaaccctgacgcgaaaagccgatgaagtgcagattctgaaatactgcgtgcacaacgtggcccatgcctacggcaaaacagccacatttatgcccaagccagtcgtgggtgataacggctcgggtatgcacgtacacatgtcgttgagcaaagatggcaagaacctgtttgccggcgacagctatgctggtctgagtgagatggcgttgtattacgttggcggcatcatcaagcacgccaaagcgataaatgctttcaccaaccccgccaccaacagctacaagcgtttggtgccgcactatgaagccccggttatgctggcctattccgctcgcaaccgctcggcttctatccgtattccctacgttaacagcccgaaggcacgccgcgttgaagtgcgtttcccagacccggcggctaacccttacctggcattttcagcgctgatcatggccggcctggacggcattcagaacaagattcatcctggcgacgccatggacaaagatctttacgacctaccaaaagaagaagcgctgaacatcccaaaagtggccgagaccctgcaagaagcgctgcagtgcctggaagccgatcacgagtttttgacccgtggcggcgtgttcaccgaagacatgattcgcgcctatattgaccttaagcgtgctgacgtagagcgtatgaacatgaccactcacccggttgagttcgaactctactattcttgctaa

SEQ ID NO: 101588 - protein, 467 aa, Marinobacter sp. ELB17
MSKTIDLITQHDVKWIDLRFTDTHGKEHHVTIPATEASEDFFIDGKMFDGSSISGWKGINESDMILMPDDTSAVVDPFTEESTVNISCDIVEPTTMQGYERDPRSVARRTEEYLKSTGIADSALFGPEPEFFVFDSVKWKTDMQGSMYEIHSEEAAWSSDKDFDGNNTGHRPRVKGGYFPVPPVDSLHDLRGAMCGAMASMGLEIEVHHHEVGTAGQCEIGVGAATLTRKADEVQILKYCVHNVAHAYGKTATFMPKPVVGDNGSGMHVHMSLSKDGKNLFAGDSYAGLSEMALYYVGGIIKHAKAINAFTNPATNSYKRLVPHYEAPVMLAYSARNRSASIRIPYVNSPKARRVEVRFPDPAANPYLAFSALIMAGLDGIQNKIHPGDAMDKDLYDLPKEEALNIPKVAETLQEALQCLEADHEFLTRGGVFTEDMIRAYIDLKRADVERMNMTTHPVEFELYYSC

SEQ ID NO: 101589 - DNA, 1332 bp, Clostridium beijerinckii
  CDS (1)..(1332): transl_table=11
atggcaaagtacacaaagggagatatcattaacttagtaaaggaaaatggagttaaatttataagacttcaatttacagatatctttggaacattaaaaaacgtagcaattacagacagacagttagaaaaagcattaaataatgaatgtatgtttgatggatcatctattgatggttttgttagaattgaagaatctgacatgaatttaagaccgaacttagatagttttgtaattttcccatggagaccgcaacaaggtaaggttgcaagattaatctgtgacgtttataaaccagatggaaagccatttgaaggtgatccaagatatatcttaaagagagctatagcagatgcagctgaacttggatatacaatgaatgttggacctgaatgtgaatttttcttgtttgaaactgatgaaaatggtaatgcaacaacaaacactcaagataaaggtgggtactttgatttagcacctacagatttgggagaaaatgcaagacgtgacatgactttagcattagaagaaatgggatttgagattgaagcatctcaccatgaagttgctgaaggacaaaatgaaattgactttaaatatggtgatgcattaactacagctgatagtattatgacattcaagctagttgttaagtctattgcacaaagacacggattacatgcatcatttatgccaaagccaattttcggaattaatggttcaggaatgcatgttaatatgtcattattcaaggatggaaagaatgtctttgttgatgaaaatgataagaatggcttaagtccaatagcttataactttatagcaggattactaaagaatatcaaaggtcttgcggctgttactaacccgttagttaattcatacaagagattagtaccaggatatgaagcaccagtttatttagcttggtcttgtaaaaacagaacagcattaataagagtaccagcagctagaggcgcaggaactagagttgagcttagatgtccagatccaagttctaacccatatttagtattagcagctctattacaagcaggactagatggtattaaaaacaatctacaaccaccagcagaagttgaagcaaatatttttgctatgactgatgaggaaagaaaagctaacggaattgataacttacctaataacttatatgaagcagttcaattcatgagagaaagtgagttagctaagtcagctttaggagatcatgtatacaataattatcttgaaggtaaagcagctgagtgggatgattatagaactaaagtacatgactgggaattagaaaactatcttaatagatattaa

SEQ ID NO: 101590 - protein, 443 aa, Clostridium beijerinckii
MAKYTKGDIINLVKENGVKFIRLQFTDIFGTLKNVAITDRQLEKALNNECMFDGSSIDGFVRIEESDMNLRPNLDSFVIFPWRPQQGKVARLICDVYKPDGKPFEGDPRYILKRAIADAAELGYTMNVGPECEFFLFETDENGNATTNTQDKGGYFDLAPTDLGENARRDMTLALEEMGFEIEASHHEVAEGQNEIDFKYGDALTTADSIMTFKLVVKSIAQRHGLHASFMPKPIFGINGSGMHVNMSLFKDGKNVFVDENDKNGLSPIAYNFIAGLLKNIKGLAAVTNPLVNSYKRLVPGYEAPVYLAWSCKNRTALIRVPAARGAGTRVELRCPDPSSNPYLVLAALLQAGLDGIKNNLQPPAEVEANIFAMTDEERKANGIDNLPNNLYEAVQFMRESELAKSALGDHVYNNYLEGKAAEWDDYRTKVHDWELENYLNRY

SEQ ID NO: 101591 - DNA, 2520 bp, Oryza sativa subsp
  CDS (1)..(2520)
atggagatggagtccaagtacgcggcgctgcggcgcgcggcggaggaggcggcggcggtggacgcgcacgcgcacaacctcgtcgccgacggctccgcgttccccttcctccgctgcttctccgaggccgacgccgccgacgccctcgccctcgctccccacaccctctccttcaagagaagcctgagggacatcgctgcattgtacaactgtgaagcttcacttgagaaggtggaggagttcagaagggctgaagggttgtcgtctataagctcaaagtgcttcaaggctgccaacttttctgcaattcttatagatgatggcatagactttgacaagatgcttgaactggaggcacacaaggcgtttgctcctacagttggcagaattctaaggattgaaaagctggcagaaacaattattaatgatgaatcattcagcgcatcaagctggacacttgactcttttactgaaatttttgtcactaagctgaaatcatatcctccccatatagctgcatatagaagtggcttagagattgatccaaatattagcaagacagatgcagaggatggactacgtaaggagttatcaggtcagaggcctcttcggattacaaataagaacctgattgactatctatttacttgcagtcttgaaattgctgtatcatatcacctgccaatgcagattcacacaggatttggagataaggacctggacttgcgaaagtgcaaccctctccatctgcgtgctgttcttgaggacacaagattctctaagtgccaaattgttcttttacatgcctcttatccattttcaaaggaagcatcatatctagcatcagtgtactcccaggtataccttgattttggcttggcaattccaaaacttagtgttcaaggaatgacatcatcaattaaagagctccttgagctagctcccataaagaaggtcatgttcagcacagatggttatgcttttccagagacatattacctaggtgcaaggagggcacgtgatgttgtttatcgtgtactctcagctgcatgtgaagatggtgaccttagcattcaagaagctattgaagcagttgaggacatatttagacgaaatgcattgtatctatacaagttgaatgttgccaatgggtcagtcggtcagataacagcaatagctgacaacggcataccattatctgaacaagatgtgctctttgttcgagtcgtctggattgatacttcaggtcaacataggtgccgcgttgtgccagccggaagattttatgaaattgctaggaaaaagggtattggtctgacttttgcatcgatgggaatgacttcatttactgatggcccagcagatggaacaaaccttactggtgtaggagagatcaggcttatgccggatatgtcaacactattgaggcttccatggtcaagacgcgaagaaatggtaatggctgaaatgcatataaggcctggggaagcctgggaatactgtcccagaaataccttgagaaaagtcacaaaagttctgctagatgagtttaatgtgacaatgatggcaggttttgagaatgaatttttcctacgtaaaaaagtagtaagtggtgaaaaggagctgtgggtcccatttgacaataccccctactgctcaactacagcattcgatggtgcatcatctgtgttgcaagaagtatatacttctcttaaagcggcggaaattgtggttgagcagctgcatgctgaagctggaaaagggcagtttgagatagccttgaagtatgtgttgtgcactcttgctgctgacaaactgatatatgcccgtgagattattaaatcagttgctcgaaagcatgggctacttgcaacttttcttccaaaacctgacttgaatgatattggatccggttctcatgtgcatctgagtttatgggaattcgatcagaatgtgttcatgggatcaagtgaatataattactatggaatgtcaagaatcggagaaagcttccttgctggagtatatctccatcttccatcaatcttggcattcactgctcctcacccaaacagctacaaccgaattcagccaaacacatggagtggtgcatatcagtgctgggggaaggagaacagggaggctccactgagaactgcatgcccacctgggatacctcttgatctcgtcagcaacttcgaaattaaatccttcgatgcgtgcgcaaacccgcacttgggccttgctgctatagttgctgctgggattgatggactcaggagaagccttacgttgcctgaaccaactgaatcaaaccctgcaggttatgcctccaactccaagctcaaaaggatgccgaaggacttgatggaatctgtcgaagcactagctgcagacaaaatcatgcatgaattgatcggcgataaacttgtcactgccgttattgctgtacgaaaggctgagattgatcactacgagaagaaccctgcagcattcgccgatctcattcaccgttactag

SEQ ID NO: 101592 - protein, 839 aa, Oryza sativa subsp
MEMESKYAALRRAAEEAAAVDAHAHNLVADGSAFPFLRCFSEADAADALALAPHTLSFKRSLRDIAALYNCEASLEKVEEFRRAEGLSSISSKCFKAANFSAILIDDGIDFDKMLELEAHKAFAPTVGRILRIEKLAETIINDESFSASSWTLDSFTEIFVTKLKSYPPHIAAYRSGLEIDPNISKTDAEDGLRKELSGQRPLRITNKNLIDYLFTCSLEIAVSYHLPMQIHTGFGDKDLDLRKCNPLHLRAVLEDTRFSKCQIVLLHASYPFSKEASYLASVYSQVYLDFGLAIPKLSVQGMTSSIKELLELAPIKKVMFSTDGYAFPETYYLGARRARDVVYRVLSAACEDGDLSIQEAIEAVEDIFRRNALYLYKLNVANGSVGQITAIADNGIPLSEQDVLFVRVVWIDTSGQHRCRVVPAGRFYEIARKKGIGLTFASMGMTSFTDGPADGTNLTGVGEIRLMPDMSTLLRLPWSRREEMVMAEMHIRPGEAWEYCPRNTLRKVTKVLLDEFNVTMMAGFENEFFLRKKVVSGEKELWVPFDNTPYCSTTAFDGASSVLQEVYTSLKAAEIVVEQLHAEAGKGQFEIALKYVLCTLAADKLIYAREIIKSVARKHGLLATFLPKPDLNDIGSGSHVHLSLWEFDQNVFMGSSEYNYYGMSRIGESFLAGVYLHLPSILAFTAPHPNSYNRIQPNTWSGAYQCWGKENREAPLRTACPPGIPLDLVSNFEIKSFDACANPHLGLAAIVAAGIDGLRRSLTLPEPTESNPAGYASNSKLKRMPKDLMESVEALAADKIMHELIGDKLVTAVIAVRKAEIDHYEKNPAAFADLIHRY

SEQ ID NO: 101593 - DNA, 2520 bp, Oryza sativa subsp
  CDS (1)..(2520)
atggagatggagtccaagtacgcggcgctgcggcgcgcggcggaggaggcggcggcggtggacgcgcacgcgcacaacctcgtcgccgacggctccgcgttccccttcctccgctgcttctccgaggccgacgccgccgacgccctcgccctcgctccccacaccctctccttcaagagaagcctgagggacatcgctgcattgtacaactgtgaagcttcacttgagaaggtggaggagttcagaagggctgaagggttgtcgtctataagctcaaagtgcttcaaggctgccaacttatctgcaattcttatagatgatggcatagactttgacaagatgcttgaactggaggcacacaaggcgtttgctcctacagttggcagaattctgaggattgaaaagctggcagaaacaattattaatgatgaatcattcagcgcatcaagctggacacttgactcttttactgaaatttttgtcactaagctgaaatcatatcctccccatatagctgcatatagaagtggcttagagattgatccaaatattagcaagacagatgcagaggatggactacgtaaggagttatcaggtcagaggcctcttcggattacaaataagaacctgattgactatctatttacttgcagtcttgaaattgctgtatcatatcacctgccaatgcagattcacacaggatttggagataaggacctggacttgcgaaagtgcaaccctctccatctgcgtgctgttcttgaggacacaagattctctaagtgccaaattgttcttttacatgcctcttatccattttcaaaggaagcatcatatctagcatcagtgtactcccaggtataccttgattttggcttggcaattccaaaacttagtgttcaaggaatgacatcatcaattaaagagctccttgagctagctcccataaagaaggtcatgttcagcacagatggttatgcttttccagagacatattacctaggtgcaaggagggcacgtgatgttgtttatcgtgtactctcagctgcatgtgaagatggtgaccttagcattcaagaagctattgaagcagttgaggacatatttagacgaaatgcattgtatctatacaagttgaatgttgccaacgggtcagtcggtcagataacagcaatagctgacaacggcataccattatctgaacaagatgtgctctttgttcgagtcgtctggattgatacttcaggtcaacataggtgccgcgttgtgccagccggaagattttatgaaattgctaggaaaaagggtattggtctgacttttgcatcgatgggaatgacttcatttactgatggcccagcagatggaacaaaccttactggtgtaggagagatcaggcttatgccggatatgtcaacactattgaggcttccatggtcaagacgcgaagaaatggtaatggctgaaatgcatataaggcctggggaagcctgggaatactgtcccagaaataccttgagaaaagtcacaaaagttctgctagatgagtttaatgtgacaatgatggcaggttttgagaatgaatttttcctacgtaaaaaagtagtaagtggtgaaaaggagctgtgggtcccatttgacaataccccctactgctcaactacagcattcgatggtgcatcatctgtgttgcaagaagtatatacttctcttaaagcggcggaaattgtggttgagcagctgcatgctgaatctggaaaagggcagtttgagatagccttgaagtatgtgttgtgcactcttgctgctgacaaactgatatatgcccgtgagattattaaatcagttgctcgaaagcatgggctacttgcaacttttcttccaaaacctgacttgaatgatattggatccggttctcatgtgcatctgagtttatgggaattcgatcagaatgtgttcatgggatcaagtgaatataattactatggaatgtcaagaatcggagaaagcttccttgctggagtatatctccatcttccatcaatcttggcattcactgctcctcacccaaacagctacaaccgaattcagccaaacacatggagtggtgcatatcagtgctgggggaaggagaacagggaggctccactgagaactgcatgcccacctgggatacctcttgatctcgtcagcaacttcgaaattaaatccttcgatgcgtgcgcaaacccgcacttgggccttgctgctatagttgctgctgggattgatggactcaggagaagccttacgttgcctgaaccaactgaatcaaaccctgcaggttatgcctccaactccaagctcaaaaggatgccgaaggacttgatggaatctgtcgaagcactagctgcagacaaaatcatgcatgaattgatcggcgataaacttgtcactgccgttattgctgtacgaaaggctgagatcgatcactacgagaagaaccctgcagcattcgccgatctcattcaccgttactag

SEQ ID NO: 101594 - protein, 839 aa, Oryza sativa subsp
MEMESKYAALRRAAEEAAAVDAHAHNLVADGSAFPFLRCFSEADAADALALAPHTLSFKRSLRDIAALYNCEASLEKVEEFRRAEGLSSISSKCFKAANLSAILIDDGIDFDKMLELEAHKAFAPTVGRILRIEKLAETIINDESFSASSWTLDSFTEIFVTKLKSYPPHIAAYRSGLEIDPNISKTDAEDGLRKELSGQRPLRITNKNLIDYLFTCSLEIAVSYHLPMQIHTGFGDKDLDLRKCNPLHLRAVLEDTRFSKCQIVLLHASYPFSKEASYLASVYSQVYLDFGLAIPKLSVQGMTSSIKELLELAPIKKVMFSTDGYAFPETYYLGARRARDVVYRVLSAACEDGDLSIQEAIEAVEDIFRRNALYLYKLNVANGSVGQITAIADNGIPLSEQDVLFVRVVWIDTSGQHRCRVVPAGRFYEIARKKGIGLTFASMGMTSFTDGPADGTNLTGVGEIRLMPDMSTLLRLPWSRREEMVMAEMHIRPGEAWEYCPRNTLRKVTKVLLDEFNVTMMAGFENEFFLRKKVVSGEKELWVPFDNTPYCSTTAFDGASSVLQEVYTSLKAAEIVVEQLHAESGKGQFEIALKYVLCTLAADKLIYAREIIKSVARKHGLLATFLPKPDLNDIGSGSHVHLSLWEFDQNVFMGSSEYNYYGMSRIGESFLAGVYLHLPSILAFTAPHPNSYNRIQPNTWSGAYQCWGKENREAPLRTACPPGIPLDLVSNFEIKSFDACANPHLGLAAIVAAGIDGLRRSLTLPEPTESNPAGYASNSKLKRMPKDLMESVEALAADKIMHELIGDKLVTAVIAVRKAEIDHYEKNPAAFADLIHRY

SEQ ID NO: 101595 - DNA, 1413 bp, Magnetospirillum gryphiswaldense
  CDS (1)..(1413): transl_table=11
atggccgacaacgtcaagaaggtccttgaaatgatcaaggaaaacgacgtgaagtacgtcgatttccgtttcaccgatccgcgcggcaagtggcagcacactgcccagcacgtctccaccgtggacgaagacatgctgaccgaaggtctgatgttcgacggctcctccatcgctggttggaaggcgattgatcagtccgacatggtgctgatgcccgacagctcgaccgccgtcatggaccccttcgccgcccagtcgcagatgatcatcttctgtgacatcatcgagccggccaccggccagctgtatgaccgcgacccccgcgccatcgccaagcgcgccgagcgctatgtggtcgaatcgggcgctggcgacaccgccttcttcggcccggaagccgaattcttcgtgttcgacgacgtcaagttcaagaccggcatgaatgtcggctattacgaactgtcgtcggaagacggcgccgaagcctcgggcaaggaattccaggaaggtaacctgggccaccgtccgggcgtcaagggcggctacttcccggttccgccggtggacgcttcggtcgacatgcgcgccgagatgctgaccatcatgggcgaaatgggtctgcctatcgaaaagcatcaccacgaagttgcgtcgtcgcagcacgaactgggctgcaagttcggcaccatggttcaggccgccgactggatgcagatctacaagtacgtggtccacaacgtcgccgcgtcctatggcaagtcggccaccttcatgccgaagccgatttatggcgataacggctcgggcatgcacgtgcaccagtccatctggaaggacggcaagccgctgttcgccggttcgggctatgccgacctgtcggacaccgcgctctactacatcggcggcatcatcaagcatgccaaggcgctgaacgccttcaccaacccgctgaccaactcgtacaagcgcctgatccccggcttcgaagccccggttctgctggcctactcggcccgcaaccgttcggcctcgtgccgtattccgtacgcgaccagcccgaaggccaagcgcgtcgaaatccgcttccccgatccgggcgcgaacccgtatctggccttcgccgccatgctgatggccggcctggacggtatcgccaacaagatccatcccggcgaagccatggacaagaacctgtacgaccttcccccggaagagctcaagcaggtcccgaccgtgtgcggctcgttgcgtgaagccctggacaacctgcgggccgacaacgacttcctgtgcaagggcgacgtgttctcgaaggaattcatcgaggcctacatcgacctcaagttcgaggaagtctacaagttcgaacacaccccgcacccggtggaattctccatgtactactcggtctga

SEQ ID NO: 101596 - protein, 470 aa, Magnetospirillum gryphiswaldense
MADNVKKVLEMIKENDVKYVDFRFTDPRGKWQHTAQHVSTVDEDMLTEGLMFDGSSIAGWKAIDQSDMVLMPDSSTAVMDPFAAQSQMIIFCDIIEPATGQLYDRDPRAIAKRAERYVVESGAGDTAFFGPEAEFFVFDDVKFKTGMNVGYYELSSEDGAEASGKEFQEGNLGHRPGVKGGYFPVPPVDASVDMRAEMLTIMGEMGLPIEKHHHEVASSQHELGCKFGTMVQAADWMQIYKYVVHNVAASYGKSATFMPKPIYGDNGSGMHVHQSIWKDGKPLFAGSGYADLSDTALYYIGGIIKHAKALNAFTNPLTNSYKRLIPGFEAPVLLAYSARNRSASCRIPYATSPKAKRVEIRFPDPGANPYLAFAAMLMAGLDGIANKIHPGEAMDKNLYDLPPEELKQVPTVCGSLREALDNLRADNDFLCKGDVFSKEFIEAYIDLKFEEVYKFEHTPHPVEFSMYYSV

SEQ ID NO: 101597 - DNA, 1401 bp, Amycolatopsis mediterranei; identical to SEQ ID NO: 32249
  CDS (1)..(1401): transl_table=11

SEQ ID NO: 101598 - protein, 466 aa, Amycolatopsis mediterranei; identical to SEQ ID NO: 32250

SEQ ID NO: 101599 - DNA, 1416 bp, Herbaspirillum seropedicae
  CDS (1)..(1416): transl_table=11
atggcaaggacggccgcagaggttttgaagatggtgaaggacaacgaagtcaagtttgtcgacttccgtttcgctgacacccgtggcaaggaacagcacgtttccgtgcctgtttcgcatttcgacatcgacaagttcgaatccggtcatgccttcgacggttcgtcgatcgccggctggaagggtatcgaagcctccgacatgctgctgatcccggacccgaacaccgccaacatcgacccgttcatggaagagaccaccctcttcatgcaatgtgacgtgatcgagccgtccgacggcaagggctatgaccgcgatccgcgctccatcgccaagcgcgctgaagcctacctgaagtcctccggcctgggcgacaccgcctacttcggtccggaacccgaattcttcatcttcgacggtgtgcgttggggcgccgacatgtccggttccttcgtcaagatcgactccgaagaagcttcctggagcaccggcgccaagatcgaaggcggcaactccggccaccgtccgaccgtcaagggcggctacttcccggttcccccggtcgacagcttccaggacatgcgttcggaaatgtccctgatcattgaatccctgggcatccccgtcgaagtgcaccaccacgaagtggctggcgctggccagaacgaactgggcaccaagttctcgaccctggtcgagcgcgctgactggacccagaccatgaagtacgtgatctggaacgtcgcccacacctatggcaagaccgcgaccttcatgcccaagcccctggttggcgacaacggctccggcatgcacgttcaccagtccgtctggaaggatggcaagaacctgttcgctggcgacggctatgctggcctgtccgagttcgcgctgtactacatcggcggcatcatcaagcacgccaaggctctgaacgccatcaccaaccccggcaccaactcctacaagcgtctggtccccggcttcgaagccccggtcaagctggcctactcggcccgcaaccgttcggcctcgatccgtatcccgcacgtggccaaccccaagggccgtcgtatcgagacccgtttcccggatcccctggccaacccctacctgtgcttctcggccctgctgatggccggtctggatggcgtgcagaacaagatccacccgggcgaagctgcgaccaaggacctgtaccacctgccgccggaagaagacaagctgatcccgaccgtgtgctcctcgctggacgaagcgctggaacacctggacaaggaccgcgagttcctgacccgtggcggcgtgttcaccgacagcatgatcgatgcctacatcgatctgaagatgcaggaagtccagcgcttccgcatgaccacgcacccgatcgaattcgacatgtactactcgctgtaa

SEQ ID NO: 101600 - protein, 471 aa, Herbaspirillum seropedicae
MARTAAEVLKMVKDNEVKFVDFRFADTRGKEQHVSVPVSHFDIDKFESGHAFDGSSIAGWKGIEASDMLLIPDPNTANIDPFMEETTLFMQCDVIEPSDGKGYDRDPRSIAKRAEAYLKSSGLGDTAYFGPEPEFFIFDGVRWGADMSGSFVKIDSEEASWSTGAKIEGGNSGHRPTVKGGYFPVPPVDSFQDMRSEMSLIIESLGIPVEVHHHEVAGAGQNELGTKFSTLVERADWTQTMKYVIWNVAHTYGKTATFMPKPLVGDNGSGMHVHQSVWKDGKNLFAGDGYAGLSEFALYYIGGIIKHAKALNAITNPGTNSYKRLVPGFEAPVKLAYSARNRSASIRIPHVANPKGRRIETRFPDPLANPYLCFSALLMAGLDGVQNKIHPGEAATKDLYHLPPEEDKLIPTVCSSLDEALEHLDKDREFLTRGGVFTDSMIDAYIDLKMQEVQRFRMTTHPIEFDMYYSL

SEQ ID NO: 101601 - DNA, 1203 bp, Aedes aegypti
  CDS (1)..(1203)
atggcattcagagttgtgggattattgattcgccaggaactgtcctcccttggcagtgcatcaacaacgcgcatgatcagcaccagtgcgacacgatctgcacgtattctgcaagagtcacccaatgcttacatgaacaaaacgctgttggatcggtatcacaagctcaagtacgatccaaagtacgttcaagcaacctatgtgtggatcgatggcacgggtgaaaacgttcgtttgaaggatcgtgtgctcgattacgtaccaaaaaaaccggaagacgtgccaaactggcagtacgacggcagctcaacctatcaagctctgggtggtaactctgacatcaagttggttccccgtgctttgtacaaggatccattcaagccaggaccaaatgatttgattgtgctgtgcgacacgtaccaaccagacggaaagccaaccgaatctaacaaacgtgctttaatgcaggatgcctacaacaagtccaaagattacgaaccatggttcggaatcgagcaggaatacacgttcctagatattgatggaaggcctttgggttggccaacggctggattcccaggaccccaggggccatactactgcgctactggtgcacagaacgtcgtcggtcgcgacatcgccgaagctcacgctctggcttgcctctatgctggagttgactttgccggaaccaatgccgaagtcatgccagctcagtgggaattccaagttggaccaaatcttggaatgaagtgcgctgacgatatctggcttgctcgttacctgctgtggcgtatcgctgaggactacggtgttgttgtcacgttcgaccccaaaccaatggaaggaaactggaatggtgctggaggccattgcaacttctccaccaagcagatgcgagcagaaaatggtatcgaggccatcaaggcagctatcgagaaactgtccaagcagcatgccaagcatatcaaggcctacgatccacgaggaggaaaggacaacgaacgtcgtctggttggccgtctcgagacttcgtccattgacaaattcagttggggtgttgccgaccgtagcaccagtgttcgcattccacgaggcgttgccgatgccaacaaggggtacctcgaggacagacgtccaagctcaaactgtgatccgcacagcgtttgccatgctatcctcgagacttgcctcgtcgagtaa

SEQ ID NO: 101602 - protein, 400 aa, Aedes aegypti
MAFRVVGLLIRQELSSLGSASTTRMISTSATRSARILQESPNAYMNKTLLDRYHKLKYDPKYVQATYVWIDGTGENVRLKDRVLDYVPKKPEDVPNWQYDGSSTYQALGGNSDIKLVPRALYKDPFKPGPNDLIVLCDTYQPDGKPTESNKRALMQDAYNKSKDYEPWFGIEQEYTFLDIDGRPLGWPTAGFPGPQGPYYCATGAQNVVGRDIAEAHALACLYAGVDFAGTNAEVMPAQWEFQVGPNLGMKCADDIWLARYLLWRIAEDYGVVVTFDPKPMEGNWNGAGGHCNFSTKQMRAENGIEAIKAAIEKLSKQHAKHIKAYDPRGGKDNERRLVGRLETSSIDKFSWGVADRSTSVRIPRGVADANKGYLEDRRPSSNCDPHSVCHAILETCLVE

SEQ ID NO: 101603 - DNA, 1419 bp, Neisseria gonorrhoeae
  CDS (1)..(1419): transl_table=11
atgtccattaaaaatgtcgtaaaattgattgaagaaagcgaagcccgctttgtcgatttgcggttcaccgataccaaaggcaagcagcaccactttaccgtgcctgcgcgcatcgtgttggaagaccccgaagagtggtttgaaaacggaccggcgtttgacggctcgtccatcggcggctggaaaggcattgaggcttccgatatgcagttgcgccccgatcctgccacggcgtttgtcgatcctttttatgatgatgcgaccgttgtgttgacttgcgacgtcatcgaccctgccgacggtcagggttacgaccgcgacccgcgctccatcgcacgccgcgccgaagcctatttgaaatcttccggtatcggcgacaccgcctatttcggccccgaacccgaattcttcgtcttcgacggcgtagaatttgaaaccgacatgcacaaaacccgttacgaaatcacgtccgaaagcggcgcgtgggcaagcggcctgcatatggacggtcaaaacaccggccaccgccccgccgtcaaaggcggctacgcgcccgtcgcgccgattgactgcggtcaagatttgcgctccgccatggtaaacattttggaaggactcggcatcgaagtcgaagtccaccacagcgaagtcggtaccggcagccaaatggaaatcggcacccgtttcgccactttggtcaaacgcgccgaccaaacccaagatatgaaatacgtcatccaaaacgttgcccacaatttcggcaaaaccgccacctttatgcccaaaccgattatgggcgacaacggcagcggtatgcacgtccaccaatccatttggaaagacggtcaaaacctgttcgcaggcgacggctatgccggtttgtccgataccgcgctctactacatcggcggcatcatcaaacacgccaaagccctgaacgcgattaccaatccgtccaccaactcctacaaacgcctcgtgccgcactttgaagcaccgaccaaattggcctattccgccaaaaaccgttccgcttccatccgtatcccgtctgtgaacagcagcaaggcgcgccgcatcgaagcgcgtttccccgacccgaccgccaacccgtatttggcatttgccgccctgttgatggcgggtttggacggcattcaaaacaaaatccatccgggcgaccctgccgataaaaacctctacgacctgccgccggaagaagacgcgctcgtcccgaccgtctgcgcttctttggaagaagcacttgccgccctcaaggccgaccacgaattcctgcggcgcggcggcgtgttcagcaaagactggatcgacagctacatcgcctttaaagaggaagatgtccgccgcatccgtatggcgccgcacccgctggaatttgaaatgtattacagactgtaa

SEQ ID NO: 101604 - protein, 472 aa, Neisseria gonorrhoeae
MSIKNVVKLIEESEARFVDLRFTDTKGKQHHFTVPARIVLEDPEEWFENGPAFDGSSIGGWKGIEASDMQLRPDPATAFVDPFYDDATVVLTCDVIDPADGQGYDRDPRSIARRAEAYLKSSGIGDTAYFGPEPEFFVFDGVEFETDMHKTRYEITSESGAWASGLHMDGQNTGHRPAVKGGYAPVAPIDCGQDLRSAMVNILEGLGIEVEVHHSEVGTGSQMEIGTRFATLVKRADQTQDMKYVIQNVAHNFGKTATFMPKPIMGDNGSGMHVHQSIWKDGQNLFAGDGYAGLSDTALYYIGGIIKHAKALNAITNPSTNSYKRLVPHFEAPTKLAYSAKNRSASIRIPSVNSSKARRIEARFPDPTANPYLAFAALLMAGLDGIQNKIHPGDPADKNLYDLPPEEDALVPTVCASLEEALAALKADHEFLRRGGVFSKDWIDSYIAFKEEDVRRIRMAPHPLEFEMYYRL

SEQ ID NO: 101605 - DNA, 1836 bp, Oryza sativa subsp; identical to SEQ ID NO: 32301
  CDS (1)..(1836)

SEQ ID NO: 101606 - protein, 611 aa, Oryza sativa subsp; identical to SEQ ID NO: 32302

SEQ ID NO: 101607 - DNA, 1203 bp, Aedes aegypti
  CDS (1)..(1203)
atggcattcagagttgtgggattattgattcgccaggaactgtcctcccttggcagtgcatcaacaacgcgcatgatcagcaccagtgcgacacgatctgcacgtattctgcaagagtcacccaatgcttacatgaacaaaacgctgttggatcggtatcacaagctcaagtacgatccaaagtacgttcaagcaacctatgtgtggatcgatggcacgggtgaaaacgttcgtttgaaggatcgtgtgctcgattacgtaccaaaaaaaccggaagacgtgccaaactggcagtacgacggcagctcaacctatcaagctctgggtggtaactctgacatcaagttggttccccgtgctttgtacaaggatccattcaagccaggaccaaatgatttgattgtgctgtgcgacacgtaccaaccagacggaaagccaaccgaatctaacaaacgtgctttaatgcaggatgcctacaacaagtccaaagattacgaaccatggttcggaatcgagcaggaatacacgttcctagatattgatggaaggcctttgggttggccaacggctggattcccaggaccccaggggccatactactgcgctactggtgcacagaacgtcgtcggtcgcgacatcgccgaagctcacgctctggcttgcctctatgctggagttgactttgccggaaccaatgccgaagtcatgccagctcagtgggaattccaagttggaccaaatcttggaatgaagtgcgctgacgatatctggcttgctcgttacctgctgtggcgtatcgctgaggactacggtgttgttgtcacgttcgaccccaaaccaatggaaggaaactggaatggtgctggaggccattgcaacttctccaccaagcagatgcgagcagaaaatggtatcgaggccatcaaggcagctatcgagaaactgtccaagcagcatgccaagcatatcaaggcctacgatccacgaggaggaaaggacaacgaacgtcgtctggttggccgtctcgagacttcgtccattgacaaattcagttggggtgttgccgaccgtagcaccagtgttcgcattccacgaggcgttgccgatgccaacaaggggtacctcgaggacagacgtccaagctcaaactgtgatccgtacagcgtttgccatgctatcctcgagacttgcctcgtcgagtaa

SEQ ID NO: 101608 - protein, 400 aa, Aedes aegypti
MAFRVVGLLIRQELSSLGSASTTRMISTSATRSARILQESPNAYMNKTLLDRYHKLKYDPKYVQATYVWIDGTGENVRLKDRVLDYVPKKPEDVPNWQYDGSSTYQALGGNSDIKLVPRALYKDPFKPGPNDLIVLCDTYQPDGKPTESNKRALMQDAYNKSKDYEPWFGIEQEYTFLDIDGRPLGWPTAGFPGPQGPYYCATGAQNVVGRDIAEAHALACLYAGVDFAGTNAEVMPAQWEFQVGPNLGMKCADDIWLARYLLWRIAEDYGVVVTFDPKPMEGNWNGAGGHCNFSTKQMRAENGIEAIKAAIEKLSKQHAKHIKAYDPRGGKDNERRLVGRLETSSIDKFSWGVADRSTSVRIPRGVADANKGYLEDRRPSSNCDPYSVCHAILETCLVE

SEQ ID NO: 101609 - DNA, 1326 bp, Candidatus Kuenenia stuttgartiensis
  CDS (1)..(1326): transl_table=11
ttggcagtaattaaccgggcaaaagacgataaggtaaagcttgttcagttacaatttaccgatattaacggtagtgtaaaggcagttaccataccaattgaaaagttcccggaatctttggagaaagggttgtggtttgacggttcatcaattgaaggttttacaaggatttgtgaaagtgatatgtttttaaaacccgatgcaggtacatatgcgttgcttccctgggagacggttgctgtgactgcgaggctgttctgtgatgtttatatgcctgatggttcgccttttgagggagatccccgttacatattaaagagggcaattaaaaatgcccgtgatatgaattttgaatataacgtggggcctgaactggaatttttcctgtttaaaccgaagaatgacggggccgttgcacccaccccacatgatgtaggaagttattttgatttctctcccagggaccttgcggggaatgtgagggcagatattatttttactcttgaaaaaatgggtatcaatgtggagatgagccaccacgaagtagctccgggccaacatgagattgattttaaatatgcagaagcattacggacggctgagaatgccctgaccttcaagcaggtggtaaaatccattgcacataagcatgatctctatgctacctttatgccgaaaccgatttttgggatatgtggcagcgggatgcattgtcatcagagcctttttgatataaggacaaacaccaatattttttttgatgaaaatgacacgtataaattaagcaggaacgcaaaacattttattgccgggcaactggagcatgtaagggcgatgagcgcaatactttctccgaccgtgaattcctataagagattggttccgggatatgaagcgccggtgtatatatgctgggggcaaaaaaacagatctgccctcatcagggtgccgaggtattctcccggcagggagcaggcaacaagggctgaactgaggtgtcctgacccaagcaacaatccctatcttgctttggcagtaatgctggaagcaggactggatggtataaaaagaaagcttgaattgccaaaggcaacagaagaaaatgtgtatgaatttaataaggatgaactggcataccgtaatattgcaacattgcctggttctttgggggaggcgttgcatgaattaaaacagagtgcgttgatgaagagggcgctgggttcacatacttatcaaatatatttgcattcaaaattttccgaatgggatgaatacaggattcaggtaacggagtgggagcagaaaaaatatcttgaaaccacatag

SEQ ID NO: 101610 - protein, 441 aa, Candidatus Kuenenia stuttgartiensis
MAVINRAKDDKVKLVQLQFTDINGSVKAVTIPIEKFPESLEKGLWFDGSSIEGFTRICESDMFLKPDAGTYALLPWETVAVTARLFCDVYMPDGSPFEGDPRYILKRAIKNARDMNFEYNVGPELEFFLFKPKNDGAVAPTPHDVGSYFDFSPRDLAGNVRADIIFTLEKMGINVEMSHHEVAPGQHEIDFKYAEALRTAENALTFKQVVKSIAHKHDLYATFMPKPIFGICGSGMHCHQSLFDIRTNTNIFFDENDTYKLSRNAKHFIAGQLEHVRAMSAILSPTVNSYKRLVPGYEAPVYICWGQKNRSALIRVPRYSPGREQATRAELRCPDPSNNPYLALAVMLEAGLDGIKRKLELPKATEENVYEFNKDELAYRNIATLPGSLGEALHELKQSALMKRALGSHTYQIYLHSKFSEWDEYRIQVTEWEQKKYLETT

SEQ ID NO: 101611 - DNA, 1098 bp, Paracentrotus lividus
  CDS (1)..(1098)
atgggtgaatactcagcagctaccgacaagacggtgtcggaccgatatctgacccttgacacagatggccactgccaggtcatgtattgctgggtcgacggctccggagaaaacttgagggccaagacgaaaaccatggatttcgtaccagaaaaagcttcagactgccctgtatggaactttgatggttcgagtacggatcaatcggagggatccaacagcgatatgttccttaaaccttgcgccctcttccgggatccattcaggcgcggagacaacaagctccttatgtgtgaagtctacaagtacgactggagacccgccgaaactaactacagaaagacttgtgatgagatcatgactagggccgcagacacagaaccctggtttggaattgaacaggaatatactcttcttggtagcgacaaatggcccttcggctggccaaagggtggattcccaggaccacagggaccatactactgtggtgttggagccaacaaggtttatggtcgtgacattgtagaatctcactatcgggcctgcctgtacgcaggagtaaagatcgcaggctcaaacgctgaagtcatgccagcccagtgggaataccaggttggaccctgtttaggcattgaaatgggcgatcatctttggatgtctcgcttcatcctccaccgtgtttgtgaagactttggcgtcatcgcgacccttgaccccaaacccatggagggagactggaacggcgctggagctcactgtaatttcagcaccttagccatgcgtgaggatggaggcatcgatgtcatgaatgaagccatcaagaaactaggcaagagacacaaggagcacatccgtgcctacgaccctaagaatggagaggacaacgcccgcagattgaccggccgacatgaaacctccagcatcgacgacttctcctctggagtagccaatcgcggcgccagcatcaggataccacgtcaatgcggcatcgacgggaagggatacatggaggaccgaagaccgtcctcaaattgtgatccgtaccgcgtgaccgaagctctggttaggagtacagttctggacgattgggaaacatag

SEQ ID NO: 101612 - protein, 365 aa, Paracentrotus lividus
MGEYSAATDKTVSDRYLTLDTDGHCQVMYCWVDGSGENLRAKTKTMDFVPEKASDCPVWNFDGSSTDQSEGSNSDMFLKPCALFRDPFRRGDNKLLMCEVYKYDWRPAETNYRKTCDEIMTRAADTEPWFGIEQEYTLLGSDKWPFGWPKGGFPGPQGPYYCGVGANKVYGRDIVESHYRACLYAGVKIAGSNAEVMPAQWEYQVGPCLGIEMGDHLWMSRFILHRVCEDFGVIATLDPKPMEGDWNGAGAHCNFSTLAMREDGGIDVMNEAIKKLGKRHKEHIRAYDPKNGEDNARRLTGRHETSSIDDFSSGVANRGASIRIPRQCGIDGKGYMEDRRPSSNCDPYRVTEALVRSTVLDDWET

SEQ ID NO: 101613 - DNA, 1446 bp, Magnaporthe grisea 70; identical to SEQ ID NO: 32131
  CDS (1)..(1446)

SEQ ID NO: 101614 - protein, 481 aa, Magnaporthe grisea 70; identical to SEQ ID NO: 32132

SEQ ID NO: 101615 - DNA, 2478 bp, Oryza sativa subsp; identical to SEQ ID NO: 32299
  CDS (1)..(2478)

SEQ ID NO: 101616 - protein, 825 aa, Oryza sativa subsp; identical to SEQ ID NO: 32300

SEQ ID NO: 101617 - DNA, 1407 bp, Pseudomonas taetrolens
  CDS (1)..(1407): transl_table=11
atgtcgaagtcggttcaactcatcaaagatcatgacgtcaagtggattgatctgcgcttcacggacaccaaaggcactcagcaccacgtgaccatgccggctcgcgatgcgctggaagacgacttcttcgaagtcggcaagatgttcgacggttcctccatcgctggctggaaaggcatcgaagcctccgacatgatcctgctgccggacgacgacactgccgtgctcgacccgttcaccgaagacgccaccctgatcctggtgtgcgacatcatcgaaccgtcgaccatgcaaggttacgatcgtgacccgcgcgccattgctcaccgcgccgaggaatacctgaagaccaccggtatcggtgacaccgtcttcgccggtccagaaccggaattcttcatcttcgacgaagtgaagttcaagtcggacatctccggctcgatgttcaagatctactccgaacaaggttcgtggatgtccgaccaggacatcgaaggcggcaacaaaggtcaccgtcctggcgtcaaaggtggctacttcccggttccgccgttcgaccacgaccacgaaatccgtactgccatgtgcaacgcactggaagagatgggccagaccgttgaagttcaccaccacgaagtggcgactgccggtcagaacgaaattggtgtcaagttcaacaccctggtgaagaaagctgacgaagttcagactctgaaatacgttgtacacaacgttgccgacgcttacggccgcaccgcgaccttcatgccgaagccactgtacggcgacaacggctcgggcatgcacgtccacatgtccatcgccaaagacggcaagaacaccttcgctggcgaaggctatgccggcctgtccgaaaccgccctgtacttcatcggcggtatcatcaagcacggtaaagcgctgaacggcttcaccaacccggccaccaactcctacaagcgtctggtgccaggtttcgaagccccggtaatgctggcctactcggctcgcaaccgttccgcctcgatccgtattccttacgtcaacagcccacgcggccgtcgtatcgaagcacgcttcccggatccggctgccaacccgtacctggcattcgcagctctgctgatggccggcctggacggtatccagaacaagatccacccaggcgatgccgctgacaaaaacttgtacgacctgccgcctgaagaggcgaaagagatcccacaagtttgcggcagcctgaaagaagccctggaagagctggacaagggccgtgcgttcctgaccaagggcggcgtgttctccgacgacttcatcgacgcttacatcgcgctgaaatccgaagaagaaatcaaggttcgcaccttcgtacacccactggaatatgagctgtactacagctgctga

SEQ ID NO: 101618 - protein, 468 aa, Pseudomonas taetrolens
MSKSVQLIKDHDVKWIDLRFTDTKGTQHHVTMPARDALEDDFFEVGKMFDGSSIAGWKGIEASDMILLPDDDTAVLDPFTEDATLILVCDIIEPSTMQGYDRDPRAIAHRAEEYLKTTGIGDTVFAGPEPEFFIFDEVKFKSDISGSMFKIYSEQGSWMSDQDIEGGNKGHRPGVKGGYFPVPPFDHDHEIRTAMCNALEEMGQTVEVHHHEVATAGQNEIGVKFNTLVKKADEVQTLKYVVHNVADAYGRTATFMPKPLYGDNGSGMHVHMSIAKDGKNTFAGEGYAGLSETALYFIGGIIKHGKALNGFTNPATNSYKRLVPGFEAPVMLAYSARNRSASIRIPYVNSPRGRRIEARFPDPAANPYLAFAALLMAGLDGIQNKIHPGDAADKNLYDLPPEEAKEIPQVCGSLKEALEELDKGRAFLTKGGVFSDDFIDAYIALKSEEEIKVRTFVHPLEYELYYSC

SEQ ID NO: 101619 - DNA, 1335 bp, uncultured archaeon GZfos31B6
  CDS (1)..(1335): transl_table=11
atgattttgatgaccgccaatgaagatgtactgggaatgattgctgaaaataatataaaattcatccggctccagtttgtcgatgtccttggaatcgtgaagaatgtcgcgataccggctgcacagatgaagaaagcactcgacgtcgggatatccttcgacggatcatccatcgaggggtttgcaaggatacaggaatcggacatggtattaaagccggatcctgaaacgttccggattcttccgtggaaggcagatgaaggcaagattgccggaatcgtgtgcgatgtctgtttgcctgacggtacgccatttcatggttgcccgcgatacgcactcacaagagcgattacggaagcagagaagatggggtatgtcatgaatacgggtcccgaactggagttcttcctcttcgaaaaagaagatggtataccaacgaccacacctcatgattcgggcgggtatttcgattttccaccggttgatcttgcagaggatattcgtagggatatcgtgatcgcgctcgaagaaatggattttgagatagaagcgtcgcatcacgaggttgcctgtgggcagcatgagatcgatttcaagtacagcgatgcactgacaaccgcggacaaggtggtcaccttcaagtacgtaaccaaaacgatcgcaacgaacaagaatctccatgccacgttcatgccaaagccggtcttcggaaccagcgggtcgggcatgcatataaatacgtccctatttaataaaaataatgaaaatgtcttctttagtcccgatgacgaccacgggatcagcgatactgcaagatatttcatcggcggattactcgcccacatcaaggcagtgactgcgatcacaaatccactcgtcaattcgtacaaacggctcgtatccggatacgaggcaccggtctatatcacatggtcgtgggcgaaccggagttcgctgatccgggtgccggcagcgcgcggaagcggaacaaggatcgaactcagatcccctgacccatcctgcaacccgtatcttgcgttcgcagccatattggcatccgggcttgacggggtaaagaataagatcgatcctggtgaaccgatcgaagagaacatctacgagatggatttccatgagataaccgacgccggcatcgatacgcttccgacaagcctcagtctcgcactcgattacctggaatctgatgcggtggtgcggtcggctcttggcgagcatgtgtacacagcgttcatgcgggttgctgctgcggaatgggaggagtatcgggttcaggtgcaccagtgggaactggatcggtatctgcaactgttctga

SEQ ID NO: 101620 - protein, 444 aa, uncultured archaeon GZfos31B6
MILMTANEDVLGMIAENNIKFIRLQFVDVLGIVKNVAIPAAQMKKALDVGISFDGSSIEGFARIQESDMVLKPDPETFRILPWKADEGKIAGIVCDVCLPDGTPFHGCPRYALTRAITEAEKMGYVMNTGPELEFFLFEKEDGIPTTTPHDSGGYFDFPPVDLAEDIRRDIVIALEEMDFEIEASHHEVACGQHEIDFKYSDALTTADKVVTFKYVTKTIATNKNLHATFMPKPVFGTSGSGMHINTSLFNKNNENVFFSPDDDHGISDTARYFIGGLLAHIKAVTAITNPLVNSYKRLVSGYEAPVYITWSWANRSSLIRVPAARGSGTRIELRSPDPSCNPYLAFAAILASGLDGVKNKIDPGEPIEENIYEMDFHEITDAGIDTLPTSLSLALDYLESDAVVRSALGEHVYTAFMRVAAAEWEEYRVQVHQWELDRYLQLF

SEQ ID NO: 101621 - DNA, 1659 bp, Enterobacter agglomerans
  CDS (223)..(1632): transl_table=11
gcgctgaagatttcctgcgctcttccggcatcgctgataccgtactgtttggaccagaaccagaattcgctttatctaaatcaagcgtaaacgccagacagatgtcggttgaagagcgtgccggaagaggttggtcagggagttgttttcccgcaacgtattccggaaacgacgtttcctcgccatgtagataatgaaagaccatttccaggagagttgagtatgtccgctgaacacgttctctcgatgatgaacgagcatgaagttaagtttgttgacctgcgttttaccgataccaaaggtaaagaacagcacgttacgatccctgctcaccaggttaacgctgacttcttcgaagaaggcaaaatgttcgatggttcgtctattggcggctggaaaggcattaacgaatcagacatggtgctgatgcctgacgccaccacggcggtcatggatcctttcttcgaagattctacgctgatcatccgttgtgacatcctcgagccaggcaccatgcagggctacgaccgcgatccacgctctatcgctaagcgcgctgaagatttcctgcgctcttccggcatcgctgataccgtactgtttggaccagaaccagaattcttcctgttcgatgacatccgtttcggctcatcgacgtccggttcacacgttgctatcgacgatatcgaagcggcatggaacaccggtaaagagtacgaaggcggtaacaaaggtcaccgtccaggtctgaaaggcggctacttcccggttccaccggttgactcatcacaggacatccgttctgccatgtgtctgaccatggagcagatgggcctggttgttgaagcgcatcaccacgaagtggcgaccgcgggtcagaacgaagtggcaacccgcttcaataccatgaccaaaaaagcggacgaaattcagatttacaaatatgtggttcacaacgttgcgcatgcttacggcaaaaccgcgacctttatgccgaagcctatgtttggcgacaacggttcaggcatgcactgccatatgtcactctccaaaggtggccagaacctgtttgccggcgataagtacggcggcctgtctgaaatggcgctgttctacatcggcggtatcatcaagcacgctaaagcgatcaacgccctggcgaacccgaccaccaactcttacaagcgtctggtcccgggttacgaagcaccggttatgctggcttactctgcccgtaaccgttcagcctcaatccgtattccggttgttgccagcccgaaagcgcgtcgtatcgaagcgcgcttcccggatccagcggctaacccatacctggcgttcaccgcactgctgatggctggcctggatggcatcatcaacaaaatccatcctggcgatgcgatggacaaaaacctgtatgacctgccaccggaagaagaagctgagattccaaaagttgcaggctctctggaagaagcgctgaatgcactgaacgaagaccgcgagttcctgacccgcggcggagtattcactgacgaatcgatcgatgcttacatcgaactgcgtaaagcagagatggatcgcgttcgcatgacgccacacccggttgagttcgagctctactacagcgtttaactggtcagacgttttttgttgccgtgg

SEQ ID NO: 101622 - protein, 469 aa, Enterobacter agglomerans; identical to SEQ ID NO: 32264

SEQ ID NO: 101623 - DNA, 1461 bp, Acetobacter diazotrophicus
  CDS (1)..(1461): transl_table=11
atggcgaaaaaagccccgagttcagctccgaccacgactccgtccccatcggcggaggctgttgccaaggtattcagcctgatccaggaacattccgtggaactggtggacctgcgcttcacggacccgcgcggcaagtggcaccacaccacgcagcatatctcgacgatcgagcaggacacgttccgcgacggcttcatgttcgacggatcgtccatcgtcggctggaaggccatcaacgagagcgacatggtgctgctgcccgacccgacgacggcggtcatggacccgttctcggcgaagccgcagctgatcctgatctgcgacatcatcgagccctcgaccgggcagttctacaaccgcgacccccgcgccaccgccaagctggccgaggcctacctgaagtccaccggcctgggcgacacggcgtttttcggtccggaagccgaattcttcgtcttcgacagcgtcaagttcggcacgggcccgaatttcggcatctaccagcttgacagcatcgaggggcccggcgcctcgctgaaggactatcccgagggcaacatgggccatcgcccgacggtgaagggcggctatttccccgtcccgccggtcgacagcgaaaacgacctgcgcgccgagatgctgtccacgatgggcgagatgggcctgccgatcgaaaagcatcaccacgaggtcgcgcagtcgcagcacgagttgggcaccaagttcgcgacgctggtgaagtccgccgacttcatgcagatctacaaatactgcgtgcacaacgtcgcccattcctacggcaagtccgcgacgttcatgccgaagccgatctatggcgacaacggatcgggcatgcacgtccaccagtcgatctggaagagcggcaagccggtcttcgccggcaacggctatgccgacctgtcggaccaggcgctgtattacatcggcggcatcatcaagcacgccaaggcgctgaacgccttcaccaacccgtcgaccaattcctacaagcgcctgatcccgggcttcgaggcgccggtgctgctggcctattcggcgcgcaaccgctcggcgtcctgccgcatcccgtatgcgaccagcccgaaggccaagcgcgtcgaggtccgcttccccgacccgaccgccaacccctacctggcgttcgcggccatgctgatggccggcctggacggcatcaagaacaagatccatccgggcgacgccatggacaaggatctgtacgacctgccgcccgacgagctgaagcagatcccgaccgtctgcggatcgctgcgcgaggcgctggaggccctgacggccgatcatgagttcctgctggccggcggcgtgttcaccaaggaccagatcgagagctatatcgacatcaagtggcaggaagtgttcaagttcgaacacaccccgcacccggccgagttcgagatgtactactccgtctga

SEQ ID NO: 101624 - protein, 486 aa, Acetobacter diazotrophicus
MAKKAPSSAPTTTPSPSAEAVAKVFSLIQEHSVELVDLRFTDPRGKWHHTTQHISTIEQDTFRDGFMFDGSSIVGWKAINESDMVLLPDPTTAVMDPFSAKPQLILICDIIEPSTGQFYNRDPRATAKLAEAYLKSTGLGDTAFFGPEAEFFVFDSVKFGTGPNFGIYQLDSIEGPGASLKDYPEGNMGHRPTVKGGYFPVPPVDSENDLRAEMLSTMGEMGLPIEKHHHEVAQSQHELGTKFATLVKSADFMQIYKYCVHNVAHSYGKSATFMPKPIYGDNGSGMHVHQSIWKSGKPVFAGNGYADLSDQALYYIGGIIKHAKALNAFTNPSTNSYKRLIPGFEAPVLLAYSARNRSASCRIPYATSPKAKRVEVRFPDPTANPYLAFAAMLMAGLDGIKNKIHPGDAMDKDLYDLPPDELKQIPTVCGSLREALEALTADHEFLLAGGVFTKDQIESYIDIKWQEVFKFEHTPHPAEFEMYYSV

SEQ ID NO: 101625 - DNA, 1525 bp, Blumeria graminis
  CDS (28)..(1491)
caatacgggctttcaattgtctcaaaaatgtcgcaggtagatgtcgaaaatatcacagtagaagcgttgcctaagctccttgagaccgattcaagagttaaagttgctggaatcgacgcagatggtatcctgcgaggcaaggtcatttccaaagataaattcctgggcgtggctgctgatggcttcggcttctgctcagtcctctttggctgggatatgcatgaccgcatgtactccaaggagttgaaaatatgcagtgcaagaaatggttgtaacgacatacttgcgcgtcctgatcttagtacattcagaaggattccatgggaagacaacatcccattctttctagttacattcatcgacccagtcactgttaagccaatcattgcttgccctcgtggtctattgaaatgtactattaacaatctcaaaactcaaggaattcaagccatggcgggagtggaaatcgaattctctcaatttaagctaccatctgaaatttcaggcgcccagtcgaaaaatgtatccatagcttcattcttgaaggatcataatatcaacgccttagaaccattgactgatggcatgtttggttacagtctaactcgaatggcacaaaataaagaatatttttacagtatttttgatacttgtgagaaattcagatgtgggattgaaagctggcatactgagagcggtcctggagtttttgaagctgccttgaaattctcagaaattcagcaaatggccgacaaggctaccttgttcaaatatctggtaaaatcgatagctataccgtatggcataacaccctgtttcatggctaaaccacggcaagggatgctaggaaatagtggtcatatacatatctctttgatcgataacaacgggaataatctatttgcgcgtgcggcaagagatgagggagccaaatatcaagatattgcgcacctctctgatttaggacggcagtttcttgctggtatcttggatggtttaacagacatcatgcccatgctggctcccaatatcaactcatacaagcgtcttgtcgaaaacttctgggcacctgtcacagtttcttggggtctggaacatagggcagcgtcaattcgagtaattgcgccgccaacctctaaatctggagctacgcgaatcgaagtgcgagtacctggtgctgatatcaacccatcttacgccctagctgccattttagcccttggttggagaggagtagagaaaaagctagaaatcagtattcccccattacagactggtcttaatgttggagaaacatccgattccgggatacgacttgccaaaagcttaagagaagcaactgagattttcatgagacccgagagtattgctagggaagtttttggaaatgattttgtcgatcattatggaggtacgcgagagaatgagtatcgattatgggatgaagctgtaactgactgggaaacacaacgctacattgagactgtgtgatagaatagagaaacatgtttcttaacttatggtg

SEQ ID NO: 101626 - protein, 487 aa, Blumeria graminis; identical to SEQ ID NO: 32268

SEQ ID NO: 101627 - DNA, 1284 bp, Corynebacterium glutamicum; identical to SEQ ID NO: 74427
  CDS (1)..(1284): transl_table=11

SEQ ID NO: 101628 - protein, 427 aa, Corynebacterium glutamicum; identical to SEQ ID NO: 74428

SEQ ID NO: 101629 - DNA, 1410 bp, Shewanella violacea
  CDS (1)..(1410): transl_table=11
atgtcagctgaatcagttttacaacaactcaaagaattagaagttaagtttgttgatctacgctttaccgatacccgtggtaaagaacagcacgtctcaatcccttcacatcaggtcgatgaagacttttttgaagacggcaagatgtttgatggttcatctattaatggttggaagggaatcaacgaatcagacatggtcttgatgccagatcctgcaagcttcgtactggatcctttcactgcagagacaacggccaacattcgttgtgacatccttaaccctggtactatgacaggttataaccgtgacccacgctctatcgccaagaaagccgaagagtacctacgttctaccggcatagcagatacagttttgctcggccctgaacctgagttcttcctgtttgatgacgttaaatatggcgccgatatgtcaggttgtttctacaaggtcgatgccgaagaagctgcctggaactcaggtaccagctatgaaggcggtaacaagggtcaccgtccaagcgttaaaggtggttacttccctgtagcaccggtcgactcttcacaagacatacgttcagccatgtgtctggttctagaagagatgggtcaggtcgttgaagcacatcaccacgaagtggcaactgccggtcaaaacgagatcgcgactcgcttcaacacactaacactcaaggccgatgaagttcaggtgcttaaatatgtcgttcataacgtagctcacgcttatggtaagacagctacctttatgcctaagcctatcgttggcgacaatggtagcggcatgcacgttcatatttcgctggccaaagatggcaccaacctattcgctggtgacaagtacggcggattgagcgagatggcaatctattttatcggtggagttatcaagcatgctcgcgccatcaacgccttctctaacccagccacaaactcgtacaagcgtctgatcccacatttcgaaacgcctgtaatgttggcatactctgcagctaaccgcagtgcttcgattcgtatacctttggttccaagccctaagggacgtcgtatcgaactaagattcggtgacccaatggctaacccatatttggcattctcggctatgctgatggctggcctagacggtatccagaacaagatccatccgggtgaagccatggacaaagatctatatgacctgcctcctgaagaggctgctgaaatcccaacagtggctacttcacttgagaatgcactggaatgtctggatgcagatcgtgaattcctgactcgcggcgaagtattcagcaacgatttcatcgattcatatatcacgctgaaatctgaagatgttgagcgtgttaatcagactactcaccctgtcgagttcgagctttattacagcttgtaa

SEQ ID NO: 101630 - protein, 469 aa, Shewanella violacea
MSAESVLQQLKELEVKFVDLRFTDTRGKEQHVSIPSHQVDEDFFEDGKMFDGSSINGWKGINESDMVLMPDPASFVLDPFTAETTANIRCDILNPGTMTGYNRDPRSIAKKAEEYLRSTGIADTVLLGPEPEFFLFDDVKYGADMSGCFYKVDAEEAAWNSGTSYEGGNKGHRPSVKGGYFPVAPVDSSQDIRSAMCLVLEEMGQVVEAHHHEVATAGQNEIATRFNTLTLKADEVQVLKYVVHNVAHAYGKTATFMPKPIVGDNGSGMHVHISLAKDGTNLFAGDKYGGLSEMAIYFIGGVIKHARAINAFSNPATNSYKRLIPHFETPVMLAYSAANRSASIRIPLVPSPKGRRIELRFGDPMANPYLAFSAMLMAGLDGIQNKIHPGEAMDKDLYDLPPEEAAEIPTVATSLENALECLDADREFLTRGEVFSNDFIDSYITLKSEDVERVNQTTHPVEFELYYSL

SEQ ID NO: 101631 - DNA, 1734 bp, Medicago truncatula
  CDS (43)..(1407)
aagcaataggagtttgactttgagcactttcattgagagaatatggatttgattgagttgagtaaagcagtggaaaatgttgaacttgtggataccttagacactgatgtttcatttgttcgtatattatgggttgataattcaggacaacacagatgtcgtgctattcctagaaagcgtttctatgatgttgttactaagaatggtgttggtttagcatttgtgagtatggtaatgacttcttttttggatggatctccagctggttctggtttaggttcagttggtgaagcaagattaacacctgatttatctactaaaaggacaattccttggagcaagcaagatgaaattgttttaggtgatttgaatctacaacctggtcaagcatgggaatattgcccaagagaggccttaagaagagtctccaaaattctcaaagatgaatttgacttggcaatgaatgcaggatttgagaatgagttttttctcttgaagagcgcaataagggaagggaaagaagaatggatacaatttgactcgaccccttactgctcctcgtcagcatttgatgttgcttccccaatacttcgtgaagttacttctgctttacattcaatgggaattccagtagaacagttacatgctgaagctggaaaaggtcaatttgagctggttttgggacatatggtttgtacaaaatccgcagacaacttagtttacacacgtgaaactgttagggcaattgctagaaaacatggcttgcttgctacttttgttccaaagtacacattagatgatctgggttctggatgccatgttcatctaagcttgtggcagaatggccgaaatgtatttatggcatctgatgaatcatcaaagtatggaatatcaactttgggaaaagaatttatggctggagttctacatcatcttccttctattttgtcatttgtggcaccacttcctatcagttatgatcgattgcagccgaacacatggagtggtgcatacatgttctggggaaatgaaaatagggaggctccattgcgtgcttcaactcctcctggaactcctaatggttttgcgagtaattttgagtttaaatcatttgatggttgtgcaaacccatacttaggcttatctgctataattgctgctggcattgatggtctacgtaggcatctttcacttcctgaacctgttgatacaaatccagatccagaaaaacttcagagattaccaaaatcactttcagaatctttggaagctcttcataaggctgactttctagaggagtttattggtgacaagttgctgactgccataaaggcgattcgaaaggctgaaattgatcattactcgaagaacaaggatgcatacaagcaactcatacaccgttattgaactgcttaatgtcatgttacatttatttggttgtagatgttctctcaaaataaaattacaactcacatgatagaacatgtgcaacggaataaaagcaacatgacaccgtttccatccgatgcaaatgcactattacaatccacgtcacaatagaaattacaacatagtcttctccccctcaataattttatgtagtattccttgcttagctttattctcttcttgcggatgtaataatatgtgaactaattttagaaaatttcaacctaagtcagcaataaaggaaattgaaagtgccaaaaaaaaaaaaaaaaaaaaaaaaaaaaa

SEQ ID NO: 101632 - protein, 454 aa, Medicago truncatula
MDLIELSKAVENVELVDTLDTDVSFVRILWVDNSGQHRCRAIPRKRFYDVVTKNGVGLAFVSMVMTSFLDGSPAGSGLGSVGEARLTPDLSTKRTIPWSKQDEIVLGDLNLQPGQAWEYCPREALRRVSKILKDEFDLAMNAGFENEFFLLKSAIREGKEEWIQFDSTPYCSSSAFDVASPILREVTSALHSMGIPVEQLHAEAGKGQFELVLGHMVCTKSADNLVYTRETVRAIARKHGLLATFVPKYTLDDLGSGCHVHLSLWQNGRNVFMASDESSKYGISTLGKEFMAGVLHHLPSILSFVAPLPISYDRLQPNTWSGAYMFWGNENREAPLRASTPPGTPNGFASNFEFKSFDGCANPYLGLSAIIAAGIDGLRRHLSLPEPVDTNPDPEKLQRLPKSLSESLEALHKADFLEEFIGDKLLTAIKAIRKAEIDHYSKNKDAYKQLIHRY

SEQ ID NO: 101633 - DNA, 1410 bp, Enterobacter gergoviae
  CDS (1)..(1410): transl_table=11
atgtccgctgaacacgttttgacgatgctgaacgagcacgaagtgaagtttgtcgatctgcgcttcaccgataccaaaggtaaagaacagcacgtcacgattccgtctcatcaggtaaatgccgaattcttcgaagaaggcaaaatgtttgatggctcctcgatcggtggctggaaaggtatcaacgaatctgacatggtcctgatgccggacgcttccaccgcggtcattgacccgttctacgaagaaccgaccctgatcatccgctgcgatatcctcgagccaggcaccctgcagggctatgaccgtgacccgcgctccatcgcgaaacgcgctgaagagtacctgcgcgccaccggcatcgctgacaccgtcctgttcgggccagaaacagaattcttcctgttcgacgacatccgttttggcgcctctatctccggctcccatgtcgcgatcgatgacatcgaaggtgcgtggaactcctccaccaaatacgaaggcggtaacaaaggtcaccgtccgggcgtgaaagggggttacttcccggttccgccagtagactcttctcaggatatccgttccaccatgtgtatgatcatggaagagatgggcctggttgttgaagctcaccaccacgaagtggctaccgcaggtcagaacgaagtggcaacccgcttcaacaccatgaccaaaaaagcggacgaaattcagatttacaaatacgttgttcacaacgtcgctcaccgcttcggtaaaaccgcgacctttatgccgaaaccaatgttcggcgataacggttccggcatgcactgccatatgtctctggcgaaaaacgggactaacctgttctccggcgacaaatacgcaggtctgtctgagcaggcgctgttctacatcggcggcgtaatcaaacacgctaaagctatcaacgccctggcgaacccgaccaccaactcctacaagcgtctggtcccgggttacgaagcgccggttatgctggcttactctgcgcgtaaccgctctgcctccatccgtattccggtggtgacctctccgaaagcgcgtcgtatcgaagtgcgcttcccggacccggctgccaacccgtacctgtgctttgcggcgctgctgatggctggccttgatggtatcaagaacaaaatccatccgggcgaagcaatggacaaaaacctgtatgacctgccgccggaagaagcgaaagagatcccgcaggttgcaggctctctggaagaagccctgcaggctctggatgctgaccgtgagttcctgacggctggcggcgtgttcaccaatgacgctatcgatgcttatatcgccctgcgtctggaagagaacgaccgcgtacgcatgactccgcatccggttgagttcgaactgtactacagcgtctaa

SEQ ID NO: 101634 - protein, 469 aa, Enterobacter gergoviae
MSAEHVLTMLNEHEVKFVDLRFTDTKGKEQHVTIPSHQVNAEFFEEGKMFDGSSIGGWKGINESDMVLMPDASTAVIDPFYEEPTLIIRCDILEPGTLQGYDRDPRSIAKRAEEYLRATGIADTVLFGPETEFFLFDDIRFGASISGSHVAIDDIEGAWNSSTKYEGGNKGHRPGVKGGYFPVPPVDSSQDIRSTMCMIMEEMGLVVEAHHHEVATAGQNEVATRFNTMTKKADEIQIYKYVVHNVAHRFGKTATFMPKPMFGDNGSGMHCHMSLAKNGTNLFSGDKYAGLSEQALFYIGGVIKHAKAINALANPTTNSYKRLVPGYEAPVMLAYSARNRSASIRIPVVTSPKARRIEVRFPDPAANPYLCFAALLMAGLDGIKNKIHPGEAMDKNLYDLPPEEAKEIPQVAGSLEEALQALDADREFLTAGGVFTNDAIDAYIALRLEENDRVRMTPHPVEFELYYSV

SEQ ID NO: 101635 - DNA, 1410 bp, Bradyrhizobium japonicum; identical to SEQ ID NO: 32271
  CDS (1)..(1410): transl_table=11

SEQ ID NO: 101636 - protein, 469 aa, Bradyrhizobium japonicum; identical to SEQ ID NO: 32272

SEQ ID NO: 101637 - DNA, 1200 bp, Drosophila melanogaster
  CDS (1)..(1200)
atggcactacgcgtggcaggactcttcctgaagaaggagctggtggctcccgcaacacagcagctgcgtctgctgcgtactggcaataccacccgctcccagttcttggccaactcccccaacacggctctagacaagagcattctgcagaggtaccgcaacctggaaacgccggccaatcgagtgcaggctacttacttatggatcgacggtaccggcgagaacattcgcctcaaggatcgcgttttggacaaagtacccagctccgtggaggacttgccggattggcagtacgacggcagttccacctaccaggcccatggcgagaactcggacaccacgctcaagccacgcgccatatatcgcgatccctttaagccgggaaagaacgacgtaattgtcctgtgcgacacctacagcgccgacggcaagccgacggcgtccaacaagcgtgccgcgttccaggcagccattgacctaattagcgatcaggagccctggttcggcattgagcaagaatacactttattagacgtggacggacgtcccttcggctggccggagaacggtttcccagccccacaaggtccttactactgcggcgtgggagctgaccgtgtgtacgctcgcgatcttgtggaggcccacgtcgtggcctgcctgtatgctgggatcgacttcgccggcaccaatgccgaggtaatgcccgcgcagtgggagttccaaattggtccagccgggattaaggcatgtgacgatttatgggtgtcgcgatatattttgcagcgcatagctgaggagtatggcgtagtggtcacctttgaccccaaaccgatggagggtcagtggaacggagccggcgcgcataccaacttttccacaaaggagatgcgtgctgatggcggaatcaaggccatcgaggaagctatcgagaagctgagcaagcgccacgagcggcacatcaaggcatacgaccccaaggaaggcaaagacaatgaacggcgcctcgtgggacgtcttgagacttctagcatcgataagttttcttggggcgtggccaaccgggccgtaagtgtgcgagtgccgcgtggcgttgcgacggccggcaaaggatacctcgaagaccggcggccaagctccaactgtgatccctacgccgtgtgcaacgccattgttcgcacctgcctgctcaacgagtag

SEQ ID NO: 101638 - protein, 399 aa, Drosophila melanogaster
MALRVAGLFLKKELVAPATQQLRLLRTGNTTRSQFLANSPNTALDKSILQRYRNLETPANRVQATYLWIDGTGENIRLKDRVLDKVPSSVEDLPDWQYDGSSTYQAHGENSDTTLKPRAIYRDPFKPGKNDVIVLCDTYSADGKPTASNKRAAFQAAIDLISDQEPWFGIEQEYTLLDVDGRPFGWPENGFPAPQGPYYCGVGADRVYARDLVEAHVVACLYAGIDFAGTNAEVMPAQWEFQIGPAGIKACDDLWVSRYILQRIAEEYGVVVTFDPKPMEGQWNGAGAHTNFSTKEMRADGGIKAIEEAIEKLSKRHERHIKAYDPKEGKDNERRLVGRLETSSIDKFSWGVANRAVSVRVPRGVATAGKGYLEDRRPSSNCDPYAVCNAIVRTCLLNE

SEQ ID NO: 101639 - DNA, 1719 bp, Frankia alni; identical to SEQ ID NO: 32273
  CDS (198)..(1622): transl_table=11

SEQ ID NO: 101640 - protein, 474 aa, Frankia alni; identical to SEQ ID NO: 32274

SEQ ID NO: 101641 - DNA, 1410 bp, Rhizobium leguminosarum bv; identical to SEQ ID NO: 74431
  CDS (1)..(1410): transl_table=11

SEQ ID NO: 101642 - protein, 469 aa, Rhizobium leguminosarum bv; identical to SEQ ID NO: 74432

SEQ ID NO: 101643 - DNA, 1410 bp, Rhizobium meliloti; identical to SEQ ID NO: 74433
  CDS (1)..(1410): transl_table=11

SEQ ID NO: 101644 - protein, 469 aa, Rhizobium meliloti; identical to SEQ ID NO: 74434

SEQ ID NO: 101645 - DNA, 1410 bp, Streptomyces filamentosus; identical to SEQ ID NO: 32275
  CDS (1)..(1410): transl_table=11

SEQ ID NO: 101646 - protein, 469 aa, Streptomyces filamentosus; identical to SEQ ID NO: 32276

SEQ ID NO: 101647 - DNA, 1410 bp, Streptomyces viridochromogenes; identical to SEQ ID NO: 32277
  CDS (1)..(1410): transl_table=11

SEQ ID NO: 101648 - protein, 469 aa, Streptomyces viridochromogenes; identical to SEQ ID NO: 32278

SEQ ID NO: 101649 - DNA, 1308 bp, Rhizobium leguminosarum bv; identical to SEQ ID NO: 32279
  CDS (1)..(1308)

SEQ ID NO: 101650 - protein, 435 aa, Rhizobium leguminosarum bv; identical to SEQ ID NO: 32280

SEQ ID NO: 101651 - DNA, 1308 bp, Rhizobium meliloti; identical to SEQ ID NO: 32281
  CDS (1)..(1308): transl_table=11

SEQ ID NO: 101652 - protein, 435 aa, Rhizobium meliloti; identical to SEQ ID NO: 32282

SEQ ID NO: 101653 - DNA, 1410 bp, Aquifex aeolicus
  CDS (1)..(1410): transl_table=11
atgccaaagtacacaccagaagaagtcttagaccttattcagaaggaaggggttcagtacgttgacctgaggttttctgaccccttcggtcagtggcagcacttaacgatccccgcctacgaaatatctaaggaaacttttgaagtaggcaggggatttgacgggtcttccatcaggggatggcagtccatcaacgagtctgacatgctcgcaaaacctgaccccaataccgcgtttatagacccatttatagagccaaagacgctcgtaatgatttgtgatatctacgatcccgttacgggtgaaaggtatggaagggacaccaggtacatagcacaaaaagctgaacagtacctcaagcaaactggaataggagataccgcgtactttggacccgaagcggagttcttcatatttgacagtgtggagtttggcaccgctgctaattacgccttctggagagtagactcagaagaaggatggtggaacagagaagtaccctcttccggatataagataccccacaagagaggatacttccccgcaccgcccgttgacaagatgatgcaactgagaaacgaaatggtttctataatgtcggacctcggtataatagttgagctccaccaccacgaagttgcaacagctggacagggcgaaatagacataaggtacgacagccttttaaatcaggcggataaactcttcctctacaagtacatagttagaatggttgccgcaaaacacggaaagtacgcaacctttatggctaaggttcttccaaacgacaacggttctggaatgcacacccacttctccatatggaaaaacggagaaaacctctttgcaggaagcgagtacgctggactttcaaagacagcactctacgccataggaggtatactcaaacacggtcccgcaatagcggcgtttacaaaccccacagttaactcttaccacaggctcgtacccggatacgaagcacccgtaagattagcctactccgctaggaacagatctgcggctataagaatacccatgtactctcaaaatccgaaggcaaagaggatagaagtaaggttcccggacgctacatccaacccttaccttgcgtttgcggctatactcatggctgcaatagatggaattgagaacgaaatagaccctggtgaaccttttgacaaggacatatactccctacctcccgaagagctcgaaggaattcctcaactacccggttcccttgaagaagccttaaaggctctggaggaagattacgagttcctcttaaaaggaaacgtgttcacagaagagttcatacagctctggatagagtccaagagagccgaaatagacgaactcaggtttataccccaccccaaagaatttgaactttactgggacatttaa

SEQ ID NO: 101654 - protein, 469 aa, Aquifex aeolicus
MPKYTPEEVLDLIQKEGVQYVDLRFSDPFGQWQHLTIPAYEISKETFEVGRGFDGSSIRGWQSINESDMLAKPDPNTAFIDPFIEPKTLVMICDIYDPVTGERYGRDTRYIAQKAEQYLKQTGIGDTAYFGPEAEFFIFDSVEFGTAANYAFWRVDSEEGWWNREVPSSGYKIPHKRGYFPAPPVDKMMQLRNEMVSIMSDLGIIVELHHHEVATAGQGEIDIRYDSLLNQADKLFLYKYIVRMVAAKHGKYATFMAKVLPNDNGSGMHTHFSIWKNGENLFAGSEYAGLSKTALYAIGGILKHGPAIAAFTNPTVNSYHRLVPGYEAPVRLAYSARNRSAAIRIPMYSQNPKAKRIEVRFPDATSNPYLAFAAILMAAIDGIENEIDPGEPFDKDIYSLPPEELEGIPQLPGSLEEALKALEEDYEFLLKGNVFTEEFIQLWIESKRAEIDELRFIPHPKEFELYWDI

SEQ ID NO: 101655 - DNA, 1476 bp, Archaeoglobus fulgidus; identical to SEQ ID NO: 74435
  CDS (1)..(1476): transl_table=11

SEQ ID NO: 101656 - protein, 491 aa, Archaeoglobus fulgidus; identical to SEQ ID NO: 74436

SEQ ID NO: 101657 - DNA, 1407 bp, Azospirillum brasilense
  CDS (1)..(1407): transl_table=11
atgtccgacatcagcaaggtcttcgacctgatcaaggaacacgacgtcaagtacgtggacctccgcttcaccgacccgcgcggcaagctgcaccacaccgctcagcacgtctcgaccatcgacgaggacgtgtttgaagacggcatcatgttcgacggctcctcgatcgccggttggaaggcgatcaacgagtcggacatgatcctccagctcgacccgaccaccgccgtcatggacccgttctcggcccagccgacgctgaacatcctctgcgacgtgtacgagccgtcgaccggccagccctacgcccgctgcccgcgcggtatcgcgaaggccgccgagaagtacatggcgtcggccggcatcgcggacaccgcctacttcggcccggaagccgagttcttcgtcttcgacgacgtcaagttcaaggtcgagatgaacaaggtgtcctacgagttcgactcggaggaaggcccgtacacctcggacaaggactatgaggacggcaacctgggccaccgcccgggcgtcaagggcggctacttcccggtcgctccggtcgacagcggctcggacctgcgcgccgagatgctgagcgtgctcgccgagatgggcgtgccggtcgagaagcaccaccacgaggtggccgcttcgcagcatgagctgggcatcaagttcgacacgctggtccgcaccggcgacaacatgcagtactacaagtacgtcgtgcacaatgtcgcccacgcctacggcaagaccgcgaccttcatgccgaagcccgtcttcggcgacaacggctcgggcatgcacatgcaccagtcgatctggaaggaaggccagccgctgttcgccggcaaccagtacgccgacctgtcggaactggcgctgtactacatcggcggcatcatcaagcacgccaaggcgctgaacgccttcaccaacccgacgaccaactcgtacaagcgtctggtcccgggctacgaggctccggttctgctggcctactcggcccgcaaccgttcggcctcctgccgcatcccgtacgtcgcctcgccgaagggcaagcgcgtcgaggtccgcttcccggacccgtcggccaacccgtacctggccttcgccgccctgctgatggccggtctggacggcatccagaacaagatccatccgggcgaggcgatggacaagaacctgtacgacctgccggccgaagagctggccaaggttccgacggtttgcggctcgcgcgaggccctggacagcctgaaggccgacagcgccttcctgcagaagggcgacgtgttcaccaaggacatgatcgagtcctacatcgacctgcgcaccgaggagctgctggccttcgagaccatgccgcacccgatcgagtacaagatgtactactcggtctga

SEQ ID NO: 101658 - protein, 468 aa, Azospirillum brasilense
MSDISKVFDLIKEHDVKYVDLRFTDPRGKLHHTAQHVSTIDEDVFEDGIMFDGSSIAGWKAINESDMILQLDPTTAVMDPFSAQPTLNILCDVYEPSTGQPYARCPRGIAKAAEKYMASAGIADTAYFGPEAEFFVFDDVKFKVEMNKVSYEFDSEEGPYTSDKDYEDGNLGHRPGVKGGYFPVAPVDSGSDLRAEMLSVLAEMGVPVEKHHHEVAASQHELGIKFDTLVRTGDNMQYYKYVVHNVAHAYGKTATFMPKPVFGDNGSGMHMHQSIWKEGQPLFAGNQYADLSELALYYIGGIIKHAKALNAFTNPTTNSYKRLVPGYEAPVLLAYSARNRSASCRIPYVASPKGKRVEVRFPDPSANPYLAFAALLMAGLDGIQNKIHPGEAMDKNLYDLPAEELAKVPTVCGSREALDSLKADSAFLQKGDVFTKDMIESYIDLRTEELLAFETMPHPIEYKMYYSV

SEQ ID NO: 101659 - DNA, 1407 bp, Azorhizobium caulinodans
  CDS (1)..(1407): transl_table=11
atgaagacggccaaggaagtcctcgacttcatcaagtcgaacgacgtgaaatacgtcgacctgcgcttcaccgatccgcgcggcaagtggcagcacgtgaccttcgacatcaccatggtcgacgaggacttcttcgccgaaggccaggccttcgacggctcgtccatcgccgctgaagccatcaacgagtccgacatgctcctcatgccggacgtcaccaccgcctgcgtcgatcccttcttctccgagaccaccctctcggtggtgtgcgacgtgctcgagccgaccaccggcgagccctacggccgcgacccgcgcggcatcgccaagaaggcgatggcctacctgcagtccaccggcatcggcgacaccgtgttcttcggccccgaggccgagttcttcatcttcgacgacgtgaagttcaaggccgacccgtacaacacgggcttcaagctggactccatcgagctgccgaccaacggcgacaccgattatgaaggcggcaacctcggccaccgcatcaagaccaagggcggctacttcccggtgcccccgctcgacagcgcccaggacatgcgctccgagatgctcgcctccatggccaagatgggcgccaaggtcgagaagcaccaccacgaggtggcttccgcccagcacgagctcggcctgaagttcggccagctcgtcaccatggccgaccacctgcaggtctataagtactgcatccatcaggtcgccaacatctatggcaagaccgcgaccttcatgccgaagcccgtctatggcgacaacggctcgggcatgcacgtccaccagtccatctggaaggaccgcaagccgctcttcgccggcgacaagtatgccgacctctcgcaggagtgcctgtggtacatcggcggcgtcatcaagcacgccaagtcgctgaacgccttcaccaacccgctgaccaactcctacaagcgtctggtcccgggctatgaggccccggtgctgctggcctattcggcccgcaaccgctcggcgtcctgccgcatcccctacacgaacaacccgaaggccaagcgcgtcgaggtccgcttccccgatccgggcgcgaacccctacctcgccttctcggccctgttcatggccggcatggacggcatcctgaacaagatcgatcccggttcggccatggacaaggatctgtacgatctgcccccggccgagctgaagcagatcccgaccgtctgctgctcgctccgcgaggcgctcgagtcgctcgccaaggaccacgactacctgctcaagggcgacgtgttccagaaggacttcatcgagtcctacatcgacctcaagatgcaggaagtcgctcgcttcgagatgaccccgcacccggtcgagttcgagatgtactactcggtctga

SEQ ID NO: 101660 - protein, 468 aa, Azorhizobium caulinodans
MKTAKEVLDFIKSNDVKYVDLRFTDPRGKWQHVTFDITMVDEDFFAEGQAFDGSSIAAEAINESDMLLMPDVTTACVDPFFSETTLSVVCDVLEPTTGEPYGRDPRGIAKKAMAYLQSTGIGDTVFFGPEAEFFIFDDVKFKADPYNTGFKLDSIELPTNGDTDYEGGNLGHRIKTKGGYFPVPPLDSAQDMRSEMLASMAKMGAKVEKHHHEVASAQHELGLKFGQLVTMADHLQVYKYCIHQVANIYGKTATFMPKPVYGDNGSGMHVHQSIWKDRKPLFAGDKYADLSQECLWYIGGVIKHAKSLNAFTNPLTNSYKRLVPGYEAPVLLAYSARNRSASCRIPYTNNPKAKRVEVRFPDPGANPYLAFSALFMAGMDGILNKIDPGSAMDKDLYDLPPAELKQIPTVCCSLREALESLAKDHDYLLKGDVFQKDFIESYIDLKMQEVARFEMTPHPVEFEMYYSV

SEQ ID NO: 101661 - DNA, 1950 bp, Azotobacter vinelandii
  CDS (478)..(1881): transl_table=11
gtcgaggttgtcccacacgcccgtcaccgccagctccggatccaggtcgcgcacgacggtgcggatgttcttcgccagttggcgaatgaagcgcttgcgcaccggcgggctcttgatggtgatttccgggaagaccttgacgatgagtttcatggaggctgcacgggccggtcaggcaaaagagggggcgggattatagcggatcttgttcaagacttgaccaactatcggcaaggcgcccacagcgcaccaaaatgaaacaaatcttctgacccaggcacataaacagagcagaaattttcgccagaatagccggtaccgggcaggcccgaccggcgaagaattcccctactccgccaaggtagtggcatgaaacttgctcccttgtggcgcggcttgccttggcggatgatcgccgcccggttttacccgaattcccgagggtcttttcgaggctctctccacctggaggacaatatgtcgaagtcgcttcaactgatcaaagaacatgacgtgaagtggattgatctccgcttcaccgacaccaaaggcaagcagcaacacgtaaccatgccggcgcgtgacgtggacgacgacttcttcgaatacggcaagatgttcgacggctcctccatcgccggctggaagggcatcgaagcctccgacatgatcctgatgccggacgacagcaccgccgtgctggatccgttcaccgaagagccgaccctgatcatcgtctgcgacatcatcgagccctcgaccatgcagggctacgatcgcgacccgcgcgccatcgcccgccgcgccgaggaatacctgaagtccaccggcatcggcgacaccgccttcttcggtccggagcccgagttcttcatcttcgacgaagtgaagtacaagtccgacatctccggctccatgttcaagatcttctccgaacaggctgcctggaacaccgacgccgacttcgaaggcggcaacaagggccatcgtccgggcgtcaagggcggctacttcccggttccgccggtcgaccacgaccacgaaatccgcaccgccatgtgcaacgccctggaagagatgggcctgaaggtcgaggttcaccaccacgaagtggccaccgccggccagaacgagatcggcgtcagcttcaacaccctggtggccaaggccgacgaagtgcagaccctgaagtactgcgtgcacaacgtcgccgacgcctacggcaagaccgtgaccttcatgccgaagccgctgtacggcgacaacggctcgggcatgcacgtgcacatgtccatcgccaaagacggcaagaacaccttcgccggcgaaggctatgccggcctgtccgacaccgccctgtacttcatcggcggcatcatcaagcacggcaaggcgctgaacggcttcaccaacccgtcgaccaactcctacaagcgtctggtccccggtttcgaagctccggtcatgctggcctactcggcccgcaaccgttccgcctccatccgcatcccctacgtcaacagcccgaaagcccgccgcatcgaagcgcgcttcccggacccgtcggccaacccctacctggccttcgccgcgctgctgatggccggcctggacggcatccagaacaagatccatcccggcgatgccgccgacaagaacctgtacgacttgccgccggaagaagccaaggaaatcccgcaggtgtgcggcagcctgaaggaggccctggaagaactggacaagggccgcgccttcctgaccaagggcggcgtcttctccgacgacttcatcgatgcctacctcgagctgaagagcgaagaggaaatcaaggtgcgcaccttcgtgcacccgctggaatacgacctgtactacagcgtctgatccagccggcgatactctggaaggcctcctcgggaggcctttcttttttgagtgatcgccataacgctt

SEQ ID NO: 101662 - protein, 467 aa, Azotobacter vinelandii; identical to SEQ ID NO: 74438

SEQ ID NO: 101663 - DNA, 1335 bp, Bacillus cereus; identical to SEQ ID NO: 32283
  CDS (1)..(1335): transl_table=11

SEQ ID NO: 101664 - protein, 444 aa, Bacillus cereus; identical to SEQ ID NO: 32284

SEQ ID NO: 101665 - DNA, 1335 bp, Bacillus subtilis; identical to SEQ ID NO: 32285
  CDS (1)..(1335): transl_table=11

SEQ ID NO: 101666 - protein, 444 aa, Bacillus subtilis; identical to SEQ ID NO: 32286

SEQ ID NO: 101667 - DNA, 1332 bp, Clostridium saccharobutylicum
  CDS (1)..(1332): transl_table=11
atggcaaaatacacaaaggaagatatcattaatttagtaaaagaaaacggcgtaaaatttataagacttcaatttactgatatctttggaacattaaagaatgtggcgattacagacaaacaattggaaaaagcattagataatgaatgtatgtttgatggatcatctattgatggttttgttagaattgaagaatcagacatgaatttaagacctaatttagatagttttgttatttttccatggagaccacaacaaggcaaagttgcaagattaatttgtgatgtatataagccagatggtacaccatttgaaggagatccaagacatgtcctaaagagagcaaatgcagatgcaaaagaattaggatatacaatgaatgttggaccagaatgtgaattcttcttatttgaaacagatgaaaatggcagagcaacaactaatactcaagataaagctggatattttgatttagcacctacagatttaggagaaaatgctagaagagacatgactttagctttagaagaaatgggattcgaaattgaagcatctcatcatgaagttgctgagggtcaaaatgaaattgactttaagtatggagatgcattaactacagctgataatattatgacatttaaactagttgttaaatctattgcacaaagacatggattacatgcatcgtttatgccaaaaccaatattcggaattaatggttctggaatgcatgtaaatatgtcattattcaaagatggaaaaaatgcttttgttgatgaaaatgataaaaatggattaagtaaagttgcttatcaatttatcgctggattattaaagaacattaaaggaatggctgctgtaactaatccattagttaactcatataagagattagtaccaggatatgaagcaccagtatatctagcttggtcttgcaaaaacagaacagcattaataagagtaccagcagctagaggtgcagggactagagtagaattaagatgtccagatccaagttctaatccatatttagtattagcatgtttattacaagcaggattagatggaattaaaaataatttacaaccacctgctgaagttgaagcaaacatttttgcaatgactgagcaagaaagaaaagaaaatggaattgataatctgccaaacaatttatatgaagcagtaaattacatgaaagaaaatgaattagctaaaaaagctttaggagatcatgtatatggaaattatgttgcaggaaaagcagcagaatgggatgattacagaacaaaagtacatgattgggaattagagaattatctaaataaatactaa

SEQ ID NO: 101668 - protein, 443 aa, Clostridium saccharobutylicum
MAKYTKEDIINLVKENGVKFIRLQFTDIFGTLKNVAITDKQLEKALDNECMFDGSSIDGFVRIEESDMNLRPNLDSFVIFPWRPQQGKVARLICDVYKPDGTPFEGDPRHVLKRANADAKELGYTMNVGPECEFFLFETDENGRATTNTQDKAGYFDLAPTDLGENARRDMTLALEEMGFEIEASHHEVAEGQNEIDFKYGDALTTADNIMTFKLVVKSIAQRHGLHASFMPKPIFGINGSGMHVNMSLFKDGKNAFVDENDKNGLSKVAYQFIAGLLKNIKGMAAVTNPLVNSYKRLVPGYEAPVYLAWSCKNRTALIRVPAARGAGTRVELRCPDPSSNPYLVLACLLQAGLDGIKNNLQPPAEVEANIFAMTEQERKENGIDNLPNNLYEAVNYMKENELAKKALGDHVYGNYVAGKAAEWDDYRTKVHDWELENYLNKY

SEQ ID NO: 101669 - DNA, 1416 bp, Fremyella diplosiphon
  CDS (1)..(1416): transl_table=11
atgacaaccccacaagaagtcttgaaattgattcaagaccaaaaaattcagatgattgatctgaaattcatcgatacaccagggacatggcagcacctaaccgtgtactacaaccaaatcgatgaaagttcattcactgatggcgtacctttcgacggttccagtattaggggttggaaaggcatcgaagaatcagacatgacaatggttttagatccaaacactgcctggatcgacccattcatgaaagagccaactctaagtataatttgtagcattaaagaacctcgcacaggcgaatggtataaccgttgtccccgcgtgattgcccaaaaagccatagactatttagtttctactggccttggtgacacagctttctttggcccagaagctgagttctttatctttgatgatgcccgttttgaccaaactgccaactcaggttattactacgtagactccgtagaaggtcgttggaattctggtaaagatgaaggccctaacctcgcttacaaaccacgcttcaaagaaggttacttcccagttgcgcccactgatactttccaggatatgcgtacagaaatgctgttgacgatggcagcttgcggcgtacccattgaaaaacaacaccatgaagttgctactggtggtcagtgcgaattgggtttccgctttggtaagctcatcgaagctgctgactggttgatgacttacaagtatgtcatcaagaacgttgccaagaaatatggtagaaccgtgacctttatgccaaaaccaatttttggtgataatggttcggggatgcactgtcaccagtctatttggaaggatggtaaacctctatttggaggtgataagtatgctggtttgagtgacatggcactgtattacatcggtggtatcctcaaacacgcaccagcattgttgggcatcacaaaccccaccaccaactcttacaagcgcttagtacctggttatgaagcacctgttaacttggcttactcccaaggtaaccgttctgcttctgtgcggattcctctgtctggtactaaccccaaagctaaacgtttagagttccgttgcccagatgctacctctaacccttacttggcatttgctgctatgctttgtgctggtattgatggtatcaagaataaaatccatcctggtgaacccttagacagaaatatctatgaactttctccagaagaactagcaaaagttccttctactcctggttctttggaactggcattagaagcactggaaaacgatcacgccttcttgactgaaagcggtgtattcacagaagactttatccaaaactggatcgagtacaagctagttaacgaagttaagcagctacaattacgtcctcatccctacgaattttacctatactacgattgctaa

SEQ ID NO: 101670 - protein, 471 aa, Fremyella diplosiphon
MTTPQEVLKLIQDQKIQMIDLKFIDTPGTWQHLTVYYNQIDESSFTDGVPFDGSSIRGWKGIEESDMTMVLDPNTAWIDPFMKEPTLSIICSIKEPRTGEWYNRCPRVIAQKAIDYLVSTGLGDTAFFGPEAEFFIFDDARFDQTANSGYYYVDSVEGRWNSGKDEGPNLAYKPRFKEGYFPVAPTDTFQDMRTEMLLTMAACGVPIEKQHHEVATGGQCELGFRFGKLIEAADWLMTYKYVIKNVAKKYGRTVTFMPKPIFGDNGSGMHCHQSIWKDGKPLFGGDKYAGLSDMALYYIGGILKHAPALLGITNPTTNSYKRLVPGYEAPVNLAYSQGNRSASVRIPLSGTNPKAKRLEFRCPDATSNPYLAFAAMLCAGIDGIKNKIHPGEPLDRNIYELSPEELAKVPSTPGSLELALEALENDHAFLTESGVFTEDFIQNWIEYKLVNEVKQLQLRPHPYEFYLYYDC

SEQ ID NO: 101671 - DNA, 2041 bp, Haemophilus influenzae
  CDS (231)..(1649): transl_table=11
tgtttaatgctttaattggataagatgcaatttttattgcattgttacataaaaaatggcgcaatgaattgcaccctacatttctacatttgtcgaaaaggaaaaattatacatgtatttttctttttctgctatgactagaataagaaaaataaatttcatgaaaaaatagcatggctacgttataatgtgcgcttatcttaataagactaaccatagaggatttcctaatgccaaacgcaaatgcaattgccaatgtatttaagctaattgaagaaaataatgtgaaatttgtacttcttcgatttaccgatattaaaggtaaagaacatggtgtttctatcccagttagccttgttgatgaagatatgtttgaagacggcaagatgtttgatggttcctctgttgaaggatggaaaaccattaataaagccgatatgttgcttatgccaatggctgaaacggcaattgttgatccattcgcgcaaattccaacgctttctattcgttgtagtgtttatgaaccaacgacaatgcaaagctatgatcgcgatccgcgctctattgcaattcgtgcagaaaattatatgcgttcaacaggtattgctgatcaagctttttttggtccagagcctgaattcttcttatttgatgatgtgcgttttaatgtatcaatgaacaaagcatctttttctattgatgatatagaagctgcttggaacacgaataaaaaatatgaagaaggcaataacgcttatcgcccattgaaaaaaggtggatattgtgccgttgcaccgattgatagtgcgcacgatattcgttctgaaatgtgcttgattttagaagaaatgggattagtcattgaagcccatcatcatgaagtggcgactgcagggcaaaacgaaattgcgactaaatttaatacgctaactttaaaagcggatgaaactcaaatttataaacatgtcgtacaaaacgttgcattagagcacggtaaaacggcgtgttttatgcccaaaccaattactggagataatggttcgggtatgcactgtaatatgtcgttaagtaaagacggaaaaaatattttccaaggcgataaatatgcaggcctttctgaaaccgcactttactacatcggcggtatcattaagcacgctaaagccttaaatgcgttcactaatccaagtactaattcatataaacgtttagtgcctggttatgaagcaccagtattgttggcttactctgcaagcaatcgttcagcctcaattcgtatccctgctgtaaccaatccaaaagcgattcgcgtagaagcacgtttcccagatccattggcaaacccatatttagcatttgctgcattattaatggcaggtcttgatggcgtggtaaacaaaatccacccaggcgatgcgatggataaaaatctttacgatcttcctccagaagaattaaaagatattcctgcagtagcaagctcgttagaagaagcgttaaattcattagaaaaagactatgaattcttaactcaaggtggcgtatttgctaaagattttattgatgcgtttatcagtatcaaacgtaaagaagtggaacgtttaaatatggcaccacatccagttgaatttgaaatgtattatgcataatgatatataaacaagaacaatgcggtgaaatttcgccgtatttttttaaaggagtaaatatgactaagatttcttctcaaaagaatgactagattgatttaatggagcttttctgcgtattcatagcaatagctggcgtataggcctgtacggcaaaagagcagtggacttcaactgatattgggttgtgcctcgttcaaccgatttcggtaacttactgcctacacgtgtggaatatgccacattattggcgacagtgaattttcttctgtagcgttatcaggttcattgtatggtcaatttaggcacttccttctttctagagatttaaaacgccagttcttaaaacaatctgtatgggtgaaaattatactaaggagatgacagaagaa

SEQ ID NO: 101672 - protein, 472 aa, Haemophilus influenzae
MPNANAIANVFKLIEENNVKFVLLRFTDIKGKEHGVSIPVSLVDEDMFEDGKMFDGSSVEGWKTINKADMLLMPMAETAIVDPFAQIPTLSIRCSVYEPTTMQSYDRDPRSIAIRAENYMRSTGIADQAFFGPEPEFFLFDDVRFNVSMNKASFSIDDIEAAWNTNKKYEEGNNAYRPLKKGGYCAVAPIDSAHDIRSEMCLILEEMGLVIEAHHHEVATAGQNEIATKFNTLTLKADETQIYKHVVQNVALEHGKTACFMPKPITGDNGSGMHCNMSLSKDGKNIFQGDKYAGLSETALYYIGGIIKHAKALNAFTNPSTNSYKRLVPGYEAPVLLAYSASNRSASIRIPAVTNPKAIRVEARFPDPLANPYLAFAALLMAGLDGVVNKIHPGDAMDKNLYDLPPEELKDIPAVASSLEEALNSLEKDYEFLTQGGVFAKDFIDAFISIKRKEVERLNMAPHPVEFEMYYA

SEQ ID NO: 101673 - DNA, 1410 bp, Methylococcus capsulatus
  CDS (1)..(1410): transl_table=11
atgacaccgaaagacgtattgcagatcatcaaggaaaaggaagtccgctacgtggacctgcgtttcgccgacacccgcggcaaagaacagcacgtgacggtccccgcctcgaccatcgacgaggccgccttcgaagagggcaagatgttcgacggttcctcgatcgccggatggaaaggcatcaacgaatctgacatgattctgatgccggatgcatccacggcggtcatggatccgttcttcgacgatccgacgctgatcctccgttgtgacatcgtcgagccggccaccatgcagggttatgagcgcgatcctcgctccatcgccaagcgggccgaagcttacatgaagtccaccggcattgccgataccgcgttgttcgggccggaaaacgagttcttcatcttcgacgacgtccgctggggcgccaacatgtccggctcgttctacaaggtcgattccgaggaggcgggctggaactcggaaaaggtctacgaagacggcaacatcggccatcgtccgggtgtgaagggcggctacttcccggtgccgccggtcgactccttccaggatctgcgctctgccatgtgcaacaccctggaggacatgggcatggtcgtggaagtccatcaccacgaagtagccaccgcaggccagtgtgaaatcggcgtccgctgcaataccctggtgaaaaaggccgacgaggtactgttgctcaaatacgccgttcagaacgtggcgcatgcctatggcaagaccgccaccttcatgccgaaacccctggtcggagacaacggcaatggcatgcatgttcaccagtccctggcgaaagacggcaagaatctcttcagcggtgacctttacggcgggttgtccgaaaccgcattgcactatatcggcggtatcatcaagcatgccaaggcgctgaacgcgttctgcaatgcctccaccaacagctacaagcggctggtgccgggcttcgaagcgccggtcatgctggcttattccgcccgtaaccgctcggcttcgatccgtatcccctacgtcatgaacccgaaggcccgtcgcatcgaggtccgcttcccggattccacggcgaatccatacctcgctttcgcggcgatgctgatggccggtctcgacggcatccagaacaagatccatccgggcgatgcgatggacaaggacctgtacgacctgccgccggaagaggaaaaggccattcctcaggtatgctattccttcgatcaggccctggaagcgctggacaaggaccgcgagttcctcacgaggggcggtgttttcaccgatgacatgatcgatgcgtacctcgatctcaaaggtcaggaagtgacccgcctgcggatgagcactcatcccgtcgagttcgatatgtattacagcctgtaa

SEQ ID NO: 101674 - protein, 469 aa, Methylococcus capsulatus
MTPKDVLQIIKEKEVRYVDLRFADTRGKEQHVTVPASTIDEAAFEEGKMFDGSSIAGWKGINESDMILMPDASTAVMDPFFDDPTLILRCDIVEPATMQGYERDPRSIAKRAEAYMKSTGIADTALFGPENEFFIFDDVRWGANMSGSFYKVDSEEAGWNSEKVYEDGNIGHRPGVKGGYFPVPPVDSFQDLRSAMCNTLEDMGMVVEVHHHEVATAGQCEIGVRCNTLVKKADEVLLLKYAVQNVAHAYGKTATFMPKPLVGDNGNGMHVHQSLAKDGKNLFSGDLYGGLSETALHYIGGIIKHAKALNAFCNASTNSYKRLVPGFEAPVMLAYSARNRSASIRIPYVMNPKARRIEVRFPDSTANPYLAFAAMLMAGLDGIQNKIHPGDAMDKDLYDLPPEEEKAIPQVCYSFDQALEALDKDREFLTRGGVFTDDMIDAYLDLKGQEVTRLRMSTHPVEFDMYYSL

SEQ ID NO: 101675 - DNA, 1365 bp, Methanococcus jannaschii
  CDS (1)..(1365): transl_table=11
ttgcattgggggatggaaatgaacgtcgaacaagcaatagaatatgtaaagaagaacaacgttaagttcataagattccagttcgtagatatcttaggattcccaaaaaatgtcgcatacccagttaaggctggagaaaaaggaatcgaagaattaagagaaatctttgaaaatggagtttggtttgatggttcatcaattaccggttttgttggtattgaagaatcagatatgttattaaaaccagatttatcaacactctctgttttaccatggagacctgaagagaaaagtgttgcaagagttatctgtgatgtttataaagatgagaagacaccattcgaaggagacccaagaagcagattaaaagctattttagaagaattaaagaaagaaatgaatggagaatactttgttggtccagaaccagagttcttcttgttaaagagagacccacacaacccacacagatgggttcctgctgacgatggaggttactttgatgttgaaccattagacgacgctccagacattagaagagatatcgtcttagctttagaaaacctcggcttccacgttgaggcatcacaccacgaagtcgctccaggacagcacgaagttgatttcaaattcgacaacgctttaaagacagctgatagcgttataacattcaagatgacaatcaaaaacattgctaagaagcacggtttaaaagctacattcatgccaaaaccattctttggaatgaacggaaacggaatgcactgccaccagagtgtctggtttaacggagaaccatcattctacgacccagaagggccttacaatggattaagtgaaacatgtttaagctacattgctggaatcttaagccacgctaaggcattagttgctataacaaacccaacagttaattcatacaagagattagtcccaggttacgaagctcctgtaaatatcgcatgggcaaacaagaacagaagtgctatcatcagagtcccagctgcaagaggaaaagctacaagaatcgagttcagagctccagacccaacatgcaacccatacttagcatttgcatgtatgttagctgctggattagatggaattaagaagaagatgacagctccagagccagttgagagaaacatcttcaagatgtcagaagaagagaaaaagcagttaggaattgagtcagttcctgcaaacttagctgctgcattggatgagttagaatgtgatgaagtcttgcagaaagctttaggaaaacacatatatgaaaactacatggaaatcaagagagctgagtgggatgacttcagaacagcagttactgactgggagacaggtaaatacttaatctactaa

SEQ ID NO: 101676 - protein, 454 aa, Methanococcus jannaschii
MHWGMEMNVEQAIEYVKKNNVKFIRFQFVDILGFPKNVAYPVKAGEKGIEELREIFENGVWFDGSSITGFVGIEESDMLLKPDLSTLSVLPWRPEEKSVARVICDVYKDEKTPFEGDPRSRLKAILEELKKEMNGEYFVGPEPEFFLLKRDPHNPHRWVPADDGGYFDVEPLDDAPDIRRDIVLALENLGFHVEASHHEVAPGQHEVDFKFDNALKTADSVITFKMTIKNIAKKHGLKATFMPKPFFGMNGNGMHCHQSVWFNGEPSFYDPEGPYNGLSETCLSYIAGILSHAKALVAITNPTVNSYKRLVPGYEAPVNIAWANKNRSAIIRVPAARGKATRIEFRAPDPTCNPYLAFACMLAAGLDGIKKKMTAPEPVERNIFKMSEEEKKQLGIESVPANLAAALDELECDEVLQKALGKHIYENYMEIKRAEWDDFRTAVTDWETGKYLIY

SEQ ID NO: 101677 - DNA, 1329 bp, Methanobacterium thermoautotrophicum
  CDS (1)..(1329): transl_table=11
atgtcagataagattggaagaataatagctaaaatggatgaatgcggcgttaaattcgtccgccttcagtttgtggacatacacggaaaaccaaagaatatggcaatacccctggtaaggccagaccagatagaggacataataaaggacggtctcctctttgatgggtcatcagttgaggggttcgtggatataaacgagagcgacctcgtcctgaaacctgaccccgacaccttctcaacactcccatggaggccagaggaaaagggtgtgtgcagattcatctgtgacatatactggccagacggaaaacccttcgaaggggacccaaggtacgtcctcaagagggccctcgacaagtacgcccaccttggatatgaatacaatgtcggaccggaaccagagttcttcatcctcgaccaggacgaggatggcaacataataccccacgactgcggtgcatacttcgatgttgaaccggtggaccagggaaccgacttcaggagaaaactcgtcatggaccttgaggcccttaacttcgacgttgaggtcagccaccacgaggttgctcctggacagcacgagatagacttcaaattcgacaaggccctgaagacagcagacgcagttataaccttcaaacaggccataaaggccatagtcgacaagattgggtacatggtaacattcatgccaaagccattctttggtgaaaacggtagcggtatgcactgccaccagtccctcttcaaggatggtgaaaacgtcttctatgaccctgacacagagacacagctctcagaggaggccctgtacttcataggggggcttctgaaacacgcccctgcgctcacagctgtctgtgctccaacagtcaactcctacaagagacttgtccctggctatgaagcaccggtctacattgcctacggccttaaaaacaggtcaaccctcatcaggatccctgcatcacgtggaaagggtacacgtgtcgagttaaggatgcctgacccatcatgcaacccataccttgcatttgcagccatgctggaggcaggtatgaacggtatacagaacaagatcgaccccggtgaaccaaccgagatcgacgtttatgaaaaatcaatgagtgagctcagggagatgggcatcgagacactcccatcaagcctctgggaggcataccatgccctagaggaggatgatgtcatcaagggcgcccttggtggtcacgtctacgagaagttcatggagatcaagcacagggaatgggacgactaccgtgtgagggtcttcaagtacgaacttgaaaggtaccttgacatctaa

SEQ ID NO: 101678 - protein, 442 aa, Methanobacterium thermoautotrophicum
MSDKIGRIIAKMDECGVKFVRLQFVDIHGKPKNMAIPLVRPDQIEDIIKDGLLFDGSSVEGFVDINESDLVLKPDPDTFSTLPWRPEEKGVCRFICDIYWPDGKPFEGDPRYVLKRALDKYAHLGYEYNVGPEPEFFILDQDEDGNIIPHDCGAYFDVEPVDQGTDFRRKLVMDLEALNFDVEVSHHEVAPGQHEIDFKFDKALKTADAVITFKQAIKAIVDKIGYMVTFMPKPFFGENGSGMHCHQSLFKDGENVFYDPDTETQLSEEALYFIGGLLKHAPALTAVCAPTVNSYKRLVPGYEAPVYIAYGLKNRSTLIRIPASRGKGTRVELRMPDPSCNPYLAFAAMLEAGMNGIQNKIDPGEPTEIDVYEKSMSELREMGIETLPSSLWEAYHALEEDDVIKGALGGHVYEKFMEIKHREWDDYRVRVFKYELERYLDI

SEQ ID NO: 101679 - DNA, 1086 bp, Panulirus argus
  CDS (1)..(1086)
atgaatcagggtgcaaacaagacggtattagaccgatatttacggttagatatcccggaccagaaatgtcaagctatgtacatctgggtcgatggaaccggcgaaaacctccgctctaagaccaggacactcaactttactcctaaatctcccagtgagctgccaatatggaatttcgatgggtcatcaacgggccaggccgaacggagcaacagtgacgtgtacctgtatccagtcgctgtttatcgagatccattcaggctgggtaacaataagctggtcctctgtgaaacctacaaatacaacaagaagcctgctgatactaaccagcgttggaagtgtatggaagtaatgacaagggcagcagaccagcacccatggttcggcatggaacaagaatatactcttttggacattgacaaacatcccttgggttggcccaagaatggctatccaggccctcagggtccctattactgtggtgtgggtgctaatagggtgtatgggcgcgatgtggtcgaggctcactacagggcgtgtctttgcgctggcatcaacatctctggggagaacgcgaaagtcatgccggcccaatgggagttccaggttggtccgtgtgaaggcataaccatgggcgacgacctctggatggctcgctaccttcttcacagggtcgctgaggactttgatgttgtagtaacactcgaccccaagccaatccctggtgactggaacggcgctggaatgcacactaatttctctactgaagccatgcgtggtcccaatggcattctggaaattgagagtgccatcgacaaattgtcgaaggttcatgagaaacacatcaaggcatacgacccacacgcaggcaaggataacgaaaggcgcttgactggtcattatgaaacttcctccatccatgacttttctgcaggtgtggccaaccgtggtgcctccatccgcatccccagaggagtggctgaggagaaaaccggctacctggaggaccgtcgcccttcctccaacgctgacccttatgtggtgtctgagaggcttgtgcgtaccatctgcctgaacgagcagtga

SEQ ID NO: 101680 - protein, 361 aa, Panulirus argus
MNQGANKTVLDRYLRLDIPDQKCQAMYIWVDGTGENLRSKTRTLNFTPKSPSELPIWNFDGSSTGQAERSNSDVYLYPVAVYRDPFRLGNNKLVLCETYKYNKKPADTNQRWKCMEVMTRAADQHPWFGMEQEYTLLDIDKHPLGWPKNGYPGPQGPYYCGVGANRVYGRDVVEAHYRACLCAGINISGENAKVMPAQWEFQVGPCEGITMGDDLWMARYLLHRVAEDFDVVVTLDPKPIPGDWNGAGMHTNFSTEAMRGPNGILEIESAIDKLSKVHEKHIKAYDPHAGKDNERRLTGHYETSSIHDFSAGVANRGASIRIPRGVAEEKTGYLEDRRPSSNADPYVVSERLVRTICLNEQ

SEQ ID NO: 101681 - DNA, 1419 bp, Pasteurella multocida
  CDS (1)..(1419): transl_table=11
atgtcagacaccaccgctatcgccaacgtattcaagctgattgaagaatacgatatcaaatttgttttacttcgctttaccgatattaaggggaaagaacacggtgtttcgcttcctgttaatcttgttgatgaagatttatttgaagacggtaaaatgttcgacggttcttccgttgaaggatggaaggcaatcaataaagcagatatgctcttgatgccaatgccagaaacagctgtggttgatccttttgctcaaattcctaccctttccctccgttgcagtatctacgaaccttctactatgcaaagctacgatcgtgatccacgttctattgcgattcgtgcagaaaactatatgcgttcaacgggaatagccgatgaagccctctttgggcctgaaccagaatttttcttatttgatgatgttcgtttcgatgtctcgatgaaccgtagcagttattctgttgatgatattgaggctgcgtggaatacgaataaaaaatatgaagacggtaacaacgcttatcgtccactcaaaaaaggcggttattgtgcggtcgccccgattgatagcgcacatgatatccgctctgaaatgtgcttaatcttagaagaaatgggcttagtgattgaagcacaccaccatgaagtcgccacagcaggacaaaatgaaattgcaacgcgctttaataccttaacaactaaagccgacgaaacccaaatttataaatatgtagtacaaaacgtcgcctacgagcacggtaaaactgcctgctttatgccaaaacccatcactggcgataacggctccggtatgcattgtaatatgtcattaagcaaagacggcaaaaacgttttccaaggggataaatacgctggactgtctgaaaccgcactttattatattggtgggattattaaacatgcaaaagcgttaaatgcgttcactaatccttcaaccaactcttataaacgcttagtgccgggctttgaagcacctgtcctattagcgtattctgcaagtaaccgttcagcctcaattcgcatccctgcggtcaccaatccaaaagcgattcgtattgaagcgcgtttcccagatccattggctaatccttatcttgcgtttgctgcattattaatggcgggtctagacgggattatcaataaaattcaccctggcgatgcgatggacaaaaacctgtatgatctgccaccagaagaactacaaaatatccctgcggtagcaagctcattagaagaagctttaaatgcattagaacaagattatgaatttttaaccaaaggaaatgtgtttactcaagcttttattgatgcgtttattacaattaagcggaaagaagtagaacgtttaaatatgaccccacaccccgtggaattcgaaatgtactatgcctaa

SEQ ID NO: 101682 - protein, 472 aa, Pasteurella multocida
MSDTTAIANVFKLIEEYDIKFVLLRFTDIKGKEHGVSLPVNLVDEDLFEDGKMFDGSSVEGWKAINKADMLLMPMPETAVVDPFAQIPTLSLRCSIYEPSTMQSYDRDPRSIAIRAENYMRSTGIADEALFGPEPEFFLFDDVRFDVSMNRSSYSVDDIEAAWNTNKKYEDGNNAYRPLKKGGYCAVAPIDSAHDIRSEMCLILEEMGLVIEAHHHEVATAGQNEIATRFNTLTTKADETQIYKYVVQNVAYEHGKTACFMPKPITGDNGSGMHCNMSLSKDGKNVFQGDKYAGLSETALYYIGGIIKHAKALNAFTNPSTNSYKRLVPGFEAPVLLAYSASNRSASIRIPAVTNPKAIRIEARFPDPLANPYLAFAALLMAGLDGIINKIHPGDAMDKNLYDLPPEELQNIPAVASSLEEALNALEQDYEFLTKGNVFTQAFIDAFITIKRKEVERLNMTPHPVEFEMYYA

SEQ ID NO: 101683 - DNA, 1410 bp, Proteus vulgaris
  CDS (1)..(1410): transl_table=11
atgtcccttgaacatgtattatccatgattgaagaacataaagttagatatattgacttacgttttactgatacccgcggcaaagaacaacatctgactattcctgcccatcaggttaacgatgatttctttgaagaaggaaaaatgttcgatggatcttctattggcggttggaaaggcattaacgaatcagacatggtactgatgcctgatgcttctacagcaatgcttgacccattttttcaagatccaacactgattattcgttgtgatgtattagaaccaggcacaatgcaaggttatgatcgcgaccctcgttcaatctcaaaacgagctgaagattacctaaaatcaagcggtatcgccgacactgttttatttgggccagaacctgaattcttcttatttgatgatattcgttttaaaaatgatatttcaggcgcgtcatacgctatcaatgacattgaagcagcatggaacactaataccaaatatgaagatggtaacaaaggccatcgtcctatggtaaaagggggttatttcccattaccacccgttgattcatctcaagatattcgctctaccatgtgtaacattatggaagagatgggattagtggttgaagctcatcaccacgaagtcgcaacggcaggtcaaaacgaagtcgcaacacgttttaataccatgaccaaaaaagcagatgaaacccaaatttataaatacgtagtacaaaacgttgctcacgtatttggcaaaacggcgacctttatgccaaaaccactcgtgggtgataacggttcaggtatgcactgccatatgtcactgtctaaaaatggaaccaatctatttgcgggtgacaaatacggcggattatctgaaatggcgctgtactacattggcggcattatcaaacatgctcgcgcattaaatgcgtttaccaacccgacaaccaactcatacaaacgcttagttccgggttttgaagcgcctgttatgctggcttactctgcacgtaaccgctcagcgtctattcgtatcccagttgttgccagcatgaaagcgcgtcgtattgaagtacgtttcccagatccactcgcgaacccttatcttgcttttgctgctcagttaatggccggtcttgatggcattaccaataaaattcacccaggtgatgctatggataaaaacctctatgacttaccgccagaagaagcaaaagagatcccaacagtagcgggttcattagaagaagcactgaatgcattagatgcagaccgtgaattcttaactcatggtggtgtattcactaatgactcaattgatgcctatttagcgcttttacgtactgacgttcagcgtgttcgtatggcaccacatcctcttgaatttgaaatgtattacagcgcttaa

SEQ ID NO: 101684 - protein, 469 aa, Proteus vulgaris
MSLEHVLSMIEEHKVRYIDLRFTDTRGKEQHLTIPAHQVNDDFFEEGKMFDGSSIGGWKGINESDMVLMPDASTAMLDPFFQDPTLIIRCDVLEPGTMQGYDRDPRSISKRAEDYLKSSGIADTVLFGPEPEFFLFDDIRFKNDISGASYAINDIEAAWNTNTKYEDGNKGHRPMVKGGYFPLPPVDSSQDIRSTMCNIMEEMGLVVEAHHHEVATAGQNEVATRFNTMTKKADETQIYKYVVQNVAHVFGKTATFMPKPLVGDNGSGMHCHMSLSKNGTNLFAGDKYGGLSEMALYYIGGIIKHARALNAFTNPTTNSYKRLVPGFEAPVMLAYSARNRSASIRIPVVASMKARRIEVRFPDPLANPYLAFAAQLMAGLDGITNKIHPGDAMDKNLYDLPPEEAKEIPTVAGSLEEALNALDADREFLTHGGVFTNDSIDAYLALLRTDVQRVRMAPHPLEFEMYYSA

SEQ ID NO: 101685 - DNA, 1410 bp, Pseudomonas aeruginosa
  CDS (1)..(1410): transl_table=11
atgtcgtacaagtcgcaccaactgatcaaagaccatgacgtgaagtgggtagacctgcgcttcaccgataccaagggcaagcagcaacacgtcaccatgccggctcgcgacgcgctggacgatgagttcttcgaagccggcaagatgttcgacggctcctccatcgccggctggaaaggcatcgaagcctccgacatgatcctgatgccggacgacagcaccgccgtcctcgatccgttcaccgaagagccgaccctgatcctggtctgcgacatcatcgagccgagcaccatgcaaggctacgagcgcgacccgcgcaacatcgccaagcgcgccgaggagtacctgaagtccaccggcatcggcgacaccgtgttcgtcggcccggagccggagttcttcatcttcgacgaagtgaagttcaagtccgacatctccggctcgatgttcaagatcttctccgagcaggcttcctggaacaccgacgccgacatcgagtccggcaacaagggccatcgcccgggcgtgaagggcggctacttcccggtaccgccggtcgaccacgaccatgaaatccgcaccgccatgtgcaacgccctggaagaaatgggcctggtggtcgaagtccaccaccacgaagtggcaaccgccggccagaacgagatcggcgtgaagttcaacaccctggtcgccaaggccgacgaagtgcagaccctgaagtactgcgtgcacaacgtcgccgacgcctacggcaagaccgtgaccttcatgccgaagccgctgtacggcgacaacggttcgggcatgcacgtgcacatgtcgatctccaaggacggcaagaacaccttcgccggcgaaggctatgccggcctgtccgagaccgccctgtacttcatcggcggcatcatcaagcacggcaaggccctgaacggcttcaccaacccctcgaccaactcctacaagcgcctggtcccgggcttcgaagctccggtgatgctggcctactcggcgcgcaaccgttccgcctcgatccgtatcccctacgtatccagcccgaaggcccgccgtatcgaagcgcgcttcccggacccggcagccaacccctacctggccttcgccgcgctgctgatggccggcctggacggcatccagaacaagatccaccccggcgatgccgccgacaagaacctgtacgacctgccgccggaagaggcgaaggaaatcccgcaggtttgcggcagcctgaaagaggcgctggaagaactcgacaagggccgcgcgttcctgaccaagggcggcgtgttcaccgacgagttcatcgatgcctacatcgagctgaagagcgaagaagagatcaaggtgcgcaccttcgtgcacccgctggaatacgacctgtactacagcgtctga

SEQ ID NO: 101686 - protein, 469 aa, Pseudomonas aeruginosa
MSYKSHQLIKDHDVKWVDLRFTDTKGKQQHVTMPARDALDDEFFEAGKMFDGSSIAGWKGIEASDMILMPDDSTAVLDPFTEEPTLILVCDIIEPSTMQGYERDPRNIAKRAEEYLKSTGIGDTVFVGPEPEFFIFDEVKFKSDISGSMFKIFSEQASWNTDADIESGNKGHRPGVKGGYFPVPPVDHDHEIRTAMCNALEEMGLVVEVHHHEVATAGQNEIGVKFNTLVAKADEVQTLKYCVHNVADAYGKTVTFMPKPLYGDNGSGMHVHMSISKDGKNTFAGEGYAGLSETALYFIGGIIKHGKALNGFTNPSTNSYKRLVPGFEAPVMLAYSARNRSASIRIPYVSSPKARRIEARFPDPAANPYLAFAALLMAGLDGIQNKIHPGDAADKNLYDLPPEEAKEIPQVCGSLKEALEELDKGRAFLTKGGVFTDEFIDAYIELKSEEEIKVRTFVHPLEYDLYYSV

SEQ ID NO: 101687 - DNA, 1320 bp, Pyrococcus abyssi; identical to SEQ ID NO: 32287
  CDS (1)..(1320): transl_table=11

SEQ ID NO: 101688 - protein, 439 aa, Pyrococcus abyssi; identical to SEQ ID NO: 32288

SEQ ID NO: 101689 - DNA, 1332 bp, Pyrococcus kodakaraensis
  CDS (1)..(1332): transl_table=11
atgaacgaaattaagggaattgagagggcggtacaagtcgaagtcccaaggccgaggttccttctgctggcattcacggatatcaacgggtcgctaaagggcatggaaataccaatggagcgctatgaggaggcagttgaggatggggtatccttcgacggttcctcgatacctggattcgaaggaatagaagacagcgaccttatattcaaggcggatcccagcacctacgccgaaataccgtgggagggcattggaagagtctacggttacatctataaaggagatgaaccctaccaagccgatcccagggggattctgaagagagtccttgaaaggctggagaaggaaggactaaaagctcacatcggccccgagccagagttctacatcttcaagaagaacggcacatgggaacttcatatccccgacagcggcggatattttgacctggttggcttggacaaagccagggagataagaagggagattgcactctacatgccgtatctcggcctaaagcccgaggttctgcaccatgaggtcgggaaggcccagcacgaaatagatttccgctacgacgaagcccttagaaccgccgacaacatagtaagcttcaagcacgtcgttaaagcggtggcagagctccacggctactacgccacattcatgcccaaacccatctacggctttcccggtaacggaatgcacctccacataagcctgtggaaagacggtgagaacgttttcattggagaagacggcctgagcgacacggcgctacacttcatcgggggaatccttaagcatgctaaggcccttgcagcccttaccaacccaaccgtcaacagctacaagaggctcgtgccgggttatgaagcaccggtttacatcagctggggttatagaaacaggagcgccctcatcagagtaccagctttcaagggaagtggtgcgagaatagagtaccgctgtccagacccgagtgcaaacccctacctcgccctcgctggaattcttatggtaggactggacggaataaagaagaaggtcgagccagactcgtacgtcgagaccaacgtttacgagatggacgatgccgagagagaaagactaggaatagataccctcccaggaagccttggagaggcactggaggagctgaagaaagataagacagtcagagaagcactcggcggagcctacaagaacttcatcgattacaaggagagggagtgggaagaatacattgaatacctgagctcaagggatatcccaattgacaccaagaaggttacggagtgggagcttgagaggtacttctacgtttga

SEQ ID NO: 101690 - protein, 443 aa, Pyrococcus kodakaraensis
MNEIKGIERAVQVEVPRPRFLLLAFTDINGSLKGMEIPMERYEEAVEDGVSFDGSSIPGFEGIEDSDLIFKADPSTYAEIPWEGIGRVYGYIYKGDEPYQADPRGILKRVLERLEKEGLKAHIGPEPEFYIFKKNGTWELHIPDSGGYFDLVGLDKAREIRREIALYMPYLGLKPEVLHHEVGKAQHEIDFRYDEALRTADNIVSFKHVVKAVAELHGYYATFMPKPIYGFPGNGMHLHISLWKDGENVFIGEDGLSDTALHFIGGILKHAKALAALTNPTVNSYKRLVPGYEAPVYISWGYRNRSALIRVPAFKGSGARIEYRCPDPSANPYLALAGILMVGLDGIKKKVEPDSYVETNVYEMDDAERERLGIDTLPGSLGEALEELKKDKTVREALGGAYKNFIDYKEREWEEYIEYLSSRDIPIDTKKVTEWELERYFYV

SEQ ID NO: 101691 - DNA, 1404 bp, Rhodobacter sphaeroides
  CDS (1)..(1404): transl_table=11
atgagcaaagtagctgatgctctcaaactgatgaaagacgaggaggtcgaatatgtcgacatccgcttcaccgacccgcgcggcaagctccagcatgtgacgctggtggccgatctcgtcgacgaggacttcttcgaggaaggcttcatgttcgacggctcgtccatcgccggctggaagtcgatcgaccagtccgacatgaagctgatcccggatgcgggctcggtctacatcgacccgttctatgccgagaagacgctctgcgtgcattgcaacgtcgtcgagcccgacactggcgaggcctacagccgcgacccgcgcggcgcggccgtcaaggccgaagcctacctgaaggcttcgggcatcggtgacgtggcctatttcgggccggaagccgaattcttcatcttcgacgacgtgcgctattcggtgacgccggcgaaggtggcctaccagatcgacgccgacgccggcgcgtggaacaccgactcggaatatgagatgggcaacctcgcccaccgcgccggccacaagggcggctacttcccggtgaacccgatcgacgaggcccaggacctgcgcggcgagatgctctcgaccatgaagcgcatgggcatgaaggtggacaagcaccaccacgaagtggccacctgccagcacgaactcgggctgatcttcggcgggctcaccgagcaggccgacaacatcctgaaatacaagtatgtcatccacaacgtcgccggcatgcacggcaagaccgtgaccttcatgccgaagcccatgaagggcgacaacggctcggggatgcacgtcaacatgtcgatctggaaggagcaagcgctcttcgctggcgacaaatatgccgacctgagccaggaagccctgtggttcatcggcggcatcctgaagcagccaagcgtgaacgcgctgacgaacccggccaccaacagctacaagcggctgatcccgggcttcgaggctccggtgctgcgcgcctattcggcccgcaaccgctcgggctgcgtccgtattccgtggaccgagtcgccgaacgccaagcgcgtcgaagcccgtttccccgatccgtcggcgaacccgtatctcgccttcgcggcgctgctgatggccggcctcgacggcatcaagaacaagatcgatccgggcccggcatcggacaaggacctctacgacctgccgccggaagaactggccgccatcccgaccgtctgcggctcgctccgcgaggcgctggaagagctggagaaggaccacgacttcctgctcgccggcgacgtgttcaccaaggaccagctcgagggctacatggcgctcaagtgggaagaggtctacgcctacgagcacacgccgcacccggtggaatatcagatgtactacagctgctga

SEQ ID NO: 101692 - protein, 467 aa, Rhodobacter sphaeroides
MSKVADALKLMKDEEVEYVDIRFTDPRGKLQHVTLVADLVDEDFFEEGFMFDGSSIAGWKSIDQSDMKLIPDAGSVYIDPFYAEKTLCVHCNVVEPDTGEAYSRDPRGAAVKAEAYLKASGIGDVAYFGPEAEFFIFDDVRYSVTPAKVAYQIDADAGAWNTDSEYEMGNLAHRAGHKGGYFPVNPIDEAQDLRGEMLSTMKRMGMKVDKHHHEVATCQHELGLIFGGLTEQADNILKYKYVIHNVAGMHGKTVTFMPKPMKGDNGSGMHVNMSIWKEQALFAGDKYADLSQEALWFIGGILKQPSVNALTNPATNSYKRLIPGFEAPVLRAYSARNRSGCVRIPWTESPNAKRVEARFPDPSANPYLAFAALLMAGLDGIKNKIDPGPASDKDLYDLPPEELAAIPTVCGSLREALEELEKDHDFLLAGDVFTKDQLEGYMALKWEEVYAYEHTPHPVEYQMYYSC

SEQ ID NO: 101693 - DNA, 1410 bp, Streptomyces coelicolor; identical to SEQ ID NO: 32293
  CDS (1)..(1410): transl_table=11

SEQ ID NO: 101694 - protein, 469 aa, Streptomyces coelicolor; identical to SEQ ID NO: 32294

SEQ ID NO: 101695 - DNA, 1320 bp, Thermotoga maritima; identical to SEQ ID NO: 37796
  CDS (1)..(1320): transl_table=11

SEQ ID NO: 101696 - protein, 439 aa, Thermotoga maritima; identical to SEQ ID NO: 37797

SEQ ID NO: 101697 - DNA, 2089 bp, Thiobacillus ferrooxidans
  CDS (472)..(1878): transl_table=11
atgccaccatgcatatgcacagcgaaaatgatgcggaaggtgcgtcctcctgtcgccccgtagcgatatcgaagcggtggtcgcgagcgcctgcaaacgctggatctgcccgccgaagagcagatgacgctgcattatctccggggcggtggtcatctgcctgcgttatgccttgccgtcatccgcaacattcgctagcctgcaggagacggaaacacagatccaggaagccctgcggggcatgtgcgggtttgcaggaagtggacgtggtctggtcgcctggctgaatcgcagtttttgtcatccggcgccccataatggtgcgatttttggtgttgcaccataataatgcacgctattggtgcaacatctatggggttatgctacccttgctccggttatagtctggtatgattttgttaagagagtttgtttcgggtcgtacatatttcttgattggaggagaagcaaatgggttacagccccagtgatgtggtcaaattgattcaggaaaaagacatcaagttcattgatttccgttttacggataccaagggtaaggagcagcacgtctccgttcccgggcatgtcatcgaagaagacacctttaccgaaggcaaggcttttgacggctcctccatcgccggctggaagggcatcaacgagtccgacatgattcttctgcctgacccggattctgcggtgctcgacccctttatggatgaaaccacgcttcttctccgctgcgacgtcatcgagcccgccactggtcagggctatgagcgcgatccccgctccgtggccaagcgcgccgaaatctacctgaagagcaccggtattgccgacacgtctttcttcggtcccgaattcttcgtattcgattccgtgacctggaatatcgatatgagtggttgcgcctacaaggtagacgccgaagaagccgcctggaattcgggcaaggaatatgaatccggcaatatgggccatcgcctcggcgtgaagggggggtatttcccggttccgccggtggactccgctcaggacctgcgctcggccatgtgcctggccatggaagagatgggtctgaaagtggaagtccatcaccatgaggtggccacggccgggcagcacgaaatcggcgtcggtttcaatacgctgacgccaaggcggatgaggtgcaagatcctcaagtatgtcgtccacaacgtggcggccgtacgccagacggccaccttcatgcccaagcccgtcgtcggtgacaacggcagcggcatgcacgtccaccagtccctcggcaaggacggcaagaacatcttcgcgggagatctgtacggcggattgtcggaaatcgcgctgtattacatcggcggcatcattaaacacgcgaaggcggtcaatgcgttgaccaaccccagtaccaacagctacaagcgtctggtacctcatttcgaggccccggtgctactcgcctactccgccaagaaccgttcggcatccatccgcattccctacgtcaacagtcccaaggcacggcgcatcgaagtgcgttttccggactctaccgccaacccctacctggcattctctgccatgctgatggcgggtctggacggtatccagaacaaaatccatcccgcgaccgccatggacaagaatctttacgacctgcccgccgaggaacaggccaatatccccggtgtggccgcctctctggaagaagccctgcgtgccctggaagccgaccatgacttcctcatgaagggtggggtgttctccgagagctggctggaaggatatctggacgtgaaatgggccgaagtgcagaccctgcgcgtgaccacccatccggtggagttccagatgtactacagtctctgagaccgggtactgcctgccgttgcggtctttcccccggtatcatcagccccgtgctttaggcggggctttttttatgccaccttgacacaatacggggcttggcgaccatatacggaaatgccgcgctggtcaggagaacaggctgatgaagtacagggaatccccttttacgtccggtaaaggtgaatcaagcattagcaacggcgcgacg

SEQ ID NO: 101698 - protein, 468 aa, Thiobacillus ferrooxidans
MGYSPSDVVKLIQEKDIKFIDFRFTDTKGKEQHVSVPGHVIEEDTFTEGKAFDGSSIAGWKGINESDMILLPDPDSAVLDPFMDETTLLLRCDVIEPATGQGYERDPRSVAKRAEIYLKSTGIADTSFFGPEFFVFDSVTWNIDMSGCAYKVDAEEAAWNSGKEYESGNMGHRLGVKGGYFPVPPVDSAQDLRSAMCLAMEEMGLKVEVHHHEVATAGQHEIGVGFNTLTPRRMRCKILKYVVHNVAAVRQTATFMPKPVVGDNGSGMHVHQSLGKDGKNIFAGDLYGGLSEIALYYIGGIIKHAKAVNALTNPSTNSYKRLVPHFEAPVLLAYSAKNRSASIRIPYVNSPKARRIEVRFPDSTANPYLAFSAMLMAGLDGIQNKIHPATAMDKNLYDLPAEEQANIPGVAASLEEALRALEADHDFLMKGGVFSESWLEGYLDVKWAEVQTLRVTTHPVEFQMYYSL

SEQ ID NO: 101699 - DNA, 1407 bp, Vibrio alginolyticus
  CDS (1)..(1407): transl_table=11
atgtcagtagaaaaagttctatcgctgatccaagaaaacgaagttaagtttgttgacctacgcttcactgatacaaaaggtaaagagcagcacatttcgatccctgctcaccaaatcgacgcagacttcttcgaagaaggtaaaatgttcgatggttcatcagttgctggctggaaaggtatcaacgaatcagacatggtaatgatgcctgacgcatcttctgctgtgcttgacccattcacggaagacgcaacactaaacatccgttgtgacatcttagagccggcaacaatgcaaggctacgaccgtgacccacgttctatcgcaaagcgcgctgaagacttcatgcgctctactggcgttgcagatactgtacttatcggtcctgagccagaattcttcctatttgacgacgtgaaattcgcgactgacatgtcaggctctttcttcaagatcgatgacgtagaagcagcatggaacacaggttctgattacgaagaaggtaacaaaggtcaccgtccaggcgttaaaggtggttacttccctgtagctccagtggattcatctcaagacatccgttctgctatgtgtctagtaatggaagaaatgggtcttgttgttgaagcgcaccaccacgaagcaacagcgggtcaaaacgaaatcgcaactcgtttcaacacgctaacaaccaaagctgacgaaatccaaatctacaagtacgttgtacacaacgttgctcacgcgtttggtaaaacggcaacattcatgcctaaaccacttgttggtgacaacggtagcggtatgcacgttcaccaatctctagcgaaagatggtgtaaacctatttgctggtgacaagtacggcggtctatctgaaatggcgctttactacattggcggtatcatcaaacacgctcgtgcaatcaacgcatttgctaacccatcaacaaactcgtacaaacgtcttgtaccaggcttcgaagcgccagttatgcttgcttactctgcacgtaaccgctctgcttcaatccgtatccctgtggtaccaagcccgaaagcacgtcgtatcgaagttcgctttggtgacccagcggctaacccatacctatgctttgcatcaatgctaatggctggtcttgacggtattaagaacaagatccacccaggcgaagcaatggataaagacctttacgatctaccagcagaagaatcagcagaaatcccaacggttgcatactcactgaaagacgcactagcagagctagatgctgaccgtgaattcctaacagcgggtggtgtattctctgacgacttcatcgactcttacatcgagctaaaatctcaggacgtagagcgcgtgaacatgacaactcacccagttgagttcgaactttactactctgtataa

SEQ ID NO: 101700 - protein, 468 aa, Vibrio alginolyticus
MSVEKVLSLIQENEVKFVDLRFTDTKGKEQHISIPAHQIDADFFEEGKMFDGSSVAGWKGINESDMVMMPDASSAVLDPFTEDATLNIRCDILEPATMQGYDRDPRSIAKRAEDFMRSTGVADTVLIGPEPEFFLFDDVKFATDMSGSFFKIDDVEAAWNTGSDYEEGNKGHRPGVKGGYFPVAPVDSSQDIRSAMCLVMEEMGLVVEAHHHEATAGQNEIATRFNTLTTKADEIQIYKYVVHNVAHAFGKTATFMPKPLVGDNGSGMHVHQSLAKDGVNLFAGDKYGGLSEMALYYIGGIIKHARAINAFANPSTNSYKRLVPGFEAPVMLAYSARNRSASIRIPVVPSPKARRIEVRFGDPAANPYLCFASMLMAGLDGIKNKIHPGEAMDKDLYDLPAEESAEIPTVAYSLKDALAELDADREFLTAGGVFSDDFIDSYIELKSQDVERVNMTTHPVEFELYYSV

SEQ ID NO: 101701 - DNA, 23 bp, Artificial sequence
  primer
atgtccgctgaacacgtactgac

SEQ ID NO: 101702 - DNA, 24 bp, Artificial sequence
  primer
ttagacgctgtagtacagctcaaa

SEQ ID NO: 101703 - protein, 512 aa, Artificial sequence
  consensus sequence
  Variant (2)..(2): Xaa in position 2 is any amino acid
  Variant (4)..(5): Xaa in position 4 to 5 is any amino acid
  Variant (7)..(25): Xaa in position 7 to 25 is any amino acid
  Variant (26)..(42): Xaa in position 26 to 42 is any or no amino acid
  Variant (48)..(48): Xaa in position 48 is any amino acid
  Variant (49)..(49): Xaa in position 49 is any or no amino acid
  Variant (51)..(53): Xaa in position 51 to 53 is any amino acid
  Variant (55)..(56): Xaa in position 55 to 56 is any amino acid
  Variant (60)..(61): Xaa in position 60 to 61 is any amino acid
  Variant (62)..(62): Xaa in position 62 is any or no amino acid
  Variant (65)..(71): Xaa in position 65 to 71 is any amino acid
  Variant (72)..(73): Xaa in position 72 to 73 is any or no amino acid
  Variant (75)..(95): Xaa in position 75 to 95 is any amino acid
  Variant (96)..(102): Xaa in position 96 to 102 is any or no amino acid
  Variant (105)..(115): Xaa in position 105 to 115 is any amino acid
  Variant (116)..(118): Xaa in position 116 to 118 is any or no amino acid
  Variant (120)..(124): Xaa in position 120 to 124 is any amino acid
  Variant (125)..(126): Xaa in position 125 to 126 is any or no amino acid
  Variant (128)..(128): Xaa in position 128 is any amino acid
  Variant (130)..(130): Xaa in position 130 is any amino acid
  Variant (133)..(134): Xaa in position 133 to 134 is any amino acid
  Variant (136)..(147): Xaa in position 136 to 147 is any amino acid
  Variant (148)..(181): Xaa in position 148 to 181 is any or no amino acid
  Variant (184)..(186): Xaa in position 184 to 186 is any amino acid
  Variant (187)..(187): Xaa in position 187 is any or no amino acid
  Variant (189)..(189): Xaa in position 189 is any amino acid
  Variant (191)..(195): Xaa in position 191 to 195 is any amino acid
  Variant (197)..(205): Xaa in position 197 to 205 is any amino acid
  Variant (206)..(206): Xaa in position 206 is any or no amino acid
  Variant (208)..(210): Xaa in position 208 to 210 is any amino acid
  Variant (211)..(212): Xaa in position 211 to 212 is any or no amino acid
  Variant (214)..(215): Xaa in position 214 to 215 is any amino acid
  Variant (220)..(222): Xaa in position 220 to 222 is any amino acid
  Variant (223)..(223): Xaa in position 223 is any or no amino acid
  Variant (225)..(225): Xaa in position 225 is any amino acid
  Variant (227)..(236): Xaa in position 227 to 236 is any amino acid
  Variant (237)..(238): Xaa in position 237 to 238 is any or no amino acid
  Variant (241)..(245): Xaa in position 241 to 245 is any amino acid
  Variant (247)..(252): Xaa in position 247 to 252 is any amino acid
  Variant (254)..(256): Xaa in position 254 to 256 is any amino acid
  Variant (258)..(259): Xaa in position 258 to 259 is any amino acid
  Variant (267)..(269): Xaa in position 267 to 269 is any amino acid
  Variant (270)..(271): Xaa in position 270 to 271 is any or no amino acid
  Variant (278)..(278): Xaa in position 278 is any amino acid
  Variant (280)..(280): Xaa in position 280 is any amino acid
  Variant (282)..(287): Xaa in position 282 to 287 is any amino acid
  Variant (288)..(293): Xaa in position 288 to 293 is any or no amino acid
  Variant (295)..(296): Xaa in position 295 to 296 is any amino acid
  Variant (297)..(308): Xaa in position 297 to 308 is any or no amino acid
  Variant (311)..(316): Xaa in position 311 to 316 is any amino acid
  Variant (320)..(322): Xaa in position 320 to 322 is any amino acid
  Variant (324)..(327): Xaa in position 324 to 327 is any amino acid
  Variant (328)..(328): Xaa in position 328 is any or no amino acid
  Variant (330)..(331): Xaa in position 330 to 331 is any amino acid
  Variant (334)..(335): Xaa in position 334 to 335 is any amino acid
  Variant (342)..(342): Xaa in position 342 is any amino acid
  Variant (344)..(345): Xaa in position 344 to 345 is any amino acid
  Variant (346)..(353): Xaa in position 346 to 353 is any or no amino acid
  Variant (357)..(364): Xaa in position 357 to 364 is any amino acid
  Variant (369)..(370): Xaa in position 369 to 370 is any amino acid
  Variant (372)..(372): Xaa in position 372 is any amino acid
  Variant (374)..(375): Xaa in position 374 to 375 is any amino acid
  Variant (376)..(384): Xaa in position 376 to 384 is any or no amino acid
  Variant (386)..(386): Xaa in position 386 is any amino acid
  Variant (388)..(388): Xaa in position 388 is any amino acid
  Variant (390)..(390): Xaa in position 390 is any amino acid
  Variant (393)..(395): Xaa in position 393 to 395 is any amino acid
  Variant (400)..(402): Xaa in position 400 to 402 is any amino acid
  Variant (404)..(406): Xaa in position 404 to 406 is any amino acid
  Variant (409)..(409): Xaa in position 409 is any amino acid
  Variant (412)..(412): Xaa in position 412 is any amino acid
  Variant (413)..(417): Xaa in position 413 to 417 is any or no amino acid
  Variant (419)..(435): Xaa in position 419 to 435 is any amino acid
  Variant (436)..(447): Xaa in position 436 to 447 is any or no amino acid
  Variant (449)..(450): Xaa in position 449 to 450 is any amino acid
  Variant (452)..(453): Xaa in position 452 to 453 is any amino acid
  Variant (454)..(454): Xaa in position 454 is any or no amino acid
  Variant (456)..(457): Xaa in position 456 to 457 is any amino acid
  Variant (459)..(475): Xaa in position 459 to 475 is any amino acid
  Variant (476)..(479): Xaa in position 476 to 479 is any or no amino acid
  Variant (481)..(482): Xaa in position 481 to 482 is any amino acid
  Variant (483)..(483): Xaa in position 483 is any or no amino acid
  Variant (485)..(491): Xaa in position 485 to 491 is any amino acid
  Variant (492)..(507): Xaa in position 492 to 507 is any or no amino acid
  Variant (509)..(510): Xaa in position 509 to 510 is any amino acid
  Variant (511)..(511): Xaa in position 511 is any or no amino acid
FXDXXGXXXXXXXXXXXXXXXXXXXXXXXXXXXXXXXXXXXXFDGSSXXGXXXIXXSDMXXXPDXXXXXXXXXPXXXXXXXXXXXXXXXXXXXXXXXXXXXXPRXXXXXXXXXXXXXXGXXXXXXXGXEXEFXXFXXXXXXXXXXXXXXXXXXXXXXXXXXXXXXXXXXXXXXXXXXXXXXGYXXXXPXDXXXXXRXXXXXXXXXXGXXXXXEXXHHEVXXXXQXEXXXXXXXXXXXXADXXXXXKXXXXXXAXXXGXXATFMPKPXXXXXNGSGMHXHXSXXXXXXXXXXXXFXXXXXXXXXXXXXXLSXXXXXXIGGXXXHXXXXXAXXNPXXNSYKRLXPXXXXXXXXXXEAPXXXXXXXXNRSAXXRXPXXXXXXXXXXXRXEXRXPDXXXNPYLXXXAXXXAGXDGXXXXXXPXXXXXXXXXXXXXXXXXXXXXXXXXXXXXLXXAXXXLXXDXXXXXXXXXXXXXXXXXXXXXKXXXEXXXXXXXXXXXXXXXXXXXXXXXEXXXY

SEQ ID NO: 101704 - protein, 17 aa, Artificial sequence
  protein pattern
  Variant (2)..(2): Xaa in position 2 is any or no amino acid
  Variant (4)..(6): Xaa in position 4 to 6 is any or no amino acid
  Variant (8)..(8): Xaa in position 8 is His, Lys or Arg
  Variant (11)..(13): Xaa in position 11 to 13 is any amino acid
  Variant (14)..(14): Xaa in position 14 is Phe or Tyr
NXSXXXYXRLXXXXEAP

SEQ ID NO: 101705 - protein, 15 aa, Artificial sequence
  protein pattern
  Variant (2)..(2): Xaa in position 2 is Phe, Ile, Leu or Val
  Variant (4)..(4): Xaa in position 4 is any amino acid
  Variant (6)..(6): Xaa in position 6 is any amino acid
  Variant (7)..(7): Xaa in position 7 is Ala, Gly, Ile, Pro or Val
  Variant (8)..(8): Xaa in position 8 is Asp, Gly or Ser
  Variant (9)..(9): Xaa in position 9 is Ala, Gly, Pro, Ser or Thr
  Variant (10)..(11): Xaa in position 10 to 11 is any amino acid
RXEXRXXXXXXNPYL

SEQ ID NO: 101706 - protein, 15 aa, Artificial sequence
  protein pattern
  Variant (2)..(3): Xaa in position 2 to 3 is any amino acid
  Variant (4)..(4): Xaa in position 4 is Ala, Ile or Val
  Variant (5)..(5): Xaa in position 5 is Cys, Ser or Thr
  Variant (11)..(11): Xaa in position 11 is Phe, Ile, Leu, Met or Val
  Variant (12)..(14): Xaa in position 12 to 14 is any amino acid
  Variant (15)..(15): Xaa in position 15 is Ala, Asn, Pro, Ser or Thr
GXXXXFMPKPXXXXX

SEQ ID NO: 101707 - DNA, 1116 bp, Synechocystis sp.
  CDS (1)..(1116): transl_table=11
atggattggtggaaaaaactgcggcgcaatagcctggctcgttggggtgccatactactattgttgttttacgtcgctgtcattggagcggatatttttgccccctataatccctacaacgcccaagtggatggttccctactgcctcccacccaaatccattggcgatcgccgggggggaaatggatcgggcccaccgtttaccccacccgccagttacccaccgatttagaaacgggattaagacctttagagatagatttcagccaaccttccccagtccgcctttgggtccaaggggatagttacgtctggggacaaattaaattacccttaccccccagttttgccccagtggaaatttttccgggtatcccaggcgatcgccatttaattggtaccttagggccgggtaagctcaacttattggggacagacgaacaaggaagggatcaatttagccgtttattatttggtggccgcattagtttattcattggcttgattgggattaccatttcctttcccctgggcatggtggtgggaggcattgctggatacttcggtggttggttagacgtggttttaatgcgtctagtagaagtgctgatgaccatccctggcatttacctgttggtggccctagcggcggtgttacctcctggtctgagcagtgcccaaaggtttttgctcattgtggtaattacttctttcattagttggtctgggttagctagggtaattcgaggtcaagtgctttccctcaaacaacaggaatacgtccaagccgccaaagccatgggggccggggcaccaaggattattgtgcgccacattttgccccaaaccgccagttacattattatttccgccacgttggcagtgcccggatttattgtggccgaatcagtgttgagcttgatcggcctgggcattcaacaaccggatcctagttggggaaatttactttccattgccaccaatgcttctatcttggtgttgcaaccttggttggtctggccccccgcagtactaattattttgactgtcttggcctttaatctattgggagacggcctgcgagatgccctagatccccgcagtttaggggaataa

SEQ ID NO: 101708 - protein, 371 aa, Synechocystis sp.
MDWWKKLRRNSLARWGAILLLLFYVAVIGADIFAPYNPYNAQVDGSLLPPTQIHWRSPGGKWIGPTVYPTRQLPTDLETGLRPLEIDFSQPSPVRLWVQGDSYVWGQIKLPLPPSFAPVEIFPGIPGDRHLIGTLGPGKLNLLGTDEQGRDQFSRLLFGGRISLFIGLIGITISFPLGMVVGGIAGYFGGWLDVVLMRLVEVLMTIPGIYLLVALAAVLPPGLSSAQRFLLIVVITSFISWSGLARVIRGQVLSLKQQEYVQAAKAMGAGAPRIIVRHILPQTASYIIISATLAVPGFIVAESVLSLIGLGIQQPDPSWGNLLSIATNASILVLQPWLVWPPAVLIILTVLAFNLLGDGLRDALDPRSLGE

SEQ ID NO: 101709 - DNA, 1092 bp, Mesorhizobium loti MAFF303099
  CDS (1)..(1092): transl_table=11
atgacgccggagcaatcgaaggtcttccaggcgtcgcagttgcggctgatgtggtggaaattccgaaggcaccggcttgccgtggtatccggcatattcctggcagcgctttatttcgggatactgatctgcgagttcctagcgccctacaatctgcacacgcgcaacatggactacatctattcgccgccgcagcgggtgcgcctgttccacaacggccagttcgtcgggccgttcgtctatggccgccagatgacgctggatatggacacgctcaagcggaactacatcgagaatcaggatgatgttcagcggattcgtttcttctgcaagggcgacacttaccggttctgggggcttatcgaaggtaacaggcatcttttctgccctgccgaaaacggccagctctttctggccggcactgacaggctggggcgcgatgtgctctcgcgcatcatctttggcgcacgcatttcactgacaatcggcctcgtcggcatcagtttcagcttcctgctcggcattgtcatcggcggactggccggctatcacggcggtatcttcgacctgatcgttcaacgaataatcgaagttctgcaatcgatccccagcattccgctatggctggctctggcggcgatcatgccgataacctggagtccgatcctgatctatttcggcatcaccgtcatcctcgggctgctccactggaccggactggcgcgggccgtgcgttcaaagcttctagctttgcgcgaggaggattacgttctggccgcgcaattgatgggcgccagcagcagccgcatcatcgggcggcacctcattcccggcttcatgtcgcatctgatcgcgaccgcgacgatcgccatacccggcatgatcctgggcgagacggcgctgagcttcctcgggctcggcctgagggcgccgacaaccagctggggcatcctgctcaccgaggcacgcagcgtcagcgtcatcgctttctatccatggctgcttctgccgatgctccccgtcattctcgtcatcatggcgttcaacttcctcggcgacggcttgcgggacgccgcagacccctacaagtga

SEQ ID NO: 101710 - protein, 363 aa, Mesorhizobium loti MAFF303099
MTPEQSKVFQASQLRLMWWKFRRHRLAVVSGIFLAALYFGILICEFLAPYNLHTRNMDYIYSPPQRVRLFHNGQFVGPFVYGRQMTLDMDTLKRNYIENQDDVQRIRFFCKGDTYRFWGLIEGNRHLFCPAENGQLFLAGTDRLGRDVLSRIIFGARISLTIGLVGISFSFLLGIVIGGLAGYHGGIFDLIVQRIIEVLQSIPSIPLWLALAAIMPITWSPILIYFGITVILGLLHWTGLARAVRSKLLALREEDYVLAAQLMGASSSRIIGRHLIPGFMSHLIATATIAIPGMILGETALSFLGLGLRAPTTSWGILLTEARSVSVIAFYPWLLLPMLPVILVIMAFNFLGDGLRDAADPYK

SEQ ID NO: 101711 - DNA, 1140 bp, Mesorhizobium loti MAFF303099
  CDS (1)..(1140): transl_table=11
atgctggcccgcgatccatcaccgccgccgctgcccgccgaagggcccatcgtcgccaagccggcccgcggcaatgaaagctacatcgcgctcgtctggcgccggctgaagcgctcctggaccggcatggccgggctctggctcgtcgtgctgctgctggtgatggccgtgttcgccgaattcctggcgccgatggacccgaaggcgaccgatgtcggcttcgcgccgccgcaactgccctccttccacgatagggacggcaatttcgtcgcgaggccgcgggtctatgcgctggccgattcggccgacctcgatcctgtcaccttccagcccattgtcggccccgactacgaccatccaaggctgctcggcttctttaccgagggcgcgccctacaagctcttcgggctgatcccggcgaaccggcatttcttcgcctcgatggacggccagccggtgcatttcctaggcaccgacaaattcggccgtgatgtgctgtcgcgcgccatacatggctcacgggtctcgctgatgatcgcgctgacggtcgtcttcatcatcaccgtcatcggcaccaccgtcggcatggtttccggctatttcggcggccggttcgatatctggacgcagcgcttcgtcgaactggtgctcgcttttccgcagctgccgctctatctggcgctgacgacgctgatccccgtcaccgcgccgaccaatgtctttctcgccttcgtcatcatcgtcatgtcggcgctgggctgggcgcagatgtcgcgcgaggtgcgcggcaagacgttggcgctggcgcgcatcgaatatgtgcgcgccgccatggcggtcggcgccaccgaccggcgcatcatcctgcagcacatcttgcccaatgtgatgagccacgtgatcgttgccgtcaccttggcgatcccgacggtggtgctgctcgaatgcttcctcgggttcctcggcttcgcggtcaagccgccgctgatctcctggggtctgatgctgcaggacaccgcgacctattccgtcatcggcacctatccctggatactgtcgccagtcggtttcgtgctcgccaccgtctttgccttcaacgcgctgggcgacggcctgcgcgatgccgtcgatccgtattga

SEQ ID NO: 101712 - protein, 379 aa, Mesorhizobium loti MAFF303099
MLARDPSPPPLPAEGPIVAKPARGNESYIALVWRRLKRSWTGMAGLWLVVLLLVMAVFAEFLAPMDPKATDVGFAPPQLPSFHDRDGNFVARPRVYALADSADLDPVTFQPIVGPDYDHPRLLGFFTEGAPYKLFGLIPANRHFFASMDGQPVHFLGTDKFGRDVLSRAIHGSRVSLMIALTVVFIITVIGTTVGMVSGYFGGRFDIWTQRFVELVLAFPQLPLYLALTTLIPVTAPTNVFLAFVIIVMSALGWAQMSREVRGKTLALARIEYVRAAMAVGATDRRIILQHILPNVMSHVIVAVTLAIPTVVLLECFLGFLGFAVKPPLISWGLMLQDTATYSVIGTYPWILSPVGFVLATVFAFNALGDGLRDAVDPY

SEQ ID NO: 101713 - DNA, 1122 bp, Mesorhizobium loti MAFF303099
  CDS (1)..(1122): transl_table=11
atgactgacatcgcagccactgctcccgctatcgtcggccgctcgctatggggcgatgcctgggcgcgcctcaaggccaaccgcgccgccatgttcagcctctactacctcgccctgatcgggctcgtcagcgtgtttggcccctggttcgtgccgcatcagtacacgaccatctatgccgactatgtgcgcatgccgccaagcctgtcagcctatccgaagcccgacatgatcgagtccgcgctcaatgatgcgatcaagcgcatgcgggtcgatatcaaggaatggcaccaggagggcgatcacgtcttcgtcacggtcaagtcgaccaagccgatcgatgaccgcaacatccgctacctcgaccgctccgacgcctttgacgacaccaagatcgagagcaagtcgcccgacggtctcgaagtgacgatgagcgcgtcggtcaagcagcaatatttcctgttcggcaccgacaacacaggccgcgatctgctctcgcgcacgctgatggccgggcgcatctcgctggccatcggcctgctcgccggcgtcgtggcggtggtgatcggggtgatctacggcgccgccgccggtttctccggcggcaagatcgacgaggtgatgatgcgcatcgtcgatgtgctctactccttgccgttcatcttcttcgtcatcatgctggtggtgttcttcggccgcaacttcgtgctgatgttcctggccgtgggggcagtgctgtggctcgacatggcgcgcatcgtgcgcggccaggcgctgtcgatccgccgccaggaatatgtccaggcggcggaggccatgggcgtcggccagcgcggcatcctgttgcgccatgtcatccccaatttgctgggtccggtggtgatctacatgaccttgctggtgccgcaggtcatcatcctggagagtttcctgtcgttcctcggtcttggcgtgcaggagccgatgaccagttggggcgtgctgatctcggtcggcgccaagaatatcggtaccgccaactggctgctcctgttccccgccttcttcctcgtctcgacgctgtttgcgctgaatttcgtcggcgacggcctgcgcgacgcgcttgacccaagggatcgataa

SEQ ID NO: 101714 - protein, 373 aa, Mesorhizobium loti MAFF303099
MTDIAATAPAIVGRSLWGDAWARLKANRAAMFSLYYLALIGLVSVFGPWFVPHQYTTIYADYVRMPPSLSAYPKPDMIESALNDAIKRMRVDIKEWHQEGDHVFVTVKSTKPIDDRNIRYLDRSDAFDDTKIESKSPDGLEVTMSASVKQQYFLFGTDNTGRDLLSRTLMAGRISLAIGLLAGVVAVVIGVIYGAAAGFSGGKIDEVMMRIVDVLYSLPFIFFVIMLVVFFGRNFVLMFLAVGAVLWLDMARIVRGQALSIRRQEYVQAAEAMGVGQRGILLRHVIPNLLGPVVIYMTLLVPQVIILESFLSFLGLGVQEPMTSWGVLISVGAKNIGTANWLLLFPAFFLVSTLFALNFVGDGLRDALDPRDR

SEQ ID NO: 101715 - DNA, 1104 bp, Thermotoga maritima MSB8
  CDS (1)..(1104): transl_table=11
atgaagaagagagaacagatggaggagaaattctattatgcgtctcagtggcagctgatctggtggaggttcagaaaacacaagcttgcagtgataggaggggtggtgcttctcatcatttatgtttttgctattttctgtgagttctttgctccgtacgatccgaacaaatacaactacagatacccttacgcaccaccgcagaggatacactttttccacgagggaaagttcatagggccatttgtgtacggttacacctacacggtggatcttgagactttgaggaggatatacaaggaagataaaagcaagatcttcaagataaagttctttgttcgtggggacgagtacaaattctggggtatttggaaaacaaacattcacttcataggagtagaagatggtcacatgttccttcttggaacagacagtcttgggagagacatgctctcaaggatcatttacggtgcccgcatttccacgtccataggtttgataggggtgtttttgagcttcattcttggagttgccatagggggtatttctggatactttggtggtgctgtggacaacttcatccaaaggactatagaaattataaagagcatacctactatacctttatggttagctttgagtgctgctcttccacaaaattggccaccattgagagtttattttgtaatagtgataattctttctctcacaggttggacagatcttgcaagggttgtgagaagcaggttcttatctttgagggaagaagattttgttatggcagcaaaattcatgggggcttcggaggcgaggatcatcttcaggcacatgcttccttctttcatgagtcatctcatagcaagcatcacactttccataccggggatgatcctcggtgagacgagtctcagttttttggggcttggtttgaggccgcctgtgatcagctggggagtgcttcttcaggaagcacagaatctcacggttgtagctttgtatccgtggcttttgataccagttgtgtttgtgatcacaactgttctgtgttttaacttcgttggagatggtttgagggatgcggcagatccgtacgcgaacatgtag

SEQ ID NO: 101716 - protein, 367 aa, Thermotoga maritima MSB8
MKKREQMEEKFYYASQWQLIWWRFRKHKLAVIGGVVLLIIYVFAIFCEFFAPYDPNKYNYRYPYAPPQRIHFFHEGKFIGPFVYGYTYTVDLETLRRIYKEDKSKIFKIKFFVRGDEYKFWGIWKTNIHFIGVEDGHMFLLGTDSLGRDMLSRIIYGARISTSIGLIGVFLSFILGVAIGGISGYFGGAVDNFIQRTIEIIKSIPTIPLWLALSAALPQNWPPLRVYFVIVIILSLTGWTDLARVVRSRFLSLREEDFVMAAKFMGASEARIIFRHMLPSFMSHLIASITLSIPGMILGETSLSFLGLGLRPPVISWGVLLQEAQNLTVVALYPWLLIPVVFVITTVLCFNFVGDGLRDAADPYANM

SEQ ID NO: 101717 - DNA, 1110 bp, Deinococcus radiodurans R1
  CDS (1)..(1110): transl_table=11
gtgaccggcggccccgaaacccggaccccgctgcaaatggcgtggcggcgctaccgcaagtcgcggcccggcgtgattgcagggtgggtgctcatcgcgctctacgttatcgcgctgctttcgccctttctggcgccgtacaacatcaccacccagcatgagggctacgagtaccaacgcccgcagacggtgcacctcatccaccagggccgcctgcaccgcccgttcgtctacggctcgaccaccaagcgcgacccggtgaccttcgccaagaagacggtgcccgacaccgcgcacccgctgccggtccagtttttcgtgaagggcgagccttattccttcctgggccttcagtccgaccgccacctcttcggcgtgccggatggtcaggacgagtacggggaaaaggtgccgcgctacttcttcctctttggcaccgaccagcttgggcgcgacctgttttcacgcactttggtgggcgctcaggtgagcatgacggtgggggtcgtcggcgtgctgatttcgtttgccctcggcatcctgctcggcggcgtcagcgggtacttcggcggctgggtggacaccctgattcagcgggtggtggaggtgctgctgtcttttccccgcctgccgattctgctggcgctcgccacgctgattccggcgcgctggccctcgacctgggtgtacaccggcatcgtggcggtgctggcgctgatcggctgggcgagtctggcccgggtggtgcgcgggcaagtgctcgcggcacgcaacctcgattacgtgtcggcggcgcaggcgatgggcgcgagcaacctgcgcgtgattctgcggcacatcacccccaacctcagctcgtttctgctcgtcaccgcgaccctggcgctgccgggctacatcctgggcgaaagcaccctcagtttcctgggcctgggcatcaaggaaccgatgacgagctggggtctgctgctgcgcgacgcgagcaaactcgaagtcgtgagcagttacccctggctgctgtggccgggcctcttcgtctttatcagcgtcctcgccttcaacttcatgggcgacgccctgcgtgacgcggccgacacccagagccgttaa

SEQ ID NO: 101718 - protein, 369 aa, Deinococcus radiodurans R1
MTGGPETRTPLQMAWRRYRKSRPGVIAGWVLIALYVIALLSPFLAPYNITTQHEGYEYQRPQTVHLIHQGRLHRPFVYGSTTKRDPVTFAKKTVPDTAHPLPVQFFVKGEPYSFLGLQSDRHLFGVPDGQDEYGEKVPRYFFLFGTDQLGRDLFSRTLVGAQVSMTVGVVGVLISFALGILLGGVSGYFGGWVDTLIQRVVEVLLSFPRLPILLALATLIPARWPSTWVYTGIVAVLALIGWASLARVVRGQVLAARNLDYVSAAQAMGASNLRVILRHITPNLSSFLLVTATLALPGYILGESTLSFLGLGIKEPMTSWGLLLRDASKLEVVSSYPWLLWPGLFVFISVLAFNFMGDALRDAADTQSR

SEQ ID NO: 101719 - DNA, 1131 bp, Deinococcus radiodurans R1
  CDS (1)..(1131): transl_table=11
atgacgactgcaaccgcaccccagaaaatccagaaatccaagagccagtggcaggtcattcggacccagtttttccgtaaccccctggcccgcctgggcctgtttatcctgggctttctttatctcatcgcgctgttcgcgggctttctggccccctacggcctgaccgagtacagcacctccgaccgtatttcctgggcaccccccaccaagattcactggcaggatgacggcaagttcgcgccgcatgtctacggcctcaagcgcgacatcgacatggaaaccttccgtgacaagtacaccgaggacccttcggtcaagtgcccggtcaagttctttgtccgcaaccccgacattgaggaccgcacctacaagttcctgggctttatccccagcagcctcaagctgatgggcgtggacgaaccctgcaagctctatctgctcggcagcgacaacttcgggcgtgaccagttctcgcgcatcatgtacggctcgcagatcagcctgaccatcggcatcatcgcctcgctgctgtcgctggtgctggggctggtgctgggcggtatcgccgggtacttccggggcttggccgacacgctcatcatgcgtctggtcgaggtgctttcggccattcccgacctctttctgctgattctgctccgcgccatgttcccgctcgaagccaacccgattctggtgttctacatcgtgggcggtctgctggcgttcatcggctggggcgggattgcccgcgtggtgcgcggccagatcctgtcgggccgcgaaatggactatgtgcaggccgccaacgccctcggcgcgtcggacgcccgcatcatcggtcagcacctgctgcccaactcggccaccttcatcatcgtggcgatgtcgctggcgattcccggttacatcctcaccgaatcgggcctgagctttatcggcatcggcatcgtggagccttacgcctcgtggggcagcctgctcaagctagcgcaggacggcggtttcgagtcgctcgacacccgtccctgggtgctgctgccgggtgtgttcatcatgctggccgttctgggctggcagttcgtgggcgacggcctgcgtgacgcgttcgaccctcgccgccgccgctag

SEQ ID NO: 101720 - protein, 376 aa, Deinococcus radiodurans R1
MTTATAPQKIQKSKSQWQVIRTQFFRNPLARLGLFILGFLYLIALFAGFLAPYGLTEYSTSDRISWAPPTKIHWQDDGKFAPHVYGLKRDIDMETFRDKYTEDPSVKCPVKFFVRNPDIEDRTYKFLGFIPSSLKLMGVDEPCKLYLLGSDNFGRDQFSRIMYGSQISLTIGIIASLLSLVLGLVLGGIAGYFRGLADTLIMRLVEVLSAIPDLFLLILLRAMFPLEANPILVFYIVGGLLAFIGWGGIARVVRGQILSGREMDYVQAANALGASDARIIGQHLLPNSATFIIVAMSLAIPGYILTESGLSFIGIGIVEPYASWGSLLKLAQDGGFESLDTRPWVLLPGVFIMLAVLGWQFVGDGLRDAFDPRRRR

SEQ ID NO: 101721 - DNA, 1125 bp, Agrobacterium tumefaciens str. C58
  CDS (1)..(1125): transl_table=11
atggccgatattgctgtagccaccaccattcgccccgaccgcgccgccgtcgcatcgcaatggcaactcatctggtgggcgttcaagcgtcaccgtctggccatggccgctctcgtcgtgaccattgccatgtatgtcgtggccctcgtgcccggcttctttgcgatcaatgatccggtgctgcaaaatgcccgcgcgacgttttatccgccgcaacgggttcatttgatcgacacgacggatggtttctccgtcgggctgcattattaccctctcaagctgacccgtaaccccgaaacgctggccgccgtcttcgtcgaagacacgggcaagaaaataccgatccagctttttggtcgcggctacgaatattccgtgcttggactgttcgacaccaacatccatcttctggcctccaccgataagacgcgaccgctgtttcttttcggggctgaccggcttggccgcgatgtcttcagccgtgtcgtgcagggttcgcagatttccctgtcgattggtcttgtcggcgtgttcttttcgctgctgctcggcgtcgtcttgggcggtatttccgggtattatggcgggcgtatcgatttcgtcatgcagcgggtaatcgatttcgtcctgtcgctgcccaccatccccatatggctggccatggcggcggcgctgccgcagggctggcccgcgacgcttcaatatatgatgatcaccatcatcctctccctgactggctgggcgcagcttgcccgcgtcgtgcgtggcaggttcctgtcgctcagaacggaagagtttgtcgctgctgccagattggacggcgtacccgaagggcgcatcatcttccgtcacatgctgcccagcttctccagccacatcatcgcatccgtcacgctggctgtacccgcaatgatcctcgcggaaacgtcgctgtccttcctcggtctcggccttcagccgccaacgatttcgtggggtgtgctgctgcgcgaggcccagaacatccgttcgattgcgacggctccgtggctcttcctgcccggtgttgccgttgttgttgccgtcatggcgctgaacctcctcggtgatggtctgcgcgatgcagccgacccctataacaagtga

SEQ ID NO: 101722 - protein, 374 aa, Agrobacterium tumefaciens str. C58
MADIAVATTIRPDRAAVASQWQLIWWAFKRHRLAMAALVVTIAMYVVALVPGFFAINDPVLQNARATFYPPQRVHLIDTTDGFSVGLHYYPLKLTRNPETLAAVFVEDTGKKIPIQLFGRGYEYSVLGLFDTNIHLLASTDKTRPLFLFGADRLGRDVFSRVVQGSQISLSIGLVGVFFSLLLGVVLGGISGYYGGRIDFVMQRVIDFVLSLPTIPIWLAMAAALPQGWPATLQYMMITIILSLTGWAQLARVVRGRFLSLRTEEFVAAARLDGVPEGRIIFRHMLPSFSSHIIASVTLAVPAMILAETSLSFLGLGLQPPTISWGVLLREAQNIRSIATAPWLFLPGVAVVVAVMALNLLGDGLRDAADPYNK

SEQ ID NO: 101723 - DNA, 1092 bp, Sinorhizobium meliloti 1021
  CDS (1)..(1092): transl_table=11
atgaccgaggagcaggtgcgggtgaaccaggcatcacagctgcgcctgatgtggtggaagttcaagcgccacaaggtcgcgctcgcctcgggcatcttcctcgcggtgctctacggcatgatcctgatctgcgagtttctcgcgccctacgacctgcacacgcgcaatgtcgatttcatctatgcgccgccgcagaggattcactttttccacgagggtgaattcgtcggccccttcgtctacggccggacgatgacgctggacatggacacgctgaagcgcaactacgcggacgatacgtcgaaagtcgagccgatccggttcttctgccgcggcgacgactaccgtttttggggtttgttcgaaagcaatctgcatctggtttgcccggcggagggagggcagcttttcctcctgggcacggaccgtctcggccgcgacgtgctgtcgcggatcatctacggcgcgcggatatcgctgacgatcggacttctcggcatcaccgtcagcttcgttctcggcatcgtcatcggcgggcttgccggatatcatggcgggatcttcgaccttgtggtccagagactgatcgaagtcctgcagtcgataccgagcattccgctctggctttctctggcggcgatcatgccggcgacatggagcccgcttctcatctatctgggtataacggtcatcctaggccttctcgactggaccggccttgcgcgcgccgtgcgctcgaagctgctcgcgctcagggaggaagactatgtccttgcggcgcagctgatgggcgccagaagcggacgcatcatagggcgacacctcgttccgggcttcatgtcccatctcatcgcaacggcaacgatctccatacccggcatgatcctcggagaaacggcattgagcttcctcggcctcggcctgcgccctccgataaccagctggggaatcctgctcaccgaggcaaagagcgtcagcgtcattgccttctatccttggctgcttttccccacgatcccggtcattcttgtgatattggcgttcaacttcctgggagacgggttgcgcgacgccgccgatccctacaaataa

SEQ ID NO: 101724 - protein, 363 aa, Sinorhizobium meliloti 1021
MTEEQVRVNQASQLRLMWWKFKRHKVALASGIFLAVLYGMILICEFLAPYDLHTRNVDFIYAPPQRIHFFHEGEFVGPFVYGRTMTLDMDTLKRNYADDTSKVEPIRFFCRGDDYRFWGLFESNLHLVCPAEGGQLFLLGTDRLGRDVLSRIIYGARISLTIGLLGITVSFVLGIVIGGLAGYHGGIFDLVVQRLIEVLQSIPSIPLWLSLAAIMPATWSPLLIYLGITVILGLLDWTGLARAVRSKLLALREEDYVLAAQLMGARSGRIIGRHLVPGFMSHLIATATISIPGMILGETALSFLGLGLRPPITSWGILLTEAKSVSVIAFYPWLLFPTIPVILVILAFNFLGDGLRDAADPYK

SEQ ID NO: 101725 - DNA, 1128 bp, Sinorhizobium meliloti 1021
  CDS (1)..(1128): transl_table=11
atgaccatcgaagccgaaagcactcttccggtggcgatcgagcccgaggaaaagcaccaccacgagagctactccgctctcgtctggcgccggttgaagcgttcctggaccggcctgctcggccttgtcctcgtctgcctcctgatcctgatggcggtcttcgccgagttcctgtcgcccgtcgatccgaaggcgacggacgtagccttcgctcagccgcagacgatcagcttccgggacaaggaggggaatttcgtctttccgccgaggagctatccggtgcgggagacggaggagctcgatcccgttaccttccagccgatcatcggaccggattacgacaacccgcaggtcctcggcttcttcgtcaagggcgcaccctacaggctcttcgggctgatcccggccgagcggcatctgttcggtgccgtcgacggtacgccggtgcatctgctcggcaccgacaagttcggccgcgacgtgctgtcccgcatcctctacggctcgcgcatctcgctgatgatcgcgctcaccgtcgtcttcatcgtcaccgtggtcgggaccaccgtcggcatggtgtccggctatttcggcgggcgcttcgatgcctgggtgcagcgtttcgtcgaacttgtgctcgccttcccgcaattgccgctctatttggcgctcgcctcactgatcccggtcaccgcgccgaccaatgtcttcctcgccttcgtcatcatcgtgatgtcggcgctcggctgggcgcagatgtcgcgcgaggtgcgcggcaagaccctggcgcttgcgcggatcgaatatgtgcgggcggcgatcgccatcggcgccacggaccggcgcatcatattccagcacatcttcccgaatgtgatgagccacgtcatcgtcgcggtgacgctcgccatcccgcatgtggtgctgctcgagtccttccttggtttcctcggctttgcggtcaagccgccgctgatctcctgggggctgatgctgcaggacacggcgaattattccgcgattggttcctatccctggattctctcgccggtcgccttcgtgctcgtcaccgttttcgccttcaatgcgctgggcgacggcctgcgcgacgcaatcgacccctattga

SEQ ID NO: 101726 - protein, 375 aa, Sinorhizobium meliloti 1021
MTIEAESTLPVAIEPEEKHHHESYSALVWRRLKRSWTGLLGLVLVCLLILMAVFAEFLSPVDPKATDVAFAQPQTISFRDKEGNFVFPPRSYPVRETEELDPVTFQPIIGPDYDNPQVLGFFVKGAPYRLFGLIPAERHLFGAVDGTPVHLLGTDKFGRDVLSRILYGSRISLMIALTVVFIVTVVGTTVGMVSGYFGGRFDAWVQRFVELVLAFPQLPLYLALASLIPVTAPTNVFLAFVIIVMSALGWAQMSREVRGKTLALARIEYVRAAIAIGATDRRIIFQHIFPNVMSHVIVAVTLAIPHVVLLESFLGFLGFAVKPPLISWGLMLQDTANYSAIGSYPWILSPVAFVLVTVFAFNALGDGLRDAIDPY

SEQ ID NO: 101727 - DNA, 1119 bp, Nostoc sp. PCC 7120
  CDS (1)..(1119): transl_table=11
atgaattggtggcaaagactccagaaaaatcccttagcacaatttggggctattttacttttaatattttatttggcggtgattgcggctgattttatcgctccatacgacccttacacttctcaaccgaatggttcactattaccgccaactaagatttattgggtttcaaaaacatcaggtaagtttatcggcccccacgtttatcccacaatacaaggcaatacagacttagaaacaggcgatcgccaactcattgtagacgataaaaagccctcacctgtgcgtttatttgtctctgggccagaataccgactcttacagctaagtttacccctaccgcccaagtgggaagaaaccacaattatccccggtatccccttaaattggcatttattcggcgcagataatggggcaaaactcaacatcttaggtacggacgaacaaggccgcgaccaattcagccgtctcctacatggtgggcgcattagtatgtttatcggcattattggggtggtaattacttttcccctcggtttgctgatagggggtatttccggctatttcggcggttggacggacagcattattatgcggattgcagaagtgctgatgactttccccagtatttatctgttggttaccttgggggcagttttaccggctggtttaactagcagtcagcgatttttactcatagttttgatcacttctgtaattagctgggctgggttagccagggtaattcgtggacaagtgctatcaatcaaagaacgagaatttgtccaagccgccagggctatgggtggtaagccaatatatattattctgcgtcatgttctgccgcaaactgctacttatgtaattatctctgctaccttggcggttcctagctttatcggttcagaagcaatactcagtctcatcggtttaggcattcaacaaccagacccatcttggggtaatatgctatctctagccagcaatgcttctatattagtgctgcaaccttggttaatttggccgccggctgtgttaattattttgacagttttagcttttaatttactaggtgatgggttaagagatgcccttgatcctcggagtttacgccgctag

SEQ ID NO: 101728 - protein, 372 aa, Nostoc sp. PCC 7120
MNWWQRLQKNPLAQFGAILLLIFYLAVIAADFIAPYDPYTSQPNGSLLPPTKIYWVSKTSGKFIGPHVYPTIQGNTDLETGDRQLIVDDKKPSPVRLFVSGPEYRLLQLSLPLPPKWEETTIIPGIPLNWHLFGADNGAKLNILGTDEQGRDQFSRLLHGGRISMFIGIIGVVITFPLGLLIGGISGYFGGWTDSIIMRIAEVLMTFPSIYLLVTLGAVLPAGLTSSQRFLLIVLITSVISWAGLARVIRGQVLSIKEREFVQAARAMGGKPIYIILRHVLPQTATYVIISATLAVPSFIGSEAILSLIGLGIQQPDPSWGNMLSLASNASILVLQPWLIWPPAVLIILTVLAFNLLGDGLRDALDPRSLRR

SEQ ID NO: 101729 - DNA, 1176 bp, Agrobacterium tumefaciens str. C58
  CDS (1)..(1176): transl_table=11
atgacttcatccattccgaaatcaggcgaagcgctgccccattacgtctcgacggcacccttcgacccgtcgctcatcgaacccaacacctctggaatggcggccttcagcaaggcatcacagctgaagctgatgtggtggcaattccgccagcacaagatcgctgtgtggtccggcgcgtttctggcgctgatctatctttcgatcctgatcagcgagttcctcgccccttacaatcttcatacccgcaatatcgagcatatctacgcgccgccgcaggctatccacctcttcgacgacggaaaatttgtcggtcccttcgtttatggccgggaaatgacgctcgacatggacaatctgaggcgcgtctaccgggatgtgccgacggatatccagccgctgcgcttcttttgcaagggcgatacctatcgcttctggggcatgtttgagggcagaacccactttgtatgcccggccgaaggcggtgaaatgttcctgctcggcactgacaggctggggcgcgatgtgctgtcgcggattatctacggcgcgcgcatctcgctgaccatcggtcttctcggtgttgccatgagcttcgttctcggcattgtgatcggcggtctggcgggctatcgcggcggcacctttgacctgattgtccagcgcatcatcgaggtgctgcaatccatccccagcattcctctctggctggcgctggcggccatcatgccggtgacctggagtccgatcctcgtctatctcggcatcaccatcattctcggcatgctggactggacgggccttgcgcgcgccgtgcgctcgaagcttctggcgcttcgcgaggaagactatgttttatctgcgcaattgatgggtgccggcacaccgcgcatcatcggcagacaccttatccccggcttcatgtcgcatctcatcgcttcggccaccctgacgatacccggcatgattctcggcgagaccgccctgagcttcctcggcctgggtctcaggccaccgatcacaagttggggaattctgctcacggaggcgcgcagcgtcagcgtcattgcgctatatccgtggcttctcatcccgacgatcccggtcgttctcgtcattctggcctttaatttcttcggcgacggactacgtgatgctgcggaccccttcagataa

SEQ ID NO: 101730 - protein, 391 aa, Agrobacterium tumefaciens str. C58
MTSSIPKSGEALPHYVSTAPFDPSLIEPNTSGMAAFSKASQLKLMWWQFRQHKIAVWSGAFLALIYLSILISEFLAPYNLHTRNIEHIYAPPQAIHLFDDGKFVGPFVYGREMTLDMDNLRRVYRDVPTDIQPLRFFCKGDTYRFWGMFEGRTHFVCPAEGGEMFLLGTDRLGRDVLSRIIYGARISLTIGLLGVAMSFVLGIVIGGLAGYRGGTFDLIVQRIIEVLQSIPSIPLWLALAAIMPVTWSPILVYLGITIILGMLDWTGLARAVRSKLLALREEDYVLSAQLMGAGTPRIIGRHLIPGFMSHLIASATLTIPGMILGETALSFLGLGLRPPITSWGILLTEARSVSVIALYPWLLIPTIPVVLVILAFNFFGDGLRDAADPFR

SEQ ID NO: 101731 - DNA, 1137 bp, Agrobacterium tumefaciens str. C58
  CDS (1)..(1137): transl_table=11
atgatggcatttgacgacctgaaaaacgaaacagcggttatgccaaagcccgaacgcggcacgcagggtaacgagtcctatctcgcgctggtgtggcggcgtctcagacgctcggttaccggcatgctcgggctggtgctggtggccttgctgatcctgatcgccatttttgccgatttcttcgcgccgatgaacccgctggaaaccaacgccagcttctcaccgccgcaagtggttcgtttcaccgacaaggacggtaatttcagtcctttcccccgcgtctatgcgactgccgacacagcagaactcgatccggtcacttttcagcccatcgtcgggccggactatgacaatccggtttatctgggcttcttcgtcaaaggctcggaatacaggcttctgggtctcatcccgatgagccggcatttcttcggctcgacggatggcaagcccgtgcattttcttggcaccgacaagttcggacgcgacgtgctgtcgcgcgccatctatggctcgcgcatctcgctcgccatcgcactcagtgtcgtcgccatcgtcacggtcatcggcaccagtgtcggcctgatatcaggttatttcggcgggccgctggatgcctggttgcagcgtttcgtagaagtggtgctcgctttcccgcaattgccgctttatctcgcgctgacctcgctcattccggttaccgccccgacgactgttttcctcctcttcgtggtcggcgtcatgtccgcgctcggttgggcgcagatgtcgcgggaggtgcgcggcaagacgctggcgctggcgcgcatcgattatgtgcgggcagcgattgctgtcggggccaccgaccggcgcatcatcttccagcacattctgccgaatgtgatgagccacgtgatcgttgccgtcaccctgcatattccaagcgtcgtgctcctggaatccttcctcggtttcctcggctttgcggtgaagccgccgctcatctcctgggggttgatgctgcaggataccgcgacctattccgtcatcggttcctatccgtggatcctggccccggtcggtttcgtgctggtcacggttttcgccttcaacgcgctgggcgatggcctgcgcgatgccgtcgatccctattga

SEQ ID NO: 101732 - protein, 378 aa, Agrobacterium tumefaciens str. C58
MMAFDDLKNETAVMPKPERGTQGNESYLALVWRRLRRSVTGMLGLVLVALLILIAIFADFFAPMNPLETNASFSPPQVVRFTDKDGNFSPFPRVYATADTAELDPVTFQPIVGPDYDNPVYLGFFVKGSEYRLLGLIPMSRHFFGSTDGKPVHFLGTDKFGRDVLSRAIYGSRISLAIALSVVAIVTVIGTSVGLISGYFGGPLDAWLQRFVEVVLAFPQLPLYLALTSLIPVTAPTTVFLLFVVGVMSALGWAQMSREVRGKTLALARIDYVRAAIAVGATDRRIIFQHILPNVMSHVIVAVTLHIPSVVLLESFLGFLGFAVKPPLISWGLMLQDTATYSVIGSYPWILAPVGFVLVTVFAFNALGDGLRDAVDPY

SEQ ID NO: 101733 - DNA, 1137 bp, Thermosynechococcus elongatus BP-1
  CDS (1)..(1137): transl_table=11
atgactccttggcaaaccctgcggcgtaaccctcttgtgatgttcagtttgggggtgttgctgacattgtacctgctggcgatcgctgccgattttgtcgcaccctatagtccctatgcgtttcaggtagatggtgccctgctgccccccacccgtatttactggcacacccccaatggtcagtggcttgggccccatgtctatcccactcgcctaggccctgtgaacttggaaacgggggaacggcctttgattgtggactggcaggaaccgtcgcccattcgcctatttgtcaagggtagcccctatcgcttcctggaaattaccctgcccctaccgaagcgctggagtctcaccaatgtgcaaattgaaccgcgtacgatctttgcggggttccccagcgatcgccacctgtttggcacggtgggcaagggctatctgaacctgttgggaaccgatgaccaaggacgcgatcagctgagtcggctgctctttggtgcccgcattagcctcagtattgggcttgtgggggtggcgatcgccttcccgattggcattttggtgggtgccatttccggctactttggcggctggctcgatgcagtgttgatgcggggtgttgaggtgctgatgacgctgccgaccatctatctgctagtggccttggcggccgtgctgccggtgggactcagtagtggtgagcgattcctgctgattacaattatcacgtcctttgtgagctgggcaggactggcgcgggtcattcgtggtcaggttttaggcattagggaaatggcctttgtccaggcggcacaggtcatgggggggcgatcgctctacattattgtgcggcacattattccccaaacagcgacctacgtaattattgcggcaacgctctcaattcccagctttattgtggcggaatcggtgctcagtctcattggcttggggatccaacagccggatccctcctgggggaatatgctgtccttggcaaccaatgcctcaatcttggtcctacagccctggttagtctgggcaccggccacgctgattgtgcttacggtgctgtgtttcaacattgtcggcgatggtctgcgggatgcccttgatcctaaggggatacaaaaatag

SEQ ID NO: 101734 - protein, 378 aa, Thermosynechococcus elongatus BP-1
MTPWQTLRRNPLVMFSLGVLLTLYLLAIAADFVAPYSPYAFQVDGALLPPTRIYWHTPNGQWLGPHVYPTRLGPVNLETGERPLIVDWQEPSPIRLFVKGSPYRFLEITLPLPKRWSLTNVQIEPRTIFAGFPSDRHLFGTVGKGYLNLLGTDDQGRDQLSRLLFGARISLSIGLVGVAIAFPIGILVGAISGYFGGWLDAVLMRGVEVLMTLPTIYLLVALAAVLPVGLSSGERFLLITIITSFVSWAGLARVIRGQVLGIREMAFVQAAQVMGGRSLYIIVRHIIPQTATYVIIAATLSIPSFIVAESVLSLIGLGIQQPDPSWGNMLSLATNASILVLQPWLVWAPATLIVLTVLCFNIVGDGLRDALDPKGIQK

SEQ ID NO: 101735 - DNA, 1161 bp, Vibrio vulnificus YJ016
  CDS (1)..(1161): transl_table=11
atgacgacacaagcaattcatctatttaatcgactgtttggtcgcaaaaaagccacgcttgatttagccaccgcgacccaatggcagctcatcggactcaaaatgcgtcagcataaactggcgtggtacagcatgtggttcctcgtgtgggtttactttattgccatttttgctgagttttttgctccgtttgatcccagtgataactggcgccgttacacctatgcgccaccacaagcggtgagcttgattgaatccacggaggatggatggcgttgggcgccacaccttgagttttataacagcaaaaccgatccacgcacgttaaaacgtcactacaccctaaatgagaacaaaaaagtgtatttctccttttttggtgagactgagcgttactacttgctgggctttatcccaatgaatcgcaagtttgtggtgccacatgatccgaagcagccattttttgtgctcggttctgaccgaatggggcgcgatatgttgtctcgcctgatttatggtgcgcgcatttctctctcggtcggtttgatgggggtattcaccacctttgtgctcggcattgtcattggcggtatctctggctacttcggtggggcgatcgataacttcattcagcgcagtatcgagtttatgaagtccattccaaccttgcctttgtggatggccctttcggcctcattgccagcggaatggagttctctcaccaagtatttcttgatcaccattattttaggtttggtctcttggccggacatggcgcgagtggtgcgcagccgctttatgtcattgcgcagcgaagagtacgtcgcggcagcgtggctcgatggcaacacaccgtttgaaatcatccgccgttacatggtgccgaacttcctgagccacattattgcggtggtgacgctggcgattcccgcgatgattctgggtgaaaccgcactgagcttccttggtcttggtttacaggcgccgatggtgagttggggcgtactgctgcaagaagcgcaaaacatccgcgcattggcggaagcggcttggctgttgattcctgccgcagcggtgattgtggtgattttggcaatgaactttgtgggcgatggtttacgtgatgcttgtgacccataccacgatcagggagcgaaataa

SEQ ID NO: 101736 - protein, 386 aa, Vibrio vulnificus YJ016
MTTQAIHLFNRLFGRKKATLDLATATQWQLIGLKMRQHKLAWYSMWFLVWVYFIAIFAEFFAPFDPSDNWRRYTYAPPQAVSLIESTEDGWRWAPHLEFYNSKTDPRTLKRHYTLNENKKVYFSFFGETERYYLLGFIPMNRKFVVPHDPKQPFFVLGSDRMGRDMLSRLIYGARISLSVGLMGVFTTFVLGIVIGGISGYFGGAIDNFIQRSIEFMKSIPTLPLWMALSASLPAEWSSLTKYFLITIILGLVSWPDMARVVRSRFMSLRSEEYVAAAWLDGNTPFEIIRRYMVPNFLSHIIAVVTLAIPAMILGETALSFLGLGLQAPMVSWGVLLQEAQNIRALAEAAWLLIPAAAVIVVILAMNFVGDGLRDACDPYHDQGAK

SEQ ID NO: 101737 - DNA, 1179 bp, Unknown
  Unidentified
  CDS (1)..(1179): transl_table=11
atgacgctgatcgcacgcgagccgatcgaagccaccacgcaagcccccctcggcgaggcggtgccgccgacccgaaaccgcttgtcgctgtcgccgctgaacaagcggcgctggcagaacttcaaagccaatcgtcgcggctattggtcgttctggctgtttttggtgctgttcggcgtctcgctgttcgccgaatttatcgccaacgaccggccgctgctgatcaaactcgacggccattattattttccggcggtggtgacctattctgagaccacattcggcggtgacttcgagacggcggcagactatcgcgatccgtttttgcagaagctgatcgccgacaagggcggcaccgtgatctgggcgccgatccgctattcctacgggacacacaatctcgatctgccgacgccggcgccgtcgaagccgacctggatgctgaccgagcaggaatgtgccgcagtggtcgccaagaagggcgtgaagagctgccgcgatctcgaatacaactggctcggtaccgacgatcagggccgcgacgtggtcgcgcggctgatctacggcttccggatctcgatcctgttcggcctcagtctgacgatcatctcgtcggtcatcggcgtcgctgctggtggcatccagggctattttggcggctgggtcgatctcggtttccagcgcttcatcgaagtgtggaccgcgatcccgtcgctgtatctgctgctgatcctgtcctcggtgctggtgcccggcttcttcgtgctgctcggcatcctgctgctgttcagttgggtgtcgttggtcggtctggtgcgcgccgaattcctgcgtggacgcaatttcgaatacatcacggcggcacgcgcgctcggcgtctccaatgccaaaatcatggtgcggcacctgctgccaaacgcgatggttgcgacgatgacgtttctgccgttcatcgtctcctcctcggtgatgacgctgaccgcgctcgacttcctcggcttcggcctgccgccaggctcgccgtcgctgggtgaactgctggcgcagggcaaggccaacgttcaggcgccatggctcggcttcaccggcttcttcgcggttgccatcatgctgtcgctgctgatcttcatcggcgaagccgtccgcgacgccttcgacccgcgcaagacgttcaggtga

SEQ ID NO: 101738 - protein, 392 aa, Unknown
  Unidentified
MTLIAREPIEATTQAPLGEAVPPTRNRLSLSPLNKRRWQNFKANRRGYWSFWLFLVLFGVSLFAEFIANDRPLLIKLDGHYYFPAVVTYSETTFGGDFETAADYRDPFLQKLIADKGGTVIWAPIRYSYGTHNLDLPTPAPSKPTWMLTEQECAAVVAKKGVKSCRDLEYNWLGTDDQGRDVVARLIYGFRISILFGLSLTIISSVIGVAAGGIQGYFGGWVDLGFQRFIEVWTAIPSLYLLLILSSVLVPGFFVLLGILLLFSWVSLVGLVRAEFLRGRNFEYITAARALGVSNAKIMVRHLLPNAMVATMTFLPFIVSSSVMTLTALDFLGFGLPPGSPSLGELLAQGKANVQAPWLGFTGFFAVAIMLSLLIFIGEAVRDAFDPRKTFR

SEQ ID NO: 101739 - DNA, 1152 bp, Silicibacter pomeroyi DSS-3
  CDS (1)..(1152): transl_table=11
atgacccaacttcccgacggacgctatgtcgatgacgccccctatgacccgcaacagtcgatccagcagctggaacggcgcgatctggacgcgcccaactggctgttggtctggcgcaagttccgcacccacaagctgggtctgatctcgggcatcttcctgctgttgagttacctgttgctgcccttcatgggcttcatcgcgccctattcccccaactaccgcaacgcagatcacctctatgccccgccgcaggcggtgcgctgggtgcatgagggcgatttcctggggcccttcatctatccgatcaccgccgaggcggatttggagacctttcagtggacctttgtccccgataccgagaacccgcagcgcatccgcttcttctgcgagggggacagttacaaactggccgggctgatcgagagcgacacccatctgttttgcgcgcccgagggggcgacactgttcctgtggggctcggaccggctgggccgcgacgtgttcagccgtatcctctatggcgcacagctgtcgctgaccgttggcctgatcggcatctcggtgtccttcgtgctgggcatcttctttggctcgctggcgggctatctgggcggcaagacggactgggtgatcaaccgggtgatcgagattctgcgctcgctgccggaactgccactttggctcgcgctgtcggcagcggtgccgtcgaactggtcgccggtggcggtgttcttcatcatctcggtgatcctcgggatcctcgactggccggggctggcgcgctcggtgagggccaagttcctgtccctgcgcgaagaggaatatgtgcgggccgccgagatgatgggcgcgggcaaggggcgggtcatccgcaagcatctgctgcccaatttcatgtcgcacctgatcgccagcgcgacgctgtcgatcccggcgatgatcctaggcgagaccgcgctcagcttcctggggcttggcctgcgggcgcccgctgtcagctggggggtgatgctgaacgacgcccagaacctggccagcatcgagctttatccctggaccgcgatcccgatgctacccatcgtggtggtggtgctggccttcaacttcctgggcgacggcctgcgcgacagtctcgacccctatagctga

SEQ ID NO: 101740 - protein, 383 aa, Silicibacter pomeroyi DSS-3
MTQLPDGRYVDDAPYDPQQSIQQLERRDLDAPNWLLVWRKFRTHKLGLISGIFLLLSYLLLPFMGFIAPYSPNYRNADHLYAPPQAVRWVHEGDFLGPFIYPITAEADLETFQWTFVPDTENPQRIRFFCEGDSYKLAGLIESDTHLFCAPEGATLFLWGSDRLGRDVFSRILYGAQLSLTVGLIGISVSFVLGIFFGSLAGYLGGKTDWVINRVIEILRSLPELPLWLALSAAVPSNWSPVAVFFIISVILGILDWPGLARSVRAKFLSLREEEYVRAAEMMGAGKGRVIRKHLLPNFMSHLIASATLSIPAMILGETALSFLGLGLRAPAVSWGVMLNDAQNLASIELYPWTAIPMLPIVVVVLAFNFLGDGLRDSLDPYS

SEQ ID NO: 101741 - DNA, 1125 bp, Silicibacter pomeroyi DSS-3
  CDS (1)..(1125): transl_table=11
atgacagccccaagccagaccgccaaggaagcctatttcaccgcctcgcagcggcagttgatctgggcaaggttcaagaaacagcgcgctgccatggtggcggccaccgtgctggtggtgctgatcctgtcgggcctctttgcccccttcctgtcgccctatgacccgacggttgcggggcgggacaaggattacctgaacggcgcgccgcaaattccgaagttctgcgacaagaacggctgttccctgcgccccttcctgcacacggtcacccgcgaacgctcgcttgccaccaatttccgttgggtggaaaaggtgaacgaggatgaacggcgctatgtgcagttcttcgtgcagggcgacagttacaagctgtttggcttcatccccggcaacatccacctgttcggcatggatcagggctatgtccacctgttcggcaccgacagcgcgggcaaggatatcttcagccgcaccctgcacgcggtctggacctcgcttcaggtcggaacgctaggggttctgatctcatttgtgctggcgctcgccatcggcgggatcgcgggctattacggcggcatgatcgacagcgtgatccagatggtgacggacgcggtgcgaacgattccatccatcccgcttttcatggccatcgccgcctttatcccgccggaatggtcggccgagacgcggttctttgtcattaccctgatcctggggctggtcggctggccgacgctggcgcggcgggtgcgcacgcacctgctgaccgagcgcaatcaggaatacgtgctggccgcgcaactttgcggtgcctcgcccagccacgtcatccgccgccacctgctgcccagtttcaccagttacatcatcgtcgatctggtaatctcgtttccctatgtcgtgctcagcgaaaccgcgctcagcttcatcgggctggggctcaaggacccggttaacagcctgggcgtgatgttgcagaacgtgaccaaggccgacgtgctgctgaactatcagtggtatttcatcccggtcctgttcttcatcgcgctggtcatggcctttgtctttgtcggcgacgggctgcgcgacgcggccgatccctattcggagagccgtaaatga

SEQ ID NO: 101742 - protein, 374 aa, Silicibacter pomeroyi DSS-3
MTAPSQTAKEAYFTASQRQLIWARFKKQRAAMVAATVLVVLILSGLFAPFLSPYDPTVAGRDKDYLNGAPQIPKFCDKNGCSLRPFLHTVTRERSLATNFRWVEKVNEDERRYVQFFVQGDSYKLFGFIPGNIHLFGMDQGYVHLFGTDSAGKDIFSRTLHAVWTSLQVGTLGVLISFVLALAIGGIAGYYGGMIDSVIQMVTDAVRTIPSIPLFMAIAAFIPPEWSAETRFFVITLILGLVGWPTLARRVRTHLLTERNQEYVLAAQLCGASPSHVIRRHLLPSFTSYIIVDLVISFPYVVLSETALSFIGLGLKDPVNSLGVMLQNVTKADVLLNYQWYFIPVLFFIALVMAFVFVGDGLRDAADPYSESRK

SEQ ID NO: 101743 - DNA, 1119 bp, Anabaena variabilis ATCC 29413
  CDS (1)..(1119): transl_table=11
atgaattggtggcaaagacttcagaaaaatcctttagcgcaatttggggctattttacttttaatattttatttggcggtgattgcggctgattttatcgctccatacgacccttacacttctcaaccgaatggttcgctattaccgccaactaagatttattgggtttcaaaaacatcaggtaagtttatcggcccccacgtttatcccacaacacaaggtaatacagacttagaaacaggcgatcgccaactcattgtagacgataaaaagccctcacctgtgcgtttctttgtctctgggccagaataccgactgttacagctaagtttacccctaccccccaagtgggaagaaaccacaattatccccggtatccccttaaattggcatttattcggtgcagataatggggcaaaactcaacatcttaggtacggacgaacaaggccgcgaccaatttagccgcctcctacatggtggacgcattagtatgtttatcggcattattggggtggtaattacttttcccctcggtttgctaatagggggaatttccggctatttcggtggttggacggacagcattattatgcggattgcagaagtgctgatgactttccccagtatttatctgttagttaccttgggggcagttttaccggctggtttaactagcagtcagcgatttttactcatagttttgatcacctctgtaattagctgggctgggttagccagggtaattcgtggacaagtgctgtcaatcaaagaacgagaatttgtccaagccgccagggctatgggtggtaagccaatatatattattctgcgtcatgttctgccgcaaactgctacttatgtaattatctctgctactttggcggttcctagctttatcggttcagaagcaatactcagtctcatcggtttaggcatccaacaaccagacccatcttggggtaatatgctatctctagctagcaatgcttccatattagtgctgcaaccttggttaatttggccgccagccgtgttaattattttgacagttttagcttttaatttactcggtgatggccttagggatgcccttgatcctcggagtttacgccgctag

SEQ ID NO: 101744 - protein, 372 aa, Anabaena variabilis ATCC 29413
MNWWQRLQKNPLAQFGAILLLIFYLAVIAADFIAPYDPYTSQPNGSLLPPTKIYWVSKTSGKFIGPHVYPTTQGNTDLETGDRQLIVDDKKPSPVRFFVSGPEYRLLQLSLPLPPKWEETTIIPGIPLNWHLFGADNGAKLNILGTDEQGRDQFSRLLHGGRISMFIGIIGVVITFPLGLLIGGISGYFGGWTDSIIMRIAEVLMTFPSIYLLVTLGAVLPAGLTSSQRFLLIVLITSVISWAGLARVIRGQVLSIKEREFVQAARAMGGKPIYIILRHVLPQTATYVIISATLAVPSFIGSEAILSLIGLGIQQPDPSWGNMLSLASNASILVLQPWLIWPPAVLIILTVLAFNLLGDGLRDALDPRSLRR

SEQ ID NO: 101745 - DNA, 1056 bp, Synechococcus elongatus PCC 7942
  CDS (1)..(1056): transl_table=11
atgactgagcggcgatcgccattgcctcgatcgtggacgagttggggcgtgggtctcttgctgctgctctatctcggggccttgggcgcagactgcttagccccttacaacccctacagttcgcaagccgacgcagccctattgccacccagccaaatcttctggcgcaatcgccaaggccaatggcttggcccccatgtctacccagtgcgccagggccccatcgatctggagactggtcagcgggaagtgatcactgactggaatgccccatcgcctctccgcatctgggtggttggcgatccgtaccgagtgctgagttggaagggcgatcgccatctcctcggcaccacaggacccggcaaactgcatctgctgggaaccgacgatcaggggcgcgatcagttcagtcgcttgctctacggcagccgcattagtttgagtgtgggcctagtcggtgtgattctgaccttcccgctcggcatcttggtgggcggcatcgccggctactggggcggctgggtcgacgcactgatcatgaggctggtagaagtgctgatgaccatccccagcttgtatttactggtcgcgctggccgctgtcctaccaccggggttgagtagcgccgagcggtttttgctgattgtagcgattacctcgctgatcaattgggcaggattggcacgggtcattcgggggcaggtgctgtcactgcgggaacgggagtatgtccaagcctcgcaggtgatgggggctagtcgactctacctgctcatccgccacatcctgccccagaccctgacctacgtgatcattgccgcgacgctggcggtgccgagcttcattgttgcggaatcggtcttgagcctcgtgggcttgggcatccaacaaccagatccctcctggggcaacatgctgtccttggcgaccaatgcctcgatgttgttgttgaatccttggctgatttggccacctgctctgctgattgttgttgcagtactggccttcaacgtggtgggtgacgggttgcgcgatcgcctcgacccacggcgttga

SEQ ID NO: 101746 - protein, 351 aa, Synechococcus elongatus PCC 7942
MTERRSPLPRSWTSWGVGLLLLLYLGALGADCLAPYNPYSSQADAALLPPSQIFWRNRQGQWLGPHVYPVRQGPIDLETGQREVITDWNAPSPLRIWVVGDPYRVLSWKGDRHLLGTTGPGKLHLLGTDDQGRDQFSRLLYGSRISLSVGLVGVILTFPLGILVGGIAGYWGGWVDALIMRLVEVLMTIPSLYLLVALAAVLPPGLSSAERFLLIVAITSLINWAGLARVIRGQVLSLREREYVQASQVMGASRLYLLIRHILPQTLTYVIIAATLAVPSFIVAESVLSLVGLGIQQPDPSWGNMLSLATNASMLLLNPWLIWPPALLIVVAVLAFNVVGDGLRDRLDPRR

SEQ ID NO: 101747 - DNA, 1158 bp, Silicibacter sp. TM1040
  CDS (1)..(1158): transl_table=11
atgagcgaaaaacaccccgacggccgttttgtggatgatgcgccctatgacccgcaggcctcgatccgcgaactggagcgcaaggatctcgacgcgccgaactgggtgctgatctggcgcaagttcaagacccaccgcctggggttgatctcgggcatattcctgctgttttgctatgtgatgctgccgtttgtaggcttcatcgcgccctatggccccaacgagcgcaacgccgagcatctctattcgccaccgcagtccgtgaacttctttcacgagggcgaattcctgggcccgtttatctatccgctgacttcagaggccgatcttgagacatttcaatgggtggtgaagcctgattacgacaacccgcaacagatccgtttcttttgcgagggggccgaatatcgactggcgggtctgatccctgccaacacccatctcttttgcgcgcccgaaggggcgacattgtttctctgggggtcagatcgcctgggacgtgacatcttcagccgcattctctttggcgcgcagctctcgctcaccgtgggtctgatcggcatcacggtatcttttgttctcgggatcttttttggctctgttgcggggtatttcggcggcaagatcgactgggtcatcaaccgcgccatcgaaatcctgcgcagcctgcccgagctgccgctctggctggcgctttcagcagcggtcccctccacatggtcgccggtggcagtgtttttcatcatttccatcatcctcggcatcctcgactggccgggtcttgcgcgttccgtcagggccaagttcctgagcctgcgcgaagaggaatacgtccgcgccgccgaaatgatgggcgcatcttcagggcgcgtgatcaagaaacacctgctgcccaacttcatgagccatcttatcgcctcggccacattgtcgatcccggcaatgatcttgggagagacggcgctctcgttccttgggctcggtctgcgcgccccggcagtgagctggggggtgatgctcaatgacgcgcagaaccttgccaatatcgagatctacccctggaccgcgatcccaatgctgccgatcatcgtggtcgttctggcgttcaactttctgggcgacggtctgcgcgatagtctggatccctatcagcaatga

SEQ ID NO: 101748 - protein, 385 aa, Silicibacter sp. TM1040
MSEKHPDGRFVDDAPYDPQASIRELERKDLDAPNWVLIWRKFKTHRLGLISGIFLLFCYVMLPFVGFIAPYGPNERNAEHLYSPPQSVNFFHEGEFLGPFIYPLTSEADLETFQWVVKPDYDNPQQIRFFCEGAEYRLAGLIPANTHLFCAPEGATLFLWGSDRLGRDIFSRILFGAQLSLTVGLIGITVSFVLGIFFGSVAGYFGGKIDWVINRAIEILRSLPELPLWLALSAAVPSTWSPVAVFFIISIILGILDWPGLARSVRAKFLSLREEEYVRAAEMMGASSGRVIKKHLLPNFMSHLIASATLSIPAMILGETALSFLGLGLRAPAVSWGVMLNDAQNLANIEIYPWTAIPMLPIIVVVLAFNFLGDGLRDSLDPYQQ

SEQ ID NO: 101749 - DNA, 1140 bp, Mesorhizobium sp. BNC1
  CDS (1)..(1140): transl_table=11
atgactgatatcgcaaccaacacgcccgagcttgccgccggcacagcggtaaaggggcgatccctctgggcgacagcgctgatgcggctacgccgcaacaaggctgccatggtgagccttctcattctcatactgtatattttcgccggtatctctggcccaatgctatcgccgcatcactacgcgaccgtctatcccgagtatgtgcgagtgccggcgagcctcgaggcatatccgcgtgcagaagagatcattccgcaggcggaaagcgtgctcacccgtacacggctccaaatcgacgcgattgaggtcaacggaaacacgctgcacgtcgaggcctcgtccgagcgtgagatcgatccgcgtatgacccgctatctggaacgttccgacatcttctccaatgtccggattgtggaaacgagcggcgacagccgctcggtcgttatggaggcggatgtggagcggttgcgtttcctcttcgggaccgatgccaacggaagagacctgcttgcccgcatcctggtctccatccgcatctcgcttatgatcggcgcgctggcgacgggcgtggcgcttatcatcggcgttgcctggggggcgacggcaggctttctcggaggacgcgtcgacaatgtgatgatgcgcgtggtggatgttttatacgccctgcccttcacgttcttcgcgattctgctcgtggtcttcttcggccgaaacgtggtgctcatgttcgttgccgtgggagcggtggaatggctcgacatggcgcgcatcgtgcgcggacagaccatctcgctacgcaggcgtgaattcgtgcaggcggccgaggcgctgggagtaagctccggcggcatcctgcgccggcatatcattcccaacacgctcggccccgtcatcatctatatgacgttgctcatcccgaaggtgatcctgctagagagcttcctctccttccttggcctcggagtgcaggagccgctaacaagtctcggcgtgctgatctccgagggagcccgcaacatgcgcagcgcgccctacatgctgatctacccctcgatcgcgctgacgctgctcctcttctcgcttaacttcctgggcgacggcctgcgcgatgcgctcgacccgagggaccgctga

SEQ ID NO: 101750 - protein, 379 aa, Mesorhizobium sp. BNC1
MTDIATNTPELAAGTAVKGRSLWATALMRLRRNKAAMVSLLILILYIFAGISGPMLSPHHYATVYPEYVRVPASLEAYPRAEEIIPQAESVLTRTRLQIDAIEVNGNTLHVEASSEREIDPRMTRYLERSDIFSNVRIVETSGDSRSVVMEADVERLRFLFGTDANGRDLLARILVSIRISLMIGALATGVALIIGVAWGATAGFLGGRVDNVMMRVVDVLYALPFTFFAILLVVFFGRNVVLMFVAVGAVEWLDMARIVRGQTISLRRREFVQAAEALGVSSGGILRRHIIPNTLGPVIIYMTLLIPKVILLESFLSFLGLGVQEPLTSLGVLISEGARNMRSAPYMLIYPSIALTLLLFSLNFLGDGLRDALDPRDR

SEQ ID NO: 101751 - DNA, 1068 bp, Trichodesmium erythraeum IMS101
  CDS (1)..(1068): transl_table=11
atgaaatggtggaaaaatcttaaaaaaaatcctttagcaaaatttggtggattattgctattaattttctatttggtagtaattgctgctgactttattgctccctatgacgcctatacatctcaacccaacggttccctattacctcctactcaaatttactggcaaaaccaagcaggtgagtttattggacctcatgtttaccccacgactcaaggaccggtagatttagaaactggactccgggagttaaaggtagatttgagtaaaccatcccctctaggtttatttgtccaaggaccatcctataaactcttggggattttgccctggaatcgacatttgtttggaacgataggtcaagcaaaatttaatttattaggtactgacgaacaagcaagagaccaatttagtcgtttaatttttggtggtaggattagtttatttattggtttagtaggaattacaatctattttcctttgggaatgattattggtggaatttctggttactttggtggttggatagatagtattttaatgcgttttgctgaagtattaatgactattccgggtatttatttattagtggcactcgctgctatattacctcctggtttaactagtgcccaaagatttctcttaattgtggtgattacttcatttattagttgggcagggttagctagagttattcgtggagaagtcttatctatcaaagaacgagaatttgttcaagcagttagggcgatgggggcaggttctttttatatcattgttcgccatgtattaccccaaacagcaacttatgtgattatttcagcaactttagctattcctagctttattatctcagaatcagttttgagtttgattggtttaggtattcaacagccagacccttcttgggggaatatgttatctttggctacaaacgcttctatcttagtattacaaccttggttagtatggcctccagcactattgattattctgacggtattagcatttaatttattaggagatgggttgcgagatgctttagatcccagaaatttacaacaataa

SEQ ID NO: 101752 - protein, 355 aa, Trichodesmium erythraeum IMS101
MKWWKNLKKNPLAKFGGLLLLIFYLVVIAADFIAPYDAYTSQPNGSLLPPTQIYWQNQAGEFIGPHVYPTTQGPVDLETGLRELKVDLSKPSPLGLFVQGPSYKLLGILPWNRHLFGTIGQAKFNLLGTDEQARDQFSRLIFGGRISLFIGLVGITIYFPLGMIIGGISGYFGGWIDSILMRFAEVLMTIPGIYLLVALAAILPPGLTSAQRFLLIVVITSFISWAGLARVIRGEVLSIKEREFVQAVRAMGAGSFYIIVRHVLPQTATYVIISATLAIPSFIISESVLSLIGLGIQQPDPSWGNMLSLATNASILVLQPWLVWPPALLIILTVLAFNLLGDGLRDALDPRNLQQ

SEQ ID NO: 101753 - DNA, 1191 bp, Rhizobium leguminosarum bv. viciae 3841
  CDS (1)..(1191): transl_table=11
atgagcacgcacgaaaccttcggagcccatgctggtccgctccacaccgttgccgacggcccctcgatcagcccgctgaaacagggcaagaccgtctcgaccgccgcgatcggcccctggcggctggtcgccggcaaactggtccgccagaaagtggcgatggtggccggcgccatcatcctcttcctctatctggttggcctcttcgccgaattcctggcgccggctttgccgatgacctcacggccgcaatatacctatgcaccgccgcagggcttcagcttcttcgtcgaaaaaccggacggcagctcggagttcaatttccacgtgaagggctacaaggtcgagatcgacaaggtggcgctgcgccgcaccttcgtcgtcgacgaaaccaaggtcgtcccgatcggcttcttcgtcaaaggcgcggcctacgatctctggggcctgatcccgatgaaccgtcacctgatcggcccccttaaccagaacgacccaatgtatctgctcggcgccgaccggctcggccgcgacgtcttctcgcgcctcgtctacggcacccgcgtatccatgtcgatcggcctcgtcggcgtcgccatgtcgctgatcctgggcgtcgtgctcggctcgatctccggcttctacggcggctgggtggatacactgatccagcgcgtcatcgaggtcgtcagcgccatgccgaccatcccgctatggctcggcctggcggcggcgatcccgctgacatggtcgccggtcaatgtctatttcgtcataacgatcatcgtctcgctgctcggctggaccagcctggcgcgggaggtgcgcggccggttcctggcactgcgcagcgaggatttcgtcgtcgccgcccggctcgacggatcgagcgaagcgcgactgatcttccgccacatcctgccgtcgctgacgagccacatccttgcggtcgtgacgctggccgtgccgacgatgatcgtcgccgagacctcgctgtccttcctcggcatcggcctcaagccgccggtcgtcagctggggcgtgctgctgcaggacgcccagaacatccgcaccgtcgccaccgcgccgtggctcctgatctggccgtcgctcgcagtcgtcgtcgccgtcctgtccttcaatttcttcggcgacggcctgcgcgatgccgccgacccttacgacaattga

SEQ ID NO: 101754 - protein, 396 aa, Rhizobium leguminosarum bv. viciae 3841
MSTHETFGAHAGPLHTVADGPSISPLKQGKTVSTAAIGPWRLVAGKLVRQKVAMVAGAIILFLYLVGLFAEFLAPALPMTSRPQYTYAPPQGFSFFVEKPDGSSEFNFHVKGYKVEIDKVALRRTFVVDETKVVPIGFFVKGAAYDLWGLIPMNRHLIGPLNQNDPMYLLGADRLGRDVFSRLVYGTRVSMSIGLVGVAMSLILGVVLGSISGFYGGWVDTLIQRVIEVVSAMPTIPLWLGLAAAIPLTWSPVNVYFVITIIVSLLGWTSLAREVRGRFLALRSEDFVVAARLDGSSEARLIFRHILPSLTSHILAVVTLAVPTMIVAETSLSFLGIGLKPPVVSWGVLLQDAQNIRTVATAPWLLIWPSLAVVVAVLSFNFFGDGLRDAADPYDN

SEQ ID NO: 101755 - DNA, 1173 bp, Rhizobium leguminosarum bv. viciae 3841
  CDS (1)..(1173): transl_table=11
atgtcgccccttcccgcacccggcgcgccgcttccccattacgtctcgaccgctcctttcgatccgcaggcgaccgaaagcatgacggcggcgcaatcgcgcatccatctcgcctcgcagaaaaagctgatgtggtggaagttcaagcagcacaagctggccttgatctccggcatctttctcgccgccgtctacctgatgatcctgatcgtcgagttcctggcgccctacggcctgcacacgcgcaatgtcgatttcatccatgcgccgccgcagcccatccacttcttcgacaagggcagcttcgtcggtcccttcgtctacggccgcagcatgacgctcgatatcgatactctgcaccgcgtctatacggacaagacgaacgacgtgcagccgatccgtttcttctgccgcggcgatgcctataaattctggggggttgtcgcgtcgaactatcatctcgtctgtccggcgatcggcgggcagatgttcctgctcggcaccgaccggctcggccgtgacgtgctttcgcgcatcctctacggcgcgcggatatcgctgaccatcggtctgatcggcatttcgatcagcttcgtgctcggcatcgtcatcggcggtcttgccggttatcgcggcggcattttcgatctcatcgtccagcgcctgatcgaagtgctgcaatcgctgccgagcctgccgctgtggatggcgctggccgccatcatgccggtgacctggagcccgatcgtcatctatttcggcatcaccgtcatcctcggcatcatcgactggacggggctggcgcgtgccgtgcgctccaagctcctggcgctgcgcgaggaggattatgtccaggccgcacagctgatgggcgccagcacgccgcgcatcatcggccggcatctggtgccgggcttcatgtcgcatctcattgcttcggcgacgatttcaatccccggcatgatccttggagagactgcgctctccttcctcggcctcggccttcgtccgccgatcaccagctggggcatcctgctgaccgaggcaaaaagcgtcagcgtcatcgccttctatccatggctgctctatccgatcattcctgttgttctcgtcattttggcgttcaactttctgggagacggcttgcgtgatgcggcagatccctacaaatag

SEQ ID NO: 101756 - protein, 390 aa, Rhizobium leguminosarum bv. viciae 3841
MSPLPAPGAPLPHYVSTAPFDPQATESMTAAQSRIHLASQKKLMWWKFKQHKLALISGIFLAAVYLMILIVEFLAPYGLHTRNVDFIHAPPQPIHFFDKGSFVGPFVYGRSMTLDIDTLHRVYTDKTNDVQPIRFFCRGDAYKFWGVVASNYHLVCPAIGGQMFLLGTDRLGRDVLSRILYGARISLTIGLIGISISFVLGIVIGGLAGYRGGIFDLIVQRLIEVLQSLPSLPLWMALAAIMPVTWSPIVIYFGITVILGIIDWTGLARAVRSKLLALREEDYVQAAQLMGASTPRIIGRHLVPGFMSHLIASATISIPGMILGETALSFLGLGLRPPITSWGILLTEAKSVSVIAFYPWLLYPIIPVVLVILAFNFLGDGLRDAADPYK

SEQ ID NO: 101757 - DNA, 1137 bp, Rhizobium leguminosarum bv. viciae 3841
  CDS (1)..(1137): transl_table=11
atgcttgctttcgactcttctgcaacgccgccgacaaccgacatcgagaccaaaaagccatcgcgtgggcatgagagctatatcgcccttgtctggcgccggttgaggcgctcctggaccggcatggccgggctcgtgctcgtcgtgctcttgatcctcatggcgatctttgccgatttctttgcgccgatggatccgaaggcgaccgatgtcggcttcgcgccgccacaggtgatgagcttccacgacaaggatggcaatttcgtcttccagccgcgcgtctacgcgctctcggattccgaagagcttgatccggtcaccttccagccgatcgtcggcatggattacgacaatccacggctgctcggcttcttcgtcaagggcgccgaataccggcttttcggcctgatcccggccaaccggcatttcttcggctcgaccgacggccagccggtgcatttcctcggcaccgacaagttcggccgcgacgtgctgtcgcgcgccatcatcggctcgcgcatttcgctgaccattgccctgacggtcgtcttcatcgtcaccatcatcggcacgaccgtcggcatggtgtcgggttacttcggcggcaccttcgatgtctggctgcagcgtttcgtcgacctggtgctggccttcccgcaattgccgctctatctggcgctgacctcgctgatcccggtgacggcgccgaccaacgtctttcttgccttcgtcatcgccgtgatgtcggcgctcggctgggcgcagatgtcgcgcgaggtgcgcggcaagaccttagctcttgctcgcatcgattatgtccgggcggccatggccgtcggcgccaccgacacgcgcatcatcatgcagcacatcttcccgaatgtgatgagccacgtcatcgtcgcggtgacgctgcatataccgagcgtcgtgctgttggaatccttcctgggtttcctcggcttcgccgtcaagccgccgctgatctcctgggggctgatgctgcaggatacggcaacctattcggtcatcggctcctatccctggattctcgctcccgtcggcttcgtgctcgccaccgtcttcgcgttcaatgcgctcggcgacggattgcgcgacgcggtcgatccttattga

SEQ ID NO: 101758 - protein, 378 aa, Rhizobium leguminosarum bv. viciae 3841
MLAFDSSATPPTTDIETKKPSRGHESYIALVWRRLRRSWTGMAGLVLVVLLILMAIFADFFAPMDPKATDVGFAPPQVMSFHDKDGNFVFQPRVYALSDSEELDPVTFQPIVGMDYDNPRLLGFFVKGAEYRLFGLIPANRHFFGSTDGQPVHFLGTDKFGRDVLSRAIIGSRISLTIALTVVFIVTIIGTTVGMVSGYFGGTFDVWLQRFVDLVLAFPQLPLYLALTSLIPVTAPTNVFLAFVIAVMSALGWAQMSREVRGKTLALARIDYVRAAMAVGATDTRIIMQHIFPNVMSHVIVAVTLHIPSVVLLESFLGFLGFAVKPPLISWGLMLQDTATYSVIGSYPWILAPVGFVLATVFAFNALGDGLRDAVDPY

SEQ ID NO: 101759 - DNA, 1116 bp, Nostoc punctiforme PCC 73102
  CDS (1)..(1116): transl_table=11
atggattggtggcgacgactaaagaaaaatcctttggcacaatttggggcgattttgctgttaattttctacatagcagtaattgcagcagatttcgtggctccttatgacccttatgcctcacagcctaatggttcactgctgccaccaactcagatacactgggtttctcaatcaggacagtttatcgggccccatgtttatcccacaactcagggagacacaaatttagaaacaggcgatcgccaactcatcgtagacttcaaaaagccatcacctgtacgtctatttgtttccgggccagaataccgattgttgcagatgagtttgccactaccccccaagtgggatgaagtcacaatctttcctggtattcccttaaattggcatttatttggcacaacaactgacgcaaaagtcaatatcttgggtactgatgaccaaagccgcgaccaatttagtcgcctcttacatggcggtcgcatcagtatgtttattgggatttttggcattatcattacctatcccctcggtttgctcattggtggaatttccggttatttaggcggtgtgactgatagcgtcattatgcgcttggcagaagtgctaatgaccttccctagtatttatcttttggtgactttgggagcagtcttaccacctggtttaagcagtacccagcgctttttgctgattgtggtgattacttcggttattagctgggctggtttagcacgagtcattcggggacaggtactatcaattaaagagcgagaatttgtccaagcatcacgcgcgatgggcgcaaaccctctttatataatcctccgccacgtcttgccgcaaacggctagttatgtagttatctccgctactcttgcaattcccagctttattggtgcagaggcgatactaagtctcatcggcttgggaattcaacaaccagacccctcttggggaaatatgctttctctggctagcaatgcttcaattttggtactgcaaccttggttaatttggccgccggctgtgttgattattctcacagtgctagcattcaacttactcggtgatgggctgagagatgcactcgaccctcggagtttgagaagataa

SEQ ID NO: 101760 - protein, 371 aa, Nostoc punctiforme PCC 73102
MDWWRRLKKNPLAQFGAILLLIFYIAVIAADFVAPYDPYASQPNGSLLPPTQIHWVSQSGQFIGPHVYPTTQGDTNLETGDRQLIVDFKKPSPVRLFVSGPEYRLLQMSLPLPPKWDEVTIFPGIPLNWHLFGTTTDAKVNILGTDDQSRDQFSRLLHGGRISMFIGIFGIIITYPLGLLIGGISGYLGGVTDSVIMRLAEVLMTFPSIYLLVTLGAVLPPGLSSTQRFLLIVVITSVISWAGLARVIRGQVLSIKEREFVQASRAMGANPLYIILRHVLPQTASYVVISATLAIPSFIGAEAILSLIGLGIQQPDPSWGNMLSLASNASILVLQPWLIWPPAVLIILTVLAFNLLGDGLRDALDPRSLRR

SEQ ID NO: 101761 - DNA, 1140 bp, Crocosphaera watsonii WH 8501
  CDS (1)..(1140): transl_table=11
atgtttatgatatcttcagtccactcaactaactggtggcaaaaacttaaaaataatcctctcgctcgttttggagcagtattactgataattttctatatagctgtgattgcggctgattttgtcgctccttataatccctacatatcacaagctgatggttctctccttccccccacacaaattcattggacaacccaagacggtcgctttatcggtccccacgtctatccaaccacccaaagtcctacggatgttgagacgggaaaacgcagtttaaatgtcgattttgagcaaccttctcccattcggctcttggttaagggtgaaacttaccccttcttacaagttcgtctccctttacccccttcttttgaagaagtagaactattttctggtattcctctggatcgtcatctttttggtactgttggtccaggaaaacttaatttactgggaacggatgaacaagcaagagatcaattcagtcgtttactttttgggggcagaattagcctatttatcggtctagtcggtattattatctcttttcccctcggcatgatcgtcggaggcattgccggttattttggtggctggctcgatgcagttttaatgcgtctggtagaagttttaatgacaattcctggcatttatcttttagtagctctagctgctgtgctgccccctagtttgaccagtgcgcaacgattcttgttgattgtcttaattacttcttttattggttggtcaggactggccagggttatccgtggtcaggttttatccctcaaagaacaggaatttgttcaggccgcaaaagctatgggggcaactccttggcgcattattgttcgtcatgtacttccccaaacagctacctatattattatatcagcaacgctagcagttcctggttttattgtttctgagtctgtcctcagtctcattggcctaggaattcaacaacctgaccccagttggggtaatttactctcggtatcgacaaatgcctccattttggtgcttcaaccctggctgatttgtcctccggctcttttaattatcctcaccgttctctcctttaatttactgggagatggtttgagagatgctcttgatccccgcagtctggattga

SEQ ID NO: 101762 - protein, 379 aa, Crocosphaera watsonii WH 8501
MFMISSVHSTNWWQKLKNNPLARFGAVLLIIFYIAVIAADFVAPYNPYISQADGSLLPPTQIHWTTQDGRFIGPHVYPTTQSPTDVETGKRSLNVDFEQPSPIRLLVKGETYPFLQVRLPLPPSFEEVELFSGIPLDRHLFGTVGPGKLNLLGTDEQARDQFSRLLFGGRISLFIGLVGIIISFPLGMIVGGIAGYFGGWLDAVLMRLVEVLMTIPGIYLLVALAAVLPPSLTSAQRFLLIVLITSFIGWSGLARVIRGQVLSLKEQEFVQAAKAMGATPWRIIVRHVLPQTATYIIISATLAVPGFIVSESVLSLIGLGIQQPDPSWGNLLSVSTNASILVLQPWLICPPALLIILTVLSFNLLGDGLRDALDPRSLD

SEQ ID NO: 101763 - DNA, 1155 bp, Sulfitobacter sp. EE-36
  CDS (1)..(1155): transl_table=11
atgagcatccagccggacaaccgctttgtcgacaccgccccctggaccgacgacgccgatctttccgcgcttgagcgggccgagatggacgcctctgtcgcgcggctcatgtggcgcaagttccggcggcacaagctggcgctggtatccgggctgtttctggccttctgctatctgatcttgccagtggcggggttcatcgcgccctacacaccaaacgagcgcaatgccgaacacatctacgcgccaccccaaagcatcaacctttggcacgagggcagtttcatcggcccctttgtctacgagacgacgggcactgcggatctggtgaatttccgctgggaatacgacaccgataccagcaacccgcgcaagattgagtatttttgtaagggtgaaacctaccacctcttcgctgtcatccccagcgacacccatctgttctgcgcgcctgacggggcgacggtgtttctctggggatctgatcggttggggcgcgatgtattcagccgcatcctctatggcgcgcagctgtccttgacggtggggttgatcggcatcacggtcagctttgtgctggggatcttctttggatcgctggccggctacttcggcggcaagaccgactggctggtcaaccgcgcgatcgagattttgcggtccttgccagagctcccgctctggctcgcgctttcggcggcggtgccgtcgaactgggggccggtgtcggtgttctttatcatctcgatcatcctcggcattctggactggcccgggctggcgcgggcggtgcggtcaaaattcctgagcctgcgtgaagaggaatacgtcaaagcggccgagatgatgggcgcgtcgcccgcacgggtgatccgcaaacacctgttgccaaatttcatgtcgcatctgatcgccagcgcgaccctatcgatcccggcgatgatccttggggaaaccgcgcttagtttcctcgggttgggcctacgcgcgcccgccgtcagctggggcgtcatgctgaatgacgcgcaaaatctggcgagcatcgaaatctactggtggaccgccattcccatgctgccgatcatcgtcgtggtgctggcgttcaacttcctgggaaatggtctgcgcgcaagtcttgatccgtataaatcctga

SEQ ID NO: 101764 - protein, 384 aa, Sulfitobacter sp. EE-36
MSIQPDNRFVDTAPWTDDADLSALERAEMDASVARLMWRKFRRHKLALVSGLFLAFCYLILPVAGFIAPYTPNERNAEHIYAPPQSINLWHEGSFIGPFVYETTGTADLVNFRWEYDTDTSNPRKIEYFCKGETYHLFAVIPSDTHLFCAPDGATVFLWGSDRLGRDVFSRILYGAQLSLTVGLIGITVSFVLGIFFGSLAGYFGGKTDWLVNRAIEILRSLPELPLWLALSAAVPSNWGPVSVFFIISIILGILDWPGLARAVRSKFLSLREEEYVKAAEMMGASPARVIRKHLLPNFMSHLIASATLSIPAMILGETALSFLGLGLRAPAVSWGVMLNDAQNLASIEIYWWTAIPMLPIIVVVLAFNFLGNGLRASLDPYKS

SEQ ID NO: 101765 - DNA, 1203 bp, Roseovarius nubinhibens ISM
  CDS (1)..(1203): transl_table=11
atgagtgacaccccctcgaacccgaccgatcccaacctcgcacagacgaccggcccccatgtggccatcgtcgagaccgaggatgccgtcgagcgccgcgccaaagaggcctatttcaccgcctcgcagggacagctcatctgggcccggttccgcaagcaacgcgccgcgatgatcgccgcctgtgtgctggtctttttgatcctctcaggcctctttgcgccgtttctctcgccctatgatccgaccatcgccgggcgcgacaaggactataccaacggcgcgccgcagatcccgatgttctgcgacaagaacggctgttcagcgcggccctttatccatggggtcgaacgcgaacggtcgatggccaccaatttccgctgggtgaccaaggtcaacgaggatgagcggctctacgtgaaattcttcgtcgatggcgaccggtacaagctctttggcctgatcaagatggacacgcatcttttcggtgtcgaaggcggcaagatccatatctttggcaccgacgaggacgggcaggacatctttagccgcacgctccatgccatctggacctcgatgaaagtgggcacgatcggcgtggtgatcgcctttgtgctggcgctgatcatcggcggggtctcgggctattacggcggctggatcgacggggtgatccagatgatcaccgacgcggtgcgcacggtgcccgccatcccgctcttcatggcggtggcggcctttatgccacccgagatgaccgccgaggcgaggttcttctacatatcaatgatcctcgggctcatcggctggccgacgctggcgcgacgggtgcggacccatctgctcaccgagcgcaatcaggaatatgtgttggccgcccagctctgtggcgccgggccgggccatgtcatccggcggcatctgctgccgagcttcaccagctatatcatcgtcgatctggtgatctccttcccctacatggtgctgagcgaaaccgcgctgagctttatcggcctcggcctcaaggacccggtgagctcgctcggcgtgatgctgcaaaaagccaccagcgccgacgtgctcttgaactaccaatggtatttcatcccggtgctcttcttcatcgccctcgtcatggccttcgtctttgtcggcgacgggctgcgcgacgcggcagacccctattcggatgcgcataaatga

SEQ ID NO: 101766 - protein, 400 aa, Roseovarius nubinhibens ISM
MSDTPSNPTDPNLAQTTGPHVAIVETEDAVERRAKEAYFTASQGQLIWARFRKQRAAMIAACVLVFLILSGLFAPFLSPYDPTIAGRDKDYTNGAPQIPMFCDKNGCSARPFIHGVERERSMATNFRWVTKVNEDERLYVKFFVDGDRYKLFGLIKMDTHLFGVEGGKIHIFGTDEDGQDIFSRTLHAIWTSMKVGTIGVVIAFVLALIIGGVSGYYGGWIDGVIQMITDAVRTVPAIPLFMAVAAFMPPEMTAEARFFYISMILGLIGWPTLARRVRTHLLTERNQEYVLAAQLCGAGPGHVIRRHLLPSFTSYIIVDLVISFPYMVLSETALSFIGLGLKDPVSSLGVMLQKATSADVLLNYQWYFIPVLFFIALVMAFVFVGDGLRDAADPYSDAHK

SEQ ID NO: 101767 - DNA, 1209 bp, Xanthobacter autotrophicus Py2
  CDS (1)..(1209): transl_table=11
atggacgcagtccccgtgctccagccgggcgagcccaccgacgtgcccgccgctcgcgacgcgccgcacggccagctccagccgccgggcgcggccaagccgcgcggccgcttcgatctttcgcccctcaatcgcaggcggctcgccaatttccgcgccaaccggcggggctactggtcgttcatggtgttcatggtgctgttcgtgatcagcctgtgcgccgaattcattgccaacgacaagccgatcctcgtctcctacgacgggggctattatttcccggtggtgcgcgcctatccggagaccgcctttggcggcgacttcgagaccgacgccgactatcgcgatcctttcctgcagaagctgatcgccgaaaagggcggctggatggtgtggccgccgatccgcttctcctactcgacccacaatctggacctgcccaccccagcgccctcgccacccacctggatgctcacggaagcccagtgcaaggcggttgcggacaagaagggggtgagcggctgctcgggccttgaatacaattggctcggcaccgacgaccagggccgcgacgtggtggcccgcctgatctacggcttccgcatctcggtgctgttcgggctcgcgctcaccatcatctcgtcggtgatcggggtggcggccggcgcggtgcagggctatttcggtggctggatcgacctgctgttccaacgcttcatcgagatctggacagccatcccctccctctacctgctgctcatcatctcctcggtgctggtgcccggcttctgggtgctgctgggcatcctgctgctgttctcgtgggtgtcgctggtggggctggtgcgggcggaattcctgcgcgcccgcaacttcgaatatgtgcaggcggcccgcgcgctgggcgtgggcaacctcaccatcatgacgcggcacatgctgcccaacgccatggtggcgacgctgaccatgctgcccttcatcctctcctcctcggtgatgacgctgacggcgctggacttcctcggcttcggcctgccccccggctcgccctcgctgggcgagcttctgtcccagggcaagaacaacatccaggcgccctggctgggcctcaccggcttcttcacggtggcggtgatgctgagcctgctcatcttcgtgggcgaggcagtgcgcgacgccttcgacccgcgcaagaccttctcgtga

SEQ ID NO: 101768 - protein, 402 aa, Xanthobacter autotrophicus Py2
MDAVPVLQPGEPTDVPAARDAPHGQLQPPGAAKPRGRFDLSPLNRRRLANFRANRRGYWSFMVFMVLFVISLCAEFIANDKPILVSYDGGYYFPVVRAYPETAFGGDFETDADYRDPFLQKLIAEKGGWMVWPPIRFSYSTHNLDLPTPAPSPPTWMLTEAQCKAVADKKGVSGCSGLEYNWLGTDDQGRDVVARLIYGFRISVLFGLALTIISSVIGVAAGAVQGYFGGWIDLLFQRFIEIWTAIPSLYLLLIISSVLVPGFWVLLGILLLFSWVSLVGLVRAEFLRARNFEYVQAARALGVGNLTIMTRHMLPNAMVATLTMLPFILSSSVMTLTALDFLGFGLPPGSPSLGELLSQGKNNIQAPWLGLTGFFTVAVMLSLLIFVGEAVRDAFDPRKTFS

SEQ ID NO: 101769 - DNA, 21 bp, Artificial sequence
  primer
atggattggtggaaaaaactg

SEQ ID NO: 101770 - DNA, 20 bp, Artificial sequence
  primer
ttattcccctaaactgcggg

SEQ ID NO: 101771 - protein, 365 aa, Artificial sequence
  consensus sequence
  Variant (2)..(2): Xaa in position 2 is any amino acid
  Variant (5)..(16): Xaa in position 5 to 16 is any amino acid
  Variant (17)..(20): Xaa in position 17 to 20 is any or no amino acid
  Variant (22)..(33): Xaa in position 22 to 33 is any amino acid
  Variant (34)..(38): Xaa in position 34 to 38 is any or no amino acid
  Variant (40)..(72): Xaa in position 40 to 72 is any amino acid
  Variant (73)..(75): Xaa in position 73 to 75 is any or no amino acid
  Variant (77)..(78): Xaa in position 77 to 78 is any amino acid
  Variant (79)..(83): Xaa in position 79 to 83 is any or no amino acid
  Variant (85)..(93): Xaa in position 85 to 93 is any amino acid
  Variant (94)..(117): Xaa in position 94 to 117 is any or no amino acid
  Variant (119)..(130): Xaa in position 119 to 130 is any amino acid
  Variant (131)..(140): Xaa in position 131 to 140 is any or no amino acid
  Variant (142)..(142): Xaa in position 142 is any amino acid
  Variant (144)..(145): Xaa in position 144 to 145 is any amino acid
  Variant (149)..(150): Xaa in position 149 to 150 is any amino acid
  Variant (153)..(155): Xaa in position 153 to 155 is any amino acid
  Variant (157)..(159): Xaa in position 157 to 159 is any amino acid
  Variant (161)..(163): Xaa in position 161 to 163 is any amino acid
  Variant (165)..(174): Xaa in position 165 to 174 is any amino acid
  Variant (176)..(178): Xaa in position 176 to 178 is any amino acid
  Variant (180)..(182): Xaa in position 180 to 182 is any amino acid
  Variant (185)..(185): Xaa in position 185 is any amino acid
  Variant (188)..(189): Xaa in position 188 to 189 is any amino acid
  Variant (191)..(194): Xaa in position 191 to 194 is any amino acid
  Variant (196)..(197): Xaa in position 196 to 197 is any amino acid
  Variant (199)..(203): Xaa in position 199 to 203 is any amino acid
  Variant (205)..(207): Xaa in position 205 to 207 is any amino acid
  Variant (209)..(211): Xaa in position 209 to 211 is any amino acid
  Variant (213)..(216): Xaa in position 213 to 216 is any amino acid
  Variant (218)..(231): Xaa in position 218 to 231 is any amino acid
  Variant (232)..(237): Xaa in position 232 to 237 is any or no amino acid
  Variant (239)..(241): Xaa in position 239 to 241 is any amino acid
  Variant (244)..(245): Xaa in position 244 to 245 is any amino acid
  Variant (247)..(249): Xaa in position 247 to 249 is any amino acid
  Variant (251)..(257): Xaa in position 251 to 257 is any amino acid
  Variant (259)..(259): Xaa in position 259 is any amino acid
  Variant (262)..(264): Xaa in position 262 to 264 is any amino acid
  Variant (266)..(271): Xaa in position 266 to 271 is any amino acid
  Variant (273)..(274): Xaa in position 273 to 274 is any amino acid
  Variant (276)..(277): Xaa in position 276 to 277 is any amino acid
  Variant (279)..(284): Xaa in position 279 to 284 is any amino acid
  Variant (286)..(288): Xaa in position 286 to 288 is any amino acid
  Variant (290)..(292): Xaa in position 290 to 292 is any amino acid
  Variant (294)..(298): Xaa in position 294 to 298 is any amino acid
  Variant (300)..(301): Xaa in position 300 to 301 is any amino acid
  Variant (304)..(305): Xaa in position 304 to 305 is any amino acid
  Variant (307)..(307): Xaa in position 307 is any amino acid
  Variant (309)..(311): Xaa in position 309 to 311 is any amino acid
  Variant (313)..(314): Xaa in position 313 to 314 is any amino acid
  Variant (318)..(319): Xaa in position 318 to 319 is any amino acid
  Variant (321)..(329): Xaa in position 321 to 329 is any amino acid
  Variant (330)..(334): Xaa in position 330 to 334 is any or no amino acid
  Variant (337)..(339): Xaa in position 337 to 339 is any amino acid
  Variant (340)..(340): Xaa in position 340 is any or no amino acid
  Variant (342)..(352): Xaa in position 342 to 352 is any amino acid
  Variant (354)..(355): Xaa in position 354 to 355 is any amino acid
  Variant (363)..(363): Xaa in position 363 is any amino acid
FXAPXXXXXXXXXXXXXXXXPXXXXXXXXXXXXXXXXXPXXXXXXXXXXXXXXXXXXXXXXXXXXXXXXXXXXXXGXXXXXXXYXXXXXXXXXXXXXXXXXXXXXXXXXXXXXXXXXHXXXXXXXXXXXXXXXXXXXXXXGXDXXGRDXXSRXXXGXXXSXXXGXXXXXXXXXXGXXXGXXXGYXGGXXDXXXXRXXEXXXXXPXXXLXXXLXXXXPXXXXXXXXXXXXXXXXXXXXWXXXARXXRXXXLXXXXXXXVXAAXXXGXXXXXXIXXHXXPXXXXXXIXXXTXXXPXXXXXEXXLSXXGXGXXXPXXSWGXXLXXXXXXXXXXXXXXPWXXXXPXXXXXXXXXXXNXXGDGLRDAXDP

SEQ ID NO: 101772 - protein, 58 aa, Artificial sequence
  protein pattern
  Variant (2)..(4): Xaa in position 2 to 4 is any amino acid
  Variant (5)..(8): Xaa in position 5 to 8 is any or no amino acid
  Variant (10)..(10): Xaa in position 10 is any or no amino acid
  Variant (12)..(12): Xaa in position 12 is Ala, Gly, Ser or Thr
  Variant (13)..(14): Xaa in position 13 to 14 is any amino acid
  Variant (16)..(16): Xaa in position 16 is Ala, Gly, Ser or Thr
  Variant (17)..(20): Xaa in position 17 to 20 is any amino acid
  Variant (21)..(21): Xaa in position 21 is Ala, Asp or Glu
  Variant (22)..(22): Xaa in position 22 is Phe or Tyr
  Variant (24)..(24): Xaa in position 24 is any amino acid
  Variant (26)..(26): Xaa in position 26 is Ala, Ser or Val
  Variant (27)..(29): Xaa in position 27 to 29 is any amino acid
  Variant (31)..(31): Xaa in position 31 is Ala, Gly, Ser or Val
  Variant (32)..(35): Xaa in position 32 to 35 is any amino acid
  Variant (36)..(36): Xaa in position 36 is Ile, Leu or Val
  Variant (37)..(37): Xaa in position 37 is Ile or Leu
  Variant (38)..(39): Xaa in position 38 to 39 is any amino acid
  Variant (41)..(41): Xaa in position 41 is Ile, Leu, Met or Val
  Variant (42)..(42): Xaa in position 42 is any amino acid
  Variant (44)..(44): Xaa in position 44 is Gly, Asn, Gln or Ser
  Variant (45)..(46): Xaa in position 45 to 46 is any amino acid
  Variant (47)..(47): Xaa in position 47 is Ser or Thr
  Variant (48)..(48): Xaa in position 48 is Phe, His or Tyr
  Variant (49)..(50): Xaa in position 49 to 50 is Ile, Leu or Val
  Variant (51)..(51): Xaa in position 51 is Ala, Ile or Val
  Variant (52)..(52): Xaa in position 52 is Ala, Asp, Ser, Thr or Val
  Variant (53)..(53): Xaa in position 53 is any amino acid
  Variant (54)..(54): Xaa in position 54 is Ser, Thr or Val
  Variant (55)..(55): Xaa in position 55 is Ile or Leu
  Variant (56)..(56): Xaa in position 56 is any amino acid
  Variant (57)..(57): Xaa in position 57 is Phe, Ile, Leu or Val
GXXXXXXXVXRXXXLXXXXXXXVXAXXXXGXXXXXXXXXHXXPXXXXXXXXXXXXXXP

SEQ ID NO: 101773 - protein, 60 aa, Artificial sequence
  protein pattern
  Variant (2)..(2): Xaa in position 2 is any amino acid
  Variant (3)..(3): Xaa in position 3 is any or no amino acid
  Variant (5)..(6): Xaa in position 5 to 6 is any amino acid
  Variant (7)..(7): Xaa in position 7 is any or no amino acid
  Variant (10)..(10): Xaa in position 10 is any amino acid
  Variant (11)..(11): Xaa in position 11 is Phe or Leu
  Variant (14)..(14): Xaa in position 14 is any amino acid
  Variant (15)..(15): Xaa in position 15 is Ile, Leu, Met or Val
  Variant (16)..(16): Xaa in position 16 is any amino acid
  Variant (18)..(18): Xaa in position 18 is Ala, Gly, Ser or Thr
  Variant (19)..(19): Xaa in position 19 is Gln or Arg
  Variant (20)..(20): Xaa in position 20 is Ile, Leu or Val
  Variant (22)..(23): Xaa in position 22 to 23 is any amino acid
  Variant (24)..(24): Xaa in position 24 is Ile or Val
  Variant (25)..(25): Xaa in position 25 is Ala or Gly
  Variant (26)..(26): Xaa in position 26 is Ile, Leu or Val
  Variant (27)..(27): Xaa in position 27 is any amino acid
  Variant (28)..(28): Xaa in position 28 is Ala, Gly or Val
  Variant (29)..(33): Xaa in position 29 to 33 is any amino acid
  Variant (34)..(34): Xaa in position 34 is Ala, Ile, Leu, Pro or Val
  Variant (35)..(35): Xaa in position 35 is Ile, Leu or Val
  Variant (37)..(38): Xaa in position 37 to 38 is any amino acid
  Variant (39)..(39): Xaa in position 39 is Phe, Ile, Leu or Val
  Variant (41)..(41): Xaa in position 41 is any amino acid
  Variant (42)..(42): Xaa in position 42 is Ile, Leu or Val
  Variant (43)..(43): Xaa in position 43 is Ala or Ser
  Variant (45)..(45): Xaa in position 45 is Phe or Tyr
  Variant (46)..(47): Xaa in position 46 to 47 is any amino acid
  Variant (49)..(50): Xaa in position 49 to 50 is any amino acid
  Variant (52)..(55): Xaa in position 52 to 55 is any amino acid
  Variant (57)..(57): Xaa in position 57 is any amino acid
  Variant (58)..(58): Xaa in position 58 is Ala, Ile or Val
  Variant (59)..(59): Xaa in position 59 is Asp or Glu
  Variant (60)..(60): Xaa in position 60 is Phe, Ile, Leu or Val
GXXDXXXRDXXSRXXXGXXXSXXXXXXXXXXXXXXGXXXGXXXGXXXGXXDXXXXRXXXX

SEQ ID NO: 101774 - protein, 22 aa, Artificial sequence
  protein pattern
  Variant (2)..(2): Xaa in position 2 is Ala, Ser or Thr
  Variant (3)..(3): Xaa in position 3 is any amino acid
  Variant (6)..(6): Xaa in position 6 is Phe or Leu
  Variant (7)..(7): Xaa in position 7 is Ile, Leu or Val
  Variant (9)..(9): Xaa in position 9 is Ile or Leu
  Variant (11)..(11): Xaa in position 11 is Ile, Leu or Val
  Variant (12)..(13): Xaa in position 12 to 13 is any amino acid
  Variant (15)..(16): Xaa in position 15 to 16 is any amino acid
  Variant (18)..(18): Xaa in position 18 is any amino acid
  Variant (20)..(20): Xaa in position 20 is any amino acid
  Variant (21)..(21): Xaa in position 21 is any or no amino acid
EXXLSXXGXGXXXPXXSXGXXL

SEQ ID NO: 101775 - protein, 20 aa, Artificial sequence
  protein pattern
  Variant (2)..(4): Xaa in position 2 to 4 is any amino acid
  Variant (5)..(6): Xaa in position 5 to 6 is any or no amino acid
  Variant (8)..(8): Xaa in position 8 is any amino acid
  Variant (9)..(10): Xaa in position 9 to 10 is any or no amino acid
  Variant (17)..(17): Xaa in position 17 is Ala or Ser
  Variant (18)..(18): Xaa in position 18 is any amino acid
LXXXXXFXXXGDGLRDXXDP

SEQ ID NO: 101776 - DNA, 1335 bp, Synechocystis sp.
  CDS (1)..(1335): transl_table=11
atggcaggtaacgagaatattgccgaaccccagccggtctatacgggcaccattctttatccttcccccagtccctatgctttggccattactcctctggtccagctcaagaaaattttccaatccctctacaccagtttattaaaaatgatgtggcaggagttgtgggcgggggaggtgcaaaacaatgaagctttcaatctcatcctttttttgatttttctgcttctttgttggttaacgtttagcttccgtaccgctagccaatggttgtttactttattctttcttttctggtttattgacaactccattacccatcgaaattttcaggaaggccattacattcgtcgggtttacctccgtcgccatgggacagaaaatttacattggcaactgcaactatcccacagtgctcccctctcgatggagtttaatccaggacaggtaagggccattggggtgcggcgacgggaaattagggggggagcctttcaggacaaattggcgacggtgtggcagggacaactgcttttatacgatgggtctgattggatttttgaggaagatcaaaacctcgacccggtgctagaggcgatcgccgtgattcaagaactgctcggggaaccggtgccggtggcttttgaagctagccatgggttgggagcctatgcccttaataggattacaccccaggaggaagcaaagctgttacaacaaggacaaggggtgggggtgaaaagaacagagcgtaaatggcagattttttcccgttggcgctggggggattcttggctattaattcaacagatttttcgagagtcgggtttcctcttatttgtgatattgatgatgggatttatggtgcaattgggggctattttggatggttttagacgggcatttgctggggagatggtttacgttgaaataccggataatttcggtttaatgctgccctggcaggattggcgcattggtctgcccctattgctggcgatcgccattatgatttaccggggctggcgtctgagtcgggttaagcactgtgctgtggatcaacattttgtgcgggccagtttggaccatcaacccctgggtaaactacctaccgaggcggtggaaacagtattgacagtgggacaggacaaaccagaaattttggtcttaaccgccagccgtagtctaatcattccctctttccaacggctagaagaagccctggtgtacacctgtgtccttaccaaggcgatcgacgcattcaccctaggcaaacaccaagcagaagttactgaaactaccacacatccaaaggaatttgggggcgaaccttga

SEQ ID NO: 101777 - protein, 444 aa, Synechocystis sp.
MAGNENIAEPQPVYTGTILYPSPSPYALAITPLVQLKKIFQSLYTSLLKMMWQELWAGEVQNNEAFNLILFLIFLLLCWLTFSFRTASQWLFTLFFLFWFIDNSITHRNFQEGHYIRRVYLRRHGTENLHWQLQLSHSAPLSMEFNPGQVRAIGVRRREIRGGAFQDKLATVWQGQLLLYDGSDWIFEEDQNLDPVLEAIAVIQELLGEPVPVAFEASHGLGAYALNRITPQEEAKLLQQGQGVGVKRTERKWQIFSRWRWGDSWLLIQQIFRESGFLLFVILMMGFMVQLGAILDGFRRAFAGEMVYVEIPDNFGLMLPWQDWRIGLPLLLAIAIMIYRGWRLSRVKHCAVDQHFVRASLDHQPLGKLPTEAVETVLTVGQDKPEILVLTASRSLIIPSFQRLEEALVYTCVLTKAIDAFTLGKHQAEVTETTTHPKEFGGEP

SEQ ID NO: 101778 - DNA, 22 bp, Artificial sequence
  primer
atggcaggtaacgagaatattg

SEQ ID NO: 101779 - DNA, 21 bp, Artificial sequence
  primer
tcaaggttcgcccccaaattc

SEQ ID NO: 101780 - DNA, 426 bp, Physcomitrella patens
  CDS (1)..(426)
atgtactgtaagagttggctgactgggacagagcctgcggaaaacgatacggccgatgcatcgttggtgaaacaaacgtcaattgagttacccgtcgaagcctacaaagagcttcacaagttggctggaaaatggatggacatcttggatcccaaagatcttacgttgacacggctcaagggtgccatgacaaaccatgtttatcaatgccattgggaaagagacaatggccacccacctcgcaaggttcttgtgcgggtgtacggggaaggttcaagcatgttttttgacaggaatgacgaggtaatgactttcgagcggatgtcgctgaaagatcagggcccacgtctgttaggccggtttcccaacggtcgagttgaggaattcttggcgagcacggacacttgcgaagcaagacttacgtaa

SEQ ID NO: 101781 - protein, 141 aa, Physcomitrella patens
MYCKSWLTGTEPAENDTADASLVKQTSIELPVEAYKELHKLAGKWMDILDPKDLTLTRLKGAMTNHVYQCHWERDNGHPPRKVLVRVYGEGSSMFFDRNDEVMTFERMSLKDQGPRLLGRFPNGRVEEFLASTDTCEARLT

SEQ ID NO: 101782 - DNA, 1802 bp, Zea mays subsp. mays
  CDS (220)..(1320)
aacaacactcgcctgccctgccctctcatctcgcttcgcttccattccatcgcgccagtcgccagactcaccagggagacagggagagtagggggaaatatcaattagaaacaacgaggaactagcaaagaaagaaggataactcccataagaaaaatcgccaaatacgccattcatcttctccgcccgggtttcagaacgtgcggcagtttagccaggatggtggcgatcgagaaccagaaccagagccaggccgcggtggcggtggcggcggaggcggtgccggcgccggcgtcgcggatccccagggaggcgcggcgcctgctgcacgagctggcggcggcgtgggcggacgtggccgactgccgcgcgctggaggtcgtgccgctcaagggggccatgaccaacgaggtctaccaggcgcgctggctcactgcaggccctgccggccagaaggaggagcccagggcggagagggaggtgaggaaggtgctcgtgcggatttacggcgacggcgtcgacctcttcttcgaccgcgaggacgaggtgcgcaccttcgagtgcatgtcacgccatggccagggtccccgcctcctcggccgcttcccgaacggccgcgtcgaggagttcatccacgcaaggacattgtcagctgccgaccttcgcgatcctgaaatttcagctctggtggcttccaagctgagggagttccacaaccttgacatgcctggtcccaaatctgtgctcatttgggacagacttaggaactggctcagaactgccaagagcttgtgtccacctgaagaagccaaggaatttcggttggacagtctggagaaccagattactgcattggagaacgagtgttcaggtgattaccagtggattggtttctgtcacaatgatcttcagtatggcaatatcatgattgatgaagagaccaacgtgctgaccatcattgattatgagtatgcaagcttcaacccagttgcatatgacattgctaaccatttctgtgagatggcagcagactatcattcatcaaagcctcatatactggactacagcagatatccagatgttgatgagcagaagcgttttgttaagacctacctgaacatttctggtgaggaacctgatgcggaagttgtagagaacctgctccaaagcattgagaagcacacgctctccagccatctagtatggggcctctggggaataatttcggaccatgttaacgacattgacttcgactacaaggagtatgcgaggcagagattcgagcagtactggcacaagtctgcgatcttaacatcttgaacatgtgtataaacacccgtacgtggtctcaggaactccctgagggcctgtggctgcacacacgaaattgtgcagtgccactgacacatagataagctgtgaaagaagaaatactgacgacgacgacgaataatcccgttttgggctcgggaggttatttctccgcaactcgatgagcttcaggcttcagcttcaggaaggaaggaaggagctatggggatttggctgcccgcttatgctgtaccaatgcaattaaaagataaagatccggtccggtgttgcgtgtgctatgtttagttttggctagcaccgccgagagccgtggtcctgttgtggtgtttctagtttctgtatgcttgatgttgttagtgtgctggataatttggttttgtgcttggggagtccttagctttgggacaacgcatacattgtatactgggtagatgtataaacataaaacagctatgggaatttggttctct

SEQ ID NO: 101783 - protein, 366 aa, Zea mays subsp. mays
MVAIENQNQSQAAVAVAAEAVPAPASRIPREARRLLHELAAAWADVADCRALEVVPLKGAMTNEVYQARWLTAGPAGQKEEPRAEREVRKVLVRIYGDGVDLFFDREDEVRTFECMSRHGQGPRLLGRFPNGRVEEFIHARTLSAADLRDPEISALVASKLREFHNLDMPGPKSVLIWDRLRNWLRTAKSLCPPEEAKEFRLDSLENQITALENECSGDYQWIGFCHNDLQYGNIMIDEETNVLTIIDYEYASFNPVAYDIANHFCEMAADYHSSKPHILDYSRYPDVDEQKRFVKTYLNISGEEPDAEVVENLLQSIEKHTLSSHLVWGLWGIISDHVNDIDFDYKEYARQRFEQYWHKSAILTS

SEQ ID NO: 101784 - DNA, 1358 bp, Triticum aestivum
  CDS (116)..(1183)
atcctaatcaaaaacccatcaaacagccctcgcgaactcaacgggaagcgactcacgcccccctccgccccccgcagatcgcccgctccgccacgcgccgccgacgccgccgccaatggccgccgccgccgacgccgggcccgagctgcggcggagctccagcatcgaccgcatcccggcggaggcgcgccgcatcctgcaccgcctcgccggcgagctctggggcgccgacgtcgaccccgccgcgctcgtcgtgtcccagctcaagggcgccctcaccaacgaggtcttccgcatcacctggcccggcggcgagggcgacccgcgcaaggtgctcgtgcgcatctacggccagggcgtcgaggtcttcttcgaccgcgccgacgaggtccgcaccttcgagtgcatgtcccgccacggccagggcccccgcctcctcggccgcttcccccagggccgcgtcgaggagttcatcaacgccaggacgctctcggcgccggatctgcgcgacccggagatttccggcctgattgccaggaagctgcgggagtttcacgagctcgacatgcctggacccaaggacatctcactctggcagaggctgaggcgttggcttgaggaagctcgcagcaggtgctcgactgaggaggccagggaattgcggttggagacgctcggcgatgagattgcggagctggagaatgtattgtccggggtcgatcagagagtagtattttgccataatgatttgcagtatggcaacattatgatatacgaagagaccagacaagtgaccttaatcgactatgaatacgccagttttaaccctgttgcgttcgacattgcgaatcacttctgtgagatggctgctgattatcatagtgatacaccgcacgtgatggactttacaaaatatcctgacgtggatgaacagcggagatttcttgaggcttaccttagttcttcaggagaaaacacatccgatgtagaagtcgaaacattgcttggcttgattgcaaagtacagtctcacaagccatctcttctggggtctctggggaatagtctcggcgcatgtgaacaagaacatcgactttgagtacaaggagtacgcgaggcatcggttcgaccagtactgggacacgaagcctagaatactgcaagcctgcaacccaaccagctgatcacgcgcatggctcattctttttcttattatagcacccatcgcctctcgagtagctctgtagagtcctgtgactgaatcttgttcatcagccaatttggttgcaaatcgtttaggctagtagttgaccgtgtcgtgtaattaaacctgcgcagaatagtcgattctacggtttt

SEQ ID NO: 101785 - protein, 355 aa, Triticum aestivum
MAAAADAGPELRRSSSIDRIPAEARRILHRLAGELWGADVDPAALVVSQLKGALTNEVFRITWPGGEGDPRKVLVRIYGQGVEVFFDRADEVRTFECMSRHGQGPRLLGRFPQGRVEEFINARTLSAPDLRDPEISGLIARKLREFHELDMPGPKDISLWQRLRRWLEEARSRCSTEEARELRLETLGDEIAELENVLSGVDQRVVFCHNDLQYGNIMIYEETRQVTLIDYEYASFNPVAFDIANHFCEMAADYHSDTPHVMDFTKYPDVDEQRRFLEAYLSSSGENTSDVEVETLLGLIAKYSLTSHLFWGLWGIVSAHVNKNIDFEYKEYARHRFDQYWDTKPRILQACNPTS

SEQ ID NO: 101786 - DNA, 1041 bp, Arabidopsis thaliana
  CDS (1)..(1041)
atggcgatcaagacaaagactagtctaattccaagttgttcatcacctgaggatctaaaacgcgttttgcaaacgctaggttcgagctggggagatgtagttgaagatctggagcgtcttgaggttgttccgttaaaaggagctatgactaacgaggtttatcagattaattggcctactttaaacggtgaagatgttcatcggaaagttcttgttcggatctacggtgacggcgttgaccttttctttaacagaggtgatgaaatcaaaacgtttgagtgtatgtctcatcatggttatggtcctaagcttcttggtcgtttctctgatggtcgtcttgaagaattcatacacgccagaactctttctgcagatgatcttcgtgtagcagaaacatctgatttcatcgctgcgaagctaagagagtttcataagcttgatatgcctggtccaaagaacgttcttctctgggaaagacttaggacttggcttaaggaggctaagaacttggcttcacctatagagatggataagtatcggttggaaggtttggaaaatgaaatcaatttgttggaagagagacttactcgggatgatcaagagattggtttctgtcacaacgatcttcagtatggaaatgtcatgattgatgaagtaaccaatgccattaccatcatagactatgagtattcgagtttcaacccaattgcttatgacattgcaaaccacttttgtgagatggctgctaattaccattcagacactcctcatgttctggactacactctatatccaggagaaggagaaaggagaaggttcattagcacatatcttggctctacagggaatgcaacaagtgataaagaagtagagaggttattgaaagatgcagagagctacactttagcaaaccatatcttctggggactatggggaatcatctcgggacatgtgaacaagattgagttcgattacatggaatatgcaaggcagagatttgaacagtactggcttagaaagcctttgcttcttgaaggatga

SEQ ID NO: 101787 - protein, 346 aa, Arabidopsis thaliana
MAIKTKTSLIPSCSSPEDLKRVLQTLGSSWGDVVEDLERLEVVPLKGAMTNEVYQINWPTLNGEDVHRKVLVRIYGDGVDLFFNRGDEIKTFECMSHHGYGPKLLGRFSDGRLEEFIHARTLSADDLRVAETSDFIAAKLREFHKLDMPGPKNVLLWERLRTWLKEAKNLASPIEMDKYRLEGLENEINLLEERLTRDDQEIGFCHNDLQYGNVMIDEVTNAITIIDYEYSSFNPIAYDIANHFCEMAANYHSDTPHVLDYTLYPGEGERRRFISTYLGSTGNATSDKEVERLLKDAESYTLANHIFWGLWGIISGHVNKIEFDYMEYARQRFEQYWLRKPLLLEG

SEQ ID NO: 101788 - DNA, 1053 bp, Arabidopsis thaliana
  CDS (1)..(1053)
atgacgatgggtggtactgaaaagaatgtagagaataaacaatatcgtttgcctcgagaagtcaaggaagctttacaagcaatagcatcagagtgggaagatgtgattgattcaaaggctctgcaagttattcctttaaaaggtgcaatgacaaatgaggtgtttcagatcaaatggccaactagggaaaaaggtccttctcgtaaggttttggttaggatttatggtgaaggtgttgagattttctttgatcgtgaggatgagatcaggacatttgagttcatgtcgaagcatggtcatggacctttgttgttaggtcggtttggtaatggtcgtatcgaagagttcctccatgcacggaccctatctgcttgtgacttgcgtgatcctgaaatatctggtcgaatagcaactaggatgaaggagtttcatggtcttgaaatgcctggtgcgaaaaaggctttgctttgggacagattacgaaattggctcactgcatgcaagagactggcttcaccagaagaagctaagtcctttcgtctcgatgttatggagatggaaattaatatgcttgagaaatctctctttgacaatgatgaaaatattggattttgccacaatgatttacagtatgggaacatcatgatggatgaagagaccaaagcaataaccatcattgattatgaatattcatgctataatcctgtggcttatgacattgccaatcacttctgtgagatggctgccgattaccacactgaaacacctcacatcatggattatagtaaataccctggtgtggaggagcgacaaagatttctgaaaacatatatgagttattcagatgaaaagcccagcgatactatggtcaaaaaactcctagaagacgttgagaaatatacacttgctagtcatctaatttggggtttatggggaattatatcggaacatgtgaatgaaatcgactttgactacatggagtatgcaagacaaaggttcgagcagtattggttaacaaagccgaggctccttgcagcttccgaacacaagtaa

SEQ ID NO: 101789 - protein, 350 aa, Arabidopsis thaliana
MTMGGTEKNVENKQYRLPREVKEALQAIASEWEDVIDSKALQVIPLKGAMTNEVFQIKWPTREKGPSRKVLVRIYGEGVEIFFDREDEIRTFEFMSKHGHGPLLLGRFGNGRIEEFLHARTLSACDLRDPEISGRIATRMKEFHGLEMPGAKKALLWDRLRNWLTACKRLASPEEAKSFRLDVMEMEINMLEKSLFDNDENIGFCHNDLQYGNIMMDEETKAITIIDYEYSCYNPVAYDIANHFCEMAADYHTETPHIMDYSKYPGVEERQRFLKTYMSYSDEKPSDTMVKKLLEDVEKYTLASHLIWGLWGIISEHVNEIDFDYMEYARQRFEQYWLTKPRLLAASEHK

SEQ ID NO: 101790 - DNA, 1125 bp, Arabidopsis thaliana
  CDS (1)..(1125)
atgggagcagcgaagaatatctgggcattagccaacgccgaagatgcagctaacgacgccgaacaaatcccttattcttcgttcgtcgtcgacacgtctttgcctcttcctctcatgattcctcgtatcatagagttatgtaaagatctgttcaagaattggggagagcttgatgattcactcttctctgttgagagagtatctggaggcattacaaatcttttgctgaaggtttctgtgaaagaggacactaataaagaagtgtctgttacagtgagactgtatgggcctaacactgagtatgttattaaccgggagagagagattctggctatcaagtatctctcggctgccggatttggtgccaagttgcttggtggttttggaaatggcatggtgcaatcgttcatcaatgcaagaaccttagagccatcagacatgagagagccaaagattgctgcacaaattgccagagaacttggaaagtttcataaagtggacataccaggttccaaggaacctcagctgtgggttgatatcttgaagttctatgaaaaagcatctactcttacgtttgaagaacctgataagcagaagctctttgagactatttcgtttgaagaactccacaaagaaattattgagctaagggaattcacaggcttacttaacgcacctgtggtgtttgctcataacgatttactatcaggaaacttcatgctgaatgatgaagaagagaaactatacttgattgatttcgagtatggatcatacaactatagaggctttgacatcggaaatcacttcaatgaatatgcaggatacgactgtgattacagcctgtacccaagtaaagaggaacaatatcatttcatcaagcattacttacagccagacaaaccagacgaggtcagtatcgctgaagtagaatcagtctttgtagagacagatgcgtataaattagcatctcatttgtactgggcaatatgggcgatcatccaggcaaggatgtctcccattgagtttgaatatttgggttacttctttttgcggtacaatgaatacaagaagcagaagccacttactttttcacttgttacatctcacctctcagcatcgctgtag

SEQ ID NO: 101791 - protein, 374 aa, Arabidopsis thaliana
MGAAKNIWALANAEDAANDAEQIPYSSFVVDTSLPLPLMIPRIIELCKDLFKNWGELDDSLFSVERVSGGITNLLLKVSVKEDTNKEVSVTVRLYGPNTEYVINREREILAIKYLSAAGFGAKLLGGFGNGMVQSFINARTLEPSDMREPKIAAQIARELGKFHKVDIPGSKEPQLWVDILKFYEKASTLTFEEPDKQKLFETISFEELHKEIIELREFTGLLNAPVVFAHNDLLSGNFMLNDEEEKLYLIDFEYGSYNYRGFDIGNHFNEYAGYDCDYSLYPSKEEQYHFIKHYLQPDKPDEVSIAEVESVFVETDAYKLASHLYWAIWAIIQARMSPIEFEYLGYFFLRYNEYKKQKPLTFSLVTSHLSASL

SEQ ID NO: 101792 - DNA, 1041 bp, Arabidopsis thaliana
  CDS (1)..(1041)
atggcggtaggaatctttggattgatcccaagctcatcaccagacgagctaaggaagattcttcaagcgctttcgacgaaatggggagacgtagttgaggattttgagagtcttgaagtgaagccaatgaaaggagcgatgactaacgaagtgttcatggttagttggcctagaaaagaaacgaatcttcgatgtaggaagcttcttgttcgtgtttatggtgaaggtgttgagcttttcttcaatagagacgatgagattcgtacttttgagtatgttgctcgtcatggtcacggtcctacacttcttggtcgcttcgccggcggtagagtcgaagagtttatccatgcccggacactatcggcaaccgatcttcgtgatccgaacatatcagctcttgttgcatctaagctaagaagatttcacagcatacacattcctggagatagaattatgctcatctgggacaggatgaggacttgggtaggacaagccaagaatctatgttcaaatgaacattcaacagagtttggtctagacgacattgaagatgaaatcaacctgctggaacaagaagtgaacaatgaacaagagattggcttctgtcacaatgacttgcagtatggtaacatcatgattgatgaagaaaccaatgcaattactatcattgattatgagtatgcaagttataatccgatcgcttacgacatagcaaatcatttctgtgaaatggcggcagattatcattcaaacactcctcatatcttggactacactctatatccaggggaagaagaaaggaggagattcatatgtaactacttaacctcttcaggtgaagaagcaagagaagaagacatagaacaacttttggatgatattgagaagtatacattggcaagccatctcttctggggtttatggggaatcatatctggttatgtgaacaagattgagtttgattatatcgagtattcgaggcagagattcaaacagtattggcttcgcaagccaaagcttttatctttcttcccatcctaa

SEQ ID NO: 101793 - protein, 346 aa, Arabidopsis thaliana
MAVGIFGLIPSSSPDELRKILQALSTKWGDVVEDFESLEVKPMKGAMTNEVFMVSWPRKETNLRCRKLLVRVYGEGVELFFNRDDEIRTFEYVARHGHGPTLLGRFAGGRVEEFIHARTLSATDLRDPNISALVASKLRRFHSIHIPGDRIMLIWDRMRTWVGQAKNLCSNEHSTEFGLDDIEDEINLLEQEVNNEQEIGFCHNDLQYGNIMIDEETNAITIIDYEYASYNPIAYDIANHFCEMAADYHSNTPHILDYTLYPGEEERRRFICNYLTSSGEEAREEDIEQLLDDIEKYTLASHLFWGLWGIISGYVNKIEFDYIEYSRQRFKQYWLRKPKLLSFFPS

SEQ ID NO: 101794 - DNA, 768 bp, Arabidopsis thaliana
  CDS (1)..(768)
atggcggtaggaatctttggattgatcccaagctcatcaccagacgagctaaggaagattcttcaagcgctttcgacgaaatggggagacgtagttgaggattttgagagtcttgaagtgaagccaatgaaaggagcgatgactaacgaagtgttcatggttagttggcctagaaaagaaacgaatcttcgatgtaggaagcttcttgttcgtgtttatggtgaaggtgttgagcttttcttcaatagagacgatgagattcgtacttttgagtatgttgctcgtcatggtcacggtcctacacttcttggtcgcttcgccggcggtagagtcgaagagtttatccatgcccggacactatcggcaaccgatcttcgtgatccgaacatatcagctcttgttgcatctaagctaagaagatttcacagcatacacattcctggagatagaattatgctcatctgggacaggatgaggacttgggtaggacaagccaagaatctatgttcaaatgaacattcaacagagtttggtctagacgacattgaagatgaaatcaacctgctggaacaagaagtgaacaatgaacaagagattggcttctgtcacaatgacttgcagtatggtaacatcatgattgatgaagaaaccaatgcaattactatcattgtaagtctcttactcataaccacaaatcttcttaacattttttctttctttcagaatgggggaaaaaagtttaaaacccatttttacgatacgatttaa

SEQ ID NO: 101795 - protein, 255 aa, Arabidopsis thaliana
MAVGIFGLIPSSSPDELRKILQALSTKWGDVVEDFESLEVKPMKGAMTNEVFMVSWPRKETNLRCRKLLVRVYGEGVELFFNRDDEIRTFEYVARHGHGPTLLGRFAGGRVEEFIHARTLSATDLRDPNISALVASKLRRFHSIHIPGDRIMLIWDRMRTWVGQAKNLCSNEHSTEFGLDDIEDEINLLEQEVNNEQEIGFCHNDLQYGNIMIDEETNAITIIVSLLLITTNLLNIFSFFQNGGKKFKTHFYDTI

SEQ ID NO: 101796 - DNA, 1056 bp, Oryza sativa subsp
  CDS (1)..(1056)
atgaagcggagcgcgagcttcgaccgcgtcccggaggaggcgcgccgcatcctgcaccgcctcgccggggagctctggggcggcgacgtcgaccccgccgcgctcgccgtgtcccagctcaagggcgccatgaccaacgaggtgttccggatcacctggcccggcggcggcggcggcggcgagggcgagggcgagggcgaccaccgcaaggtgctcgtccgcatctacggccagggcgtcgaggtcttcttcgaccgcgccgacgaggtccgcaccttcgagtgcatgtcccgccacggccagggcccccgcctcctcggccgcttccccaacggccgcatcgaggagttcatcaacgcgaggacgctctccgcggcggatctgcgcgacgcggagatatcctcgctgatcgccaagaagcttcgtgaattccacgatctcgacatgcctggacccaagaacgtgtcactgtggcagaggctgaggaggtggcttgaggaagctcgtggcaggtgctcgcccgaggaggctaggcagttcagtttggagaagctaggtgatgagatcgcaatgctggacattgcattgtcaggggttgatcagagagtaggattttgccacaatgatctgcaatatggcaacattatgatatatgaagaaaccagacaagtgaccttaattgactacgagtatgcgagttttaatcctgtggcatttgacattgctaatcacttctgtgagatgtctgctgattatcattcagccacacctcatgtgctggacttcacaaaataccctggcattgacgaacaacgcagatttgttcaaacgtacctcagatcttcaggtgagaacccatcagatgcggaagttgaacatttacttggcctgattgcaaaatacagtcttgcaagccatatcttctggggtctttggggaataatctcagggcatgtgaacaagaacatcgacttcgagtaccaggagtatgcaaggcagcggttcgatcagtactggaagacaaaagatcaaacgctgggatccaaatccaactag

SEQ ID NO: 101797 - protein, 351 aa, Oryza sativa subsp
MKRSASFDRVPEEARRILHRLAGELWGGDVDPAALAVSQLKGAMTNEVFRITWPGGGGGGEGEGEGDHRKVLVRIYGQGVEVFFDRADEVRTFECMSRHGQGPRLLGRFPNGRIEEFINARTLSAADLRDAEISSLIAKKLREFHDLDMPGPKNVSLWQRLRRWLEEARGRCSPEEARQFSLEKLGDEIAMLDIALSGVDQRVGFCHNDLQYGNIMIYEETRQVTLIDYEYASFNPVAFDIANHFCEMSADYHSATPHVLDFTKYPGIDEQRRFVQTYLRSSGENPSDAEVEHLLGLIAKYSLASHIFWGLWGIISGHVNKNIDFEYQEYARQRFDQYWKTKDQTLGSKSN

SEQ ID NO: 101798 - DNA, 1065 bp, Oryza sativa subsp
  CDS (1)..(1065)
atggtggcgagcgagacgagccagaaggcggcggcggcggggagcagcatcccggagggggcgcggcggctgctgcacgagctggcggcggggtggggcgacgtggcggactgccgggcgctggaggtggtgccgctcaggggggccatgaccaacgaggtctaccaggcgcggtggccgccggcggcggaggcggaggtggaggcggcggggaggagggtgctggtgagggtgtacggcgagggcgtggaggtgttcttcgaccgggaggccgaggtgcgcacgttcgagtccatgtcgcggcacggccacggcccgcgcctcctcggccgcttccccaacggccgcgtcgaggagttcatccacgccaggacactctcagctgttgatctgcgtgatccagagatttcagccattatagcctcaaagctgagggaattccacaaccttgatatgcctggtccaaaatctgtactcatttgggacagactaaggaactggctcaaaactgccaagaatttgtgcccctctgacgaagccaaagagttctgcttggatagcatggagaacgagatcactgcgttggaaaatgagctttcagaggattaccagtgcgtaggattttgccacaacgatctccagtatggaaacatcatgattgatgaagagaccaaattgctgaccatcattgactatgagtatgcaagttttggtccagttgcttatgacattgcaaaccatttctgcgagatggctgcagactaccattcagaaaagcctcacatactggactacactaaatatccagatactgatgagcagaagcaatttgtgcagagctacctgagctcttcaggcgaggaacctgacgcagagaaggtcaataatctgataaaaagtatcgagaagtacaccttggcaagccatctcatttggggcctctggggaataatttcggagcatgtcaacgatattgacttcgactacatggggtatgcgaggcagaggttcgagcagtactggctcaagaagcctgcaatcctaacatgtcaggtcgttgaataa

SEQ ID NO: 101799 - protein, 354 aa, Oryza sativa subsp
MVASETSQKAAAAGSSIPEGARRLLHELAAGWGDVADCRALEVVPLRGAMTNEVYQARWPPAAEAEVEAAGRRVLVRVYGEGVEVFFDREAEVRTFESMSRHGHGPRLLGRFPNGRVEEFIHARTLSAVDLRDPEISAIIASKLREFHNLDMPGPKSVLIWDRLRNWLKTAKNLCPSDEAKEFCLDSMENEITALENELSEDYQCVGFCHNDLQYGNIMIDEETKLLTIIDYEYASFGPVAYDIANHFCEMAADYHSEKPHILDYTKYPDTDEQKQFVQSYLSSSGEEPDAEKVNNLIKSIEKYTLASHLIWGLWGIISEHVNDIDFDYMGYARQRFEQYWLKKPAILTCQVVE

SEQ ID NO: 101800 - DNA, 1134 bp, Medicago truncatula
  CDS (1)..(1134)
atgaataaagcagaagatcttgcaaacaatatagaaagtagtgctacacaaattgttgtagaaaatgatgtaaataataaagtaaattatctagattatcttccagatgaagcaaaagagatattgaaatcattagcaaataaatgggaaaatgtattggatgcaaatgagttggaagttattcctcttaaaggggcaatgaccaatgaggtattccagataaaatggcaaacaacagaaggtgaaatgtcaagaaaggttcttgttagaatctatggtgaaggtactgacattttctttgatagggaaaacgaaattcgaacattcgcattcatatcaaagaatggacagggacctcgtttgctaggaaggtttgctcaaggtcgccttgaagagttcatccgtgcaaggacattatcagcacccgatatgcgcgatccatctatttctgctcttatagcctccaaaatgaaggagttccatgatcttgacatgcctggttccaagaatgtgtacctttgggaaagattaagagattggcttattgaagcgaggcgcttgttgtcacccgaagaagttgagatgtttcatttgaacacaatggacaaagaaatttctcttttggaaaaggaattgtcgataactcctcaacgcatagggttttgccacaatgatttacaatatggtaacatcatgcttgatgaagtaacaaattctgtgaccataatagattatgagtatgcaagttataatccagttgcatatgatatagcaaaccacttctctgaaatggctgcaaattatcataccgaaactccacatattctcgactatagtaaatatcccgatttggaggaacgtcaaagatttgtgcatacatatttgagttcatcaggagagcaacctagtgataatgaagtgcagaaactacttgatgaaattgaaaagtatacacttgcaagtcatctcttatggggcctttggggaatcgtttcggagcatgtaaacaaaattgattttgactacaaggagtatgcaaaacaaaggtttcaagagtactggtcaaggaaaaatcatcttttgagccctaatggatcttcccatgataatgttattgatggtaatggtaaataa

SEQ ID NO: 101801 - protein, 377 aa, Medicago truncatula
MNKAEDLANNIESSATQIVVENDVNNKVNYLDYLPDEAKEILKSLANKWENVLDANELEVIPLKGAMTNEVFQIKWQTTEGEMSRKVLVRIYGEGTDIFFDRENEIRTFAFISKNGQGPRLLGRFAQGRLEEFIRARTLSAPDMRDPSISALIASKMKEFHDLDMPGSKNVYLWERLRDWLIEARRLLSPEEVEMFHLNTMDKEISLLEKELSITPQRIGFCHNDLQYGNIMLDEVTNSVTIIDYEYASYNPVAYDIANHFSEMAANYHTETPHILDYSKYPDLEERQRFVHTYLSSSGEQPSDNEVQKLLDEIEKYTLASHLLWGLWGIVSEHVNKIDFDYKEYAKQRFQEYWSRKNHLLSPNGSSHDNVIDGNGK

SEQ ID NO: 101802 - DNA, 1080 bp, Glycine max
  CDS (1)..(1080)
atggccataaaggcaattgagttgttgaaaggaagcggaaaccatgaagagatatttgaagttcttgcagcagtggctgcatctttgggggatgtaatagatgatgtgaacactttgcaggtaacacctttaaagggggcaatgaccaatgaggtttttgaggtaaattggccaaccaaaagtgatggtcatcaaagaagggttcttgttcgattatatggtgaaggtgttgaggttttcttcaacagggtggatgaaatccaaacctttgagtgcatgtcaaagcatggacagggtccacgccttcttgggaggttcaccactggcagagttgaggagttcattcatgccaaaacactctcagctgcggacctccgtgaccctgaaatatctgctttgatagcatctaagatgagggagtttcacaatcttcatatgcctggtgcaaagaaggctcagctttggcagagaatgaggaagtggcttagtcatgccaaaagtttgtgctcccctaaagaaaccaagaattttggcctggacaatctagatgctgaaataaatatgcttgtggagttgttatctcaaggaaatcaacagattggtttttgtcacaatgatctacaatatggtaacataatgatggatgaagatacaagagcaatcactttaattgactatgaatatgccagttacaatcctattggatatgatctggcaaatcatttctgtgaaatggtggcaaattaccatagtgacgaacctcatgttcttgactacagtaaatatcctggtctggaggagcgtcaaaggtttgtttataattatttgagttctgagggtaagaaaccaagcaatagtgaagtggatcagctagtgaatcttgcagaaaaatacactcttgcaaaccatctattttggggcttgtggggacttatttcgagtcatgtcaatacaattgactttgactacaaggagtatgcgaggcagagatttcagcaatactggttgaagaagcctactttattggactcaccaagtatcgtttcccaagatgggattgccaatggtgtgaaccattga

SEQ ID NO: 101803 - protein, 359 aa, Glycine max
MAIKAIELLKGSGNHEEIFEVLAAVAASLGDVIDDVNTLQVTPLKGAMTNEVFEVNWPTKSDGHQRRVLVRLYGEGVEVFFNRVDEIQTFECMSKHGQGPRLLGRFTTGRVEEFIHAKTLSAADLRDPEISALIASKMREFHNLHMPGAKKAQLWQRMRKWLSHAKSLCSPKETKNFGLDNLDAEINMLVELLSQGNQQIGFCHNDLQYGNIMMDEDTRAITLIDYEYASYNPIGYDLANHFCEMVANYHSDEPHVLDYSKYPGLEERQRFVYNYLSSEGKKPSNSEVDQLVNLAEKYTLANHLFWGLWGLISSHVNTIDFDYKEYARQRFQQYWLKKPTLLDSPSIVSQDGIANGVNH

SEQ ID NO: 101804 - DNA, 1089 bp, Glycine max
  CDS (1)..(1089)
atggccataaaggcgattgaactgttgaaagggtgcggatcacaagaagaaataatggaagtgcttgctgcggtggcttcggatttgggggatgtgatcgatgatgtgaacaccttgcaggtgattccactgaatggtgcaatgaccaatgaggtttttcagataaactggccaaccaaaaatggtggtgagatcagaaaggttctggttcgtttatatggggaaggtgttgaagttttctttgacagggaagaagaaattcgaaactttgactgtatttcaaagcatggtcagggtccacgccttcttggccgattcacctctggcagagttgaggagtttattcatgcccgaactctctcagctgctgacctccgtgaccctgaagtatctgctttgatagcatctaagatgagagagttccataatcttcatatgcctggtgcaaagaaggttcagatttggcacagaatgaggaagtggctcggtcaagccaaaagtctgtgctccccaaaggatgaaaaaaattttggcttggacaatctggatgaggaaataaatatcctggagaagaagttatctgaaggatatcaagagattggtttttgtcacaatgacttacaatatggtaacataatgatggatgaagagacaagattaatcactataattgactatgaatatgccagttataatcccattgcatatgacctcgcaaatcatttttgtgaaatggtggcagattaccacagtgacacacctcatgttcttgactacacgaagtatccaggactagaggaacgtcaaagatttatccgcaactatctgagttctgaaggcaataaaccaagcaatgctaaagtgaaccagttagcgaaagctgcagaaaaatacactcttgcaaaccatctattttgggggttgtggggacttatttcgagttatgtgaacaaaattgattttgactataaggagtatgcaaggcagaggtttcagcaatactggataaggaagcctactttattggactcaccaagcatcgtttccctagatgaaactgtgaatggattgatgccatccttcacgtga

SEQ ID NO: 101805 - protein, 362 aa, Glycine max
MAIKAIELLKGCGSQEEIMEVLAAVASDLGDVIDDVNTLQVIPLNGAMTNEVFQINWPTKNGGEIRKVLVRLYGEGVEVFFDREEEIRNFDCISKHGQGPRLLGRFTSGRVEEFIHARTLSAADLRDPEVSALIASKMREFHNLHMPGAKKVQIWHRMRKWLGQAKSLCSPKDEKNFGLDNLDEEINILEKKLSEGYQEIGFCHNDLQYGNIMMDEETRLITIIDYEYASYNPIAYDLANHFCEMVADYHSDTPHVLDYTKYPGLEERQRFIRNYLSSEGNKPSNAKVNQLAKAAEKYTLANHLFWGLWGLISSYVNKIDFDYKEYARQRFQQYWIRKPTLLDSPSIVSLDETVNGLMPSFT

SEQ ID NO: 101806 - DNA, 477 bp, Oryza sativa subsp
  CDS (1)..(477)
atggtggcgatcgagaaccagagccagggccagcgggcggcggaggcggcggcgcagccacggatccccagggaggcgcggcggctactgcacgagatggcggcgtcgtgggcggacgttgccgactgccgggcgctgcaggtgattccgctcaagggcgccatgaccaacgaggtgtaccaggtgcgctggctcaacggcgccccggccaccgccgacggcggcgaggtggaggcggaggcggccgcaagggagagggaggtgaggaaggtcctcgtgcggatatacggcgacggcgtggagctcttcttcgaccgcgaggacgaggtgcgcaccttcgagtgcatgtctcgccatggccaaggcccccgcctcctcggccggttcaccaacggccgcgtcgaggagttcatccacgcaagggtaggtgcacatgaatatgatatgattccgcgctgctgtagccaaactgtctag

SEQ ID NO: 101807 - protein, 158 aa, Oryza sativa subsp
MVAIENQSQGQRAAEAAAQPRIPREARRLLHEMAASWADVADCRALQVIPLKGAMTNEVYQVRWLNGAPATADGGEVEAEAAAREREVRKVLVRIYGDGVELFFDREDEVRTFECMSRHGQGPRLLGRFTNGRVEEFIHARVGAHEYDMIPRCCSQTV

SEQ ID NO: 101808 - DNA, 1107 bp, Oryza sativa subsp
  CDS (1)..(1107)
atggtggcgatcgagaaccagagccagggccaccgggcggcggaggcggcggcgcacccacggatccccagggaggcgcggcggctactgcacgagatggcggcgtcgtgggcggacgttgccgactgccgggcgctgcaggtgattccgctcaagggcgccatgaccaacgaggtgtaccacgtgcgctggctcaacggggccccggccaccgccgacagcggcgaggtggaggcggaggcggccgcaagggagagggaggtgaggaaggtcctcgtgcggatatacggcgacggcgtggagctcttcttcgaccgcgaggacgaggtgcgcaccttcgagtgcatgtctcgccatggccaaggcccccgcctcctcggccggttcaccaacggccgcgtcgaggagttcatccacgcaaggacactatctgcagcagaccttcgtgatcctgaaatttcagctctggtggcgtcaaaactgagggaattccacaaccttgacatgcctggcccgaaatctgtactcatttgggaccgactgaaaaactggctcaaaactgcaaggaacctgcgctcatctgatgaatccaagaaatttcggctgggtagcctggagaacgagattgctgcattggagaaagaattttcaggggattaccacgggattggtttttgccacaacgatcttcagtatggcaacatcatgattgatgaagacaccaacatgttgactatcatcgattatgaatatgccagcttcaatccagttgcgtatgacatcgctaatcatttctgcgagatgccagcagactatcattcagagaagccacatagactggactacagtaaatatccagacactgatgaacagaagcgttttgtgaagacgtacctaagcaattctgtaagtgaagaacctgatgcggaagaggtggagaaccttctccaaagcattgagaaatacacgctcgccagtcatatagtttggggcctctggggaataatatcggatcatgtcaatgatattgacttcgactacaaggagtatgcaaggcagagattcgagcagtattggcagaagaagcaagcacttttaacttcatga

SEQ ID NO: 101809 - protein, 368 aa, Oryza sativa subsp
MVAIENQSQGHRAAEAAAHPRIPREARRLLHEMAASWADVADCRALQVIPLKGAMTNEVYHVRWLNGAPATADSGEVEAEAAAREREVRKVLVRIYGDGVELFFDREDEVRTFECMSRHGQGPRLLGRFTNGRVEEFIHARTLSAADLRDPEISALVASKLREFHNLDMPGPKSVLIWDRLKNWLKTARNLRSSDESKKFRLGSLENEIAALEKEFSGDYHGIGFCHNDLQYGNIMIDEDTNMLTIIDYEYASFNPVAYDIANHFCEMPADYHSEKPHRLDYSKYPDTDEQKRFVKTYLSNSVSEEPDAEEVENLLQSIEKYTLASHIVWGLWGIISDHVNDIDFDYKEYARQRFEQYWQKKQALLTS

SEQ ID NO: 101810 - DNA, 1041 bp, Arabidopsis thaliana
  CDS (1)..(1041)
atggcggtaggaatctttggattgatcccaagctcatcaccagacgagctaaggaagattcttcaagcgctttcgacgaaatggggagacgtagttgaggattttgagagtcttgaagtgaagccaatgaaaggagcgatgactaacgaagtgttcatggttagttggcctagaaaagaaacgaatcttcaatgtaggaatcttcttgttcgtgtttatggtgaaggtgttgagcttttcttcaatagagacgatgagattcgtacttttgagtatgttgctcgtcatggtcacggtcctacacttcttggtcgcttcgccggcggtagagtcgaagagtttatccatgcccggacactatcggcaaccgatcttcgtgatccgaacatatcagctcttgttgcatctaagctaagaagatttcacagcatacacattcctggagatagaattatgctcatctgggacaggatgaggacttgggtaggacaagccaagaatctatgttcaaatgaacattcaacagagtttggtctagacgacattgaagatgaaatcaacctgctggaacaagaagtgaacaatgaacaagagattggcttctgtcacaatgacttgcagtatggtaacatcatgattgatgaagaaaccaatacaattactatcattgattatgagtatgcaagttataatccgatcgcttacgacatagcaaatcatttctgtgaaatggcggcagattatcattcaaacactcctcatatcttggactacactctatatccaggggaagaagaaaggaggagattcatatgtaactacttaacctcttcaggtgaagaagcaagagaagaagacatagaacaacttttggatgatattgagaagtatacattggcaagccatctcttctggggtttatggggaatcatatctggttatgtgaacaagattgagtttgattatatcgagtattcgaggcagagattcaaacagtattggcttcgcaagccaaagcttttatctttcttcccatcctaa

SEQ ID NO: 101811 - protein, 346 aa, Arabidopsis thaliana
MAVGIFGLIPSSSPDELRKILQALSTKWGDVVEDFESLEVKPMKGAMTNEVFMVSWPRKETNLQCRNLLVRVYGEGVELFFNRDDEIRTFEYVARHGHGPTLLGRFAGGRVEEFIHARTLSATDLRDPNISALVASKLRRFHSIHIPGDRIMLIWDRMRTWVGQAKNLCSNEHSTEFGLDDIEDEINLLEQEVNNEQEIGFCHNDLQYGNIMIDEETNTITIIDYEYASYNPIAYDIANHFCEMAADYHSNTPHILDYTLYPGEEERRRFICNYLTSSGEEAREEDIEQLLDDIEKYTLASHLFWGLWGIISGYVNKIEFDYIEYSRQRFKQYWLRKPKLLSFFPS

SEQ ID NO: 101812 - DNA, 1125 bp, Arabidopsis thaliana
  CDS (1)..(1125)
atgggagcagcgaagaatatctgggcattagccaacgccgaagatgcagctaacgacgccgaacaaatcccttattcttcgttcgtcgtcgacacgtctttgcctcttcctctcatgattcctcgtatcatagagttatgtaaagatctgttcaagaattggggagagcttgatgattcactcttctctgttgagagagtatctggaggcattacaaatcttttgctgaaggtttctgtgaaagaggacactaataaagaagtgtctgttacagtgcgactgtatgggcctaacactgagtatgttattaaccgggagagagagattctggctatcaagtatctctcggctgccggatttggtgccaagttgcttggtggttttggaaatggcatggtgcaatcgttcatcaatgcaagaaccttagagccatcagacatgagagagcaaaagattgctgcacaaattgccagagaacttggaaagtttcataaagttgacataccaggttccaaggaacctcagctgtgggttgatatcttgaagttctatgaaaaagcatctactcttacgtttgaggaacctgataagcagaagctctttgaaactatttcgtttgaagaactccatacagaaattattgagctaagggaattcacaggcttacttaacgcacctgtggtgtttgctcataacgatttactatcaggaaacttcatgctgaatgatgaagaagagaaactatacttgattgatttcgagtatggatcatacaactatagaggctttgacatcggaaatcacttcaatgaatatgcaggatacgactgtgattacagcctgtacccaagtaaagaggaacaatatcacttcatcaagcattacttacagccagacaaaccagacgaggtcagtatcgcagaagtagaatcagtctttgtagagacagatgcgtataaattagcatctcatttgtactgggcaatatgggcgatcatccaggcaaggatgtctcccattgagtttgaatatttgggttacttctttttgcggtacaatgaatacaagaagcagaagccacttactttttcccttgttacatctcacctctctgcatcgatgtag

SEQ ID NO: 101813 - protein, 374 aa, Arabidopsis thaliana
MGAAKNIWALANAEDAANDAEQIPYSSFVVDTSLPLPLMIPRIIELCKDLFKNWGELDDSLFSVERVSGGITNLLLKVSVKEDTNKEVSVTVRLYGPNTEYVINREREILAIKYLSAAGFGAKLLGGFGNGMVQSFINARTLEPSDMREQKIAAQIARELGKFHKVDIPGSKEPQLWVDILKFYEKASTLTFEEPDKQKLFETISFEELHTEIIELREFTGLLNAPVVFAHNDLLSGNFMLNDEEEKLYLIDFEYGSYNYRGFDIGNHFNEYAGYDCDYSLYPSKEEQYHFIKHYLQPDKPDEVSIAEVESVFVETDAYKLASHLYWAIWAIIQARMSPIEFEYLGYFFLRYNEYKKQKPLTFSLVTSHLSASM

SEQ ID NO: 101814 - DNA, 1041 bp, Arabidopsis thaliana
  CDS (1)..(1041)
atggcggtaggaatctttggattgatcccaagctcatcaccagacgagctaaggaagattcttcaagcgctttcgacgaaatggggagacgtagttgaggattttgagagtcttgaagtgaagccaatgaaaggagcgatgactaacgaagtgttcatggttagttggcctagaaaagaaactaatcttcgatgtaggaagcttcttgttcgtgtttatggcgaaggtgttgagcttttcttcaatagagacgatgagattcgtacttttgaatatgttgctcgtcatggtcacggtccaacacttcttggtcgcttcgccggcggtagagtcgaagagtttatccatgcccggacactatcagcaaccgatcttcgtgatccgaacatatcagctcttgttgcatctaagttaagaagatttcacagcatacacattcctggagatagaactatgcttatctgggacaggatgaggacttgggtaggacaagccaagaatctatgttcaaatgaacattcatcagagtttggtctagactgcattgacgatgaaatcaacctgctggaacaagaagtgaacaatgaacaagagattggcttctgtcacaatgatttgcagtatggtaacatcatgattgatgaagaaaccaatgccattactatcattgactatgagtatgcaagttataatccaatcgcttacgacatagcaaatcatttctgtgaaatggcggcagattatcattcaaacactcctcatatcttggactacactctatatccaggggaagaagaaaggaggagattcatatgtaactacttaacctcttcaggtgaagaagcaagagaagaagacatagaccagctcttggatgatattgagaagtatacattggcaagccatctcttctggggtttatggggaatcatttctggttatgtgaacaagattgagtttgattatatcgagtattcgaggcagagattcaaacagtattggcttcgaaagccaaagcttttatctttctacccatcctaa

SEQ ID NO: 101815 - protein, 346 aa, Arabidopsis thaliana
MAVGIFGLIPSSSPDELRKILQALSTKWGDVVEDFESLEVKPMKGAMTNEVFMVSWPRKETNLRCRKLLVRVYGEGVELFFNRDDEIRTFEYVARHGHGPTLLGRFAGGRVEEFIHARTLSATDLRDPNISALVASKLRRFHSIHIPGDRTMLIWDRMRTWVGQAKNLCSNEHSSEFGLDCIDDEINLLEQEVNNEQEIGFCHNDLQYGNIMIDEETNAITIIDYEYASYNPIAYDIANHFCEMAADYHSNTPHILDYTLYPGEEERRRFICNYLTSSGEEAREEDIDQLLDDIEKYTLASHLFWGLWGIISGYVNKIEFDYIEYSRQRFKQYWLRKPKLLSFYPS

SEQ ID NO: 101816 - DNA, 1032 bp, Pisum sativum
  CDS (1)..(1032)
atggctttaaaaacctttgaattgttgaaaggatgtgaaactcatgaagagatcatgaaagttcttgctgctgtggctgtggatttaggtgatgtaattgatgatgtcagtgttgtggaggtgaatcccttaaagggtgcaatgacaaatgaggtttttgaggtgaattggccgaccaaaagtgacggtcatcttcgaagggttttggttcgattatacggtgaaggtgtcgaggttttcttcgatagggacgatgaaattcaaacctttgagtgtatgtcgaagaatggacaaggtccgcgccttcttagccggttcactaccggtcgagttgaagagttcattcatgcccggacactttcagctgccgacctccgcgaccctgaaatatcatctttgatagcatctaagatgaaggagtttcacaatcttcacatgcctggtgcaaagaaggctcagatttggcagagaatgaggaaatggcttaatcatgctaaaagtttgtgctcccaaaaggatatcaaaattttcggcttggacaatctagacgccgagataaattcgctgagggagttgttatcagatggatatcaagagattggtttttgtcacaatgatctacaatacggtaacatcatgatggatgaagagactagatcaatcactttaatagactacgagtactcgagttacaatcctgttgcgtatgatcttgcaaatcacttctgtgaaatggctgcagattaccacagtgacacgcctcatgttcttgactacactaaatatcctgatctcgaggaacgtcgaaggtttattcatacatacctgagttctgaaggggaaaaaccaagtgaaggtgaggtggagcagttagtgaatgttgtagagaagtacactcttgcaaaccatctattttggggcttatggggacttatttcaaattatgtcaatacaattgattttgattacaaggagtactcaaggcaaaggtttcaacaatactggttaaagaaagttattttgttgccatga

SEQ ID NO: 101817 - protein, 343 aa, Pisum sativum
MALKTFELLKGCETHEEIMKVLAAVAVDLGDVIDDVSVVEVNPLKGAMTNEVFEVNWPTKSDGHLRRVLVRLYGEGVEVFFDRDDEIQTFECMSKNGQGPRLLSRFTTGRVEEFIHARTLSAADLRDPEISSLIASKMKEFHNLHMPGAKKAQIWQRMRKWLNHAKSLCSQKDIKIFGLDNLDAEINSLRELLSDGYQEIGFCHNDLQYGNIMMDEETRSITLIDYEYSSYNPVAYDLANHFCEMAADYHSDTPHVLDYTKYPDLEERRRFIHTYLSSEGEKPSEGEVEQLVNVVEKYTLANHLFWGLWGLISNYVNTIDFDYKEYSRQRFQQYWLKKVILLP

SEQ ID NO: 101818 - DNA, 1047 bp, Arabidopsis thaliana
  CDS (1)..(1047)
atgggtggtactgaaaagaatgtagagaataaacaatatcgtttgcctcgagaagtcaaggaagctttacaagcaatagcatcagagtgggaagatgtgattgattcaaaggctctgcaagttattcctttaaaaggtgcaatgacaaatgaggtgtttcagatcaaatggccaactagggaaaaaggtccttctcgtaaggttttggttaggatttatggtgaaggtgttgagattttctttgatcgtgaggatgagatcaggacatttgagttcatgtcgaagcatggtcatggacctttgttgttaggtcggtttggtaatggtcgtatcgaagagttcctccatgcacggaccctatctgcttgtgacttgcgtgatcctgaaatatctggtcgaatagcaactaggatgaaggagtttcatggtcttgaaatgcctggtgcgaaaaaggctttgctttgggacagattacgaaattggctcactgcatgcaagagactggcttcaccagaagaagctaagtcctttcgtctcgatgttatggagatggaaattaatatgcttgagaaatctctctttgacaatgatgaaaatattggattttgccacaatgatttacagtatgggaacatcatgatggatgaagagaccaaagcaataaccatcattgattatgaatattcatgctataatcctgtggcttatgacattgccaatcacttctgtgagatggctgccgattaccacactgaaacacctcacatcatggattatagtaaataccctggtgtggaggagcgacaaagatttctgaaaacatatatgagttattcagatgaaaagcccagcgatactatggtcaaaaaactcctagaagacgttgagaaatatacacttgctagtcatctaatttggggtttatggggaattatatcggaacatgtgaatgaaatcgactttgactacatggagtatgcaagacaaaggttcgagcagtattggttaacaaagccgaggctccttgcagcttccgaacacaagtaa

SEQ ID NO: 101819 - protein, 348 aa, Arabidopsis thaliana
MGGTEKNVENKQYRLPREVKEALQAIASEWEDVIDSKALQVIPLKGAMTNEVFQIKWPTREKGPSRKVLVRIYGEGVEIFFDREDEIRTFEFMSKHGHGPLLLGRFGNGRIEEFLHARTLSACDLRDPEISGRIATRMKEFHGLEMPGAKKALLWDRLRNWLTACKRLASPEEAKSFRLDVMEMEINMLEKSLFDNDENIGFCHNDLQYGNIMMDEETKAITIIDYEYSCYNPVAYDIANHFCEMAADYHTETPHIMDYSKYPGVEERQRFLKTYMSYSDEKPSDTMVKKLLEDVEKYTLASHLIWGLWGIISEHVNEIDFDYMEYARQRFEQYWLTKPRLLAASEHK

SEQ ID NO: 101820 - DNA, 993 bp, Arabidopsis thaliana
  CDS (1)..(993)
atggcgatcaagacaaagactagtctaattccaagttgttcatcacctgaggatctaaaacgcgttttgcaaacgctaggttcgagctggggagatgtagttgaagatctggagcgtcttgaggttgttccgttaaaaggagctatgactaacgaggtttatcagattaattggcctactttaaacggtgaagatgttcatcggaaagttcttgttcggatctacggtgacggcgttgaccttttctttaacagaggtgatgaaatcaaaacgtttgagtgtatgtctcatcatggttatggtcctaagcttcttggtcgtttctctgatggtcgtcttgaagaattcatacacgccagaactctttctgcagatgatcttcgtgtagcagaaacatctgatttcatcgctgcgaagctaagagagtttcataagcttgatatgcctggtccaaagaacgttcttctctgggaaagacttaggacttggcttaaggaggctaagaacttggcttcacctatagagatggataagtatcggttggaaggtttggaaaatgaaatcaatttgttggaagagagacttactcgggatgatcaagagattggtttctgtcacaacgatcttcagtatggaaatgtcatgattgatgaagtaaccaatgccattaccatcatagactatgagtattcgagtttcaacccaattgcttatgacattgcaaaccacttttgtgagatggctgctaattaccattcagacactcctcatgttctggactacactctatatccagggaatgcaacaagtgataaagaagtagagaggttattgaaagatgcagagagctacactttagcaaaccatatcttctggggactatggggaatcatctcgggacatgtgaacaagattgagttcgattacatggaatatgcaaggcagagatttgaacagtactggcttagaaagcctttgcttcttgaaggatga

SEQ ID NO: 101821 - protein, 330 aa, Arabidopsis thaliana
MAIKTKTSLIPSCSSPEDLKRVLQTLGSSWGDVVEDLERLEVVPLKGAMTNEVYQINWPTLNGEDVHRKVLVRIYGDGVDLFFNRGDEIKTFECMSHHGYGPKLLGRFSDGRLEEFIHARTLSADDLRVAETSDFIAAKLREFHKLDMPGPKNVLLWERLRTWLKEAKNLASPIEMDKYRLEGLENEINLLEERLTRDDQEIGFCHNDLQYGNVMIDEVTNAITIIDYEYSSFNPIAYDIANHFCEMAANYHSDTPHVLDYTLYPGNATSDKEVERLLKDAESYTLANHIFWGLWGIISGHVNKIEFDYMEYARQRFEQYWLRKPLLLEG

SEQ ID NO: 101822 - DNA, 1371 bp, Schizosaccharomyces pombe
  CDS (1)..(1371)
atggtcaattttgcttctgaggttgacaagaataatgcctttgattcggctcacccttctcgaaaatgtaaaggatctttggattgtaatgaccctgatcccatttttcgtcataaggttttggtaataatacacaaacttgctatttctagttggaatcgtattccgttaacattgtgtaacaagttacacatcaaaagaatttcaggagctttaactaatgctgtctattatgtggcaccgccagaaggttaccacgctcccaaactgttactacggatttatggtccccatgttgaattgtttattaatcgacaagttgaactggaaaacttgaagcgccttgctcgacacaatattgggccttatttaattggcgagttttccaatggccgctttgaacaatatatggaatcaactactttgacctgcaaaacaattcgcgatcccaaactttctatctatgttggccgtagactttgtgagttacacaattttatccttttacacccccatgaagttctcgaaatgcctgctgcttggaaaaattgcttggtatggcttccgaaagcaaaagcaaaaatacttggtagaaagcactccttagcaattactagtgaatttatgaaaactttggaagaagactttaacgcttattacaattggtttgttgaatggtcgcgtgataaaaaagattggtttggtttaaaaatggttttctctcataatgatactcaatatggcaacctcttgaaaattaaagctaaaaaacgttctatacctctttcccaaaagcatcgaacccttgtacctgttgattttgagtatgctgggccaaatctttgtgcttttgatttagctaactattttgctgaatggatggccgactatcatcatccaacccataattatttgatggaccgctcaaggtatccagattttaatgctcgaaagttggtttatcacgcatatgttgagcaatccgctgtcattaatgatctactcgaaattgaagatgcttcattgttgaaaactgatatttccgacgaattaaagaacacgtttgaaaagcaaattatgaacttagaagaatctgttcgcgcaattagtcctgctgcgaacatcgggtgggcattgtggggaattttacaatgcttggaagaagatgatgaatgggaggatctaagcgtttccagccaagttgcggatcgacctgaaaaacagttggttgaaggttctaccgtccctcctattggtacctcttcttttgactatattggatacagctctgaaaaatttgatctgttttacgagggatgtgctgccttaggcctaaacggtcgaaaccgttctacattttcgtatgcttga

SEQ ID NO: 101823 - protein, 456 aa, Schizosaccharomyces pombe
MVNFASEVDKNNAFDSAHPSRKCKGSLDCNDPDPIFRHKVLVIIHKLAISSWNRIPLTLCNKLHIKRISGALTNAVYYVAPPEGYHAPKLLLRIYGPHVELFINRQVELENLKRLARHNIGPYLIGEFSNGRFEQYMESTTLTCKTIRDPKLSIYVGRRLCELHNFILLHPHEVLEMPAAWKNCLVWLPKAKAKILGRKHSLAITSEFMKTLEEDFNAYYNWFVEWSRDKKDWFGLKMVFSHNDTQYGNLLKIKAKKRSIPLSQKHRTLVPVDFEYAGPNLCAFDLANYFAEWMADYHHPTHNYLMDRSRYPDFNARKLVYHAYVEQSAVINDLLEIEDASLLKTDISDELKNTFEKQIMNLEESVRAISPAANIGWALWGILQCLEEDDEWEDLSVSSQVADRPEKQLVEGSTVPPIGTSSFDYIGYSSEKFDLFYEGCAALGLNGRNRSTFSYA

SEQ ID NO: 101824 - DNA, 1053 bp, Oryza sativa
  CDS (1)..(1053)
atgaagcggagcgcgagcttcgaccgcgtcccggaggaggcgcgccgcatcctgcaccgcctcgccggggagctctggggcggcgacgtcgaccccgccgcgctcgccgtgtcccagctcaagggcgccatgaccaacgaggtgttccggatcacctggcccggcggcggcggcggcgagggcgagggcgagggcgaccaccgcaaggtgctcgtccgcatctacggccagggcgtcgaggtcttcttcgaccgcgccgacgaggtccgcaccttcgagtgcatgtcccgccacggccagggcccccgcctcctcggccgcttccccaacggccgcatcgaggagttcatcaacgcgaggacgctctccgcggcggatctgcgcgacgcggagatatcctcgctgatcgccaagaagcttcgtgaattccacgatctcgacatgcctggacccaagaacgtgtcactgtggcagaggctgaggaggtggcttgaggaagctcgtggcaggtgctcgcccgaggaggctaggcagttcagtttggagaagctaggtgatgagatcgcaatgctggacattgcattgtcaggggttgatcagagagtaggattttgccacaatgatctgcaatatggcaacattatgatatatgaagaaaccagacaagtgaccttaattgactacgagtatgcgagttttaatcctgtggcatttgacattgctaatcacttctgtgagatgtctgctgattatcattcagccacacctcatgtgctggacttcacaaaataccctggcattgacgaacaacgcagatttgttcaaacgtacctcagctcttcaggtgagaacccatcagatgcggaagttgaacatttacttggcctgattgcaaaatacagtcttgcaagccatatcttctggggtctttggggaataatctcagggcatgtgaacaagaacatcgacttcgagtaccaggagtatgcaaggcagcggttcgatcagtactggaagacaaaagatcaaacgctgggatccaaatccaactag

SEQ ID NO: 101825 - protein, 350 aa, Oryza sativa
MKRSASFDRVPEEARRILHRLAGELWGGDVDPAALAVSQLKGAMTNEVFRITWPGGGGGEGEGEGDHRKVLVRIYGQGVEVFFDRADEVRTFECMSRHGQGPRLLGRFPNGRIEEFINARTLSAADLRDAEISSLIAKKLREFHDLDMPGPKNVSLWQRLRRWLEEARGRCSPEEARQFSLEKLGDEIAMLDIALSGVDQRVGFCHNDLQYGNIMIYEETRQVTLIDYEYASFNPVAFDIANHFCEMSADYHSATPHVLDFTKYPGIDEQRRFVQTYLSSSGENPSDAEVEHLLGLIAKYSLASHIFWGLWGIISGHVNKNIDFEYQEYARQRFDQYWKTKDQTLGSKSN

SEQ ID NO: 101826 - DNA, 1107 bp, Oryza sativa
  CDS (1)..(1107)
atggtggcgatcgagaaccagagccagggccagcgggcggcggaggcggcggcgcagccacggatccccagggaggcgcggcggctactgcacgagatggcggcgtcgtgggcggacgttgccgactgccgggcgctgcaggtgattccgctcaagggcgccatgaccaacgaggtgtaccaggtgcgctggctcaacggcgccccggccaccgccgacggcggcgaggtggaggcggaggcggccgcaagggagagggaggtgaggaaggtcctcgtgcggatatacggcgacggcgtggagctcttcttcgaccgcgaggacgaggtgcgcaccttcgagtgcatgtctcgccatggccaaggcccccgcctcctcggccggttcaccaacggccgcgtcgaggagttcatccacgcaaggacactatctgcagcagaccttcgtgatcctgaaatttcagctctggtggcgtcaaaactgagggaattccacaaccttgacatgcctggcccgaaatctgtactcatttgggaccgactgaaaaactggctcaaaactgcaaggaacctgtgctcatctgatgaatccaagaaatttcggctgggtagcctggagaacgagattgctgcattggagaaagaattttcaggggattaccacgggattggtttttgccacaacgatcttcagtatggcaacatcatgattgatgaagacaccaacatgttgactatcatcgattatgaatatgccagcttcaatccagttgcgtatgacatcgctaatcatttctgcgagatggcagcagactatcattcagagaagccacatagactggactacagtaaatatccagacactgatgagcagaagcgttttgtgaagacgtacctaagcaattctgtaagtgaagaacctgatgcggaagaggtggagaaccttctccaaagcattgagaaatacacgctcgccagtcatctagtttggggcctctggggaataatatcggatcatgtcaatgatattgacttcgactacaaggagtatgcaaggcagagattcgagcagtattggcagaagaagcaagcacttttaacttcatga

SEQ ID NO: 101827 - protein, 368 aa, Oryza sativa
MVAIENQSQGQRAAEAAAQPRIPREARRLLHEMAASWADVADCRALQVIPLKGAMTNEVYQVRWLNGAPATADGGEVEAEAAAREREVRKVLVRIYGDGVELFFDREDEVRTFECMSRHGQGPRLLGRFTNGRVEEFIHARTLSAADLRDPEISALVASKLREFHNLDMPGPKSVLIWDRLKNWLKTARNLCSSDESKKFRLGSLENEIAALEKEFSGDYHGIGFCHNDLQYGNIMIDEDTNMLTIIDYEYASFNPVAYDIANHFCEMAADYHSEKPHRLDYSKYPDTDEQKRFVKTYLSNSVSEEPDAEEVENLLQSIEKYTLASHLVWGLWGIISDHVNDIDFDYKEYARQRFEQYWQKKQALLTS

SEQ ID NO: 101828 - DNA, 1059 bp, Oryza sativa
  CDS (1)..(1059)
atggtggcgagcgagacgaaccagaaggcggcggcggcggggagcagcatcccggagggggcgcggcagctgctgcacgagctggcggcggggtggggcgacgtggcggactgccgggcgctggaggtggtgccgctcaggggggccatgaccaacgaggtctaccaggcgcggtggccgccggcggcggaggcggaggcggcggggaggagggtgctggtgagggtgtacggcgagggcgtggagttgttcttcgaccgggaggccgaggtgcgcacgttcgagtccatgtcgcggcacggccacggcccgcgcctcctcggtcgcttccccaacggccgcgtcgaggagttcatccacgccaggacactctcagctgttgatctgcgtgatccagagatttcagccattatagcctcaaagctgagggaattccacaaccttgatatgcctggtccaaaatctgtactcatttgggacagactaaggaactggctcaaaactgccaagaatttgtgcccctctgacgaagccaaagagttctgcttggatagcatggagaacgagatcactgcgttggaaaatgagctttcagaggattaccagtgcgtaggattttgccacaacgatctccagtatggaaacatcatgattgatgaagagaccaaattgctgaccatcattgactatgagtatgcaagttttggtccagttgcttatgacattgcaaaccatttctgcgagatggctgcagactaccattcagaaaagcctcacatactggactacactaaatatccagatactgatgagcagaagcaatttgtgcagagctacttgagctcttcaggcgaggaacctgacgcagagaaggtcaataatctgataaaaagtatcgagaagtacaccttggcaagccatctcatttgggccctctggggaataatttcggagcatgtcaacgatattgacttcgactacatggggtatgcgaggcagaggttcgagcagtactggctcaagaagcctgcaatcctaacatgtcaggtcgttgaataa

SEQ ID NO: 101829 - protein, 352 aa, Oryza sativa
MVASETNQKAAAAGSSIPEGARQLLHELAAGWGDVADCRALEVVPLRGAMTNEVYQARWPPAAEAEAAGRRVLVRVYGEGVELFFDREAEVRTFESMSRHGHGPRLLGRFPNGRVEEFIHARTLSAVDLRDPEISAIIASKLREFHNLDMPGPKSVLIWDRLRNWLKTAKNLCPSDEAKEFCLDSMENEITALENELSEDYQCVGFCHNDLQYGNIMIDEETKLLTIIDYEYASFGPVAYDIANHFCEMAADYHSEKPHILDYTKYPDTDEQKQFVQSYLSSSGEEPDAEKVNNLIKSIEKYTLASHLIWALWGIISEHVNDIDFDYMGYARQRFEQYWLKKPAILTCQVVE

SEQ ID NO: 101830 - DNA, 1062 bp, Brassica napus
  CDS (1)..(1062)
atgggaataggagtgttgggtttgatcccagtttcatcaccagacagtctaaagaaagtacttcaaacactctcggggaaatggggagacgtagtggaagatctcgagaggattcaggtgaaacccatgaaaggtgcaatgactaaccaagttttcatggtgaactggcccactaaggataaccattttcaccacaggaagcttcttgttcgagtttatggcgacggagttgatctcttcttcgacaggaacgacgagattcgtacgttcgagattgtctctcggtacggccacggtcctagactccttggtcggtttgctggcggtcggatcgaggagtttatccatgcccggactttatcgaccgttgatctacgtgatccgcaactatctgctctcattgcagctagactaagagaatttcatggtataaaggttcctggtgatggaaatgtgctcctttgggataggatgaggaattggcttggacaagccaagagtctgtgtacacctgacgattcagcagagtttggtctagacaacattgaatctgagatcaacttgctggaacatgagctgcaatatgagtataagcagcaggagattgggttttgtcacaatgatttgcagtatggtaacatcatgattgatgaagacaccaattccattactataattgactacgagtatgctagttataacccagctgcatacgacatagcaaatcacttctgtgaaatggctgcaaattaccattctgacactccccatatcttggattactctctgtacccaggagaagaagaacggaggagattcattggtaactatctcagatcttcaggggaggatcctagagaagaagacataaaacagctcttggaagatgctgagaagtacacattggcaagccatctcttctggggattatggggaatcatctctgggcatgtgaacaagatcgatttcgattacgctgagtactcaagacagagattcaaacagtacctgattcgaaaaccccaactcttgtgttcctttaccaataagatgtatgaataa

SEQ ID NO: 101831 - protein, 353 aa, Brassica napus
MGIGVLGLIPVSSPDSLKKVLQTLSGKWGDVVEDLERIQVKPMKGAMTNQVFMVNWPTKDNHFHHRKLLVRVYGDGVDLFFDRNDEIRTFEIVSRYGHGPRLLGRFAGGRIEEFIHARTLSTVDLRDPQLSALIAARLREFHGIKVPGDGNVLLWDRMRNWLGQAKSLCTPDDSAEFGLDNIESEINLLEHELQYEYKQQEIGFCHNDLQYGNIMIDEDTNSITIIDYEYASYNPAAYDIANHFCEMAANYHSDTPHILDYSLYPGEEERRRFIGNYLRSSGEDPREEDIKQLLEDAEKYTLASHLFWGLWGIISGHVNKIDFDYAEYSRQRFKQYLIRKPQLLCSFTNKMYE

SEQ ID NO: 101832 - DNA, 993 bp, Brassica napus
  CDS (1)..(993)
atgggtgctaacgaaacgaatgtggagagcaaagagtaccgtctctctcgagaagtgaaggaagctctacaagctatagcctcagagtgggaagacgtgatcgattccaaggcgctgcaagtgattcctctgaaaggtgcgatgaccaacgaggtgtttcagatcaagtggcccactagagaaagtgggccttctcgtaaggttctcgttaggatttacggtgaaggtgttgggattttctttgaccgtgaggatgagatcaggacgtttgagttcatgtctaagcatggtcatgggcctttgttgttggcaaggtttggtaatggtcgtatcgaagagtttctccatgcacggacactgtctgcttctgatttgcgtgatcctgtgatatctggtcggatagcgactaggatgaaggagtttcacgggcttgacatgcctggtgtgaagaaggctttgctttgggacaggttacgaaaatggctggttgcatgcaagagactggcttcacctgaagaagctaagtcctttcgtctcgatgttatggagatggagattactttgcttgagaaagctctctttaagaatgatgaaaagattgggttttgccacaatgatttacagtatgggaacataatgatggatgaggaaaccaaagcaataaccatcattgattatgaatactcttgctacaatccagtggcttatgacattgccaatcacttctgtgagatggctgctgattaccacactgacacacctcacatcatggattacactaaatatcctggtgaagtagagcccagcgatacaatggtcaaaaaactccttgaggatgttgagaaatatacacttgctagtcatctaacttggggtttatggggaatcatatcggaacatgtgaatgaaatcgacttcgactacatggagtacgcaagacaaaggcttaaccagtattggttaacaaagcagaggctcattggtaatccttga

SEQ ID NO: 101833 - protein, 330 aa, Brassica napus
MGANETNVESKEYRLSREVKEALQAIASEWEDVIDSKALQVIPLKGAMTNEVFQIKWPTRESGPSRKVLVRIYGEGVGIFFDREDEIRTFEFMSKHGHGPLLLARFGNGRIEEFLHARTLSASDLRDPVISGRIATRMKEFHGLDMPGVKKALLWDRLRKWLVACKRLASPEEAKSFRLDVMEMEITLLEKALFKNDEKIGFCHNDLQYGNIMMDEETKAITIIDYEYSCYNPVAYDIANHFCEMAADYHTDTPHIMDYTKYPGEVEPSDTMVKKLLEDVEKYTLASHLTWGLWGIISEHVNEIDFDYMEYARQRLNQYWLTKQRLIGNP

SEQ ID NO: 101834 - DNA, 1080 bp, Zea mays
  CDS (1)..(1080)
atggccgccgcggacccgccgccgcgcggggaggccgcgcccgcgctgaagcggagcgccagcatcgaccggataccggcggacgcgcgccgcatcctgcaccgcctcgccggggacctctggggcggcgacgtggaccccggcgcgctggccgtgtcgcagctcaggggcgccatgaccaacgaggtcttccggatcacctggcccggcggcgaggccgagggcaacggcccgcgcaaggtgctcgtgcgcatctacggccggggcgtcgaggtcttcttcgaccgcgccgacgaggtccgcaccttcgagtgcatgtcgcgccacggtcaggggccccgcctcctgggccgcttcgccaacggccgcgtcgaggagttcatcaacgccaggaccctctccgccgcggatctgcgcgacccggagatgtccacgctgattgccaggaagctgcgcgagtttcacgatctcgacatgcctggacctagggacgtgtcattgtggcagaggctcaagcggtggcttggggaggctcgtgacaggtgttctcaggaagagtctaaccaatttcagctgaataaactaggtgatgagatttcagtgctggagaagacgctctcggggctccaacagtcagtaggattttgccataacgatctgcaatatgggaatattatgatatatgaagagaccagacaagtcaccttgattgactatgagtatgcgagttttaacccagttgcattcgacattgctaatcacttctgtgagatggctgctgattaccatacagcaacaccacatgtgttggattttacgaaatatcctgacactggggagcagagaagattcgttgaggcataccttagctctgcaggtgaaaagccaacggatggggaagttgaagaactgctagggttgattgcaaagtacactcttgcgagccatctcttctggggcctgtggggaataatctcggcgcacgtgaacgaacatatcgacttcgagtacaaggagtatgcaaggcagcgcttggatcagtactggcaaacaaagcctcgaattcttggacccaagtga

SEQ ID NO: 101835 - protein, 359 aa, Zea mays
MAAADPPPRGEAAPALKRSASIDRIPADARRILHRLAGDLWGGDVDPGALAVSQLRGAMTNEVFRITWPGGEAEGNGPRKVLVRIYGRGVEVFFDRADEVRTFECMSRHGQGPRLLGRFANGRVEEFINARTLSAADLRDPEMSTLIARKLREFHDLDMPGPRDVSLWQRLKRWLGEARDRCSQEESNQFQLNKLGDEISVLEKTLSGLQQSVGFCHNDLQYGNIMIYEETRQVTLIDYEYASFNPVAFDIANHFCEMAADYHTATPHVLDFTKYPDTGEQRRFVEAYLSSAGEKPTDGEVEELLGLIAKYTLASHLFWGLWGIISAHVNEHIDFEYKEYARQRLDQYWQTKPRILGPK

SEQ ID NO: 101836 - DNA, 1080 bp, Zea mays
  CDS (1)..(1080)
atggccgccgcggacccgccgccgcgcggggaggccgcgcccgcgctgaagcggagcgccagcatcgaccggataccggcggacgcgcgccgcatcctgcaccgcctcgccggggacctctggggcggcgacgtggaccccggcgcgctggccgtgtcccagctcaggggcgccatgaccaacgaggtcttccggatcacctggcccggcggcgaggccgagggcaacggcccgcgcaaggtgctcgtgcgcatctacggccggggcgtcgaggtcttcttcgaccgcgccgacgaggtccgcaccttcgagtgcatgtcgcgccacggccaggggccccgcctcctgggccgcttcgccaacggccgcgtcgaggagttcatcaacgccaggaccctctccgccgcggatctgcgcgacccggagatgtccgcgctgattgccaggaagctgcgcgagtttcacgatctcgacatgcctggacctagggacgtgtcattgtggcagaggctcaagcggtggcttggggaggctcgtgacaggtgttctgaggaagagtctaaccaatttcagctgaataaactaggtgatgagatttcagtgctggagaagacgctctcggggctccaacagtcagtaggattctgccataacgatctgcagtatggaaatattatgatatatgaagagaccagacaagtcaccttgatagactatgaatatgcgagttttaacccagtcgcattcgacattgctaatcacttctgtgagatggctgctgattaccatacatcaacactacatgtgttggattttacgaaatatcctgacactggggagcagagaagattcgttgaggcataccttagctctgcaggtaaaaagccaacggatggggaagttgaagaactgctagggttgatagcaaagtacactcttgcgagccatctcttctggggcctgtggggaataatctcggcgcacgtgaacgaaaatatcgacttcgcgtacaaggagtatgcaaggcagcgcttggatcagtactggcaaacaaaacctcgaattcttggacccaagtga

SEQ ID NO: 101837 - protein, 359 aa, Zea mays
MAAADPPPRGEAAPALKRSASIDRIPADARRILHRLAGDLWGGDVDPGALAVSQLRGAMTNEVFRITWPGGEAEGNGPRKVLVRIYGRGVEVFFDRADEVRTFECMSRHGQGPRLLGRFANGRVEEFINARTLSAADLRDPEMSALIARKLREFHDLDMPGPRDVSLWQRLKRWLGEARDRCSEEESNQFQLNKLGDEISVLEKTLSGLQQSVGFCHNDLQYGNIMIYEETRQVTLIDYEYASFNPVAFDIANHFCEMAADYHTSTLHVLDFTKYPDTGEQRRFVEAYLSSAGKKPTDGEVEELLGLIAKYTLASHLFWGLWGIISAHVNENIDFAYKEYARQRLDQYWQTKPRILGPK

SEQ ID NO: 101838 - DNA, 1044 bp, Helianthus annuus
  CDS (1)..(1044)
atggaatctgcagaaaaagttgatgctataggaagtcggctaccagcagaggcattgaggatactacagtcattggcttctcattgggatgatataattgatgtagatggtttacaggtgataagactcaaaggtgctatgacgaatgaagtctaccaaattaagtggccaaccaacagagaacgctctcgaaaggttttagtgaggatatatggtgagggagtggatgtgttttttgatcgtgaattggagatcaggacatttgagtttatgtccaaacaagggcaagggcctcgtctactaggccgattctcaaatgggcgaattgaagaattcattcgtgcacggacactgtcagcttgtgatttgagggatcctgatatatctgcacttatagcatctaagctaaaggagttccatgaccttgacatgcctggtccaaacaaggcattgatctgggatagactgcgaaaatggcttagtgcagctaaacatatgtgctctgcagaagaaacaagggccctccgtttggatgcaattgagggagagatagaaactttatacaagtgtcttgcagctgatcaacacatagcattttgccacaacgacttacagtatgggaacataatgattgacgaagacacacgatccataaccataattgactatgagtatgcgtgttacaaccctttcatgtttgatattgcaaatcacttttgtgagatggctgctgattatcatacagaaacacctcatgtgctggattacagtaaataccccgatattgaagagcgtaggagatttatgcatgtatatttgagttcttcaggtaatcaactggtcaactcagaagttgacaagatgcttgaagaagttgagaagtatactcttgcaagtcatctactgtggggcttatggggagtaatatcggaacatgttaatgaaattgattttgactacatggagtatgcaaagcagaggtttcaagagtactggttacagaaacctaaactattgggttgctgtaatgtaactggtaactga

SEQ ID NO: 101839 - protein, 347 aa, Helianthus annuus
MESAEKVDAIGSRLPAEALRILQSLASHWDDIIDVDGLQVIRLKGAMTNEVYQIKWPTNRERSRKVLVRIYGEGVDVFFDRELEIRTFEFMSKQGQGPRLLGRFSNGRIEEFIRARTLSACDLRDPDISALIASKLKEFHDLDMPGPNKALIWDRLRKWLSAAKHMCSAEETRALRLDAIEGEIETLYKCLAADQHIAFCHNDLQYGNIMIDEDTRSITIIDYEYACYNPFMFDIANHFCEMAADYHTETPHVLDYSKYPDIEERRRFMHVYLSSSGNQLVNSEVDKMLEEVEKYTLASHLLWGLWGVISEHVNEIDFDYMEYAKQRFQEYWLQKPKLLGCCNVTGN

SEQ ID NO: 101840 - DNA, 1041 bp, Brassica napus
  CDS (1)..(1041)
atgggtgctaacgaaacgaatgtggagagcaaagagtaccgtctctctcgagaagtgaaggaagctctacaagctatagcctcagagtgggaagacgtgatcgattccaaggcgctgcaagtgattcctctgaaaggtgcgatgaccaacgaggtgtttcagatcaagtggcccactagagaaagtgggccttctcgtaaggttctcgttaggatttacggtgaaggtgttgggattttctttgaccgtgaggatgagatcaggacgtttgagttcatgtctaagcatggtcatgggcctttgttgttggcaaggtttggtaatggtcgtatcgaagagtttctccatgcacggacactatctgcttctgatttgcgtgatcctgtgatatctggtcggatagcgactaggatgaaggagtttcacaggcttgacatgcctggtgtgaagaaggctttgctttgggacaggttacgaaaatggctggttgcatgcaagagactggcttcacctgaagaagctaagtcctttcgtctcgatgttatggagatggaaataaatttgcttgagaaagctctctttaagaatgatgaaaagattgggttttgccacaatgatttacagtatggaaacataatgatggatgaggaaaccaaagcaataaccatcattgattatgaatactcttgctacaatccagtggcttatgacattgccaatcacttctgtgagatggctgctgattaccacactgacacacctcacatcatggattacactaaatatcctggtgtggaggagcgtaaacgatttgtgaaaacatatatgagcccttcaggtgaagaacagcccagcgatacaatggtcaaaaaactccttgaggatgttgagaaatatacacttgctagtcatctaacttggggtttatggggaatcatatcggaacatgtgaatgaaatcgacttcgactacatggagtacgcaagacaaaggcttaaccagtattggttaacaaagcagaggctcattggtaatccttga

SEQ ID NO: 101841 - protein, 346 aa, Brassica napus
MGANETNVESKEYRLSREVKEALQAIASEWEDVIDSKALQVIPLKGAMTNEVFQIKWPTRESGPSRKVLVRIYGEGVGIFFDREDEIRTFEFMSKHGHGPLLLARFGNGRIEEFLHARTLSASDLRDPVISGRIATRMKEFHRLDMPGVKKALLWDRLRKWLVACKRLASPEEAKSFRLDVMEMEINLLEKALFKNDEKIGFCHNDLQYGNIMMDEETKAITIIDYEYSCYNPVAYDIANHFCEMAADYHTDTPHIMDYTKYPGVEERKRFVKTYMSPSGEEQPSDTMVKKLLEDVEKYTLASHLTWGLWGIISEHVNEIDFDYMEYARQRLNQYWLTKQRLIGNP

SEQ ID NO: 101842 - DNA, 1041 bp, Brassica napus
  CDS (1)..(1041)
atgggtgctaacgaaacgaatgtggagagcaaagagtaccgtctctctcgagaagtgaaggaagctctacaagctatagcctcagagtgggaagacgtgatcgattccaaggcgctgcaagtgattcctctgaaaggtgcgatgaccaacgaggtgtttcagatcaagtggcccactagagaaagtgggccttctcgtaaggttctcgttaggatttacggtgaaggtgttgggattttctttgaccgtgaggatgagatcaggacgtttgagttcatgtctaagcatggtcatgggcctttgttgttggcaaggtttggtaatggtcgtatcgaagagtttctccatgctcggacactatctgcttctgatttgcgtgatcctgtgatatctggtcggatagcgactaggatgaaggagtttcatagtcttgacatgcctggtgtgaagaaggctttgctttgggacaggttacgaaaatggctggttgcatgcaagagactggcttcacctgaagaagctaagtcctttcgtctggatgttatggagatggaaataaatttgcttgagaagtctctgtttaagagtgatgaaaagattgggttttgccacaatgatttacagtatggaaacataatgatggatgaggaaaccaaagcaataaccatcattgattatgaatattcttgctacaatccagtggcttatgacattgccaatcacttctgcgagatggctgctgattaccacactgacacacctcacatcatggattacactaaataccctggtgtggaggagcgtaaacgatttgtgaaaacatatatgagtccttcaggtgaagaacagcccagcgatacaatggtcaaaaaactccttgaggatgttgagaaatatacacttgctagtcatctaacttggggtttatggggaatcatatcggaacatgtgaatgaaatcgacttcgactacatggagtacgcaagacaaaggcttaaccagtattggttaacaaagcagaggctcattggtaatccttga

SEQ ID NO: 101843 - protein, 346 aa, Brassica napus
MGANETNVESKEYRLSREVKEALQAIASEWEDVIDSKALQVIPLKGAMTNEVFQIKWPTRESGPSRKVLVRIYGEGVGIFFDREDEIRTFEFMSKHGHGPLLLARFGNGRIEEFLHARTLSASDLRDPVISGRIATRMKEFHSLDMPGVKKALLWDRLRKWLVACKRLASPEEAKSFRLDVMEMEINLLEKSLFKSDEKIGFCHNDLQYGNIMMDEETKAITIIDYEYSCYNPVAYDIANHFCEMAADYHTDTPHIMDYTKYPGVEERKRFVKTYMSPSGEEQPSDTMVKKLLEDVEKYTLASHLTWGLWGIISEHVNEIDFDYMEYARQRLNQYWLTKQRLIGNP

SEQ ID NO: 101844 - DNA, 1080 bp, Zea mays
  CDS (1)..(1080)
atggccgccgcggacccgccgccgcgcggggaggccgcgcccgcgctgaagcggagcgccagcatcgaccggataccggcggacgcgcgccgcatcctgcaccgcctcgccggggacctctggggcggcgacgtggaccccggcgcgctggccgtgtcgcagctcaggggcgccatgaccaacgaggtcttccggatcacctggcccagcggcgaggccgagggcaacggcccacgcaaggtgctcgtgcgcatctacagccggggcgtcgaggtcttcttcgaccgcgccaacgaggtccgcaccttcgagtgcatgtcgcgccacggtcaggggccccgcctcctgggccgcttcgccaacggccgcgtcgaggagttcatcaacgccaggaccctctccgccgcggatctgcgcgacccggagatgtccacgctgattgccaggaagctgcgcgagtttcacgatctcgacatgcctggacctagggacgtgtcattgtggcagaggctcaagcggtggcttggggaggctcgtgacaggtgttctcaggaagagtctaaccaatttcagctgaataaactaggtgatgagatttcagtgctggagaagacgctctcggggctccaacagtcagtaggattctgccataacgatctgcagtatgggaatattatgatatatgaagagaccagacaagtcaccttgattgactatgagtatgcgagttttaacccagttgcattcgacattgctaatcacttctgtgagatggctgctgattaccatacagcaacaccacatgtgttggattttacgaaatatcctgacactggggagcagagaagattcgttgaggcataccttagctctgcaggtgaaaagccaacggatggggaagttgaagaactgctagggttgattgcaaagtacactcttgcgagccatctcttctggggcctgtggggaataatctcggcgcacgtgaacgaaaatatcgacttcgagtacaaggagtatgcaaggcagcgcttggatcagtactggcaaacaaagcctcgaattcttggacccaagtga

SEQ ID NO: 101845 - protein, 359 aa, Zea mays
MAAADPPPRGEAAPALKRSASIDRIPADARRILHRLAGDLWGGDVDPGALAVSQLRGAMTNEVFRITWPSGEAEGNGPRKVLVRIYSRGVEVFFDRANEVRTFECMSRHGQGPRLLGRFANGRVEEFINARTLSAADLRDPEMSTLIARKLREFHDLDMPGPRDVSLWQRLKRWLGEARDRCSQEESNQFQLNKLGDEISVLEKTLSGLQQSVGFCHNDLQYGNIMIYEETRQVTLIDYEYASFNPVAFDIANHFCEMAADYHTATPHVLDFTKYPDTGEQRRFVEAYLSSAGEKPTDGEVEELLGLIAKYTLASHLFWGLWGIISAHVNENIDFEYKEYARQRLDQYWQTKPRILGPK

SEQ ID NO: 101846 - DNA, 1101 bp, Zea mays
  CDS (1)..(1101)
atggtggcgatcgagaaccagaaccagagccaggccgcggtggcggtggcggcggaggcggtgccggcgccggcgtcgcggatccccagggaggcgcggcgcctgctgcacgagctggcggcggcgtgggcggacgtggccgactgccgcgcgctggaggtcgtgccgctcaagggggccatgaccaacgaggtctaccaggcgcgctggctcactgcaggccctgccggccagaaggaggagcccagggcggagagggaggtgaggaaggtgctcgtgcggatttacggcgacggcgtcgacctcttcttcgaccgcgaggacgaggtgcgcaccttcgagtgcatgtcacgccatggccagggtccccgcctcctcggccgctttccgaacggccgcgtcgaggagttcatccacgcaaggacattgtcagctgccgaccttcgcgatcctgaaatttcagctctggtggcttccaaactgagggagttccacaaccttgacatgcctggtcccaaatctgtgctcatttgggacagacttaggaactggctcagaactgccaagagcttgtgtccacctgaagaagccaaggaatttcggttggacagtctggagaaccagattactgcattggagaacgagtgttcaggtgattaccagtggattggtttctgtcacaatgatcttcagtatggcaatatcatgattgatgaagagaccaacgtgctgaccatcattgattacgagtatgcaagcttcaacccagttgcatatgacattgctaaccatttctgtgagatggcagcagactatcattcatcaaagcctcatatactggactacagcagatatccagatgttgacgagcagaagcgttttgttaagacctacctgaacatttctggtgaggaacctgatgcggaagttgtggagaacctgctccaaagcattgagaagcacacgctcgccagccatctagtatggggcctctggggaataatttcggaccatgttaacgacattgacttcgactacaaggagtatgcgaggcagagattcgagcagtactggcacaagtctgcgatcttaacatcttga

SEQ ID NO: 101847 - protein, 366 aa, Zea mays
MVAIENQNQSQAAVAVAAEAVPAPASRIPREARRLLHELAAAWADVADCRALEVVPLKGAMTNEVYQARWLTAGPAGQKEEPRAEREVRKVLVRIYGDGVDLFFDREDEVRTFECMSRHGQGPRLLGRFPNGRVEEFIHARTLSAADLRDPEISALVASKLREFHNLDMPGPKSVLIWDRLRNWLRTAKSLCPPEEAKEFRLDSLENQITALENECSGDYQWIGFCHNDLQYGNIMIDEETNVLTIIDYEYASFNPVAYDIANHFCEMAADYHSSKPHILDYSRYPDVDEQKRFVKTYLNISGEEPDAEVVENLLQSIEKHTLASHLVWGLWGIISDHVNDIDFDYKEYARQRFEQYWHKSAILTS

SEQ ID NO: 101848 - DNA, 1080 bp, Zea mays
  CDS (1)..(1080)
atggccgccgcggacccgccgccgcgcggggaggccgcgcccgcgctgaagcggagcgccagcatcgaccggataccggcggacgcgcgccgcatcctgcaccgcctcgccggggacctctggggcggcgacgtggaccccggcgcgctggccgtgtcccagctcaggggcgccatgaccaacgaggtcttccggatcacctggcccggcggcgaggccgagggcaacggcccgcgcaaggtgctcgtgcgcatctacggccggggcgtcgaggtcttcttcgaccgcgccgacgaggtccgcaccttcgagtgcatgtcgcgccacggccaggggccccgcctcctgggccgcttcgccaacggccgcgtcgaggagttcatcaacgccaggaccctctccgccgcggatctgcgcgacccggagatgtccgcgctgattgccaggaagctgcgcgagtttcacgatctcgacatgcctggacctagggacgtgtcattgtggcagaggctcaagcggtggcttggggaggctcgtgacaggtgttctgaggaagagtctaaccaatttcagctgaataaactaggtgatgagatttcagtgctggagaagacgctctcggggctccaacagtcagtaggattttgccataacgatctgcaatatgggaatattatgatatatgaagagaccagacaagtcaccttgattgactatgagtatgcgagttttaacccagttgcattcgacattgctaatcacttctgtgagatggctgctgattaccatacagcaacaccacatgtgttggattttacgaaatatcctgacactggggagcagagaagattcgttgaggcataccttagctctgcaggtgaaaagccaacggatggggaagttgaagaactgctagggttgattgcaaagtacactcttgcgagccatctcttctggggcctgtggggaataatctcggcgcacgtgaacgaacatatcgacttcgagtacaaggagtatgcaaggcagcgcttggatcagtactggcaaacaaagcctcgaattcttggacccaagtga

SEQ ID NO: 101849 - protein, 359 aa, Zea mays
MAAADPPPRGEAAPALKRSASIDRIPADARRILHRLAGDLWGGDVDPGALAVSQLRGAMTNEVFRITWPGGEAEGNGPRKVLVRIYGRGVEVFFDRADEVRTFECMSRHGQGPRLLGRFANGRVEEFINARTLSAADLRDPEMSALIARKLREFHDLDMPGPRDVSLWQRLKRWLGEARDRCSEEESNQFQLNKLGDEISVLEKTLSGLQQSVGFCHNDLQYGNIMIYEETRQVTLIDYEYASFNPVAFDIANHFCEMAADYHTATPHVLDFTKYPDTGEQRRFVEAYLSSAGEKPTDGEVEELLGLIAKYTLASHLFWGLWGIISAHVNEHIDFEYKEYARQRLDQYWQTKPRILGPK

SEQ ID NO: 101850 - DNA, 1089 bp, Zea mays
  CDS (1)..(1089)
atggtggcgatcgagaaccagagccaggccgcggtggcggcggaggcggtggcggcgccggcgtcgcggatccccagggaggcgcggcgcctgctgcacgagctggcggcggcgtgggcggacgtggccgactgccgcgcgctggaggtcgtgccgctcaagggggccatgaccaacgaggtctaccaggcgcgctggctcactgcaggccctgccggccagaaggaggagcccagggcggagagggaggtgaggaaggtgctcgtgcggatttacggcgacggcgtcgacctcttcttcgaccgcgaggacgaggtgcgcaccttcgagtgcatgtcacgccatggccagggtccccgcctcctcggccgctttccgaacggccgcgtcgaggagttcatccacgcaaggacattgtcagctgccgaccttcgcgatcctgaaatttcagctctggtggcttccaagctgagggagttccacaaccttgacatgcctggtcccaaatctgtgctcatttgggacagacttaggaactggctcagaactgccaagagcttgtgtccacctgaagaagccaaggaatttcggttggacagtctggagaaccagattactgcattggagaacgagtgttcaggtgattaccagtggattggtttctgtcacaatgatcttcagtatggcaatatcatgattgatgaagagaccaacgtgctgaccatcattgattatgagtatgcaagcttcaacccagttgcatatgacattgctaaccatttctgtgagatggcagcagactatcattcatcaaagcctcatatactggactacagcagatatccagatgttgatgagcagaagcgttttgttaagacctacctgaacatttctggtgaggaacctgatgcggaagttgtggagaacctgctccaaagcattgagaagcacacgctcgccagccatctagtatggggcctctggggaataatttcggaccatgttaacgacattgacttcgactacaaggagtatgcgaggcagagattcgagcagtactggcacaagtctgcgatcttaacatcttga

SEQ ID NO: 101851 - protein, 362 aa, Zea mays
MVAIENQSQAAVAAEAVAAPASRIPREARRLLHELAAAWADVADCRALEVVPLKGAMTNEVYQARWLTAGPAGQKEEPRAEREVRKVLVRIYGDGVDLFFDREDEVRTFECMSRHGQGPRLLGRFPNGRVEEFIHARTLSAADLRDPEISALVASKLREFHNLDMPGPKSVLIWDRLRNWLRTAKSLCPPEEAKEFRLDSLENQITALENECSGDYQWIGFCHNDLQYGNIMIDEETNVLTIIDYEYASFNPVAYDIANHFCEMAADYHSSKPHILDYSRYPDVDEQKRFVKTYLNISGEEPDAEVVENLLQSIEKHTLASHLVWGLWGIISDHVNDIDFDYKEYARQRFEQYWHKSAILTS

SEQ ID NO: 101852 - DNA, 21 bp, Artificial sequence
  primer
atgtactgtaagagttggctg

SEQ ID NO: 101853 - DNA, 23 bp, Artificial sequence
  primer
ttacgtaagtcttgcttcgcaag

SEQ ID NO: 101854 - protein, 423 aa, Artificial sequence
  consensus sequence
  Variant (2)..(7): Xaa in position 2 to 7 is any amino acid
  Variant (9)..(14): Xaa in position 9 to 14 is any amino acid
  Variant (15)..(17): Xaa in position 15 to 17 is any or no amino acid
  Variant (19)..(25): Xaa in position 19 to 25 is any amino acid
  Variant (26)..(27): Xaa in position 26 to 27 is any or no amino acid
  Variant (29)..(29): Xaa in position 29 is any amino acid
  Variant (31)..(34): Xaa in position 31 to 34 is any amino acid
  Variant (42)..(45): Xaa in position 42 to 45 is any amino acid
  Variant (47)..(53): Xaa in position 47 to 53 is any amino acid
  Variant (54)..(70): Xaa in position 54 to 70 is any or no amino acid
  Variant (77)..(77): Xaa in position 77 is any amino acid
  Variant (80)..(80): Xaa in position 80 is any amino acid
  Variant (83)..(84): Xaa in position 83 to 84 is any amino acid
  Variant (87)..(87): Xaa in position 87 is any amino acid
  Variant (89)..(90): Xaa in position 89 to 90 is any amino acid
  Variant (92)..(93): Xaa in position 92 to 93 is any amino acid
  Variant (97)..(98): Xaa in position 97 to 98 is any amino acid
  Variant (100)..(100): Xaa in position 100 is any amino acid
  Variant (103)..(103): Xaa in position 103 is any amino acid
  Variant (106)..(106): Xaa in position 106 is any amino acid
  Variant (112)..(113): Xaa in position 112 to 113 is any amino acid
  Variant (116)..(116): Xaa in position 116 is any amino acid
  Variant (121)..(121): Xaa in position 121 is any amino acid
  Variant (128)..(128): Xaa in position 128 is any amino acid
  Variant (134)..(135): Xaa in position 134 to 135 is any amino acid
  Variant (137)..(139): Xaa in position 137 to 139 is any amino acid
  Variant (141)..(145): Xaa in position 141 to 145 is any amino acid
  Variant (148)..(151): Xaa in position 148 to 151 is any amino acid
  Variant (154)..(159): Xaa in position 154 to 159 is any amino acid
  Variant (161)..(161): Xaa in position 161 is any amino acid
  Variant (163)..(165): Xaa in position 163 to 165 is any amino acid
  Variant (167)..(183): Xaa in position 167 to 183 is any amino acid
  Variant (185)..(188): Xaa in position 185 to 188 is any amino acid
  Variant (189)..(189): Xaa in position 189 is any or no amino acid
  Variant (192)..(193): Xaa in position 192 to 193 is any amino acid
  Variant (195)..(204): Xaa in position 195 to 204 is any amino acid
  Variant (205)..(221): Xaa in position 205 to 221 is any or no amino acid
  Variant (235)..(236): Xaa in position 235 to 236 is any amino acid
  Variant (237)..(246): Xaa in position 237 to 246 is any or no amino acid
  Variant (248)..(248): Xaa in position 248 is any amino acid
  Variant (250)..(252): Xaa in position 250 to 252 is any amino acid
  Variant (254)..(254): Xaa in position 254 is any amino acid
  Variant (260)..(262): Xaa in position 260 to 262 is any amino acid
  Variant (265)..(265): Xaa in position 265 is any amino acid
  Variant (267)..(267): Xaa in position 267 is any amino acid
  Variant (277)..(277): Xaa in position 277 is any amino acid
  Variant (279)..(279): Xaa in position 279 is any amino acid
  Variant (282)..(284): Xaa in position 282 to 284 is any amino acid
  Variant (286)..(286): Xaa in position 286 is any amino acid
  Variant (288)..(289): Xaa in position 288 to 289 is any amino acid
  Variant (291)..(293): Xaa in position 291 to 293 is any amino acid
  Variant (296)..(296): Xaa in position 296 is any amino acid
  Variant (297)..(298): Xaa in position 297 to 298 is any or no amino acid
  Variant (300)..(302): Xaa in position 300 to 302 is any amino acid
  Variant (304)..(306): Xaa in position 304 to 306 is any amino acid
  Variant (308)..(317): Xaa in position 308 to 317 is any amino acid
  Variant (318)..(344): Xaa in position 318 to 344 is any or no amino acid
  Variant (346)..(349): Xaa in position 346 to 349 is any amino acid
  Variant (350)..(351): Xaa in position 350 to 351 is any or no amino acid
  Variant (353)..(353): Xaa in position 353 is any amino acid
  Variant (356)..(356): Xaa in position 356 is any amino acid
  Variant (358)..(359): Xaa in position 358 to 359 is any amino acid
  Variant (368)..(369): Xaa in position 368 to 369 is any amino acid
  Variant (372)..(372): Xaa in position 372 is any amino acid
  Variant (373)..(403): Xaa in position 373 to 403 is any or no amino acid
  Variant (405)..(405): Xaa in position 405 is any amino acid
  Variant (407)..(407): Xaa in position 407 is any amino acid
  Variant (409)..(410): Xaa in position 409 to 410 is any amino acid
  Variant (412)..(413): Xaa in position 412 to 413 is any amino acid
  Variant (416)..(418): Xaa in position 416 to 418 is any amino acid
  Variant (421)..(422): Xaa in position 421 to 422 is any amino acid
PXXXXXXLXXXXXXXXXWXXXXXXXXXLXVXXXXGAMTNEVXXXXWXXXXXXXXXXXXXXXXXXXXXXXXRKVLVRXYGXGVXXFFXRXXEXXTFEXXSXHGXGPXLLGRFXXGRXEEFIXARTLSAXDLRDPXXSXXXAXXXXXFHXXXXPGXXXXXXWXRXXXWXXXXXXXXXXXXXXXXXLXXXXXEIXXLXXXXXXXXXXXXXXXXXXXXXXXXXXXGFCHNDLQYGNIMXXXXXXXXXXXXEXTXXXTXIDYEYXXXNPXAXDIANHFCEMXAXYHXXXPXHXXDXXXYPXXXEXXXFXXXYXXXXXXXXXXXXXXXXXXXXXXXXXXXXXXXXXXXXXLXXXXXXYXLAXHXXWGLWGIISXXVNXXXXXXXXXXXXXXXXXXXXXXXXXXXXXXXXIXFXYXXYXXQRXXXYWXXK

SEQ ID NO: 101855 - DNA, 2130 bp, Saccharomyces cerevisiae
  CDS (1)..(2130)
atgtttccctctctcttccgacttgtagtattctccaaacgttacatattccgatcaagccagcgcctttacactagtttaaaacaagaacagagccgtatgtccaaaataatggaagatttacgaagtgactacgtcccgcttatcgccagtattgatgtaggaacgacctcatccagatgcattctgttcaacagatggggccaggacgtttcaaaacaccaaattgaatattcaacttcagcatcgaagggcaagattggggtgtctggcctaaggagaccctctacagccccagctcgtgaaacaccaaacgccggtgacatcaaaaccagcggaaagcccatcttttctgcagaaggctatgccattcaagaaaccaaattcctaaaaatcgaggaattggacttggacttccataacgaacccacgttgaagttccccaaaccgggttgggttgagtgccatccgcagaaattactggtgaacgtcgtccaatgccttgcctcaagtttgctctctctgcagactatcaacagcgaacgtgtagcaaacggtctcccaccttacaaggtaatatgcatgggtatagcaaacatgagagaaaccacaattctgtggtcccgccgcacaggaaaaccaattgttaactacggtattgtttggaacgacaccagaacgatcaaaatcgttagagacaaatggcaaaacactagcgtcgataggcaactgcagcttagacagaagactggattgccattgctctccacgtatttctcctgttccaagctgcgctggttcctcgacaatgagcctctgtgtaccaaggcgtatgaggagaacgacctgatgttcggcactgtggacacatggctgatttaccaattaactaaacaaaaggcgttcgtttctgacgtaaccaacgcttccagaactggatttatgaacctctccactttaaagtacgacaacgagttgctggaattttggggtattgacaagaacctgattcacatgcccgaaattgtgtcctcatctcaatactacggtgactttggcattcctgattggataatggaaaagctacacgattcgccaaaaacagtactgcgagatctagtcaagagaaacctgcccatacagggctgtctgggcgaccaaagcgcatccatggtggggcaactcgcttacaaacccggtgctgcaaaatgtacttatggtaccggttgctttttactgtacaatacggggaccaaaaaattgatctcccaacatggcgcactgacgactctagcattttggttcccacatttgcaagagtacggtggccaaaaaccagaattgagcaagccacattttgcattagagggttccgtcgctgtggctggtgctgtggtccaatggctacgtgataatttacgattgatcgataaatcagaggatgtcggaccgattgcatctacggttcctgattctggtggcgtagttttcgtccccgcatttagtggcctattcgctccctattgggacccagatgccagagccaccataatggggatgtctcaattcactactgcctcccacatcgccagagctgccgtggaaggtgtttgctttcaagccagggctatcttgaaggcaatgagttctgacgcgtttggtgaaggttccaaagacagggactttttagaggaaatttccgacgtcacatatgaaaagtcgcccctgtcggttctggcagtggatggcgggatgtcgaggtctaatgaagtcatgcaaattcaagccgatatcttaggtccctgtgtcaaagtcagaaggtctccgacagcggaatgtaccgcattgggggcagccattgcagccaatatggctttcaaggatgtgaacgagcgcccattatggaaggacctacacgatgttaagaaatgggtcttttacaatggaatggagaaaaacgaacaaatatcaccagaggctcatccaaaccttaagatattcagaagtgaatccgacgatgctgaaaggagaaagcattggaagtattgggaagttgccgtggaaagatccaaaggttggctgaaggacatagaaggtgaacacgaacaggttctagaaaacttccaataa

SEQ ID NO: 101856 - protein, 709 aa, Saccharomyces cerevisiae
MFPSLFRLVVFSKRYIFRSSQRLYTSLKQEQSRMSKIMEDLRSDYVPLIASIDVGTTSSRCILFNRWGQDVSKHQIEYSTSASKGKIGVSGLRRPSTAPARETPNAGDIKTSGKPIFSAEGYAIQETKFLKIEELDLDFHNEPTLKFPKPGWVECHPQKLLVNVVQCLASSLLSLQTINSERVANGLPPYKVICMGIANMRETTILWSRRTGKPIVNYGIVWNDTRTIKIVRDKWQNTSVDRQLQLRQKTGLPLLSTYFSCSKLRWFLDNEPLCTKAYEENDLMFGTVDTWLIYQLTKQKAFVSDVTNASRTGFMNLSTLKYDNELLEFWGIDKNLIHMPEIVSSSQYYGDFGIPDWIMEKLHDSPKTVLRDLVKRNLPIQGCLGDQSASMVGQLAYKPGAAKCTYGTGCFLLYNTGTKKLISQHGALTTLAFWFPHLQEYGGQKPELSKPHFALEGSVAVAGAVVQWLRDNLRLIDKSEDVGPIASTVPDSGGVVFVPAFSGLFAPYWDPDARATIMGMSQFTTASHIARAAVEGVCFQARAILKAMSSDAFGEGSKDRDFLEEISDVTYEKSPLSVLAVDGGMSRSNEVMQIQADILGPCVKVRRSPTAECTALGAAIAANMAFKDVNERPLWKDLHDVKKWVFYNGMEKNEQISPEAHPNLKIFRSESDDAERRKHWKYWEVAVERSKGWLKDIEGEHEQVLENFQ

SEQ ID NO: 101857 - DNA, 1590 bp, Oryza sativa (japonica cultivar-group)
  CDS (1)..(1590)
atggcggaggaggtgtatgtcgcgtcgatcgaccagggcacgacgagcacgcggttcatcgtctacgaccgccacgccaagcccgtcgcgtcgcatcagctcgagttcaagcagcactacccggaggctggatgggttgagcatgatcctatggagattatggagagtgtgaagatatgcatggcgaaggcacttgacaaagctgcagctgatggtcataatatggatgttggactgaaggccattggtattacaaatcagagggaaaccactgttatgtggagcaaatccacaggccttcctctatacaatgccattgtatggatggatgctcgcacaagccccatttgcaggagattggaaagtgatctttctggtggtagaacccactttgtcgagacatgtggattggcaatcagtacctatttcagtgctttgaaggtgttatggttgatcgaaaatgtggatgccgtcaagaatgcagtccgagctggtgatgccttatttggcacaattgacacctggttaatctggaacctcacaggaggcattggcgggacagatcgtgatggaaataaagtatttgggcaccatgtcacagactgctccaatgcatctcgcacaatgcttatgaacctgaaggcacttgactgggacaaaccaacacttgagacgttaggaattcctgctgagatattgcccaaaattatcagtaactcggagagaattggtgtggttgccaatgggtttcccttggcgggcgtccctattgctgggtgcctaggagaccagcatgctgcaatgcttgggcagctgtgccagaaaggtgaagccaaaagcacctacggaactggtgccttcattcttctcaacacaggggaggagcctacccaatcctcccatggtcttcttagcacgattgcttataagcttggcccaagcgcacccactaattatgctctagaaggctccatcgcaattgctggtgccgcagttcagtggttgagagacagccttggaatcattagcacagcagctgatattgaaaagttggctgatactgtgcaggattcaggtggaatatactttgttccagcattcaatgggttgtttgcaccatggtggagggatgatgcaagaggcatatgtataggaatcacacggttcactaacaaggggcacattgctcgagcagtgctcgagagtatgtgctttcaggtgaatgatgtcctcagctccatgcacaaggatgctggggaggcaggagaagtgaagagtgcagaaggggagttcctgctgcgcgttgatggtggtgctactgtcaacaatcttctcatgcagatccaggctgatttattgggtagccctgttgtcagacctgctgacatcgagacaactgcccttggagctgcgtatgcagctggattagctgttggagtctggtcgaaggaacaaattttcgctggtttgcacaaggagaacaccagagtcttccgcccgaaattggatgaggcccacaggaggaagagagcagactcctggtacaaggccgtttcaagatcatttgatttggctgacctttctctttag

SEQ ID NO: 101858 - protein, 529 aa, Oryza sativa (japonica cultivar-group)
MAEEVYVASIDQGTTSTRFIVYDRHAKPVASHQLEFKQHYPEAGWVEHDPMEIMESVKICMAKALDKAAADGHNMDVGLKAIGITNQRETTVMWSKSTGLPLYNAIVWMDARTSPICRRLESDLSGGRTHFVETCGLAISTYFSALKVLWLIENVDAVKNAVRAGDALFGTIDTWLIWNLTGGIGGTDRDGNKVFGHHVTDCSNASRTMLMNLKALDWDKPTLETLGIPAEILPKIISNSERIGVVANGFPLAGVPIAGCLGDQHAAMLGQLCQKGEAKSTYGTGAFILLNTGEEPTQSSHGLLSTIAYKLGPSAPTNYALEGSIAIAGAAVQWLRDSLGIISTAADIEKLADTVQDSGGIYFVPAFNGLFAPWWRDDARGICIGITRFTNKGHIARAVLESMCFQVNDVLSSMHKDAGEAGEVKSAEGEFLLRVDGGATVNNLLMQIQADLLGSPVVRPADIETTALGAAYAAGLAVGVWSKEQIFAGLHKENTRVFRPKLDEAHRRKRADSWYKAVSRSFDLADLSL

SEQ ID NO: 101859 - DNA, 1503 bp, Agrobacterium rhizogenes
  CDS (1)..(1503): transl_table=11
atgaccggctatgttctggcgatcgaccaggggacgacgtcctcacgagccatcgtttacggccctgatgcccagccgatcgcgatcgatcaaaaagagatatcccagtcgtttccgaagtcgggttgggtcgagcacaacgccactgaaatctgggaatctgtccttcagacctcccgtaacgctcttgcgcgggccggcatagaggcgcgcgacgtcgcggcgatcggcataaccaatcagcgcgaaacatgcctcgtctgggagcggtcgacgggcaagccgatccatccagcgatcgtctggcaagaccggcggacctacggcgcctgcgaggtccttcgcgcagacggctttggccccctgatacaggaaaaaaccggtcttctgctcgatccctatttttccgccacgaaaatcgcctggatcctcgacaatgtcgagggcgcgcggcgcgcggccgagaacggccaactgctgtgcggcaccatcgacacctatctcacctggatgctcaccggcggcgccgtgcatgcgacggacgccaccaacgcgtcgcgcacctcgctgttcgacattcgtgagaattgctgggacgacgaattgctaggcgccttcagagtgccgcgggctcttttgcctgaggtcaaggattgtgctgacgatttcggtcagacgatcgccgcccatttcggcgctcaaattccgatccgggcgctcgccggcgaccagcaggccgccctgcttggtcaggcctgcctgaagcccggaatgctcaaatcgacttacggcacgggctgcttcgtcgttctgaataccggcgataagattgtccggtcgtccaaccgcctgctgtcgaccatcggctatcgcctcaatggcaaaacgacctacgcgcttgagggttcgatcttcatggcaggggccgcggttcaatggctgcgagactccctgaagctcatcaaggaggccgacgagacgggccgtcttgcgcatctggccgacgaacaggaagacgtctatctggtgccggcattcaccgggctcggtgcaccgcactggaattcgcaggctcgtggcgcgattttcggcctgacgagagggacggggatcgcggaactttcgcgggcgacgctggaatccgtctgctaccagacgcgcgatctccttgaggccatggcctgcgattacccgatggaggtcaggggcgcgacccttcgcgtcgacggcggcctgtcgggcagcgattgggccatgcaggcgctggccgattgcctgggcagcgtcatcgagcgatcgcaaagccaggaagcgaccgcttacggcgttgcggcacttgcgggcgctgagagcggcgtctggcccgatcttcagacctttgccgcgaactggaaggcaaagcgcagcttcacccccaacctcaacactgacgagcgggcgcgacgctatcggaaatggcgcgccgccgttgcaagcacgctttcctatgcggcaacggcgtga

SEQ ID NO: 101860 - protein, 500 aa, Agrobacterium rhizogenes
MTGYVLAIDQGTTSSRAIVYGPDAQPIAIDQKEISQSFPKSGWVEHNATEIWESVLQTSRNALARAGIEARDVAAIGITNQRETCLVWERSTGKPIHPAIVWQDRRTYGACEVLRADGFGPLIQEKTGLLLDPYFSATKIAWILDNVEGARRAAENGQLLCGTIDTYLTWMLTGGAVHATDATNASRTSLFDIRENCWDDELLGAFRVPRALLPEVKDCADDFGQTIAAHFGAQIPIRALAGDQQAALLGQACLKPGMLKSTYGTGCFVVLNTGDKIVRSSNRLLSTIGYRLNGKTTYALEGSIFMAGAAVQWLRDSLKLIKEADETGRLAHLADEQEDVYLVPAFTGLGAPHWNSQARGAIFGLTRGTGIAELSRATLESVCYQTRDLLEAMACDYPMEVRGATLRVDGGLSGSDWAMQALADCLGSVIERSQSQEATAYGVAALAGAESGVWPDLQTFAANWKAKRSFTPNLNTDERARRYRKWRAAVASTLSYAATA

SEQ ID NO: 101861 - DNA, 1569 bp, Arabidopsis thaliana
  CDS (1)..(1569)
atggcaaaagaaaatggatttataggatcaatcgatcaaggaaccaccagcaccagattcatcatttacgaccacgatgctcgtcctgttgcttctcatcaagtcgagttcactcagttctatcccgaagctggatgggtggaacacgatccaatggagatactggaaagtgtgaaagtgtgcattgcaaaggctctcgacaaagccactgccgatggacacaacgtcgacggtggcttgaaggccattgggcttacagatcagagagagactactgttgtttggagcaaatccactggccttcctctccacaaggctattgtctggatggatgctcgtaccagctccatctgcaggagactagagaaagaactctcgggaggaagatcccattttgtggagtcttgcggcttgccaataagcacatacttctctgccatgaagctgctttggctcatggagaatgtggatgatgtcaaagacgctatcaagaaaggggatgccatctttggcactatcgacacatggttgatctggaacatgactggcggtatcaatggcggccttcatgtcactgatgtcaccaatgcttcacggacaatgctcatgaacctcaaaaccttgagctgggaccaggacactttgaagacacttggcataccggctgaaatcttgcccaagattgtcagcaattcagaagtgattggagagatctgcaaaggctggcctattcccggtatcaagattgctggatgtcttggtgatcagcatgctgcgatgttggggcaagcttgcagaaaaggcgaggcgaagagtacttatggcacaggtgctttcattcttctcaacaccggagaagtgccaatcaaatcaggtcatggtcttctgaccacgttggcctacaagctcggtcctcaagcacagacaaactatgcattggagggttcgattgccatagcaggagctgctgttcagtggcttagagacagccttgggataatcaaaagcgcctctgagatcgaagatttggcagcaatggtagattctacaggaggagtgtactttgtgccagcgttcaacggcttgtttgctccttggtggagagaagacgcacgtggtgtgtgcattggaatcacgaggttcaccaacaagtctcacattgctcgggctgtgctggagagcatgtgtttccaggtgaaagacgtccttgactccatgaacaaagatgcaggtgaaaagggttcccttaataacgggaaaggggagttcttgctcagagttgatggtggtgccacagctaacaaccttctgatgcagattcaggctgatctgatgggaagtccggtggtgaggccagtggacatagagacaacagcattaggagcagcctatgcagctggattagctgtgggattctggaaggaagcagacatattcgagtcgggagagaaggcgaagaactccaaagttttcagacccgctatggaagaaggaatcaggaagaagaaagtggcgtcttggtgcaaagcggtggaaagaacatttgatctcgctgacctctctatctaa

SEQ ID NO: 101862 - protein, 522 aa, Arabidopsis thaliana
MAKENGFIGSIDQGTTSTRFIIYDHDARPVASHQVEFTQFYPEAGWVEHDPMEILESVKVCIAKALDKATADGHNVDGGLKAIGLTDQRETTVVWSKSTGLPLHKAIVWMDARTSSICRRLEKELSGGRSHFVESCGLPISTYFSAMKLLWLMENVDDVKDAIKKGDAIFGTIDTWLIWNMTGGINGGLHVTDVTNASRTMLMNLKTLSWDQDTLKTLGIPAEILPKIVSNSEVIGEICKGWPIPGIKIAGCLGDQHAAMLGQACRKGEAKSTYGTGAFILLNTGEVPIKSGHGLLTTLAYKLGPQAQTNYALEGSIAIAGAAVQWLRDSLGIIKSASEIEDLAAMVDSTGGVYFVPAFNGLFAPWWREDARGVCIGITRFTNKSHIARAVLESMCFQVKDVLDSMNKDAGEKGSLNNGKGEFLLRVDGGATANNLLMQIQADLMGSPVVRPVDIETTALGAAYAAGLAVGFWKEADIFESGEKAKNSKVFRPAMEEGIRKKKVASWCKAVERTFDLADLSI

SEQ ID NO: 101863 - DNA, 1530 bp, Escherichia coli O157:H7 EDL933
  CDS (1)..(1530): transl_table=11
atgactacgggacaattaaacatgactgaaaaaaaatatatcgttgcgctcgaccagggcaccaccagctcccgcgcggtcgtaatggatcacgatgccaatatcattagcgtgtcgcagcgcgaatttgagcaaatctacccaaaaccaggctgggtagaacacgacccaatggaaatctgggccacccaaagctccacgctggtagaagtgctggcgaaagccgatatcagttccgatcaaattgcagctatcggtattacgaaccagcgtgaaaccactattgtctgggaaaaagaaaccggcaagcctatctataacgccattgtctggcagtgccgtcgtaccgcagaaatctgcgagcatttaaaacgtgacggtttagaagattatatccgcagcaataccggtctggtgattgacccgtacttttctggcaccaaagtgaagtggatcctcgaccatgtggaaggctctcgcgagcgtgcgcgtcgtggtgaattgctgtttggtacggttgatacgtggcttatctggaaaatgactcagggccgtgtccatgtgaccgattacaccaacgcctctcgtaccatgttgttcaacatccataccctggactgggacgacaaaatgctggaagtgctggatattccgcgcgagatgctgccagaagtgcgtcgttcttccgaagtgtacggtcagactaacattggcggcaaaggcggcacgcgtattccaatctccgggatcgccggtgaccagcaggccgcgctgtttggtcagttgtgcgtgaaagaagggatggcgaagaacacctatggcactggctgctttatgctgatgaacactggcgagaaagcggtgaaatcagaaaacggcctactgaccaccatcgcctgcggcccgactggcgaagtgaactatgcgttggaaggtgcggtgtttatggcaggcgcatccattcagtggctgcgcgatgagatgaagttgattaacgacgcctacgattccgaatatttcgccaccaaagtgcaaaacaccaatggtgtgtatgtggttccggcatttaccgggctgggtgcgccgtactgggacccgtatgcgcgcggggcgattttcggtctgactcgtggggtgaacgctaaccacattatacgcgcgacgctggagtctattgcttatcagacgcgtgacgtgctggaagcgatgcaggccgactctggtatccgtctgcacgccctgcgcgtggatggtggcgcagtagcaaacaatttcctgatgcagttccagtctgatattctcggcacccgcgttgagcgcccggaagttcgcgaagtcaccgcattgggtgcggcctatctcgcaggcctggcggttggcttctggcagaacctcgacgagctgcaagagaaagcggtgattgagcgcgagttccgtccaggcatcgaaaccactgagcgtaattaccgttacgcaggctggaaaaaagcggtcaaacgcgcgatggcgtgggaagaacacgacgagtaa

SEQ ID NO: 101864 - protein, 509 aa, Escherichia coli O157:H7 EDL933
MTTGQLNMTEKKYIVALDQGTTSSRAVVMDHDANIISVSQREFEQIYPKPGWVEHDPMEIWATQSSTLVEVLAKADISSDQIAAIGITNQRETTIVWEKETGKPIYNAIVWQCRRTAEICEHLKRDGLEDYIRSNTGLVIDPYFSGTKVKWILDHVEGSRERARRGELLFGTVDTWLIWKMTQGRVHVTDYTNASRTMLFNIHTLDWDDKMLEVLDIPREMLPEVRRSSEVYGQTNIGGKGGTRIPISGIAGDQQAALFGQLCVKEGMAKNTYGTGCFMLMNTGEKAVKSENGLLTTIACGPTGEVNYALEGAVFMAGASIQWLRDEMKLINDAYDSEYFATKVQNTNGVYVVPAFTGLGAPYWDPYARGAIFGLTRGVNANHIIRATLESIAYQTRDVLEAMQADSGIRLHALRVDGGAVANNFLMQFQSDILGTRVERPEVREVTALGAAYLAGLAVGFWQNLDELQEKAVIEREFRPGIETTERNYRYAGWKKAVKRAMAWEEHDE

SEQ ID NO: 101865 - DNA, 1524 bp, Agrobacterium tumefaciens str. C58
  CDS (1)..(1524): transl_table=11
ttgcgtctgaaagggagtgacataatgggcggttatattctggcgatcgatcaggggacgacatcgacgaggtcgatggtctttgatcgcgacatgcgggtgatcggtgtcggccagcgagaatttccgcagcatttcccggcctccggctgggtcgagcacgatgccgaagatatctggaaaagcgtgctcgaaaccatccggctggcgcttgccgatgccggcatcgccgcatccgatattgcagcaatcggcatcacaaaccagcgtgaaacaaccgtgctgtgggaccgcaacaccggcgaggccgtgcatcgcgccgtggtctggcaggatcgtcgcgccgcgccggtctgcgaggacctgaagcgccgagggctggagccgctgttttcgaaaaagaccggactgctgctcgatccctatttttccggcaccaagctgaaatggcttctcgatagcgtcagcggccttcgcgaaaaagccgtgaagggagaaatctgcttcggcaccgtcgacagtttcctgatctatcgcctgactggcggccggcgtcatgtgactgacgccactaatgcctcccgtaccttgatctacaacatcgaagacaacgcctgggatgacgaattgctgtctatccttaacattccccgcgccatgctgccggaggtgctggactgcgctgccgatttcggcgtgacggataaggcgcttctcggtgcggaaattccaatcctcggtgtggccggcgatcagcaggccgccgttatcggcaatgcctgcttcgagccgggcatgatgaaatctacctatggcacgggctgctttgcccttctcaataccggcacagaccgggtggcatccaccaaccggttgctaacgacgattgcttaccgcctcgatggcgtgacgacctatgcgcttgaaggttcgatcttcattgccggcgccgccgtgcaatggctgcgtgacgaacttggtttcatctcggttgcgtctgaagtcagcgcgctcgccgaaaaggccgatcccaagcagcgggtttatctcgtgccggcctttaccggccttggcgcgccttattgggatgccgaggcccgcggagcgattttcggcctgacgcgcggtacgggacctgcggaatttgcccgcgcggcgctcgaaagcgttgcctaccagacgttcgatctcctggacgccatgcgcaaggactgggcgggtgacaatggcaagacggtgctgagggtggatggcggcatggtcgcttccgattggaccatgcagcggctggcggatattcttgccgccccggtcgatcgtccggtctttctggaaacgaccattctgggcgcagcctggcttgcggcctcccgcgccggcatctggccggaccgcaaggcctttgccgaccattggcgccgtgaccgccgcttcagccccgacatggaagaaagcgagcggaagaacgcgatcgcgggctggcgtgacagcgttggccgttgcctctcgaaacgggacaattga

SEQ ID NO: 101866 - protein, 507 aa, Agrobacterium tumefaciens str. C58
MRLKGSDIMGGYILAIDQGTTSTRSMVFDRDMRVIGVGQREFPQHFPASGWVEHDAEDIWKSVLETIRLALADAGIAASDIAAIGITNQRETTVLWDRNTGEAVHRAVVWQDRRAAPVCEDLKRRGLEPLFSKKTGLLLDPYFSGTKLKWLLDSVSGLREKAVKGEICFGTVDSFLIYRLTGGRRHVTDATNASRTLIYNIEDNAWDDELLSILNIPRAMLPEVLDCAADFGVTDKALLGAEIPILGVAGDQQAAVIGNACFEPGMMKSTYGTGCFALLNTGTDRVASTNRLLTTIAYRLDGVTTYALEGSIFIAGAAVQWLRDELGFISVASEVSALAEKADPKQRVYLVPAFTGLGAPYWDAEARGAIFGLTRGTGPAEFARAALESVAYQTFDLLDAMRKDWAGDNGKTVLRVDGGMVASDWTMQRLADILAAPVDRPVFLETTILGAAWLAASRAGIWPDRKAFADHWRRDRRFSPDMEESERKNAIAGWRDSVGRCLSKRDN

SEQ ID NO: 101867 - DNA, 1617 bp, Drosophila melanogaster
  CDS (1)..(1617)
atggattctcccacaaccgaaacgacaccgcctccacccacgctatctggtccattcgttggggctattgacgagggaaccacttccgcgcgatttattatatttcgtgcgggcactgacgaaattgtgtgctttcatcagattgaagtggagtctattttccagaaggagggatggtgcgagcaggatcccatggccatagtgaatacggtcaacgagtgcatcaccggtgcctgcaagaaacttgtggccgtgggcgggaaggttgaggaaataatcacgattggaataacaaaccaacgcgagtccacagtcgtatgggatagaaactccggccaaccgctggtgaacgctatcatctggctagacaatcgtaccaccagcacggtggaggagcttttggagactattccgaacaatgccaggaacatcaactacctgcgcccattgtgcggacttcctctgtctccgtacttttcgggcgtgaaactacgctggcttcgagacaacgtgccggttgtcagccaggctatggagaagggcacggccatgtttggcaccatcgacacctggctaatgtataatcttacgggcgggaaggactgtggtgtccacaagacggatgtgaccaacgcttcgcgcactatgctcatgaacatcgagacccttcagtgggatgccaacttgctaaagttctttgggctgcccaagaccattttgccggagatctgctcgagctcagagttctatggcagcattgcgcagggcgttctgcaaggcataggcataacatcggttctgggcgaccagcaagccgctctagtgggtcaacaatgcctggccaaaggtcaggccaaagccacttatggcactggatgttttctgctttataacacaggaccttcaattgtacactcaacgcacggattactaacgactgttggctaccaactaggacggaaggcagtcccattttacgcccttgagggaagcgtgtccattgccggtgcagcattcaactggctgcgcgacaacatgaaccttattcaaaactcggggcagatcgaaaccatggctagcactgtggacaactctcttgacgtatacttcgtaccagctttcaatggactctacgccccctactggaatcaggacgctcgcggtgtcatttgtggactgagtgaagaaacaacaagtgagcacatagtaagagccaccctggaagcagtttgtttccaggtccgtgatattctcgattcgatgcacaaggactgcaagattccactggccaagcttatggtagacgggggcatgactgtgaataatctgttcctgcagcttcaatccgacctagtaggaattcaagtactccgggcgaagatcgcagagacaacagcgctgggagctgcaatggcagcctacaaagccgttgaaaaccgataccaaatggaggctccactctctaaatctggcccccgagaagccataaagccatcgatcagtgccaccgatcgcaacctgcgctaccaaaagtggaaaatggctatcgatcgttcactgaactgggagacttcgacgcttccacagggcgaacgggaggcctttgacggagcgtga

SEQ ID NO: 101868 - protein, 538 aa, Drosophila melanogaster
MDSPTTETTPPPPTLSGPFVGAIDEGTTSARFIIFRAGTDEIVCFHQIEVESIFQKEGWCEQDPMAIVNTVNECITGACKKLVAVGGKVEEIITIGITNQRESTVVWDRNSGQPLVNAIIWLDNRTTSTVEELLETIPNNARNINYLRPLCGLPLSPYFSGVKLRWLRDNVPVVSQAMEKGTAMFGTIDTWLMYNLTGGKDCGVHKTDVTNASRTMLMNIETLQWDANLLKFFGLPKTILPEICSSSEFYGSIAQGVLQGIGITSVLGDQQAALVGQQCLAKGQAKATYGTGCFLLYNTGPSIVHSTHGLLTTVGYQLGRKAVPFYALEGSVSIAGAAFNWLRDNMNLIQNSGQIETMASTVDNSLDVYFVPAFNGLYAPYWNQDARGVICGLSEETTSEHIVRATLEAVCFQVRDILDSMHKDCKIPLAKLMVDGGMTVNNLFLQLQSDLVGIQVLRAKIAETTALGAAMAAYKAVENRYQMEAPLSKSGPREAIKPSISATDRNLRYQKWKMAIDRSLNWETSTLPQGEREAFDGA

SEQ ID NO: 101869 - DNA, 1791 bp, Drosophila melanogaster
  CDS (1)..(1791)
atgtccaacggtcgttacgggagattcggagcactcatcggcgtcgcctgcgtgagcagcacccactgccgctttctgatatactcaacgaaaaatgccgaggtcctggcctaccatgagctgaagctgcgacagattgtccaccaggcgggctggatggagtacgatccgtcggagatatggaagaacacacaggagtgcatagagaccgcctataagaacctggttatactagagatcaatccacgtgatattattgccatcggtatcgtaaatcagcggggcacctcggtgttatggaatttggagacgggacagccactgcacaatgccatcggatggtcagattgccgtagcactcccatcctaaagaccctgctccataatgtccggcacaatgtggactacgtgaggtatcgcagtggcttgcccctgagcagctgtttcagtgccctaaagatccgttggctaatggatcacgttcctgccgtagccactgccattgaggagaacaagtgcttattcggcaccttggactcctggcttctgtggaacctaaccggcggcgttgagatgggtgtgcactctactgacattaccaatgcccactacacttcccttatgaacgtgtccacagagcagtgggatcctaaactctgccagttctttcgattgcccctgaacatactgccacgcatacgatccaactccgaaatcttcggctatgtgctggagggtcctttgcatggcactcccatagcggccatgatgggtgagcagcccgcaagtttgttgggccaactctgcgtgaaggccgggcaaaatgtctgtaccctggacgacagctgtttcgtgctccttaacacgggcagggagaagctggactctgcaaacggactgataacgggcatagcgcacaagctgggcgaaaaagcggccactaactacacactcgagggagccatttcaaatgccggttccacggttacatggctgcgggataagctacagatcaatactgagattaattccaatgataatgtggtggagtctttgaatacattcatcggcgagaactcgatgatctcgtcctcttgttcctcatccatgctgaatgccgagtgtggactggcagccaagaggtcggagattacgtttgtgccggcatttcatggcatgtacgcaccctactggcgacacgatgccaggggcataatcttgggacttaccagccagactacagcggaaaacattacccaagctgcttacgaggccaccgggttccagatctttgaagtgctacaggcgttcaagcgcgatacacccaactgggaccgatccagcatgcaacccgtgctgacattcggcggtgattacgccgaaaacttgcatttggtgcagttcatagcagatattattggctatatgttggagcgtccacagaccacctcacctgctggattgggcgttatgataaccgcgggcgtgacgatgaaagtggtgtccctggagcacgccgtaaaaatgtacaccccgcccactgatgtcttttcgccaacaactaccaaaaatcgtcgagagctgctctacaagcgctgggcttatgcggtaaagaaatgcctgcactggaacaactacgagacgtacgaggctgatattgagctgtttgctcagcgagaacttgatcccaatttacctgtaaggcgttccgtaccgggcagtatattcctgaccacttcttttgcgatgattatcctggctaactacttaaagtccaatcccctgaaatag

SEQ ID NO: 101870 - protein, 596 aa, Drosophila melanogaster
MSNGRYGRFGALIGVACVSSTHCRFLIYSTKNAEVLAYHELKLRQIVHQAGWMEYDPSEIWKNTQECIETAYKNLVILEINPRDIIAIGIVNQRGTSVLWNLETGQPLHNAIGWSDCRSTPILKTLLHNVRHNVDYVRYRSGLPLSSCFSALKIRWLMDHVPAVATAIEENKCLFGTLDSWLLWNLTGGVEMGVHSTDITNAHYTSLMNVSTEQWDPKLCQFFRLPLNILPRIRSNSEIFGYVLEGPLHGTPIAAMMGEQPASLLGQLCVKAGQNVCTLDDSCFVLLNTGREKLDSANGLITGIAHKLGEKAATNYTLEGAISNAGSTVTWLRDKLQINTEINSNDNVVESLNTFIGENSMISSSCSSSMLNAECGLAAKRSEITFVPAFHGMYAPYWRHDARGIILGLTSQTTAENITQAAYEATGFQIFEVLQAFKRDTPNWDRSSMQPVLTFGGDYAENLHLVQFIADIIGYMLERPQTTSPAGLGVMITAGVTMKVVSLEHAVKMYTPPTDVFSPTTTKNRRELLYKRWAYAVKKCLHWNNYETYEADIELFAQRELDPNLPVRRSVPGSIFLTTSFAMIILANYLKSNPLK

SEQ ID NO: 101871 - DNA, 1731 bp, Drosophila melanogaster
  CDS (1)..(1731)
atgaccgagggcaagaacttaccccactctagtgcggatgtgccgttccgcagcaaggagctgcgcaagcaatcgctcatccagcacaccggcctggtcggagtcatcgatgagggcaccaagaccatcggtttctccatctacaccacgccggacttcaaggagatcgccgcacaccgggtggagctgagcgtgatcacgccccaggatggctggtatgagcaggatccgctggagatgatggcctcgatcaacaagtgcgccgaggaggccatcaagcagctacccgaacagggtttctctgccagcgacattgtcaccgtgggcataaccaaccagcgcgagacgacaatcgtctgggatgcggtcaccggcaaaccgctgtacaatgcgctcctgtggaaggacatccgcactagcactacagtggagcagatcgtggccaaggtgcaggatccgaaccacttccgcagcagcactggcctgcccatctccacgtacttctcggccctcaagatccgctggctgcgggacaatgtgcccgaggtgcgacaggccatccgggaaaggcgatgcaaggcgggcacagtcgacagctggatcgtctggaacttgacaaacggagctctccacatcacggatgtaacgaatgcctcccgcactctgctcatgaatctggagacgcaagcctgggatcctgttctgctcaagacgttcggtatcagagaggagatgctgcccaccatccacagctgttcggagatatttggcaagatcacttcggagcgaagtccactgcgtgggatgaccctaagtggaataatgggcaaccagcaggcctcgcttctgggccagatgtgcgtgaagccgggtcaaacgaagaacacctaccgatccggctgttttctgctctgcaatacgggggacaagccggtcttttccaggcacggtctgctcaccaccgtggcttacaaactcggtccccaggcaccgacgatttacgcaattgagggagctgtgtcggtggccggacatgcgctgtcctggctgcaaaacaaggtgcgtatcctgccggactccagagatgccgagaaatatgcggagatggtgcccacatcgggggatgtgtacttcgtgcccgcctttacaggactatatgctccctactggcggcagaatgctcgcggcatcatcattgggctcacgcagttcacccgtaagaatcacatagtgagagctgcactggagagcatctgcttccagacgcgcgacatcctagagtgcatgcatcaggagtgcggttacgaaatcaataagcttcatgctgatggcaagctcaccacgaacaacctgttgatgcaactccaggcggacaccattggcatgcccgtcttccgctcccagctaatggactccaccgctttcggggcagccatgtgcgccgcccaggcagatggtgtcaatctctgccagttcgagcctgagaagcgatactacgagaacgtgcactacgacaccttcctggccaccaccacggatgtagagcgaaaggagcgatacggcaagtggaagcgggcggtggagcgcagtttgggatgggtcatcaagcagaagaagacgcgtgagtacacggaggagaactaccgcatgctgtcctctctgccagcgagcatcttcctcatcagcagcttcgccatgctggtgcattccctcgctgcgagtggccagtaa

SEQ ID NO: 101872 - protein, 576 aa, Drosophila melanogaster
MTEGKNLPHSSADVPFRSKELRKQSLIQHTGLVGVIDEGTKTIGFSIYTTPDFKEIAAHRVELSVITPQDGWYEQDPLEMMASINKCAEEAIKQLPEQGFSASDIVTVGITNQRETTIVWDAVTGKPLYNALLWKDIRTSTTVEQIVAKVQDPNHFRSSTGLPISTYFSALKIRWLRDNVPEVRQAIRERRCKAGTVDSWIVWNLTNGALHITDVTNASRTLLMNLETQAWDPVLLKTFGIREEMLPTIHSCSEIFGKITSERSPLRGMTLSGIMGNQQASLLGQMCVKPGQTKNTYRSGCFLLCNTGDKPVFSRHGLLTTVAYKLGPQAPTIYAIEGAVSVAGHALSWLQNKVRILPDSRDAEKYAEMVPTSGDVYFVPAFTGLYAPYWRQNARGIIIGLTQFTRKNHIVRAALESICFQTRDILECMHQECGYEINKLHADGKLTTNNLLMQLQADTIGMPVFRSQLMDSTAFGAAMCAAQADGVNLCQFEPEKRYYENVHYDTFLATTTDVERKERYGKWKRAVERSLGWVIKQKKTREYTEENYRMLSSLPASIFLISSFAMLVHSLAASGQ

SEQ ID NO: 101873 - DNA, 1524 bp, Photorhabdus luminescens subsp. laumondii TTO1
  CDS (1)..(1524): transl_table=11
atgacaacagaaaatatgattgagaaaaagtatattgtcgcccttgatcagggaaccaccagttcccgagcaataattcttgatcacgacgccaatattatctcaatttcccaaagagagtttacgcaaatttatcctaaaccgggttgggtagaacacgatccaatggaaatctgggcaacccaaagctcaacgctggtagaagtattggcgaaagcggatattagttctgatcagattgccggtattggtattaccaaccaacgtgaaacaacgattatttgggaaaaagagaccggtaaacctatctacaatgccatcgtttggcaatgtcgccgtaccgcggacgcgtgtactaaactaaaacaaaaagagggattggaagaatatattcgccagaatacagggctggtagtagacccttatttctccggcaccaaagtaaaatggatcttagataacgtcgcaggtgcccgtgaacgggctgaaaaaggtgagctcctattcggtactgtggatacttggctggtatggaaaatgactcaaggccgagtccacgttaccgatttcacaaacgcctcccgaacgatgctgttcaatattcacaatctggagtgggatcagcatattcttgatgaattacaaatccctcgttccctactgcctagcgttcattcatcttctgagatttatggtcagaccaacatcggcggtaaaggcggcactcggatccctatctcaggtatcgcaggtgatcaacaagctgctctatatggtcaactttgtgtccaaccgggtatggcgaaaaacacctacgggacaggctgtttcctgctgatgaacacgggtacagatgccgtacgctccaatcacggcctactgacaaccattgcctgtggtcctcgcggcgaagtgaactatgcgcttgaaggtgcggttttcgttggtggtgcctctattcagtggttgcgtgatgaactgaaacttattgcagatgcggctgactccgaatattttgccactaaagttaaaaatagtaacggcgtgtatgtggtccctgcttttaccggccttggtgccccctattgggacccctacgcccgagggtcaattttcggcctaacccgcggtaccaacagtaatcacatcattcgtgcgacgctggaatctatcgcctatcagacccgtgatgtactggatgctatgcaagctgatgcaggcacccggctgcaagcactacgggtagatggcggagccgttgccaataacttcctgatgcaattccaatcagatattcttggcacccgggtagaacgccctgtggtgcgtgaaagcacagcattgggcgcagcattcctcgcaggattggcagttggctactggaaagacctggatgaagtgaaaagtaaagccaccattgagaaagaattccgtccgggtattgaaaccaccgagcgtaattacaaatacaatggctggaaaaaagcagttgcccgtgcgcaggattgggaagataaaggctaa

SEQ ID NO: 101874 - protein, 507 aa, Photorhabdus luminescens subsp. laumondii TTO1
MTTENMIEKKYIVALDQGTTSSRAIILDHDANIISISQREFTQIYPKPGWVEHDPMEIWATQSSTLVEVLAKADISSDQIAGIGITNQRETTIIWEKETGKPIYNAIVWQCRRTADACTKLKQKEGLEEYIRQNTGLVVDPYFSGTKVKWILDNVAGARERAEKGELLFGTVDTWLVWKMTQGRVHVTDFTNASRTMLFNIHNLEWDQHILDELQIPRSLLPSVHSSSEIYGQTNIGGKGGTRIPISGIAGDQQAALYGQLCVQPGMAKNTYGTGCFLLMNTGTDAVRSNHGLLTTIACGPRGEVNYALEGAVFVGGASIQWLRDELKLIADAADSEYFATKVKNSNGVYVVPAFTGLGAPYWDPYARGSIFGLTRGTNSNHIIRATLESIAYQTRDVLDAMQADAGTRLQALRVDGGAVANNFLMQFQSDILGTRVERPVVRESTALGAAFLAGLAVGYWKDLDEVKSKATIEKEFRPGIETTERNYKYNGWKKAVARAQDWEDKG

SEQ ID NO: 101875 - DNA, 1662 bp, Nasonia vitripennis
  CDS (1)..(1662)
atgactgaaaatgcaaagacgacgagcagtgcaaacagatatggcccgctcatcggagctatcgacgagggcacgagcagcgtcagatttttggtctttgcagccaatactgccgaggtcttaacgtatcatcaaaaagagctcaaagtctcttatccacaagaaggatgggtggaacaagacccgatggaaatactcgaagcagttcacgaatgtttgaatcagactgtagaaaatttaaaacaactaacaattaatccagctgacattgttgctattggaattacaaatcaaagagaaacgacgatagtctgggataccaagactggaaaaccattatacaatgctattgtgtggatggatatgcgaactacctctatcatagatgaacttcttaagaaagtccgtaatcagaataaaaattatctcaaatcactctgtggtttaccaataagcccctattttagtgctctgaaaatgaagtggcttatggacaacgtaagcgaggtccaagaagctatcaaagaaaatagatgtatgtttgggactgttgattcatggctcatatggaatttaacaggtggctcaaatggtggggttcattgtacagatgtaactaatgcttccagaactatgttaatgaacattgtaaatttaaaatgggatccatatcttttatctttcttccaaatcccagaagatattctgccacaaatccgtagctcttcagagatttacggcaatatcgttgatggtgttttacagggggttccaatatctggttgtttaggagatcaacaagctgctcttgttggtcaaatgtgcttccaacatggccaagccaaaagtacttatggaactggatgtttccttttatacaatacaggaacgaagattgttgattcagcccatggtttgttgacaacagttggatatcaatttggtccaaaggctgatccagtctatgccttagaaggttcgattgctatggctggtgctattgttaaatggttaaaagacaatctacaagttattgacgacgtatctgaaacagaagctattgctgagaaactcacatgtgataatcgaattatttttgttcctgcgttttctggactgtatgcgccttattggcgaaaagatgccagaagtgtgatttgcggtattacggaggacatcaattatcgacacatagtgaaagctgcacttcaatctgtctgtttccaaactagagatattttggaagctatgagagaagatacaggaatgaccttgacaaaattattagttgatggagctatgactagtaataatctacttatgcaaatgcaagcggatatctgtggtgttccagtagttcgaccagtaatgtgtgaaataacagcacttggagtagcaattgcagctggctgcgcagaaggtataaaaaagtgggatataactgttggtaccaatgtcccaagtgatacttttactccgtcaattacagaaaatgaacgagatatgttatattcagagtggaagaagggcattgaacgaagtctcgattgggaaactgatgctgcttctgaggaagaggaggacatcaataagatgacagcatccggtttgtttgtgtttggcactttactactacttatgttcgcgaggtatcgatcgtga

SEQ ID NO: 101876 - protein, 553 aa, Nasonia vitripennis
MTENAKTTSSANRYGPLIGAIDEGTSSVRFLVFAANTAEVLTYHQKELKVSYPQEGWVEQDPMEILEAVHECLNQTVENLKQLTINPADIVAIGITNQRETTIVWDTKTGKPLYNAIVWMDMRTTSIIDELLKKVRNQNKNYLKSLCGLPISPYFSALKMKWLMDNVSEVQEAIKENRCMFGTVDSWLIWNLTGGSNGGVHCTDVTNASRTMLMNIVNLKWDPYLLSFFQIPEDILPQIRSSSEIYGNIVDGVLQGVPISGCLGDQQAALVGQMCFQHGQAKSTYGTGCFLLYNTGTKIVDSAHGLLTTVGYQFGPKADPVYALEGSIAMAGAIVKWLKDNLQVIDDVSETEAIAEKLTCDNRIIFVPAFSGLYAPYWRKDARSVICGITEDINYRHIVKAALQSVCFQTRDILEAMREDTGMTLTKLLVDGAMTSNNLLMQMQADICGVPVVRPVMCEITALGVAIAAGCAEGIKKWDITVGTNVPSDTFTPSITENERDMLYSEWKKGIERSLDWETDAASEEEEDINKMTASGLFVFGTLLLLMFARYRS

SEQ ID NO: 101877 - DNA, 1749 bp, Nasonia vitripennis
  CDS (1)..(1749)
atgacgacaagaggcgataaggaggaagggaacaagaaagaaaagactgcctacgactattacacctacaactcaacagatatgcctactctaccgagcaaacctgggccattcataggagtgattgacgtcggcacgcgaactgtccgttttgtcatctttaatgcgaagcacgtgacagaagtgcactcgcaccagatcgacatcgagcagctgacgccacaagagggatgggtcgagcaggatccgaaggagatccaatcggcgatctcgacgtgcatcagcaatgttctgagaaagatggaggaaaagggtctcgacgccagtagcatagtcaccataggaatatgcaactccagggagacgaccctcgtctgggactccaagactggagaaccgctctataacgcgatactgtggtcggacatcaggacggacaagttggttgaccagataatcgctcggttcccggacaacaacaagaaccatctgcgtccgatctgcggattgccggtgagctcgtacttttccgctttgaagattcgatggctcatggacaacgtcccaggtgtacggaaggccattcgcgagaggcgatgcatgtttggtaccttggacacctggctggtctggaatttcactggtggtaaggacggcggtctatacataactgatgtaacaaacgcctcgaggacgatgctgatgaacatagagacggtaacctgggacataacactatgccggtacttcaacattcccatgcacattctacctaagatacgcagcagttccgagatatacggcaacatcaaggttggacagctcaagggcatcccaatatcaggaatcctgggtaatcagcaagcagctctagtcggtcaaaactgcctgaagcaaggccaggccaagaacacttatagaagcggttgcttcttgctctgcaacacaggcacgcagcgcgttttctcatctcacggtttggtcacgacggtggcttaccaattgggtcccaacagcccggtagtttatgctttagagggctcgatagccgtcgctggcctggccatcaaatggctgcgagacaatatgaaaatgatgaaggacgtgcacgaaagcgaacacctcgcgcaaaaagtcttcaacaccggcgacgtctatttcgtacctgcattctccgggctctatgcgccctattggcgaaaagacgctcgaggagtaatttgcgggttgacggcgttctccacaaaggaccacattataagggcgtcgctggaggctgtgtgtttccaaacaagggatattctagaagctatgttcaaagactgcggttttccgttgaccaaactttacaccgacggcaaaatgtcggtaaacagtttgctcatgcagctgcaggcagacatttccggtgtgccagtgtttcgctcgacagtggctgacataacagcactgggtgctgccaaagccgctggaaatgcagctggaatcggactctgggaattagaaggtgcaggtgtagaaactgtgataaccgacacatttttacctacgacatcgccagaagaacgagacgcaaggtacaaaaagtggagaatggcagtacaaagaagcctgggctgggcgtcagaaaagatgtccccgcagatgacagatgaaaggtatcgaatcttggcgtcgataccagcgagttggttcttaatgaccagttttatattactaaggctaagctattacttcgacaatcggtga

SEQ ID NO: 101878 - protein, 582 aa, Nasonia vitripennis
MTTRGDKEEGNKKEKTAYDYYTYNSTDMPTLPSKPGPFIGVIDVGTRTVRFVIFNAKHVTEVHSHQIDIEQLTPQEGWVEQDPKEIQSAISTCISNVLRKMEEKGLDASSIVTIGICNSRETTLVWDSKTGEPLYNAILWSDIRTDKLVDQIIARFPDNNKNHLRPICGLPVSSYFSALKIRWLMDNVPGVRKAIRERRCMFGTLDTWLVWNFTGGKDGGLYITDVTNASRTMLMNIETVTWDITLCRYFNIPMHILPKIRSSSEIYGNIKVGQLKGIPISGILGNQQAALVGQNCLKQGQAKNTYRSGCFLLCNTGTQRVFSSHGLVTTVAYQLGPNSPVVYALEGSIAVAGLAIKWLRDNMKMMKDVHESEHLAQKVFNTGDVYFVPAFSGLYAPYWRKDARGVICGLTAFSTKDHIIRASLEAVCFQTRDILEAMFKDCGFPLTKLYTDGKMSVNSLLMQLQADISGVPVFRSTVADITALGAAKAAGNAAGIGLWELEGAGVETVITDTFLPTTSPEERDARYKKWRMAVQRSLGWASEKMSPQMTDERYRILASIPASWFLMTSFILLRLSYYFDNR

SEQ ID NO: 101879 - DNA, 1779 bp, Anopheles gambiae str. PEST
  CDS (1)..(1779)
atgaacggaaacggtgggcatcggagcaagttcggctcgctgataggcgtgctgtacgtcggccacacgagctgcaagtgtttgatttacgcaaccagaaatgcggaggtgctcacgtgccacgaatcgtcgctcgagccgttgtcgccccaggccggctgggtcgagtttgaaccgttggctctgtgggcgacggcacgagtgtgcctggagacggcggtacagaatctgatcatactggacatcaacccgcacgacattgtggcggtcggggtgtgcaatcagcgcgagacgacggtgctgtgggaccgcaccacgggcgaaccgctgtgcaatgcgatcggctggtgcgacacgcgcacctcgagcgtggtcggaagcatcctgcagcgtgtgcggggcaagaagcactacctcaagtcggtgtgcgggctgacggtgagcaactgcttcagcgcggtcaaactacgctggatgatggagcacgtcgacggggtgcagcgggcgatggacgaagggcgggccgcgttcggcacgctggacagctggatcatctggatgctgacggggggcgtcgaggccggcattcacgtgacggacgtgacgaacgcttcgcggacgatgctgatgaacctggagcgccgcgtgtgggacgaaaggctgtgtcgattctttcgcattccaagcaacattctgccggagattcgaagctgctcggaggtgtacggatacattaacgagggcccgttgagcgggacgccgatcgcaagttgcctgggcgatcagcaggctgccctgctcgggcaaatgtgtctgggcgcggggcaagccaactgcaccatcgacgaaggcatgttcgtgctgtttaacactgcccgggagatcatcgattccgaccatgggctgctttcgaccgtggcctttcagcttggaccccgtgccgacccgcactacgcactggaaggtgcgatcgcccatgccggttcttcgatcggttggttaaagcgtacgctcgccctggacccggtcgcatccgatgcgatgaacagcagcgcactgtttcccgacggccctgccaatactcagctgatggcttctttctgctcggccacgaaaacgctcgccggtggcggcgtcggccaacggggtggtgtcatttttgtacctgcattcagtggatattacacgccgtactggcggtacaaagcgcggggcatgatgttcggcataacgctgcaaacgacgccgcagcagatcctggccgccgcccacgaagcgatctgccaccaggtgcgcgaagtgctggaatcgctcgctaaggattgtcccacgtggccccggctggcgaagcttaccgtcgggggcgatctcagcgaacagcgggcgctggtgcagctgctgtcggatctgaacggggtgctggtggagcggccgcaaacatcgacaccggcctgcctcggggcaatgctcgccgccgggctggccaccgaaatactgtccatcgatcagtttcgccagaactgtgtgccaccgatcgatttgttcagtacagcgtttaattctagtcaaagagatatgaagttccgccgttggaaaatggctgtcgatcggtgtttaaacttcgattccgtgtcggatagcgacccggtgaagctgatcggcgacgggcgtgatccggattcgtacgtgcgctgctcgatccccgggtcggtctttatcgtttcgtcgttcgtgcttattgtggccgcccagctgatgaagcagcacggtttcgcgtag

SEQ ID NO: 101880 - protein, 592 aa, Anopheles gambiae str. PEST
MNGNGGHRSKFGSLIGVLYVGHTSCKCLIYATRNAEVLTCHESSLEPLSPQAGWVEFEPLALWATARVCLETAVQNLIILDINPHDIVAVGVCNQRETTVLWDRTTGEPLCNAIGWCDTRTSSVVGSILQRVRGKKHYLKSVCGLTVSNCFSAVKLRWMMEHVDGVQRAMDEGRAAFGTLDSWIIWMLTGGVEAGIHVTDVTNASRTMLMNLERRVWDERLCRFFRIPSNILPEIRSCSEVYGYINEGPLSGTPIASCLGDQQAALLGQMCLGAGQANCTIDEGMFVLFNTAREIIDSDHGLLSTVAFQLGPRADPHYALEGAIAHAGSSIGWLKRTLALDPVASDAMNSSALFPDGPANTQLMASFCSATKTLAGGGVGQRGGVIFVPAFSGYYTPYWRYKARGMMFGITLQTTPQQILAAAHEAICHQVREVLESLAKDCPTWPRLAKLTVGGDLSEQRALVQLLSDLNGVLVERPQTSTPACLGAMLAAGLATEILSIDQFRQNCVPPIDLFSTAFNSSQRDMKFRRWKMAVDRCLNFDSVSDSDPVKLIGDGRDPDSYVRCSIPGSVFIVSSFVLIVAAQLMKQHGFA

SEQ ID NO: 101881 - DNA, 1668 bp, Anopheles gambiae str. PEST
  CDS (1)..(1668)
atggcctccttggagcgcagcaagttgatcggtgtgatcgatgcgggcaccaacagtgtgcgatttgtgatcttcaaattgcccgagtttgaggagattgcatcgcaccagatccgcattacgcagatagtgccgcgcgatggctggacggagcacaacccggtggaggtgctggaagcggtacggctctgcgcggtcgaagcgtgccatcaggtggaaaagctcggctttctcgtgaaggatatcgctgccatcggtatcacgaaccagcgcgagacgaccgtcgtgtgggacaagaacacgggcgaaccgctttacaatgccatcgtatggaacgatatacgcacggacaaaacggtggaccgggtgttggcccgcctgcccgagcaaaaccataaccacttccgtgcgctgtccgggctgccgatctcgccgtacttctccgccctcaagctaaactggctgaaggacaacgtggtggcggtgcggaaggcgtgccgggagcggcgctgctatgccggcacgatcgacacgtggctggtgtggaatctgaccggtgggccgcagggcggcgcgttcgtgacggacgtaacgaacgcgtcgcgcacgctgctgatgaacatcgagacgctgcactgggatccgctgctgacgaaaacgttctcggtgcatccggacatgctgccggagatacgcagctcgtccgaaatttacggcaaggtgaaggatagcagcgtgctggacggcataccgatcagcgcgatcctgggcaaccagcaggcgagcttggtcgggcagcggtgcttgaaggagggccaggcgaagaacacgtaccgcaagggatgctttctgctgtacaacacgggcactaggtgcgtgcaatccacccacggcctggtgacgacggtggcgtaccagatgggacgaaacgcgccaccgatctacgcgctggaaggttcggtagcggtcgccggcgtggccatgaactggctgcgcgacaacctgaaaatcatcaaggacattaaagactccgaagagatcgctggcagcgtgtcatcgacgggcgatgtctactttgtacctgcattcaccggcctgtacgccccctactggcgaaaggacgcgcgaggcatattttgtggtttgaccagtttcactaccaagcatcatttcgtgcgggccgccttggaggcggtctgcttccagacgcgcgacattatcgaggcgatgaagaaggactgcggcataaaccttaacaagctccacacggacggtatcatggcgagcaacagccttctaatgcagctgcaggcggatctgagcggcattcctgtgttgaggacggaggtgcacgaaccggctgctctcgggacggcgatggccgctgcacaggcgaacggggtggatctgtacaagctggaggcggaaatccgtggctacgcaggtgttcaatcgcaccatgaaacattccttccgaccaccaccgaggaggaacggaacgctcggtacaccaagtggaaaatggcagtgcagcgcagtttgggctgggcagtttcgaagaagagtgaagcaatgacggacgaacgctacagcttgcttgcctcgataccggccggtctgttcctggccacgaccttcctgatgttggttcactcgcaacggcggtga

SEQ ID NO: 101882 - protein, 555 aa, Anopheles gambiae str. PEST
MASLERSKLIGVIDAGTNSVRFVIFKLPEFEEIASHQIRITQIVPRDGWTEHNPVEVLEAVRLCAVEACHQVEKLGFLVKDIAAIGITNQRETTVVWDKNTGEPLYNAIVWNDIRTDKTVDRVLARLPEQNHNHFRALSGLPISPYFSALKLNWLKDNVVAVRKACRERRCYAGTIDTWLVWNLTGGPQGGAFVTDVTNASRTLLMNIETLHWDPLLTKTFSVHPDMLPEIRSSSEIYGKVKDSSVLDGIPISAILGNQQASLVGQRCLKEGQAKNTYRKGCFLLYNTGTRCVQSTHGLVTTVAYQMGRNAPPIYALEGSVAVAGVAMNWLRDNLKIIKDIKDSEEIAGSVSSTGDVYFVPAFTGLYAPYWRKDARGIFCGLTSFTTKHHFVRAALEAVCFQTRDIIEAMKKDCGINLNKLHTDGIMASNSLLMQLQADLSGIPVLRTEVHEPAALGTAMAAAQANGVDLYKLEAEIRGYAGVQSHHETFLPTTTEEERNARYTKWKMAVQRSLGWAVSKKSEAMTDERYSLLASIPAGLFLATTFLMLVHSQRR

SEQ ID NO: 101883 - DNA, 1734 bp, Magnaporthe grisea 70-15
  CDS (1)..(1734)
atggcagcatcagtctcaacctgtggcatcgccacgcccccttcaagaccctcaagagtacccagcactctgggctcaaaaccttcgcgtatgcatgatccagatatcatcatcaacgcactcaaggacgttgtcctaccggctgttgccttgtcggcacagcacgtggagaatgcccaagtcccatcccctgacccggagccagaagacatgtacatcggctcaatagaccagggtaccacgtcttcgcgcttcatcatcttcaaccgtgccggcgagcccgtcgaggcgcaccagattgagtttgagaaccgctatccaaactcgggctggcacgagcatgacccaatggagttgctctccagcgttgaggagtgcatagaagaggccatgatcaagttcaccgcgacgaggccaggtgccaaggttcactcggttggcatcacaaaccagagggaaacgacggtggtctgggatacggagacgggcgagccgctgtacaacgctgtagtgtggcccgacacccgcacctcgcccatcgttcatgaactgcggcaaaagccgggtgcagaggatctgctggacctgtgcggcttgcctctgtcaacctacccgtcctctgtcaagctcatgtggttattgcggaacgtagacaccgtcaaggctgcttatgacgccggccgactcgcctttggcacggttgactcgtggctcatctaccgtctgactggtaaatcggtgcacgtaactgatggttccaacgccagccgcaccatgtttatgaacctgcgcagcatgtcctatgacgaaaagctgctgtcgttcttcgagattgacgccaccaagatccgcctccctgagattgtgccctcggcacaccccactgcctttggaaaatttgcctcgggtcccctcaaggacgtcaggatagcaggctgcctgggcgaccagtccagcgccctggtgggccagcgcgccttcgcctcgggccaggccaagaacacttacggcacgggctgcttcctgctgtataacgtcggcccggagcccgtcatctcaaaggctggcctgctggccacggtagcctacgactttggcgaggagctgggcggccgcgcctacgccctcgagggcagcatcgccgttgccggcagtggcgttaagttcctgtccaacaacctgggcttcgcaccgagcagcggcgagattacggatctggccggcagcgtcgacgacaacggcggcgtggtctttgtgactgctttcagtggcctctttgcgccttactggatcgacgatgccaagggaacactctttggactcacgcagcacacacaaaagggccacatcgcgcgcgcaactctcgaggcgacgtgctaccagaccaaggcgatcctggacgccatggaacgtgacagcgggcgcaagcttgagcgcctggccgtcgacggcggcatgtccaactcggacctgtgcatgcagacccaggccgacgtcggcaacatccccgttgaccggcccgagatgcgcgagaccacggccctgggcgccgccatcgccgccggcttggccacgggcgtatggaagaacatctcagaggtcctcgaggtcggcggccgcaataggtcccagttcctaccgtctcccgatcgcgccaaggctcaaaggatgttcaagaagtgggagcaggccgtcgagatgagtagggggtggttgagggaaggtgaagaataa

SEQ ID NO: 101884 - protein, 577 aa, Magnaporthe grisea 70-15
MAASVSTCGIATPPSRPSRVPSTLGSKPSRMHDPDIIINALKDVVLPAVALSAQHVENAQVPSPDPEPEDMYIGSIDQGTTSSRFIIFNRAGEPVEAHQIEFENRYPNSGWHEHDPMELLSSVEECIEEAMIKFTATRPGAKVHSVGITNQRETTVVWDTETGEPLYNAVVWPDTRTSPIVHELRQKPGAEDLLDLCGLPLSTYPSSVKLMWLLRNVDTVKAAYDAGRLAFGTVDSWLIYRLTGKSVHVTDGSNASRTMFMNLRSMSYDEKLLSFFEIDATKIRLPEIVPSAHPTAFGKFASGPLKDVRIAGCLGDQSSALVGQRAFASGQAKNTYGTGCFLLYNVGPEPVISKAGLLATVAYDFGEELGGRAYALEGSIAVAGSGVKFLSNNLGFAPSSGEITDLAGSVDDNGGVVFVTAFSGLFAPYWIDDAKGTLFGLTQHTQKGHIARATLEATCYQTKAILDAMERDSGRKLERLAVDGGMSNSDLCMQTQADVGNIPVDRPEMRETTALGAAIAAGLATGVWKNISEVLEVGGRNRSQFLPSPDRAKAQRMFKKWEQAVEMSRGWLREGEE

SEQ ID NO: 101885 - DNA, 1551 bp, Gibberella zeae PH-1
  CDS (1)..(1551)
atgcctctcctcaacggaaaagcaaacactgcctttattggtgccattgatcagggcactacaagctcgcgcttcctgatctttgaccccagtggcgatgttgttgccacgcatcagattgagttcaagcagtactatcctcatcctggatggcacgagcatgatcctgaggagcttataagctctgttgaacagtgcattgacggtgccgttgaaacctttgagagccaaggtcactcgagagagcagatcaaggccgttggtatcacaaaccagcgagagacaactgtcgtctgggacaagactactggcaaggccctgcacaacgccattgtctggacagacacacgatcgaaagatctcgtgcgtcgtctcaagcgccgtcttggctccagcgagctgatcggacgatgtggaattcctctctccacatacccatccgtcagcaaactgctctggcttcttgacaacattcccgaagtcaaagatgcgtatgagcgcggtgttttggcgtttggaacggtcgacacatggttgacctacaagctcaacggcgcgactgatcgcgatgtctacgtttctgacccgtcaaatgcgtcacgaaccatgtttatgaatcttgagactctcaagtatgacgaggacattcttgactggttccgcatcgatgattccaagattacgctgccaagaattgtgcgctcttcagacaacaaggcctacggatcactggctggtacatctctcaagggagtcaagatcaccggatgtctgggcgaccagtctgcagctcttgtcggacagaaggcttttacccccggtctcgccaagaacacgtacggcacaggctgcttcttgctatacaatgtgggcacaaagccagtcatttcgtcgcacggcctgttgacaacggtcgcctttgactttggcgagggcaacaccatgtacgccctggaaggcagcatcgcggtggcgggctccagtgtcaagttcctcgtggacaactttggcttcatcgagtcgtcggccaagctcagcgctttggccgagacggtggaggacaatggtgggtgcacctttgttacggcctttagcggcctgtttgcgccgtactggattgacgatgcgcgaggcaccatctttggtatcacgtcgtacacgcagcgcgggcacattgcgagggcgacgctcgaggcgacgtgtttccaaacaaaggccattctcgactcgatggagaaggacagcggacatgccttgaccgagcttgctgtggacggtggcatgtgcaactcggatctcatcatgcagacccagtcagatctcattggaatcccggtcaacagacccggcatgcgtgagacgacagcactgggtgcggccattgcagcgggtttcgccgttggtatctggaagagctttgatgacttgaaggaggtcaacacccaaggccgtaccatcttcaagccgcagattgccgaggaggaggcgacgaagcggtttggacgttggaccaaggccgtcgagatgtccaagggctgggccaacgagtga

SEQ ID NO: 101886 - protein, 516 aa, Gibberella zeae PH-1
MPLLNGKANTAFIGAIDQGTTSSRFLIFDPSGDVVATHQIEFKQYYPHPGWHEHDPEELISSVEQCIDGAVETFESQGHSREQIKAVGITNQRETTVVWDKTTGKALHNAIVWTDTRSKDLVRRLKRRLGSSELIGRCGIPLSTYPSVSKLLWLLDNIPEVKDAYERGVLAFGTVDTWLTYKLNGATDRDVYVSDPSNASRTMFMNLETLKYDEDILDWFRIDDSKITLPRIVRSSDNKAYGSLAGTSLKGVKITGCLGDQSAALVGQKAFTPGLAKNTYGTGCFLLYNVGTKPVISSHGLLTTVAFDFGEGNTMYALEGSIAVAGSSVKFLVDNFGFIESSAKLSALAETVEDNGGCTFVTAFSGLFAPYWIDDARGTIFGITSYTQRGHIARATLEATCFQTKAILDSMEKDSGHALTELAVDGGMCNSDLIMQTQSDLIGIPVNRPGMRETTALGAAIAAGFAVGIWKSFDDLKEVNTQGRTIFKPQIAEEEATKRFGRWTKAVEMSKGWANE

SEQ ID NO: 101887 - DNA, 1647 bp, Apis mellifera
  CDS (1)..(1647)
atgaacaaaaatgagtcgacaagtagatatggacccctcgtcggtgcaatcgacgaagggacaagtagtgctagatttttggtttttgctgcagatacagctgaagtattaacatatcatcaggttccaataacacaaacatgtccaaaagaaggatgggttgaacaagatcctatagaaatattaaaagcagttagagaatgtcttaatcagactatatttaatttacgtcagcttaccatagatcccactgatatagttgcagttggtataacaaaccaaagagaaactacagttgtatgggattccattactggagaaccattatataatgctatagtatggatggatatgagaactacttcaattgtagatgatatattaaaaaaaatacgtaatcaaaataaaaactatttaaaaccactttgtggtttaccaattagtccatatttcagtggtttaaaattaaaatggttattagaaaatgtacctcgtgtacgtgaggctctagatttaaaacgatgtatgtttggtacaattgattcatggttaatttggaatttaactggaggtgttcatgccactgatgttacaaatgcttcaagaacaatgttaatgaatatcacaactttaaaatgggatccaacattattatcattttttaatatacctcctgaaattttaccagagattcgtagttcatcagaaatatatggttatatacaagatgaagttttatctggtgtaccaatatcaggatgtttaggtgatcaacagtcagcattagtaggacaaatgtgtttacaaaaaggacaagcaaaaagcacttatggcacaggctgttttcttttatataatactggaactgctattgtagattcatctcatggattattgacaacagttgcttatcaattaggaccacaagcagcaccaatatatgctcttgaaggctctgtagctatagctggtgctgttattcaatggctaaaagataatcttggagtattatctgatgtaaaggaatctgaatctcttgttgaacaaattccaactgataatcgtgttacatttgtacctgcatttgctggattatatgctccatattggaggaaagatgcaagaagcgttatatgtggaattactgaagatacaaatagtacacatattataaaggcagctttgcaagctgtttgttttcagacaagagacattttggaagctatgaaagaagacacaggtttaacattatctaaattgttagtagatggtgctatgactactaataatttgttaatgcaaatgcaagcagatatttgtggaattccagttgtgaggcctttaatgtgtgaaactactgcacttggagttgcaattgctgcaggaaatgcagatggtatacgaaaatgggatgtaaaacttgatattgctgtaccaagtgatatctttttaccttcaatatctgagaatgaacgagatatattatattcacaatggaaaatggctattgatcgtagtttaggttgggaaccagtttctaataccaatgataatataaagaatattcacaaagcaactgctccaggtatttttatgataagtacattacttttacttatgattgcaaaatatcattctatgttatga

SEQ ID NO: 101888 - protein, 548 aa, Apis mellifera
MNKNESTSRYGPLVGAIDEGTSSARFLVFAADTAEVLTYHQVPITQTCPKEGWVEQDPIEILKAVRECLNQTIFNLRQLTIDPTDIVAVGITNQRETTVVWDSITGEPLYNAIVWMDMRTTSIVDDILKKIRNQNKNYLKPLCGLPISPYFSGLKLKWLLENVPRVREALDLKRCMFGTIDSWLIWNLTGGVHATDVTNASRTMLMNITTLKWDPTLLSFFNIPPEILPEIRSSSEIYGYIQDEVLSGVPISGCLGDQQSALVGQMCLQKGQAKSTYGTGCFLLYNTGTAIVDSSHGLLTTVAYQLGPQAAPIYALEGSVAIAGAVIQWLKDNLGVLSDVKESESLVEQIPTDNRVTFVPAFAGLYAPYWRKDARSVICGITEDTNSTHIIKAALQAVCFQTRDILEAMKEDTGLTLSKLLVDGAMTTNNLLMQMQADICGIPVVRPLMCETTALGVAIAAGNADGIRKWDVKLDIAVPSDIFLPSISENERDILYSQWKMAIDRSLGWEPVSNTNDNIKNIHKATAPGIFMISTLLLLMIAKYHSML

SEQ ID NO: 101889 - DNA, 1863 bp, Apis mellifera
  CDS (1)..(1863)
atggaagaagagaaggcggaagcagttgcaaagaatggagatccagatgtgaaagaagaaactgaagaagacgaagatggaatgtttgatgaatccagttttccggagctggagcgcacgcaaaccggtcgcaaaacaagtatcttcaagtactattcatttaaagagaaagatataatgccaagttcaataaaaaaaccaggtcctcttattggagtaattgatgttggcacgcgaactgttcgctttgtggtattcaatgcgaagcatgtagctgaagtggcatctcatcaaatcgacatagaacaaataagtccgcaagaaggatggatggaacaggatcccaaagaaattctttttgcggtaaaagcttgcatcaaagatgttatacggaaattagacgtgttaggtttaaaaatggacgaaatagtaacaattggtattacgaatcaaagagaaactactgtagcatgggatgcgatgactggtgaaccattatacaatgcaatagtatggtctgatattagaacgagttcgattgttgatcaaataatagctaaatttccggatcaaagtaagaatcatatcaaacctttatgcggtttgccagtgagtccatatttttcagcattaaaaatacgttggatgaaagataatgtgcccactgttagaaaagcgatgcgagataggcgatgtaaagtgggtacgatggacacttggatcgtttggaatttaacgggtggcaaagacggtggattatatattactgacgtaacaaacgcgtcaaggaccatgttaatgaacatagaaactctttcatgggatcccacgttgtgcagatattttgatattcctatgcaaatgttgccagaaattagaagcagtgctgaaatttatggaaaaattgcaatcggtccattaaagggtatcactatatctggcattttagggaatcagcaatcagctttagttggacaaaattgtttaaagaaaggacaagcaaaaaacacatatagaagtggatgttttttactctgtaatacgggaacaacacgagtatattcttctcatggattagtgacaacggtagcttatcaattaggtccaaaaagttcagctgtttatgcattagaaggttcaattgcagtagcaggtgcagctattaaatggttacgagataatatgaaacttataaaggatgtacatgaaagtgaacatttagcacaaagtgtttttagtactggcgacgtatattttgtgccagcttttacaggattatatgctccatattggagaaaagatgcaagaggaattatttgtggacttactgcatttacaacaaaacagcatataataagagcatcattagaagctgtctgttttcaaactagagatattttagaagctatgtataaagattgtggttttccattaaccaaattaaatacagatggaaaaatgtcaacaaataatcttcttatgcaattgcaagcagatctttgtggtacaccagtatttaggtccacaatgccagatattacagctttaggcgcggcaatggcagcaggtcatgcagaaggtgtggatatttgggaattagaaggtgaagaaatagaaacagtatcgactgatacatttttgccaacaacaacaccagaagaaagagatgccagatataaaaaatggaagatggcagttgaaagaagtttaggttgggcagcagtaaagaaatctgatcaaatgacagctattgattttttgggtttaggagttttcgttttagctgctggtgctttagtcgtctttttactctttgacatagttttagattcttttatagatttaactttttcagttttttga

SEQ ID NO: 101890 - protein, 620 aa, Apis mellifera
MEEEKAEAVAKNGDPDVKEETEEDEDGMFDESSFPELERTQTGRKTSIFKYYSFKEKDIMPSSIKKPGPLIGVIDVGTRTVRFVVFNAKHVAEVASHQIDIEQISPQEGWMEQDPKEILFAVKACIKDVIRKLDVLGLKMDEIVTIGITNQRETTVAWDAMTGEPLYNAIVWSDIRTSSIVDQIIAKFPDQSKNHIKPLCGLPVSPYFSALKIRWMKDNVPTVRKAMRDRRCKVGTMDTWIVWNLTGGKDGGLYITDVTNASRTMLMNIETLSWDPTLCRYFDIPMQMLPEIRSSAEIYGKIAIGPLKGITISGILGNQQSALVGQNCLKKGQAKNTYRSGCFLLCNTGTTRVYSSHGLVTTVAYQLGPKSSAVYALEGSIAVAGAAIKWLRDNMKLIKDVHESEHLAQSVFSTGDVYFVPAFTGLYAPYWRKDARGIICGLTAFTTKQHIIRASLEAVCFQTRDILEAMYKDCGFPLTKLNTDGKMSTNNLLMQLQADLCGTPVFRSTMPDITALGAAMAAGHAEGVDIWELEGEEIETVSTDTFLPTTTPEERDARYKKWKMAVERSLGWAAVKKSDQMTAIDFLGLGVFVLAAGALVVFLLFDIVLDSFIDLTFSVF

SEQ ID NO: 101891 - DNA, 2019 bp, Candida glabrata CBS 138
  CDS (1)..(2019)
atgatttccgttaacgacggtaatatccagatggataaagacggtaacatccctctgatcgcttctattgacgtgggtactacatcttcccgtgtcattttcttcaacaaacagggtcaagaagtcgctaagcaccaaatcgaatactctacatctgcctctactcagaaatatgctgtacatggttcacgtagacagtccatcaaggaccaaaccaagatggctaacccagaaaaggacaaaccagtgttcacaagtgaaggtattgccatcaaggaaaacgagtacttgaccatcgaagaattccacggtgctaatgaaggaccaactttgaaattccctaaaccaggctgggtcgaatgtaacccaatgaatgtcttggttaacgttgttcagtgtctaggtactacttacgagctgctcgataacttgaacaacgaccgtgcccaaaacaacctgccgctatacagagtcgactgtgtcggtgtagctaatatgagagaaactactattgtttggtctaagaagaccggtatgccaattgtggattacggtattgtctggaatgacacccgtactctagacttggttaagagaaagaagaaagaaactgaaaaggagaagagattacgtatgaaggacaagaccggtttgtctgttttctctacatacttctcttgttcaaaacttgtatggcttttggagaacgaaccagaggtcaagaaggcttatgaagctggcgacttgatgttcggtactgttgatacttggctgatttaccatttgaccgctagcaacgcttttgtctctgatgtaactaatgcaagcagaactggtttcatgaacttggataccagagattatgacgatgaattagttgaattctggggtattgacagaaataagatcaacttcccaaagatcgtgtcatctgctgaatactacggtgacttgagcattccaaagttgtttaagtctcaagtcccaggacatatttgggaattgttattgaaatacaccgaaggtgaatttcaagtaccaattcaaggctgtctaggtgaccaaagtgcctcattggtaggccagatggcttttaaacctggtgccgccaaatgtacctatggtacgggttgtttcttactatacaacactggctgcaagaaattgatttctaagcatggtgctttgacaactttctcttactggttcccatacttggaagaaaaggaaaacccagagtatggtgccccacactttgccttggaaggttccgtcgctgtcgctggtgccgttgtgcaatggttacgtgacaacttgcgtttaattccaaaggctgaagatgttggaccaattgccaattctgttccagactctggtggtgttgtttttgttccagcattcagtggtctattcgcaccatactgggatccagaggctagaggtaccatcatgggtatgtctcaatacacaaccgcttctcacattgctagagcagctgttgaagctgtttgtttccaagcccgtgccattctattggctatgagtaacgatgccatgggtgaagccgagaaggatagtacttttaagactgagatcagcgaagagggttcatatcaaaagtctttactatctacattggctgttgatggtggtatgtcccgttcagatgaagtcatgcaaatccaagctgacatcttgggtccatgtgtcaaagttagaagatctccaactgctgagtgtactgctttaggtgctgcagttgccgctaacatggcctacgaaagaccacaagaccgtgtcctatggagagatcttcaagacgctaagaactggattttctatgaaggtatgactaaatccgaatatcaagctaaggagactaagcaaaacttgaagattttcagaagccaatctactgatgaagacagacacaagcactggattcaatgggaagctgctgttaagagaagcaaaggctggctaaaggatgttgaaggtgaacatcctgtagtagcatga

SEQ ID NO: 101892 - protein, 672 aa, Candida glabrata CBS 138
MISVNDGNIQMDKDGNIPLIASIDVGTTSSRVIFFNKQGQEVAKHQIEYSTSASTQKYAVHGSRRQSIKDQTKMANPEKDKPVFTSEGIAIKENEYLTIEEFHGANEGPTLKFPKPGWVECNPMNVLVNVVQCLGTTYELLDNLNNDRAQNNLPLYRVDCVGVANMRETTIVWSKKTGMPIVDYGIVWNDTRTLDLVKRKKKETEKEKRLRMKDKTGLSVFSTYFSCSKLVWLLENEPEVKKAYEAGDLMFGTVDTWLIYHLTASNAFVSDVTNASRTGFMNLDTRDYDDELVEFWGIDRNKINFPKIVSSAEYYGDLSIPKLFKSQVPGHIWELLLKYTEGEFQVPIQGCLGDQSASLVGQMAFKPGAAKCTYGTGCFLLYNTGCKKLISKHGALTTFSYWFPYLEEKENPEYGAPHFALEGSVAVAGAVVQWLRDNLRLIPKAEDVGPIANSVPDSGGVVFVPAFSGLFAPYWDPEARGTIMGMSQYTTASHIARAAVEAVCFQARAILLAMSNDAMGEAEKDSTFKTEISEEGSYQKSLLSTLAVDGGMSRSDEVMQIQADILGPCVKVRRSPTAECTALGAAVAANMAYERPQDRVLWRDLQDAKNWIFYEGMTKSEYQAKETKQNLKIFRSQSTDEDRHKHWIQWEAAVKRSKGWLKDVEGEHPVVA

SEQ ID NO: 101893 - DNA, 1986 bp, Kluyveromyces lactis NRRL Y-1140
  CDS (1)..(1986)
atgactgagaaagagttagttattaagtccgatacagaaaaagaggtggttccgttagttgctgctattgatgtcggtaccacatcttcacgtgtgattcttttcaacagattgggacaagaaatttccaagcatcagatcgagtacagtactagtgcttctcattccgcatattctgcaagcggtgaacgaagattggaagagaataagaccaatggttccagtaacgaacaaaccatcttcagcgcggaaggtattgctattgaggccacggagtatcttgagatcgaggatctagaaaaagatgtagaacctacgttaaggttcccaaaaccgggatgggtcgaatgtaaaccaatgaacattttggaaaacgtggttcaatgtttcgcagcaaacttgattacaatggatcgcgtaaacggcgatagagtctctaatggtctaccgccttatcgcatcaagtgcataggtattgctaacatgagagaaacaactttagtatggtcaaagaagaccgggaaacctttaatcgattacggtattgtatggaacgatgttagaaccacagagatagttcaaaagaaaaaagatgagacaccagaagagtaccaagaacatttaagggaattaactggattaccattgttctctacatatttctcctgttccaaacttcgctggttattagataatatccctgaagttaccaaagcttacgaagaaaatgatttggtcttcggcactgtcgacacctggttgattgccaatttgacccacaacaatgttttagttaccgatgtcactaatgcttgcaggacagggttcatgaatttaaatactaaggattacgacgatgaattgctcgattattggaacatcgacaaggcaaagattcatttgccaaagattgtttcaagttctgagtactacggtaattttgtagttccagaatgtaccaagaaatctttgacgtccacagcatgggatcttctatcagcattttcgcaaagagttcctccagtgccaatacaaggttgtcttggtgaccaaagcgcatctttggtgggtcagcttgcattcaaaccaggctctgccaaatgtacttacggtacaggttgtttccttttgtataacacaggaactactaaattgatatcaaagcacggtgcgctaacaacatttgcatactggttcccacagttagaaaatgaagaaaacgattatggtaaaccacattatgccttagaaggttcagttgctgttgctggtgccgtagttcagtggctaagagacaacttaagattgattccaagagctgaagatgttggacctctagcatcagctgtaccaaattccggtggtgttgtgtttgtaccggctttcagtggtttatttgcgccatactgggatcctgatgctcgtgcaactattatgggaatgtcacaatacacaacagcttctcacatcgctcgagctgctgtcgagggtgtctgcttccaagcgagggctattttaaaagccatgagttctgatgctttcggctcagaagataaggactttttagaagaagttgttgatgaaacttacgagaaaactttactttcgactttagctgttgacggtggtatgtctagatcagatgaagtgatgcaaattcaagctgatatcctaggcccctgtgtcaaggtaagaagatctccaacttcagaatgtactgctttaggtgctgcaattgccgctgctatggctttcaaaacagatgaagaacgtattttatggaagaatctaaaggacgtcaaaaaatgggtattctatggaggggtagagaaaggcgagaaagctcccccaagtaccaccaatgacacggatctgaaggtctttataagcaagtcttcggacaaaagtagaagaaaaggttggaagatgtgggagactgcaattgagaaatctaaaggatggatgaatgaaattcaattgtcataa

SEQ ID NO: 101894 - protein, 661 aa, Kluyveromyces lactis NRRL Y-1140
MTEKELVIKSDTEKEVVPLVAAIDVGTTSSRVILFNRLGQEISKHQIEYSTSASHSAYSASGERRLEENKTNGSSNEQTIFSAEGIAIEATEYLEIEDLEKDVEPTLRFPKPGWVECKPMNILENVVQCFAANLITMDRVNGDRVSNGLPPYRIKCIGIANMRETTLVWSKKTGKPLIDYGIVWNDVRTTEIVQKKKDETPEEYQEHLRELTGLPLFSTYFSCSKLRWLLDNIPEVTKAYEENDLVFGTVDTWLIANLTHNNVLVTDVTNACRTGFMNLNTKDYDDELLDYWNIDKAKIHLPKIVSSSEYYGNFVVPECTKKSLTSTAWDLLSAFSQRVPPVPIQGCLGDQSASLVGQLAFKPGSAKCTYGTGCFLLYNTGTTKLISKHGALTTFAYWFPQLENEENDYGKPHYALEGSVAVAGAVVQWLRDNLRLIPRAEDVGPLASAVPNSGGVVFVPAFSGLFAPYWDPDARATIMGMSQYTTASHIARAAVEGVCFQARAILKAMSSDAFGSEDKDFLEEVVDETYEKTLLSTLAVDGGMSRSDEVMQIQADILGPCVKVRRSPTSECTALGAAIAAAMAFKTDEERILWKNLKDVKKWVFYGGVEKGEKAPPSTTNDTDLKVFISKSSDKSRRKGWKMWETAIEKSKGWMNEIQLS

SEQ ID NO: 101895 - DNA, 1893 bp, Debaryomyces hansenii CBS767
  CDS (1)..(1893)
atgccacgtcgtcaaagtaatgctccatcgcagccagttgttgctacgattgatattggtacaacttcagcaagagctattttgtttaatcaaggaggtgttgaagtagccaaacatcaaatcgaatactccaccacggcatcggaagctccagcggagtcggagaataaggaacagtttagaagaagatcgtcgcttatgagacacaatgcgcctattttcactgctgaaggtattgccatttctataacagacgatgtcgaaatcgaaaataattctgcaagtgttggtcctacgttgagatttccacagcccggatgggttgagtgtatgccagttcatattttggcgaatgctgttcagtgtttgatagcttgtttgattacgttgagaaaaatcaatcagaatccggagttgaaaatcaagtataaggtcaaggctattggtattgctaacatgagagaaacaacgattgtgtggtctcgtaaaaccggtaagcctttgagtaatggtatcacatggactgatacaagaactgcagaaattgtgcagcacttggaaaggacaattgacgatgaaagaaaagaagaattaaagcaaaagaccgggttgccattatccacctatttttctgccgccaaattgcgttggttaatagataatgacgataccataaaggaggaatacgagaagggtgatggtaacttaatgtttggtacggttgatacgtggttgatttatcacttaaccaaggaaagatcctttgtatccgacgttaccaatgcatctagaacttattttatggacttagaaacaagagattatgacgatgatttattagatttttggggtattgatcctacgagggtagcgttaccaaagattgtatctagttcggaattctacggatcatttgcggctccaaatttatctaacttaggtttccacaataagatcactccagaagcatacgaaatattgaaaactattaccggcattcccatttgtgggtgtcttggtgaccagtcagcttcattagttggccaattagcatttaagcctggttctgctaaatgtacttatggtactggttgtttcttgttgtataataccggtaatcgtaagttaatctctgaacatggcacagtaacaacgataggcttttggttccctaacttaaaggacgaggacgccaatccacattatgcattagaaggttcaattgctgttgcaggttcaattattcaatggttaagagataatttgaagttgatagaacacgcgagagatgttggacctttggcctcccaagttgataatgcaggtggagttgtatttatcccagctttctcaggtttatatgctccatactgggatggtggcgctagaggtacaatttttggtatgacacaatatacctcttcatctcatatagcaagagctgcattagaaggtgtctgttatcaagttagggctatcttgagagccatggctaatgatgcgggcgcaagtgaagattttttggaagaagcgttaaataggcaaaatgagaaaaagccattatctgcattatctgttgatggtggtatgtcaaaggctgatgaggtgttgcaaattcaagcggacattttaggaccatgtgtaactgtcaaaagggcaaatatatctgaatgtacagcattgggtgcagcgattgcagccggcttatcattcaaagatgaagaagaaagagtttggaaagatttcgatgatatttatgaaaagattaatggaacggatgatgagaagaataatttcaaagcgaaattgcctgattccgatagaagaaagtattggaagaggtgggagaaagcaatcgatagagctaaaggttggttagatgaagataattag

SEQ ID NO: 101896 - protein, 630 aa, Debaryomyces hansenii CBS767
MPRRQSNAPSQPVVATIDIGTTSARAILFNQGGVEVAKHQIEYSTTASEAPAESENKEQFRRRSSLMRHNAPIFTAEGIAISITDDVEIENNSASVGPTLRFPQPGWVECMPVHILANAVQCLIACLITLRKINQNPELKIKYKVKAIGIANMRETTIVWSRKTGKPLSNGITWTDTRTAEIVQHLERTIDDERKEELKQKTGLPLSTYFSAAKLRWLIDNDDTIKEEYEKGDGNLMFGTVDTWLIYHLTKERSFVSDVTNASRTYFMDLETRDYDDDLLDFWGIDPTRVALPKIVSSSEFYGSFAAPNLSNLGFHNKITPEAYEILKTITGIPICGCLGDQSASLVGQLAFKPGSAKCTYGTGCFLLYNTGNRKLISEHGTVTTIGFWFPNLKDEDANPHYALEGSIAVAGSIIQWLRDNLKLIEHARDVGPLASQVDNAGGVVFIPAFSGLYAPYWDGGARGTIFGMTQYTSSSHIARAALEGVCYQVRAILRAMANDAGASEDFLEEALNRQNEKKPLSALSVDGGMSKADEVLQIQADILGPCVTVKRANISECTALGAAIAAGLSFKDEEERVWKDFDDIYEKINGTDDEKNNFKAKLPDSDRRKYWKRWEKAIDRAKGWLDEDN

SEQ ID NO: 101897 - DNA, 1512 bp, Yarrowia lipolytica CLIB122
  CDS (1)..(1512)
atgtcttcctacgtaggagctctcgaccagggtaccacctccacccgtttcattctcttttcgcctgacggcaagcccgtggcatcccaccagatcgaattcacccagatctacccccaccccggatgggtggagcacgaccccgaggagctcgtgagctcgtgtctggagtgcatgtcgtcggtggccaaggaaatgcgaacccagggcatcaaggtggccgacgtgaaggcgatcggaatcaccaaccagcgagaaaccaccgtgctttgggacattgagaccggccagcccctgtacaacgccattgtgtggtccgacgcccgaaccggcgacaccgtcaagaagctcgaggcccagcccggcgctgacgaaatccccaagctctgtggcctgcccctgtccacctactttgccggagtcaaggtccgatggatcctggataacgtcaaggaggcccgagagtgctacgatcgaggcaagctggccttctccaccatcgactcgtggctgctctacaacctcacgggcggcctcaacggcggcgcccacatcaccgacacctccaacgcctcccggtccatgttcatgaacattgagaccctcaagtacgacgagaagctcatcaagttctttggcgtcgagaagctcattctccccaagattgtctcgtccgccgaggtctacggccgaatcggaaccggccccttcgccaacatccccctggccggctgtctcggtgaccagtccgccgccctcgtcggccagaaggcctttgagcccggccaggccaagaacacatatggaaccggctgcttcctgctctacaacgccggcgagaagcccatcatctccaacaacggcctgctgaccaccgtcggctaccacttcaagggccagaagcccgtctacgctctggagggctccatctccgtcgccggctcgtgcatcaagtggctgcgagacaacattggtctcattgagtcttccgagcagattggagagcttgcctcccaggtcgacgactctgccggcgtggtgtttgtcaccgctctgtccggcctgtttgccccctactggcgaaccgacgcccgaggcaccattctgggtctcactcagttcaccaccaaggcccacatttgccgagccgccctggaggctacttgtttccagacccgggccattctcgacgccatggccaaggactctggtaagcccttcaccaagctgcgagtcgacggaggaatgaccaactcggacattgctatgcagatccaggccgacattcttggcattgaggtcgagcgacccgccatgcgagagaccaccgctctgggtgccgccattgctgccggctttgccgttggcgtgtggaagtccattgaggatcttaaggacatcaacaccgagggcatgaccgagtttgcttccaagaccaacgaggaggagcgggccgccatgatgaagcagtggaaccggggcattgagcgagctgttggctggcttgagtaa

SEQ ID NO: 101898 - protein, 503 aa, Yarrowia lipolytica CLIB122
MSSYVGALDQGTTSTRFILFSPDGKPVASHQIEFTQIYPHPGWVEHDPEELVSSCLECMSSVAKEMRTQGIKVADVKAIGITNQRETTVLWDIETGQPLYNAIVWSDARTGDTVKKLEAQPGADEIPKLCGLPLSTYFAGVKVRWILDNVKEARECYDRGKLAFSTIDSWLLYNLTGGLNGGAHITDTSNASRSMFMNIETLKYDEKLIKFFGVEKLILPKIVSSAEVYGRIGTGPFANIPLAGCLGDQSAALVGQKAFEPGQAKNTYGTGCFLLYNAGEKPIISNNGLLTTVGYHFKGQKPVYALEGSISVAGSCIKWLRDNIGLIESSEQIGELASQVDDSAGVVFVTALSGLFAPYWRTDARGTILGLTQFTTKAHICRAALEATCFQTRAILDAMAKDSGKPFTKLRVDGGMTNSDIAMQIQADILGIEVERPAMRETTALGAAIAAGFAVGVWKSIEDLKDINTEGMTEFASKTNEEERAAMMKQWNRGIERAVGWLE

SEQ ID NO: 101899 - DNA, 1554 bp, Apis mellifera
  CDS (1)..(1554)
atgcctgaaaatatcaatcattcgggaccattcataggggcaattgatgaaggaacgagtagcgctagattcttagtatttgatgtactacatagaaaggtattagcgtcacatcaaattgaaattaaacaaaaatatccacaagaaggatgggtggaacaagatccaaaagaaattttggaagctgttatagaatgcataaaaaaaacaatagaaaaactaaaagatattaatataactgtatcagatatcaaagcaattggaatcactaatcaacgagaaactactttaatgtgggataaaaatacaggagaaccattacacaatgcaatagtatggttggatatgagaactactacaactttagaagacatattagatagtgtacctaacaaaacaagaaataaaaattatttgaaacctctttgtggacttccaatgtcaccatattttagtgctctcaaaatacgttggttaatcgataacataccacgtgttaaacatgcaatagatgaagaaagatgtgcttttggaactattgatacatggcttatttggaatcttaccaaaggacaattacatgtaactgatgtttcaaatgcatctcgtactatgttaatgaatattgaatcattaaaatgggatcctctgttatgtcgattttttggaattccacagcatattctacctgaaataagatctagtgctgaagtatatacaacaatttcaaatccagaagttcttgctggtgtacctatagcaggatgtgtaggtgatcaacagggagcacttcttggccaattgtgcttaaaacctggacaagcaaaagctacttatggaactggttgtttcttactttacaatactggaagtattgtattagattcaacacaaggtcttataacaactattgcatataaaataggtaaaaactcagcaacttatgcattggaaggctcagtggctgtagctggcgcagctttatcatggttacgtgataatatacaactatttaataatataacacaatctcaagacatggcagaacatgtaagatcttcaggagatgtatattttgtacctgcattctcaggtttatatgcaccatattggcaacaagatgcacgaggagtaatttgtggtattactgaagatacacaacaatatcatatcgttcgtgcagcattagaagctgtttgctttcagacaagagatattttagaggcaatggttaaagattctggaacaaaattaacaactttacaagttgatggtggaatgacagtaaacaatttacttatgcaattacaagctgatctcacaggaataaatgttgtacgacccaatatggtagaaacaacagcattgggagcagctatattagctggcattggagtcggtcttatcgatgtgaatgatgtagacgcatctcaagttacggaattttcaccctctattggagaagatgaaagagatttgagatattctaaatggaaaatggctgttgaaagatccatgaaatgggattgttctactactttaatgaataattaa

SEQ ID NO: 101900 - protein, 517 aa, Apis mellifera
MPENINHSGPFIGAIDEGTSSARFLVFDVLHRKVLASHQIEIKQKYPQEGWVEQDPKEILEAVIECIKKTIEKLKDINITVSDIKAIGITNQRETTLMWDKNTGEPLHNAIVWLDMRTTTTLEDILDSVPNKTRNKNYLKPLCGLPMSPYFSALKIRWLIDNIPRVKHAIDEERCAFGTIDTWLIWNLTKGQLHVTDVSNASRTMLMNIESLKWDPLLCRFFGIPQHILPEIRSSAEVYTTISNPEVLAGVPIAGCVGDQQGALLGQLCLKPGQAKATYGTGCFLLYNTGSIVLDSTQGLITTIAYKIGKNSATYALEGSVAVAGAALSWLRDNIQLFNNITQSQDMAEHVRSSGDVYFVPAFSGLYAPYWQQDARGVICGITEDTQQYHIVRAALEAVCFQTRDILEAMVKDSGTKLTTLQVDGGMTVNNLLMQLQADLTGINVVRPNMVETTALGAAILAGIGVGLIDVNDVDASQVTEFSPSIGEDERDLRYSKWKMAVERSMKWDCSTTLMNN

SEQ ID NO: 101901 - DNA, 1827 bp, Aspergillus nidulans FGSC A4
  CDS (1)..(1827)
atggacccagcaaagatttttgttggttctatcgatcagggaaccaccagcacccgatttctaatctttaatcgcgagggagatcctgtcgcatcacatcaagtcgaattcaagcagatatatcctaacccgggatggcacgagcacgatccgctagagcttgtatcttctgtggaaacctgcatcgaagaagctgttaaacaattcgaaatcaacgggtacgaccaacaatctattaaggcggtgggaattaccaatcagcgagagactacagttgtttgggaccatgaaaccggggagccactttataatgcgattgtctggaccgacacccgctcgcaagctgttgttgatgagcttaaaaagaaacccggagcatcgcaacttcaacagatctgcggtctgccgctctcaacctattcctcttcctctaagctcctctggatgcttacaaatgttcccaaggtcaaagaggcatacgaaaaaggcaccttggccttcggaactgttgatgcctggttggtttaccgactgaacggcggaagcgctgccaatgttttcgtctctgattgtacgaacgcctcacgtacaatgttcatgaacctagagacactgggatacgacgacttcttgctggatttctttggcattaagggccgagtacacctgcccaaaattgttccttcttcagatgtcacagcctacggtgcactctccaacggcaggcttgcgggggttcctatcatgggatgcttgggagatcagtcctcagcccttgtagggcaaaaagggttctcccccggcatggccaagaatacatatggcacaggatgcttcctgctgtacaacgtcggggacaaaccagttatctccaagcacggccttctggcgactatagcgtataatttcgatggacgaccagtatatgcgctcgaaggaagcatagcggttggtggatctggaatcaaattccttcagaataatttagagttcttcagggagtctaaggaagttaacgacttggctttaactgtggaagacaacggcgggtgtgttttcgttaccgcgtttagcggactttacgctccgtattggatcgatgatgcaaagggaactatatttgggatcacccaatatacccagaagggccacattgcccgagcaacactggaagcgacctgcttccaaaccaaggcaattctgaatgccatggagaaagacagcggacacgccctattcgagctcgctgttgatggaggaatgagcaactcggatctcgctatgcagatccaagccgacctcatctccatccccgtttaccgccccaagatgcgcgaaacaaccgccctcggcgccgccattgccgcaggcctagctgtcggtctctggcgcaacttcgccgagctccgcgacatcaaccgtgccgggggtacagtcttccgcccgcagacgagtcaggacataagccgcgagcaattttccctctgggaaaaggcagtgagcatgtgtagagggtgggttggcgataaatcgcacgcaacggagcacagagacactgaggggaagcctactcagaaggtggatctgagtaacggtcataagggggttgttgacgcggcttctgccactgcccctagcaacattgtgtcaccattgttgtcggcgaaaatgaatggggatttggtgctatcaaagggcacgccgtggattaatatctcgggggatttggaggatgctgatgatcaggacttgtttctggagttgaggaagttagagattttacagaggctgaagaggttgggtaaggttaaggttacctacttttga

SEQ ID NO: 101902 - protein, 608 aa, Aspergillus nidulans FGSC A4
MDPAKIFVGSIDQGTTSTRFLIFNREGDPVASHQVEFKQIYPNPGWHEHDPLELVSSVETCIEEAVKQFEINGYDQQSIKAVGITNQRETTVVWDHETGEPLYNAIVWTDTRSQAVVDELKKKPGASQLQQICGLPLSTYSSSSKLLWMLTNVPKVKEAYEKGTLAFGTVDAWLVYRLNGGSAANVFVSDCTNASRTMFMNLETLGYDDFLLDFFGIKGRVHLPKIVPSSDVTAYGALSNGRLAGVPIMGCLGDQSSALVGQKGFSPGMAKNTYGTGCFLLYNVGDKPVISKHGLLATIAYNFDGRPVYALEGSIAVGGSGIKFLQNNLEFFRESKEVNDLALTVEDNGGCVFVTAFSGLYAPYWIDDAKGTIFGITQYTQKGHIARATLEATCFQTKAILNAMEKDSGHALFELAVDGGMSNSDLAMQIQADLISIPVYRPKMRETTALGAAIAAGLAVGLWRNFAELRDINRAGGTVFRPQTSQDISREQFSLWEKAVSMCRGWVGDKSHATEHRDTEGKPTQKVDLSNGHKGVVDAASATAPSNIVSPLLSAKMNGDLVLSKGTPWINISGDLEDADDQDLFLELRKLEILQRLKRLGKVKVTYF

SEQ ID NO: 101903 - DNA, 1704 bp, Aspergillus nidulans FGSC A4
  CDS (1)..(1704)
atgcgcaagaacccttttgacatgtctgagctcgacgccgaaatcgaggccaacgaagagcagcaacaccaagtccgcatccatgcccgccaatcaattgacggcgaacggtcgttgttgcaggatgaggagcgtcggcaagacgacttgaaggatcgtttcattggtgccattgaccagggtactacgagtacgcggttcattattttcgactgcgtgggcaaccccgttgccaaataccaggcggaataccgccaactccacgagcattcaggatggcacgaacaagatccgtatgagatggtagattccgtctacacgtgtattgaagaggccatgaaaacattcctcgcccttggtcattctaagtcagatattgaagcaatcggtctcactagccaacgtgagacagtcctctgctgggattgggaaactggtgaacctctatgtccctcgattgcttggcccgatacccgaacaaaagcccttgttcgagaattgaaagcacaaaaaggcgccgatgaactgaagaacatttgcggtctgccactatccacatatccttcgtctgtctcattggtctggctactccgcaacaacgaggccgtgaaacaggcgtacgaggaaggacgacttgcttttggcactgtcgattcatggctcatctacaacctgaacggtggtctagagggtcgccaccacgtaacggatgtgaccaatgcctctagaaccatgttgatgaacctcgagacgctcgattatgataaacgacttctggacttctttgggttagaccccaagaagatccggctgcccaagattcttccatcctctgaccctgaggggttcggatatgtacggtcaggccccttagaaggagttccgatcactagcgaccttggagatcagtctgcggcgcttgttggccactgtgcgtttactccgggcatggcgaagaatacctatggtactggatgcttcctcctgtacaacgttggcgagaaaccggttatttcgaagcatggcctgctcggtactgtcggatttcaattaggaaagaaccggaagcccgtgtatgcacttgaaggaagtgtggccgtcgctggtagtggtgtttcattcctcatgaacaatatgggctttttccgagactcacgtaaagtgagtgacttggcggcaatggttccagacaacggagggtgtgtcttcgtcacagccttcagtggtctctttgcgccatactggattgatgacgccaagggaacaatttttggaatcacgcaacatacccaacgtggtcacatcgcacgtgcgactatggaggccgcctgcttccaaaccaaagcgattctcgatgccatggagatggacagtgggcactccctctctcagctcgccgtcgacggaggaatgagcaactcggatatctgcatgcagacccaagcagacatcattcaaattcccgtcgaacgaccggccatgcatgagacgacagcgctgggcgcagcaatcgccgccggcttcgccatcgatatctggaaggaatttgatgaacttaaaaacatgaaccgcgccaaccgaacctcattcacccccgcaatctcccgcgaacaaagccagaagatgtataaacagtggacgaaagccgtcgaaatgtctcgcggttgggtggataccaaggagatgggaggtgaggacgactag

SEQ ID NO: 101904 - protein, 567 aa, Aspergillus nidulans FGSC A4
MRKNPFDMSELDAEIEANEEQQHQVRIHARQSIDGERSLLQDEERRQDDLKDRFIGAIDQGTTSTRFIIFDCVGNPVAKYQAEYRQLHEHSGWHEQDPYEMVDSVYTCIEEAMKTFLALGHSKSDIEAIGLTSQRETVLCWDWETGEPLCPSIAWPDTRTKALVRELKAQKGADELKNICGLPLSTYPSSVSLVWLLRNNEAVKQAYEEGRLAFGTVDSWLIYNLNGGLEGRHHVTDVTNASRTMLMNLETLDYDKRLLDFFGLDPKKIRLPKILPSSDPEGFGYVRSGPLEGVPITSDLGDQSAALVGHCAFTPGMAKNTYGTGCFLLYNVGEKPVISKHGLLGTVGFQLGKNRKPVYALEGSVAVAGSGVSFLMNNMGFFRDSRKVSDLAAMVPDNGGCVFVTAFSGLFAPYWIDDAKGTIFGITQHTQRGHIARATMEAACFQTKAILDAMEMDSGHSLSQLAVDGGMSNSDICMQTQADIIQIPVERPAMHETTALGAAIAAGFAIDIWKEFDELKNMNRANRTSFTPAISREQSQKMYKQWTKAVEMSRGWVDTKEMGGEDD

SEQ ID NO: 101905 - DNA, 1896 bp, Candida albicans SC5314
  CDS (1)..(1896): transl_table=12
atgcctcgtcgtgttagtaatgcaccatgtattcctgttgtagctacaattgatattggtactacttcagcaagagctattatattctcggcagaaggagaagaaattgccaagcatcaaattgaatattccaccactgcttcagaggccccagaaaactcgtcaaatacagatcaattcagaagaagatcttctttattaagacatgatgaacccattttctcagctgaaggtattgccattactctcaatgacaatattatgattgagaataataaatcatctgttggtcccaccattagattcccacaaccaggttgggttgaatgtatgccggttcatattttagctaatgccgttcaatgtttagtggcttgtttgatatcattgagaaaagttaaccaagatccaaatttaaaacttaaatataaagtcaaagccattggtattgccaacatgagagaaaccactattgtttggtctagaaaaactgggaaacctttgagtggaggtattacttggaccgatactagaacttcagaaattattcaacatttggaaaaaatgattgatgaagatagaaaagctgaacttaaagagaaaactggtttacccttatctacttatttttctgctgccaaattaagatggttgttggataatgatgatgttattagagaagaatatgaaaaaggtgatggcaatttaatgtttggtactgttgatacttggttgatttatcatttgaccaaagaaaaggcatttgtttcagatatcaccaatgcctctcgtacttatttcatggatttagaaactttagattatgatgatgacttgttagacttttgggggattgatcctacaaaaatcagaatgccgaaaattgtatcttcttcagaattttatggggaatttgccgcaccaaaattggacaatttggggttccataataaaatcactaaagaagcttatgatattttgaaaacaatcactggggtgccaatctgtggttgtcttggtgatcaatctgcttcacttgttggtcaattggcattcagtgctggttctgccaaatgtacttatggtactggtgccttccttttatataatactggacctcataaattgattagtaaacgtggagcattgaccacttttggattttggttcccaactttaaagggtactgatggtaaacctcattatgccatggaagggtctattgctgttgctgggtcgattattcaatggttgagagataacttgaaaatgattgataatgccaaagatataggtccattagcttcacaagtggaaaattctggtggagtggtgtttatcccagcattttctggtctttatgccccatattgggatggtggttctagaggtactattttcggtatgacacaatacacatcggctgcacacattgctcatgctgcattggaaggggtttgttatcaagtaagagctattttgaaagcaatggctagtgatgctggtgctgtagatgatttcttggaggacgcattatcatgtcaaaacaccgataaattattatctacattagctactgatggtggtatgtctaaagctgatgaagttttacaaattcaagcggatattttgggtccttgtgttactgtgaaacgtgcacaaactgctgaatgtactgcattgggtgctgctattgccgctgggttatcattcaagaatgaggaagatcgtatttggaaagatttggatgatgtagtggccaaaattagtggttcaagtgaagatgtggctgctaattcttttactgccaaattatcagatgaaaatagaagaaaagcttggaaacgttgggaaaaagctgtagatagagccaaaggttggttagaagacgaatag

SEQ ID NO: 101906 - protein, 631 aa, Candida albicans SC5314
MPRRVSNAPCIPVVATIDIGTTSARAIIFSAEGEEIAKHQIEYSTTASEAPENSSNTDQFRRRSSLLRHDEPIFSAEGIAITLNDNIMIENNKSSVGPTIRFPQPGWVECMPVHILANAVQCLVACLISLRKVNQDPNLKLKYKVKAIGIANMRETTIVWSRKTGKPLSGGITWTDTRTSEIIQHLEKMIDEDRKAELKEKTGLPLSTYFSAAKLRWLLDNDDVIREEYEKGDGNLMFGTVDTWLIYHLTKEKAFVSDITNASRTYFMDLETLDYDDDLLDFWGIDPTKIRMPKIVSSSEFYGEFAAPKLDNLGFHNKITKEAYDILKTITGVPICGCLGDQSASLVGQLAFSAGSAKCTYGTGAFLLYNTGPHKLISKRGALTTFGFWFPTLKGTDGKPHYAMEGSIAVAGSIIQWLRDNLKMIDNAKDIGPLASQVENSGGVVFIPAFSGLYAPYWDGGSRGTIFGMTQYTSAAHIAHAALEGVCYQVRAILKAMASDAGAVDDFLEDALSCQNTDKLLSTLATDGGMSKADEVLQIQADILGPCVTVKRAQTAECTALGAAIAAGLSFKNEEDRIWKDLDDVVAKISGSSEDVAANSFTAKLSDENRRKAWKRWEKAVDRAKGWLEDE

SEQ ID NO: 101907 - DNA, 2016 bp, Tribolium castaneum
  CDS (1)..(2016)
atgagcaaagccactgatttttccgaaaacgaggatgatcctgcagtttacgaaagttctggctccgagtgggacagcgacaccgagctagaaccggtgaagaaaacaacgcgccgaacgtcttgtagggttagcaaaaagcctcgtctcaagtctgaaacaagtagtgatagtagtgaaatagaagacgacccgaaaccgagaaaaagaaatggagttaacaaaaaacagaaaactgaagttgatcaagaagaaaaagtaatcaacgcgaaggatttttcgactggctcctttgtgattctgaaaaaagatgcacaagtgggtgaccccaaaaaacacccctgcatttggaggatcgatggaaaggctttattacagaaatatgaaccgtttgaagaggagggaagaattagacacaaaacttcatcaattatcagttgttcagaagacaataagccccaaatcatgtaccacaataccagcaaaacaggccctttggtgggcgcgatagatgagggaacctccagtgcaagattcatcctcttcaaagctggaaccacccaagtggtagcttcccaccagaaggaattatcccagatttaccctcaggaagggtgggtggagcagaaccccatggagattttggacgtggtgaacgagtgtatcgaggctacgattgataaattgatcgctctggggggcaccgttaacgatatcgtaagtgtgggggtgacgaatcaaagggagtcaactatagtatgggacaagacaactggtgaacctctttataactcaatagtttggttagacgttcggacgtcgaccaccgtcgaccaactcctcgacaaagttccgaacaaaacaaggaacaagaattatctgaaaccgctgtgtggtctccccatgtcgccttatttcagtgccgttaagctcaaatggctccaagacaacgtacccaaagtgaaaaaggcaatggctgcgaaaaattgcctatttggaactgtggattcgtggctgatttggaacctgacaggaggcaaggatgggggtgtccatgtcactgatgtcagtaatgcttcaaggaccatgcttatgaacatagacacactaaagtgggatccagttcttttgaattttttcgaattaccaacttccattttgccggcgattaagtccagctcggaagtgtatgggaaaatcaaggagggcgctttgcaaaatattccaatttcagggtgtctgggtgaccaacaggctgctctcgtggggcaacaatgtctcgacaggggtcaggctaaggctacttatggcactggctgcttcctgctatacaacacaggcaaagcaaaagtagacagcgctcatggcttgataaccactgtggcttaccaattggggccttcccggcctgccacttacgcccttgagggctcagtggccgtggccggggctgccctaaactggcttcgagacaacttgacaattttaccaactttcggcgaagcccaaagcttagcagaaaaggcagaacttatcgaaagtggagaagtgtattttgttcctgctttcagcggcttgtatgcaccctattggcaacaggacgctagaggaataattgtcggtattacggaagacacaaactctaatcatatcgtgagggccactttggacgctgtttgtttccaaacgagggatattttagaggcgatgaataaagattacggggcgcctctctcacatttaaaagtggatgggggcatgacggccaattctcttctgatgcagctccaagccgatttagcaggaatacctgtcatgaagtcaagtgtggctgaaagtacggccctgggggctgcgatggtggctggggctgcagtcggctgttgggacattgagggggcaccgttggacatcccagcttataaatggacccccagatatagcgagaatgaaagagatgtgaggtacgccaaatggaagatggcgattgagagatccacaggatgggatatttga

SEQ ID NO: 101908 - protein, 671 aa, Tribolium castaneum
MSKATDFSENEDDPAVYESSGSEWDSDTELEPVKKTTRRTSCRVSKKPRLKSETSSDSSEIEDDPKPRKRNGVNKKQKTEVDQEEKVINAKDFSTGSFVILKKDAQVGDPKKHPCIWRIDGKALLQKYEPFEEEGRIRHKTSSIISCSEDNKPQIMYHNTSKTGPLVGAIDEGTSSARFILFKAGTTQVVASHQKELSQIYPQEGWVEQNPMEILDVVNECIEATIDKLIALGGTVNDIVSVGVTNQRESTIVWDKTTGEPLYNSIVWLDVRTSTTVDQLLDKVPNKTRNKNYLKPLCGLPMSPYFSAVKLKWLQDNVPKVKKAMAAKNCLFGTVDSWLIWNLTGGKDGGVHVTDVSNASRTMLMNIDTLKWDPVLLNFFELPTSILPAIKSSSEVYGKIKEGALQNIPISGCLGDQQAALVGQQCLDRGQAKATYGTGCFLLYNTGKAKVDSAHGLITTVAYQLGPSRPATYALEGSVAVAGAALNWLRDNLTILPTFGEAQSLAEKAELIESGEVYFVPAFSGLYAPYWQQDARGIIVGITEDTNSNHIVRATLDAVCFQTRDILEAMNKDYGAPLSHLKVDGGMTANSLLMQLQADLAGIPVMKSSVAESTALGAAMVAGAAVGCWDIEGAPLDIPAYKWTPRYSENERDVRYAKWKMAIERSTGWDI

SEQ ID NO: 101909 - DNA, 1554 bp, Tribolium castaneum
  CDS (1)..(1554)
atggtttcttcagatgaggtgcccctaattggagtgatagacgccggcactaggacagtccagttttgtgtttttcgcagtcagcacactcaggaaatcgcgggacatgccatagatataactcaacatacgcctcaggaagggtggtttgaagaagaccccaatgagattcttcaggcggtgaaaacctgcatgaagaacgttgtgagccagataggagataaagcctgtaaaaacattgtcactatcggaattaccaaccagcgggaaacgacagttgtttgggataaaacaacaggacagcctttatgtaacgcaatcgtttggaacgatatcaggacggactccaccgtcgacataattctagcaaaagtacctgaaaacaataaaaactactttaagccactttgcggacttccaatctcgccgtatttcagcgcgtttaagttgaaatggcttatgcaccacgtgcctgaagtaaagaaagcgataaaggcgaaaaagtgcctttttggcaccgttgacacctggttattatggaacctaacggggggtccaaacggtggactgcacatcacagacgtcacaaacgcctcaagaacattcctaatgaatatagagacttttcactgggatccgctgcttttgcacactttcaaaattccggaagaaatactcccggaaattcggagcagttcggaaatttatggaaaaatttgcggaaaagactttcctctgcaagaagtgccgatttcagggagagtacaatcgagtcatggcttggtcacgaccgttgcgtacaaattcggcgattctccgcctgtttatgccttagaaggtagcgttgctgtggccggttcggccttatcttggctccgagacaatatgggttttttaaaagacgtccaccaagacaccgaacacctcgccaaagaagtgttcaacacgggggatgtttattttgtccctgccttcacgggtctttatgcaccttactggcggaaagatgctagagggataatatgcgggttgactgccttttccacgaagcaacacatcatccgagcggcattagaggcgatctgtttccaaactagggatattttagaagccatgaataaagattgcggtattccattaacgaagttaaacgtggacgggagattaacaagaaacgatttattgatgcagttacaagctgatattagtgggattcccgtaattcgggctcagagtcaggatattacggctttgggagtcgctattgcggctggacaagcaaaagggatcgaggtctgggatttgaatgctgaagaccgtgaggttattcctagtgatacattcctcccaacaaccacagaagatgaaagggactcgaggtacaccaagtggaagatggccgtccagaggtcgctaggttgggccgttccgaagaaaacattcaccatgaccgaggaaagataccgacttttggctagcattccagggagtttatacattatcgggagttttggccttttggccttgtcagaatatctcgcaagagcaagttaa

SEQ ID NO: 101910 - protein, 517 aa, Tribolium castaneum
MVSSDEVPLIGVIDAGTRTVQFCVFRSQHTQEIAGHAIDITQHTPQEGWFEEDPNEILQAVKTCMKNVVSQIGDKACKNIVTIGITNQRETTVVWDKTTGQPLCNAIVWNDIRTDSTVDIILAKVPENNKNYFKPLCGLPISPYFSAFKLKWLMHHVPEVKKAIKAKKCLFGTVDTWLLWNLTGGPNGGLHITDVTNASRTFLMNIETFHWDPLLLHTFKIPEEILPEIRSSSEIYGKICGKDFPLQEVPISGRVQSSHGLVTTVAYKFGDSPPVYALEGSVAVAGSALSWLRDNMGFLKDVHQDTEHLAKEVFNTGDVYFVPAFTGLYAPYWRKDARGIICGLTAFSTKQHIIRAALEAICFQTRDILEAMNKDCGIPLTKLNVDGRLTRNDLLMQLQADISGIPVIRAQSQDITALGVAIAAGQAKGIEVWDLNAEDREVIPSDTFLPTTTEDERDSRYTKWKMAVQRSLGWAVPKKTFTMTEERYRLLASIPGSLYIIGSFGLLALSEYLARAS

SEQ ID NO: 101911 - DNA, 1698 bp, Tribolium castaneum
  CDS (1)..(1698)
atgtcagatgtgatgcgaaagcaagatattacgaaagtcatgtctgatacaagagaaaaatatggcccactaatcggatcaatagatgaaggaacttcaagcacaaggtttttggtctttgcttccaaaacagcagaggtattgacctatcaccaggttaaaatcccacacattactccaaaggagggatggtttgagcaagatcctatgcagattttgaattctgtgatagagaccatcaatgtaacttgtgataacttaaagaaacttaatattaattatgaggatatagtggctacgggtattaccaaccaaagagagaccacaattctttgggaccgcacaactggcaaaccattatataacgctttagtatggatggatatgcgaacttcaagcacagtagacagtattttgttaaatggaaagagaaataagaattttttacaaagtatgtgtggtctccctatcagcacatactttagtgctttaaaaatcaagtggttgatggataacgttgatggggttaagaaagcaatggaggagaaaagatgtctttttggaacggttgacacttggttgatttggaatctaacaggtggtgtaaaaggtggcctacatataactgatgttaccaatgcttcaagaacaatgttgatgaatatagaaacacttaaatgggattcttatttatgtaaagtttttgacattccgatgcacattttgcctgaaattcgaagttcttctgagatatatggctacataactgatgttacagtgttggctggaattccaatttcgggggtgttgggtgatcaacaggcggctttagttggccaaatgtgttttcaccaaggtcaagccaaaaatacatatggcactggctgttttctcttgtataataccggaactacgatggttcagtcaaaccatggtcttttaacaacagttggttataaattaggccctgataaaccaactgtttatgccttggaaggatcaattgctattgcaggcatttcgataaaatggcttcaggacaatttaatgattttgaaagactcgaaagactctggagacattgccgcatctgctgacgaagtgggtgaagtttattttgtgccagcgttctctggtctttatgcaccttattggcgtaaagatgctagaagtgttatatgtggtctgactgaggaaacaaagccagaacatttagtcaaagctgctttagaagcagtctgttaccaagtaagggatattttagaagcaatggcgttagactgtggttactctttatctaaacttctagtagacggtggtatgacagctaatgattttttaatgcaaatgcaagctgattattgtggaattcctgtggtgcggcctactatggctgaaactacttgtttaggggcagctatcgcagctggaaatgcaaaaggggttgaagtgtgggatttggataatatacaacctgtgccaagcgatacattcttaccgtcaatttctgacaatcaacgggatataaaatatgcacggtggaaaatggcaattaatcgaagtttagggtgggcacaggatgaggaagaagacaatagttttgaagatgacaatatgctaacaacactgccaggaggactttacgtacttggaactatggttatgctacttgtggctgaaattctggaaaagaaatag

SEQ ID NO: 101912 - protein, 565 aa, Tribolium castaneum
MSDVMRKQDITKVMSDTREKYGPLIGSIDEGTSSTRFLVFASKTAEVLTYHQVKIPHITPKEGWFEQDPMQILNSVIETINVTCDNLKKLNINYEDIVATGITNQRETTILWDRTTGKPLYNALVWMDMRTSSTVDSILLNGKRNKNFLQSMCGLPISTYFSALKIKWLMDNVDGVKKAMEEKRCLFGTVDTWLIWNLTGGVKGGLHITDVTNASRTMLMNIETLKWDSYLCKVFDIPMHILPEIRSSSEIYGYITDVTVLAGIPISGVLGDQQAALVGQMCFHQGQAKNTYGTGCFLLYNTGTTMVQSNHGLLTTVGYKLGPDKPTVYALEGSIAIAGISIKWLQDNLMILKDSKDSGDIAASADEVGEVYFVPAFSGLYAPYWRKDARSVICGLTEETKPEHLVKAALEAVCYQVRDILEAMALDCGYSLSKLLVDGGMTANDFLMQMQADYCGIPVVRPTMAETTCLGAAIAAGNAKGVEVWDLDNIQPVPSDTFLPSISDNQRDIKYARWKMAINRSLGWAQDEEEDNSFEDDNMLTTLPGGLYVLGTMVMLLVAEILEKK

SEQ ID NO: 101913 - DNA, 1494 bp, Desulfovibrio vulgaris subsp. vulgaris str. Hildenborough
  CDS (1)..(1494): transl_table=11
atgagcaactacgtcctcgccctcgaccagggcaccaccagctcccgcgccatcctcttcacgcgcgaaggtgacatcaagcagatttcgcagaaggaattcacccagatttacccccagccgggctgggtggagcacaacgccaacgagatattcgacacccagtcgtgggtcatgcgcgagtgcctgcaagaggccggcatcggtgccgcggacgtcgtggccgcgggcatcaccaaccagcgtgagacgaccgtggtgtgggacaaggccaccggcgcccccgtctacaacgccatcgtgtggcaagaccgccgcaccgcaggcttctgcgacgaactcaaggcccgcggcctcgccgacgtgttccgcaagaagaccggcctcgtgctcgatgcgtacttctccggcaccaaggtgcgctggatactcgacaacgtgccgggagcccgcgccaaggccgaaaagggcgaattgctgttcggcaccatcgacacatggctcatctggaacctcaccaagggcaaggcgcacgtcaccgactcgtccaacgccagccgtaccctcatgttcaacatcaacacgggcgcgtgggatgacgagcttctgggcatcctcgacgttccgcgctccatgctgccccgcgtgaccggttcgtccgaggtcgtgggtgacatccacccagaattcctcggcaaggccattcccatcgccggcaatgcgggcgaccagcaggccgccacctacggcaacgcctgcctcaagcccggcatggccaagaacacctacggcaccggctgcttcatgctcatgaacaccggcaccgaagtccgttccagccagaacaacctgctgagcaccgtggcatggacgaccccctcgggacgtttctacgccctggaaggcagcgtgttcatcgcaggcgcagtggtacagtggctgcgtgacggtctcggcatcatcaaggccgcccccgaagtggaacaactggccctgagcgtccccgacaacggcggcgtctacctcgtgcccgccttcgcgggactgggtgccccccactgggaccagtacgcccgtggcaccatggtcggcatcacccgcggcgcgacgaaggcccacatcgcacgtgccgcgctcgagtccatcgccttgcagaccctcgacatcatggactgcatgcagaaggactcgggcatcaagctggccgcactgcgcgctgacggcggcgccacccgcaacaacctgctgatgcagttccaggccgacgttctcggcgtgcccgtcgagcgtcccaaggtcactgagaccacggccctcggcgcagcctacctcgcgggtctcgccaccggattctggaagagcgaagacgagatagccaccatgtggcaactcgaccgccgcttcgagcccaacatgtccgacgacaagcgccagcacctcgtctacgaatggcagcgtgccgtagaacgcgccaaggcgtgggtcgaggcatag

SEQ ID NO: 101914 - protein, 497 aa, Desulfovibrio vulgaris subsp. vulgaris str. Hildenborough
MSNYVLALDQGTTSSRAILFTREGDIKQISQKEFTQIYPQPGWVEHNANEIFDTQSWVMRECLQEAGIGAADVVAAGITNQRETTVVWDKATGAPVYNAIVWQDRRTAGFCDELKARGLADVFRKKTGLVLDAYFSGTKVRWILDNVPGARAKAEKGELLFGTIDTWLIWNLTKGKAHVTDSSNASRTLMFNINTGAWDDELLGILDVPRSMLPRVTGSSEVVGDIHPEFLGKAIPIAGNAGDQQAATYGNACLKPGMAKNTYGTGCFMLMNTGTEVRSSQNNLLSTVAWTTPSGRFYALEGSVFIAGAVVQWLRDGLGIIKAAPEVEQLALSVPDNGGVYLVPAFAGLGAPHWDQYARGTMVGITRGATKAHIARAALESIALQTLDIMDCMQKDSGIKLAALRADGGATRNNLLMQFQADVLGVPVERPKVTETTALGAAYLAGLATGFWKSEDEIATMWQLDRRFEPNMSDDKRQHLVYEWQRAVERAKAWVEA

SEQ ID NO: 101915 - DNA, 1512 bp, Erwinia carotovora subsp. atroseptica SCRI1043
  CDS (1)..(1512): transl_table=11
atgaacccggaaaaaaaatacattgtcgcgatcgaccaaggcacaaccagctctcgcgccgtcgtactggatcacgatgcaaatatcgttagcgtttcacagcgtgaattcacccagatttatccaaaagcgggctgggtagagcacgacccgatggaaatttgggcaacacaaagctcaacgctggtcgaagtactagcgaaagccgatatcagtgcggatgaagtcgcgggtattggtatcaccaaccagcgtgaaaccaccgtcgtatgggaaaaagagagcggcaagccgatttataacgccatcgtctggcagtgtcgtcgtaccgctgaaatttgcgagaaactgaagaaagacggtctggaagagtacgttcgcaacaccaccgggctggtggtcgatccctacttctctggcaccaaggtgaaatggattctggatcacgttgaaggctcccgtgagcgcgctaaacgcggcgaattgctatttggtactatcgatacctggctgatttggaaaatgacgcaagggcgtgttcacgtaacggattacaccaacgcctcccgcaccatgctgtttaacattcatacgctagaatgggatacccgcatgctggaagcgctggatatcccgcgcgagatgctgccggaagtacgcggctcttcagaggtctacggccagaccaacatcggcggtaaaggcggcacgcgtattcctatcgccggtatcgcgggtgaccagcaggcggcgctttacggccagctctgcgtcaaccctgggcaggcgaaaaacacctacggcactggctgtttcctactaatgaataccggtaaagaagccgtgcagtccaaacacggtctgctgaccactatcgcctgtggcccgcgcggtgaagtgaactacgcgctggaaggctccgtgttcgttggcggcgcatctatccaatggctgcgtgacgagctgaagctgatcggcgactccatggactccgaatacttcgcgacaaaagtgaaggacaccaacggcgtctatgtcgtccccgctttcactggtttgggagccccctactgggacccgtatgcccgtggcgcgatcttcggtctgacccgtggcgtgaacgctaaccacatcatccgtgcgacgctggaatccatcgccttccagacccgtgacgtgctggatgccatgcaggcagacgcggggacgcgtctgaaatcactgcgtgtcgacggtggcgcagtcgccaacaacttcctgatgcagttccagtccgatatcctcggcacgcgcgtggaacgtccggaagtacgtgaatccaccgcattgggtgccgcgttcttggctggccttgccactggcttctggaacgatctggatgaagtgaagagcaaagcgactattgagcgtgaattccgccccagcatagaaacggtggagcggaacgttcgttacagcggctggcagaaagccgttgctcgtgctcgtaactgggaagatcacgacgcctaa

SEQ ID NO: 101916 - protein, 503 aa, Erwinia carotovora subsp. atroseptica SCRI1043
MNPEKKYIVAIDQGTTSSRAVVLDHDANIVSVSQREFTQIYPKAGWVEHDPMEIWATQSSTLVEVLAKADISADEVAGIGITNQRETTVVWEKESGKPIYNAIVWQCRRTAEICEKLKKDGLEEYVRNTTGLVVDPYFSGTKVKWILDHVEGSRERAKRGELLFGTIDTWLIWKMTQGRVHVTDYTNASRTMLFNIHTLEWDTRMLEALDIPREMLPEVRGSSEVYGQTNIGGKGGTRIPIAGIAGDQQAALYGQLCVNPGQAKNTYGTGCFLLMNTGKEAVQSKHGLLTTIACGPRGEVNYALEGSVFVGGASIQWLRDELKLIGDSMDSEYFATKVKDTNGVYVVPAFTGLGAPYWDPYARGAIFGLTRGVNANHIIRATLESIAFQTRDVLDAMQADAGTRLKSLRVDGGAVANNFLMQFQSDILGTRVERPEVRESTALGAAFLAGLATGFWNDLDEVKSKATIEREFRPSIETVERNVRYSGWQKAVARARNWEDHDA

SEQ ID NO: 101917 - DNA, 1548 bp, Propionibacterium acnes KPA171202
  CDS (1)..(1548): transl_table=11
atgcagataagaaaggcaaccaacatgagcgatgagaagtttgtactcgccattgacgagggcactacttccgcccgtgccatcatctttaaccacgccggccagatcatggccgttggccagcaggagttcgagcagatcttcccgcgtgctggatgggttgagcatgacccgatcgagatctgggaggccgttcgcgacgtcgttgggctcgccctgaccaaggccaacatcaaccgccaccagctggctgctgctggtatcaccaaccagcgcgagaccgcagtggtgtgggacaagaacaccggtgagccggtttataacgccatcgtgtggcaggacacgcgcactcaaaagatctgtaacgaactagctggtgacaagggcgccgaccgctacaaggagatctgtggtctgggcctgtcgacctatttctctggcccgaaggtcaaatggattctcgacaacgttgagggagcccgtgcgagggccgaggccggcgatctgctcttcggtaacatggacacttgggtgctgtggaacctgactggcggtactaacggtggcgtgcacatcaccgatccgaccaacgcgtcccgaaccatgctcatggacgtccgaaagctgcagtgggacgactcgatgtgcgaggtcatggggattccgaagtccatgcttcctgagatcaagtcctcctccgagatctacggctatggtcgcaagaacggcctgctgatcgataccccgatctccggcattcttggcgatcagcaggccgccacttttggccaggcttgcttccaaaagggcatggcgaagaacacgtacggcaccggctgcttcatgctcatgaacacaggtgaggaggccatcttctccgagaacggtctgctgaccaccgtctgctacaagatcggtgaccagcccaccgtctatgccctggaaggttcgattgccgtcgctggatcgctggtacagtggctgcgcgacaacctcaagatgttcgagaccgccccgcaaatcgaagctctcgctaacaccgtcgaggacaatggtggcgcctactttgtgccggccttctctggcctgttcgcgccgtactggcgtccagacgcccgtggtgccctcgtgggcttgacccgctacgtcaaccgtggccacattgcccgcgccgtgctcgagtcaaccgccttccagactcgcgaggttcttgaggctatgaacgccgactccggtgtgccgctgacggagctgcgcgtcgacggtggcatgaccgccaacgaaaccctcatgcagttccaggccgaccaggtcaatgtgccggtggttcgccccgtggtcgccgaaaccaccgctctgggcgccgcctacgccgctggcatcgctgtcggtttctgggaaggcgagaatgacgtcaccgacaactgggccgaggacaagcgctgggaacccaagatggacaagaatgagcgcgaacgtctgttccgcaactggaagaaggctgtcactaagaccttcgactgggtggacgacgacgtcaaggagtga

SEQ ID NO: 101918 - protein, 515 aa, Propionibacterium acnes KPA171202
MQIRKATNMSDEKFVLAIDEGTTSARAIIFNHAGQIMAVGQQEFEQIFPRAGWVEHDPIEIWEAVRDVVGLALTKANINRHQLAAAGITNQRETAVVWDKNTGEPVYNAIVWQDTRTQKICNELAGDKGADRYKEICGLGLSTYFSGPKVKWILDNVEGARARAEAGDLLFGNMDTWVLWNLTGGTNGGVHITDPTNASRTMLMDVRKLQWDDSMCEVMGIPKSMLPEIKSSSEIYGYGRKNGLLIDTPISGILGDQQAATFGQACFQKGMAKNTYGTGCFMLMNTGEEAIFSENGLLTTVCYKIGDQPTVYALEGSIAVAGSLVQWLRDNLKMFETAPQIEALANTVEDNGGAYFVPAFSGLFAPYWRPDARGALVGLTRYVNRGHIARAVLESTAFQTREVLEAMNADSGVPLTELRVDGGMTANETLMQFQADQVNVPVVRPVVAETTALGAAYAAGIAVGFWEGENDVTDNWAEDKRWEPKMDKNERERLFRNWKKAVTKTFDWVDDDVKE

SEQ ID NO: 101919 - DNA, 1503 bp, Thermobifida fusca YX
  CDS (1)..(1503): transl_table=11
gtgaccgaacagtacgtagcggcaattgaccagggcaccacgtcgagtcgctgcatcatcttcaaccgccacggcgacgtggtcgccctcgggcagcgggagcaccgccagatcttcccccgcccgggctgggtcgagcacgacgcggaagagatctgggcgaacgtcgtcgccgtcgtggaggaggcgctcgccgcgggcgggctgcgccgccaccagttggccgcggtcgggatcaccaaccagcgggagacgaccgtggtgtgggaccggcagaccggtcaacccgtccaccacgcgatcgtgtggcaggacacccgcaccgaccgcctgctgcgagtcctgggcgggacggaaggccaggaccggttccggcagcggtgcggactcccgctcgccacctacttctccgggccgaaactgcgctggctgctcgacgaaatccccgggctgcgggagcgggcgcagcgcggcgaagtgctgttcggcaccatggacacctggctggtgtggcagctcaccgggcggcacgtcaccgacgtcaccaatgccagccgtaccatgctgatgaacctgcgcaccctggactgggatgccgaaaccctggacgcgatggggatccccgcagcgatgctcccggagatccggtccagtgcggaggtgtacggcacagccaccggccccttggcgggagtgcccgtggccgcagctctgggcgaccagcatgccgccttgttcgggcagacctgcttcgaccccggcgatgtgaaaggcacctacgggacgggggcgttcctggtgctcaacacgggtaccgagccggtcgtctccaccaacgggctgctcaccacggtgggctaccagatcggcggccagcccgcggtgtacgcgctcgaagggtcgatcgcgatggcgggctcgctcgtgcagtggctccgcgacaacctggggatgatcacgcacgccgcggagatcgaagaactcgcttcgcaggtcgcagacaacggcggctgctacatcgtgcccgcgttctccgggctgttcgcgccgcactggcggagcgacgcccgcggcatcatcgccggcctgacctcctatgtgaccaaagcgcacctggcccgcgcagtgctggaagcgacagcgtggcagacccgcgaagtggtggacgcgatgaacagcgactcagggatcccgctagcctcgctgaaagtggacggcggcatggtcgccaaccggctactgaaccagatcctcgccgacgtgctggacgtggaagtggtgcggcccaaagtggcggagacgacctgcctcggggctgcctacgcggcgggcctcgccgtgggctactggccggacttggacagtctgcgcgccaactggcagcacgacgccacgtggacgccgcagatcgacgcgcaggtgcgggaccgcgaataccgcaactggacgaaagcggtacgccgcaccttcggctgggtggaatccgaggaggacgcgtcctga

SEQ ID NO: 101920 - protein, 500 aa, Thermobifida fusca YX
MTEQYVAAIDQGTTSSRCIIFNRHGDVVALGQREHRQIFPRPGWVEHDAEEIWANVVAVVEEALAAGGLRRHQLAAVGITNQRETTVVWDRQTGQPVHHAIVWQDTRTDRLLRVLGGTEGQDRFRQRCGLPLATYFSGPKLRWLLDEIPGLRERAQRGEVLFGTMDTWLVWQLTGRHVTDVTNASRTMLMNLRTLDWDAETLDAMGIPAAMLPEIRSSAEVYGTATGPLAGVPVAAALGDQHAALFGQTCFDPGDVKGTYGTGAFLVLNTGTEPVVSTNGLLTTVGYQIGGQPAVYALEGSIAMAGSLVQWLRDNLGMITHAAEIEELASQVADNGGCYIVPAFSGLFAPHWRSDARGIIAGLTSYVTKAHLARAVLEATAWQTREVVDAMNSDSGIPLASLKVDGGMVANRLLNQILADVLDVEVVRPKVAETTCLGAAYAAGLAVGYWPDLDSLRANWQHDATWTPQIDAQVRDREYRNWTKAVRRTFGWVESEEDAS

SEQ ID NO: 101921 - DNA, 1503 bp, Carboxydothermus hydrogenoformans Z-2901
  CDS (1)..(1503): transl_table=11
gtgacgaaaaaatatgttttggcgttagaccagggaaccaccagctgccgggcaatcttatttgaccgggacagcaatatcgtgggcgtagcccaaaaagagtttacccagcattatcccaagccgggctgggtggaacatgatccggaagaaatctggagcactcagtacggggttattgccgagttaatggcccgttacaacgtaaaccctgaagaaattgcggctattggtattaccaaccagcgggaaaccacggtagtttgggatagaaataccggaaagcctgtatataatgcgattgtttggcagtgccggagaactgcagggatttgcgatgagttaaaagcaaaaggtttagaagaaaaggttcgttataagaccggtctggttattgatgcatatttctcgggtacaaagattaagtggattttagataatgtcgaaggtgcccgggaaaaagctgaaagaggcgaactgttatttggcaccattgatacctggcttgtctggaaattaaccggcggaaaagtccatgttaccgactactccaatgcttcccggacgatgatttacaatatccgggagcttaaatgggacgaagagcttttagcggagcttgggattccggcctccatgcttccggaagtaaagccttcaagttacgtttacggagaaaccgatcctaacgttttctttggtcatgctattccgatttccggtattgccggagaccagcaggcggccttatttggtcaaacctgctttgaaccgggaatggctaaaaatacctatggtaccggttgctttatgctgatgaacaccggtgacaaagtttatgaatcgaaaaacggtctcttaaccaccattgcctgggggattgacggtaaggtagaatatgccctggaaggaagtatttttattgccggtgcagttatccagtggttaagagatgggctaaaacttattgaaagcgcagccgattcggaatattttgcttctaaagtgcccgataccggtggggtatacatcgttcctgcctttgccggacttggtgctccctactgggatatgcgggcgcggggtacgattgtaggcttaacccggggtactaacaaataccaccttgtgagagctgcattagaatcaatggcctatcaaacccgggatgttttatcagcaatggaagctgactcgggcattaaacttcaggctctcaaagtagatggtggggctgttgccaacaaccttttaatgcagttccaggccgatatcctgggtgttccggtagaacgaccggtaaacattgaaactactgccatgggtgctgcttatttagcaggtttggccgttggtttctgggctgataaacaggagttagtggcaaaatataaagtaagccgccgttttgaaccgactatggatgaacaaaccagggaaaaactctacaaaggctggcagcgggcagtaacccgtgcacgggaatgggaagtagaggagtaa

SEQ ID NO: 101922 - protein, 500 aa, Carboxydothermus hydrogenoformans Z-2901
MTKKYVLALDQGTTSCRAILFDRDSNIVGVAQKEFTQHYPKPGWVEHDPEEIWSTQYGVIAELMARYNVNPEEIAAIGITNQRETTVVWDRNTGKPVYNAIVWQCRRTAGICDELKAKGLEEKVRYKTGLVIDAYFSGTKIKWILDNVEGAREKAERGELLFGTIDTWLVWKLTGGKVHVTDYSNASRTMIYNIRELKWDEELLAELGIPASMLPEVKPSSYVYGETDPNVFFGHAIPISGIAGDQQAALFGQTCFEPGMAKNTYGTGCFMLMNTGDKVYESKNGLLTTIAWGIDGKVEYALEGSIFIAGAVIQWLRDGLKLIESAADSEYFASKVPDTGGVYIVPAFAGLGAPYWDMRARGTIVGLTRGTNKYHLVRAALESMAYQTRDVLSAMEADSGIKLQALKVDGGAVANNLLMQFQADILGVPVERPVNIETTAMGAAYLAGLAVGFWADKQELVAKYKVSRRFEPTMDEQTREKLYKGWQRAVTRAREWEVEE

SEQ ID NO: 101923 - DNA, 1491 bp, Geobacter metallireducens GS-15
  CDS (1)..(1491): transl_table=11
atgagttatatccttgccctggatcagggcactaccagttcccgcgccattgtcttcgacaccaccgcaacgatccgcgccattgcccagcgggagttccgccagatatttccccggcccggctgggtggaacacgacggccgggagatctgggccacccaggtgggcgtggcggccgaagccctgacccgggccggcatctctccccgggaggtacgggccatcggcatcaccaaccagcgcgagacaacgctcctctgggaccgacgaagcggcgagccgctccacaacgccatcgtctggcaggaccgccgcaccgcggaactctgcgaccggctcaaggccgacggcctggaacccctgttccggcagaagaccggcctggtactggatgcctacttttccggcaccaagctggcctggctgctggaggccatacctggcgcccgcagccgcgccgaagcgggggagctggccttcggcacggtggattcctggctggcctggaacctgtcgggaggaaagctccatgtcaccgacgccagcaacgcctcccggacgctcctcttcaacatcactaccctggattgggacgacgagctgttggcgatcctcgggataccccgggcagtgctgccgcgggtggtggattccggcgccgtttacggcgagaccgccggggatatttttgctgcggcgattccccttgccggcatggccggggaccagcaggcggccctcttcgggcaggcctgcggcacggcagggatggccaagaacacctacggcaccggctgcttcctgctgatgcactgtggaacacggccgatagagtcccggcacaacctgctcaccaccgttgcctggcaactgggcggacgggctgaatacgcccttgaggggagcgtgtttgtggccggcgctgcggtgcagtggctccgggacggcctgggcatcatccgctcctccggcgaggtggaggcccttgcggccagcgttccggacagcggcggtgtctgcctggttcccgccttcaccggactcggcgccccccactgggatccctacgcccggggcaccatcgtcggcataacccgcggcaccaccgcggcacacatcgcccgggccaccctggagagcatcgccttccagagcgccgacctcctcaccgccatggaggccgacgccggcatcagcctggccgaattgcgggtcgacggaggcgcaacggccaacgggctcctgatgcagttccaggccgacctcctcggggtgccggtggtgcggccccggatcagcgagaccacggccctgggggctgcctacctggcgggactggcggtggggctctggcgtgaccgtcaggagattgccggccactggcaggtggaccggatcttcgagccggccatgggccgcgagcaggcggcagagctacggggaaggtgggggcgggccgtggagcgggcccgggggtgggcggcgccatga

SEQ ID NO: 101924 - protein, 496 aa, Geobacter metallireducens GS-15
MSYILALDQGTTSSRAIVFDTTATIRAIAQREFRQIFPRPGWVEHDGREIWATQVGVAAEALTRAGISPREVRAIGITNQRETTLLWDRRSGEPLHNAIVWQDRRTAELCDRLKADGLEPLFRQKTGLVLDAYFSGTKLAWLLEAIPGARSRAEAGELAFGTVDSWLAWNLSGGKLHVTDASNASRTLLFNITTLDWDDELLAILGIPRAVLPRVVDSGAVYGETAGDIFAAAIPLAGMAGDQQAALFGQACGTAGMAKNTYGTGCFLLMHCGTRPIESRHNLLTTVAWQLGGRAEYALEGSVFVAGAAVQWLRDGLGIIRSSGEVEALAASVPDSGGVCLVPAFTGLGAPHWDPYARGTIVGITRGTTAAHIARATLESIAFQSADLLTAMEADAGISLAELRVDGGATANGLLMQFQADLLGVPVVRPRISETTALGAAYLAGLAVGLWRDRQEIAGHWQVDRIFEPAMGREQAAELRGRWGRAVERARGWAAP

SEQ ID NO: 101925 - DNA, 1497 bp, Acidobacteria bacterium Ellin345
  CDS (1)..(1497): transl_table=11
gtgcgtttgccatacatccttgctctcgaccaggggaccacgagttcgcgcgccattgtgttcgatcaggatggagtggtgcgttcggtggcgcagcgcgagttcacgcagatctttccgcaagcaggatgggtggagcacgacccggaagaaatttgggcgtcgcagatcagcgtggcagtggaggcgctgagccgggcggaacttcgctcgcgtcacgtggcggcgatcgccattactaaccagcgcgagactgccgtggtgtgggaccgcgaaaccgggaggcccgtttataacgcgattgtttggcaggaccggcggacggccggattctgcgatcagctgaaagccgcggggcacgaggagtttgtgcagcaacgcactgggctgctcattgactcttacttttcggggagcaaggtacggtggattctcgacaacgttccgcaagcaagaagcctggcggagcgcggacggctggcgttcggcaccgtagacagctggctgatctggaagctgacgagcgggaagctacacatcaccgacgtgagcaatgcttcgcgaacgatgctgtttaacattcacacctgccaatgggacgaggaactgctgaggctgctggagattccggcatcgatgctgccggaggtgcggtcgtcgagcgaagtgtatgggacggtgcagacgagcctggggctggaatcgattccgattgcggggattgcgggcgatcagcaggcatcattgtttggacagagatgcacttccccggggatggcgaagaacacgtacgggaccggctgcttcatgctgcagaacacgggcgaacgcgcggtgccgacgtcgaaccggctggtgacgaccgtggcgtggaagattggcgacgttgtggagtatgcgcttgagggcagcgtgttcatcggcggcgcggtagtgcagtggctgcgcgatggattgcggctggtgcggagttctggcgaattccaggagctggcgaattccgtgaaggacaatggtggcgtttacgtggtgccggcgtttgtcggactcggtgcgccgcactgggaccagtatgcgcggggcgggattttcggaattacgcgcgggacaaccgacggacatgtcgcgcgcgcggcgctggagagtattgcgtaccaggtggccgacctgttggacgcgatgcagcgcgataccggtgtgccactgccggagcttcgcgtggatggtggagcggcagcgaacgagacgctgttgcagttccaggcggacattatgggggtgccggtggttcggccgtcggtgacggaaacgaccgcgctgggtgcggcttttctcgcgggcatcgcggtgggattgtggagcgatcctcaggtcatcgcgaagatgccagtggaacaaaaacggttcgagcctcgcatggggagtgcggaagcgctggcgctgcgacaccagtgggagaaggcgctgtcgagggttaagggatgggaagaagcgtag

SEQ ID NO: 101926 - protein, 498 aa, Acidobacteria bacterium Ellin345
MRLPYILALDQGTTSSRAIVFDQDGVVRSVAQREFTQIFPQAGWVEHDPEEIWASQISVAVEALSRAELRSRHVAAIAITNQRETAVVWDRETGRPVYNAIVWQDRRTAGFCDQLKAAGHEEFVQQRTGLLIDSYFSGSKVRWILDNVPQARSLAERGRLAFGTVDSWLIWKLTSGKLHITDVSNASRTMLFNIHTCQWDEELLRLLEIPASMLPEVRSSSEVYGTVQTSLGLESIPIAGIAGDQQASLFGQRCTSPGMAKNTYGTGCFMLQNTGERAVPTSNRLVTTVAWKIGDVVEYALEGSVFIGGAVVQWLRDGLRLVRSSGEFQELANSVKDNGGVYVVPAFVGLGAPHWDQYARGGIFGITRGTTDGHVARAALESIAYQVADLLDAMQRDTGVPLPELRVDGGAAANETLLQFQADIMGVPVVRPSVTETTALGAAFLAGIAVGLWSDPQVIAKMPVEQKRFEPRMGSAEALALRHQWEKALSRVKGWEEA

SEQ ID NO: 101927 - DNA, 1503 bp, Clostridium perfringens ATCC 13124
  CDS (1)..(1503): transl_table=11
atgaaaaaatatatagtagcattagatcaaggaacaacaagctctagagcaataatttttgataaagaacaaaatattattggggtaagccaaaaggaatttaatcaaatttatcctagagaaggatgggttgagcatgatccaatggaaatatgggcaactcaatatagtgtacttcaagaagttatggctaagtgtaatataactcaagaaaatatagcagctattggaataactaaccaaagagaaactacaatagtttgggataaaaatacaggggttccaatatacaatgcaattgtttggcaatgtagaagaactgctgatatatgcgatgagttaaaagaaagagatggacttgtagactatattagagaaaatacaggacttgtacttgatgcatatttttcaggaacaaaaataaaatggatattagacaatgttgaaggtgcaagagaaaaagctgaaaagggtgagcttttatttggtacagtagacagttggcttgtttggaagcttacaaatggaaaagttcatgtaactgattatactaatgcatctagaactatgatatttaacataaagaaccttgaatgggatgaaagaatgttaaaggaactagacattcctagaagtatgttaccagaagtaaaaaattcatctgaaatttacggatatgcaaaccttggagcaaaaggtggaataagagttcctatagctggaatagctggggaccaacaagctgctttatttggacaagctgcttttaataaaggtgacgtaaaaaatacttatggaacaggatgtttcttattaatgaacacaggagaagaacttgttaaaagtaaatcaggacttttaacaacaatagctattggattacacggaaaagttcaatatgctttagaaggatcagtatttgttggaggagctgttatccaatggcttagagatgaattaagaattataagtgattctagtgatactgaatactttgctacaaaggtagaagataatggtggagtatatgttgttcctgccttcgttggattaggagctccttattgggatatgtatgctcgtggaaccatagtaggattaacacgtggaactaatagaaatcatataataagagcagcacttgaatcaattgcatatcaaacaagagatgtgcttgaagctatgataaacgatgttggatatgatataaattgtataaaggtagatggaggagcaagtagaaataatttcttaatgcaattccaatcagatttagttggtaaaaaggtaattaagcctataattacagaaacaacagctttaggagctgcttatcttgcaggattagcagttggttactggagtgataaagaagaaatagctaagttatggtttgcaagtgaagaatttgagccaactatttctgaagagagaagaaataaatatcataagaaatggaaaaaggctgttgaaagatcaaaaggatgggcacttgaagattaa

SEQ ID NO: 101928 - protein, 500 aa, Clostridium perfringens ATCC 13124
MKKYIVALDQGTTSSRAIIFDKEQNIIGVSQKEFNQIYPREGWVEHDPMEIWATQYSVLQEVMAKCNITQENIAAIGITNQRETTIVWDKNTGVPIYNAIVWQCRRTADICDELKERDGLVDYIRENTGLVLDAYFSGTKIKWILDNVEGAREKAEKGELLFGTVDSWLVWKLTNGKVHVTDYTNASRTMIFNIKNLEWDERMLKELDIPRSMLPEVKNSSEIYGYANLGAKGGIRVPIAGIAGDQQAALFGQAAFNKGDVKNTYGTGCFLLMNTGEELVKSKSGLLTTIAIGLHGKVQYALEGSVFVGGAVIQWLRDELRIISDSSDTEYFATKVEDNGGVYVVPAFVGLGAPYWDMYARGTIVGLTRGTNRNHIIRAALESIAYQTRDVLEAMINDVGYDINCIKVDGGASRNNFLMQFQSDLVGKKVIKPIITETTALGAAYLAGLAVGYWSDKEEIAKLWFASEEFEPTISEERRNKYHKKWKKAVERSKGWALED

SEQ ID NO: 101929 - DNA, 1485 bp, Shewanella sp. MR-7
  CDS (1)..(1485): transl_table=11
gtgcagaaaaaatatgtagtggctttagaccaaggcacaaccagctcaagggcgattgtgtttgaccacgatgccaatattgtcagtgtgtcacagcgggagtttacccagctttatccaaatcctggctgggtggagcatgatccaatggagatctgggcgagccaaagttcggtgttaatcgaatccctcgccagagcgggtattcacagcgatgaagtggcggcgattggtattactaatcagcgcgaaaccaccattatctgggaaaaggccacaggcaagcccgtctacaatgccattgtgtggcagtgtcgccgcagctcagaaatctgtgagcaactcaaggcccaaggcttagaagattatgtgcgggagaatacggggctcctgctcgacccttatttttcaggcactaagatcaaatggatcctcgataatgtgccggatgcgcgcgcgaaggccaaacgaggtgaactcttattcggcacggtcgatacttggttgctatggaaactcaccgaaggcaaagtgcatgtgaccgatcccaccaatgccgcccgcacgttgctgtttaatatccacagcctaagttgggacacaacactgctcgaggcgctcgatattcctgcggctatgttgcccgaagtgagaccttcctgcagtgtctatggcacaacccgtattgccggtgagggcagcgaaattcctctcgcggggatcgcgggcgatcaacaggcggcgctctttggccagctttgtgttgagcctggaatggccaaaaacacttatggcacaggctgctttttattaatgaatacaggcaacaaagccgtacgctcatcccatggtttattaaccacagtagcggtaggcgctcaaggtgaagtgaactacgccctcgaaggctctgtatttatgggcggcgcgacgattcaatggctgcgggatgagctgggattgatccgcgatgccagcgacaccgaatattttgcctctaaagtcgcggataccaatggcgtgtatttagtgccagcttttgtcgggcttggcgctccctattgggatcctaatgcccgtggcgcgctgtttgggttaacgcgcggcgccaaccgtaatcatattatccgtgcggcattggagtcgattgcctaccagagtaaggatttgctcgatgccatgattaaggacagcggtgagcggcttaaatcccttaaggtcgatggcggcgcggttgctaatgacttcctcatgcaatttcaagcggatatcaccgacgttgaagtcttaaggccaagcgtgtgtgagaccacagcgcttggcgcggcctttttagctggtcttgcggttgggttttggacctcagtgaccgaacttgagtataaagcctgtatcgacaaacacttcaaacccaatattgatgcgagtcaaagggagcgattatatgtggactggcaggatgctgtagcaagaactcgctcttag

SEQ ID NO: 101930 - protein, 494 aa, Shewanella sp. MR-7
MQKKYVVALDQGTTSSRAIVFDHDANIVSVSQREFTQLYPNPGWVEHDPMEIWASQSSVLIESLARAGIHSDEVAAIGITNQRETTIIWEKATGKPVYNAIVWQCRRSSEICEQLKAQGLEDYVRENTGLLLDPYFSGTKIKWILDNVPDARAKAKRGELLFGTVDTWLLWKLTEGKVHVTDPTNAARTLLFNIHSLSWDTTLLEALDIPAAMLPEVRPSCSVYGTTRIAGEGSEIPLAGIAGDQQAALFGQLCVEPGMAKNTYGTGCFLLMNTGNKAVRSSHGLLTTVAVGAQGEVNYALEGSVFMGGATIQWLRDELGLIRDASDTEYFASKVADTNGVYLVPAFVGLGAPYWDPNARGALFGLTRGANRNHIIRAALESIAYQSKDLLDAMIKDSGERLKSLKVDGGAVANDFLMQFQADITDVEVLRPSVCETTALGAAFLAGLAVGFWTSVTELEYKACIDKHFKPNIDASQRERLYVDWQDAVARTRS

SEQ ID NO: 101931 - DNA, 1485 bp, Solibacter usitatus Ellin6076
  CDS (1)..(1485): transl_table=11
ttgtccaactacatcggcgccatcgaccaaggcaccaccagcacgcgattcatcgtgttcgaccacgggggccggatcgtctccgtcgcccagaaagagcacgagcagatcttcccccagcccggctgggtggagcatgacgccaacgagatctggcgccgcacccgcgaagtaatcgccgaggcgctcgagaagcgcgccctctccgcctccgacctcgccgccatcggcatcaccaaccagcgcgaaaccaccgtggtgtgggaccgccttagcggcgagcccgtgtacaacgccctcgtctggcaggatacgcgcaccgcggccgccgtggccgagctcgcccgtgacggcggcgccgaccgcttccgcgcccagaccggacttccgcttgccacctacttcagcgccctcaagatcggctggatcctcgacaacgtgcccgccgtccgcgcgcgcgccgaagcaggcgacatcctcttcggcaacatcgacaccttcctgctgtggaacctcaccggcggcctgcacctcaccgattgcaccaacgccagccgcactcacctgatgaacctgcagacgctggattgggacgacgagctgctcgctgccttccgcattccccgcgccatgctgccgcgcatcgtctccagcagcgaggtctacggcaacgcaactcttgcctccgtggccggcgtcccgatcgcgggcatcctcggcgaccagcaggcggcactcgtgggccagacctgttttcacgcgggcgaggccaaaaacacgtatggcaccggatgtttcctgctgatgaacaccggaaccaagcccacgccttcgaaacacggcatgttaaccaccgtggcctatcgcttcgccacgcagcccgctgtctatgcgctcgaaggcagcgtcgccatcacgggcgcattggtgcaatgggtccgcgacaatttcggcctgatcgaaaagagcagcgatatcgaagtgctcgcgcgcactgtcaaggataacggcggcgtatacttcgtccccgccttcagcggcctttacgcgccctactggaaggacaacgcgcgcggcgtgatcgccggcctcacgcgctataccaacaaaggccacctggcgcgcgccgtcctcgaagccaccgctttccagacgcgcgaagtagtggaagcgatggagaaggattccgccatcgcgctcgagaccctgcgcaccgatgggggcatggtctctaacgacctgctcatgcagttccagtccgatatactggatcgccccgtggtgcgtcccgcggtgcaggaaaccacggctctcggcgctgcctacgcggccggcctggcggtgggattcttccaggacaccgacgacctgcgcagccggtggagcgtggatcatacctggaagccgcagatggagcccgagcggcggcaggagttgtacagcttttggaagaaggcggttacccggtcgttcgactggctgtag

SEQ ID NO: 101932 - protein, 494 aa, Solibacter usitatus Ellin6076
MSNYIGAIDQGTTSTRFIVFDHGGRIVSVAQKEHEQIFPQPGWVEHDANEIWRRTREVIAEALEKRALSASDLAAIGITNQRETTVVWDRLSGEPVYNALVWQDTRTAAAVAELARDGGADRFRAQTGLPLATYFSALKIGWILDNVPAVRARAEAGDILFGNIDTFLLWNLTGGLHLTDCTNASRTHLMNLQTLDWDDELLAAFRIPRAMLPRIVSSSEVYGNATLASVAGVPIAGILGDQQAALVGQTCFHAGEAKNTYGTGCFLLMNTGTKPTPSKHGMLTTVAYRFATQPAVYALEGSVAITGALVQWVRDNFGLIEKSSDIEVLARTVKDNGGVYFVPAFSGLYAPYWKDNARGVIAGLTRYTNKGHLARAVLEATAFQTREVVEAMEKDSAIALETLRTDGGMVSNDLLMQFQSDILDRPVVRPAVQETTALGAAYAAGLAVGFFQDTDDLRSRWSVDHTWKPQMEPERRQELYSFWKKAVTRSFDWL

SEQ ID NO: 101933 - DNA, 1518 bp, Mycobacterium smegmatis str. MC2 155
  CDS (1)..(1518): transl_table=11
gtggccgatttcgtcgcagcgatcgaccagggcaccacgagcacgcggtgcatgatcttcgaccatgacggcgccgaagtgggccgccaccagctcgaacacgagcagatcctgcccagggcgggctgggtcgagcacaacccggtggagatctgggagcgcaccgcatcggtggtgatgaccgcactcaaccggacgaatctgcaggcctccgacctggccgcgctgggcatcaccaaccagcgcgagacgtcgctggtgtggaaccggcacaccggcaggccctactacaacgcgatcgtgtggcaggacacccgcaccgacagcatcgccgcggcactcgaccgtgacggccgcggtgacgtcatccggcgcaaggccggtctgccgcccgcgacgtacttctcgggcggcaagatccagtggatcctggacaacgtgccgggggtccgcgaggacgccgagaagggcgacgcgatcttcgggaccgccgacagttggctggtgtggaacctcaccggcggtacgcgcggcggcgtgcacgtcaccgacgtcaccaacgccagccgcaccatgctgatgaacctggagaccctcgactgggacgacgaactgttgtcgttcttcgggattccgcgccggatgctgcccgagatcaagccgtcgtcgtatccggagtcgtacggcatcacgcgcgacgacggtccgctggccgggcaggtgccgttgaccggcatcctcggtgaccagcaggccgcgatggtcggccaggtgtgcctggaggccggcgaggccaagaacacctatggcaccggcaatttcctgctgctcaacaccggtgagaagatcgtgcgctcggacaacggtctgctgaccacggtgtgctaccagttcggcgactcgaaaccggtttacgcgcttgagggttcgatcgcggtgaccggatcggccgtgcagtggttgcgcgaccagttgggcatcatcagcggtgcgtcgcagagcgagtcgctggcgcggcaggtcagcgacaacggcggcgtgtacttcgtgcccgccttctccggcctgttcgcgccgtactggcgcagcgacgcgcgcggcgcgatcgtgggcctgtcgcggttcaacaccaacgcgcacctggcgcgtgcgacgctggagtcgatctgctaccagagccgcgacgtggtcgacgccatggaggcggattccggtgtgcaccttgaggttctcaaggtcgacggtgggatcaccgccaacgcgctgtgcatgcagatccaggcggacgtgctcggcgtcgacgtggtcaagcccctggtcgccgagaccaccgcgctcggtgcggcgtacgcggccggtctggcggtgggcttctgggagaacgccgacgacttgcgggccaactggcaggaggacaagcgctggtcaccgcagtggtcagatgagcaacgcgagaagggatacgcgggctggcagaaggccgttcagcgcaccctcgactgggtcgagatcgagtga

SEQ ID NO: 101934 - protein, 505 aa, Mycobacterium smegmatis str. MC2 155
MADFVAAIDQGTTSTRCMIFDHDGAEVGRHQLEHEQILPRAGWVEHNPVEIWERTASVVMTALNRTNLQASDLAALGITNQRETSLVWNRHTGRPYYNAIVWQDTRTDSIAAALDRDGRGDVIRRKAGLPPATYFSGGKIQWILDNVPGVREDAEKGDAIFGTADSWLVWNLTGGTRGGVHVTDVTNASRTMLMNLETLDWDDELLSFFGIPRRMLPEIKPSSYPESYGITRDDGPLAGQVPLTGILGDQQAAMVGQVCLEAGEAKNTYGTGNFLLLNTGEKIVRSDNGLLTTVCYQFGDSKPVYALEGSIAVTGSAVQWLRDQLGIISGASQSESLARQVSDNGGVYFVPAFSGLFAPYWRSDARGAIVGLSRFNTNAHLARATLESICYQSRDVVDAMEADSGVHLEVLKVDGGITANALCMQIQADVLGVDVVKPLVAETTALGAAYAAGLAVGFWENADDLRANWQEDKRWSPQWSDEQREKGYAGWQKAVQRTLDWVEIE

SEQ ID NO: 101935 - DNA, 1533 bp, Mycobacterium sp. KMS
  CDS (1)..(1533): transl_table=11
atgagggagagcgcattggccgagttcgtcgccgccatcgatcaggggaccaccagtacccggtgcatgatcttcgaccacgacggcgccgaggtcggccggcaccagctcgaacacgagcagatcctgcccagggccggctgggtcgaacacaacccggtggagatctgggagcgcaccgcatcggtcctcatgtcggcgctcaaccgcaccgacctctcggccggggacctgtgcgcgctcggtatcaccaaccagcgggagacggcgctggtgtggaaccgtcgcaccgggcggccgtactacaacgcgatcgtgtggcaggacacccgcaccgaccgcatcgccacggcgctcgaccgggacgggcgcggagacgtgatccgccgcaaggccgggttgccgccggcgacgtacttctccgcgggcaaggtgcagtggatcctcgacaacgtcgacggtgtgcgcgaggccgccgacaagggtgacgcgatcttcggcaccgccgacagctgggtggtgtggaacctgaccggcggaccgcgcggcggcgtgcacgtcaccgacgtgaccaacgccagccgcaccatgctgatggatctggagacgctggactgggacgatgaactgttgtcgttcttcgggattccgcgccagatgatgcccgagatcaaaccgtcgtcgtgcccggactgccacggtgtcacccgggaggacggaccgctcggcggtgaggtgccgatcgccggcatcctcggtgaccagcaggccgcgatggtcgggcaggtgtgcctgtcggcgggcgaggccaagaacacctacggcacaggcaatttcctgctgctcaacaccggcgagaagatcgtccgctccgagaacggtctgctcaccacggtctgctaccagttcggtgacgcgaaacccgtttacgcccttgagggttcgatcgcggtgacggggtcggccgtgcaatggctgcgcgatcagctcggcatcatcagcggtgcctcgcagagcgagtcgctggcgcgtcaggtcgaggacaacggcggggtgtacttcgtgccggcgttctccgggctgttcgcaccgtactggcgctcggatgcccgcggcgccatcgtcggcctgtcccggttcaacaccaacgcccacgtcgcgcgggcgacgctggaggcgatctgctaccagagccgcgatgtcgtcgacgcgatggaggccgactcaggtgtgcatctcgaggtgctcaaggtcgacggcggcatcaccgtcaacgatctgtgcatgcagatccaggccgatgtgctcggcgtcgacgtggtccggccggtggtggccgaaaccaccgctctcggtgcaggttacgcggccgggttggcggtcgggttctgggacggcgccgacgatctgcggcgcaactggcaggaggacaagcgctggactccgcagtggagcgacgatcagcgcgccgaggggtacgccggctggcagaaggccgtacagcgcaccctggactgggtcgacgtcgagtga

SEQ ID NO: 101936 - protein, 510 aa, Mycobacterium sp. KMS
MRESALAEFVAAIDQGTTSTRCMIFDHDGAEVGRHQLEHEQILPRAGWVEHNPVEIWERTASVLMSALNRTDLSAGDLCALGITNQRETALVWNRRTGRPYYNAIVWQDTRTDRIATALDRDGRGDVIRRKAGLPPATYFSAGKVQWILDNVDGVREAADKGDAIFGTADSWVVWNLTGGPRGGVHVTDVTNASRTMLMDLETLDWDDELLSFFGIPRQMMPEIKPSSCPDCHGVTREDGPLGGEVPIAGILGDQQAAMVGQVCLSAGEAKNTYGTGNFLLLNTGEKIVRSENGLLTTVCYQFGDAKPVYALEGSIAVTGSAVQWLRDQLGIISGASQSESLARQVEDNGGVYFVPAFSGLFAPYWRSDARGAIVGLSRFNTNAHVARATLEAICYQSRDVVDAMEADSGVHLEVLKVDGGITVNDLCMQIQADVLGVDVVRPVVAETTALGAGYAAGLAVGFWDGADDLRRNWQEDKRWTPQWSDDQRAEGYAGWQKAVQRTLDWVDVE

SEQ ID NO: 101937 - DNA, 1494 bp, Fusobacterium nucleatum subsp. vincentii ATCC 49256
  CDS (1)..(1494): transl_table=11
atgaaatatattgtagcattagatcaaggtacaacaagttcaagagcaattttatttgatgaatctcaaaatataattggagtagctcaaaaagaatttacacaaatatatccaaatgaaggttgggtagaacatgatcctatggaaatatgggctagccaaagtggagttttaagtgaagttattgccagagctggaataagtcaacatgatatcatagccttaggaattacaaaccaaagagaaactacaatagtttgggataagaaaacaggaaagccagtatataatgcaatagtttggcaatgtagaagaactgccaaaatttgtgatgaattgaaaaagatagatggatttagtgattatgtaaaagataacacaggacttttagttgatgcttatttctctggaacaaaaataaaatggattttagataatgtagaaggtgcaagagaaagagcagaaaaaggagaactattatttggaaccgttgatacttggttaatttggcaattaactaatggaaaagtacatgcaacagattatactaatgcttcaagaactatgctttataatataaaagaattaaaatgggatgaaaaaatactaaaaactttaaacattcctaaatcaatgttaccagaagttaaagattcaagtggaacatttggatatgcaaatcttggtggaaaaggtggacatagaataccaatagcaggagttgcaggagatcaacaatctgcattatttggacaagcatgttttgaagaaggagaatctaaaaatacttatggaactggttgtttcttgcttatgaacacaggagaaaaatttgtaaaaagtaacaatggacttatcacaactattgcaataggacttaatggaaaagttcaatatgcacttgaaggaagtgtgtttgtaggtggagctagtgttcaatggttaagagatgaattaaaattaatctctgaatcaagagatactgaatattttgctagaaaagttaaagataatggtggagtttatgtagtaccagcatttgtaggattaggagcaccttattgggatatgtatgcaagaggagctattttaggtttaactcgtggagcaaataaaaatcatattataagagcaactttggaatcaatagcttatcaaacaaaagacgttttaaaagctatggaagaagattcaggaataaaattaaatggtttaaaagttgatggtggagcagcagctaataatttcttaatggaatttcaagcagatatcttaggagaatctgtaaaaagacctactgttttagaaacaacagccttaggagcagcatatcttgcaggacttgcagttggattctgggaaaataaaaatgaaattaaacaaaaatgggtattagataaagaatttacacctaatatgtcaaaagaagaaagagataaaaaatatgctggttggttaaaagctgttgaaagaactaaaaaatgggaagaataa

SEQ ID NO: 101938 - protein, 497 aa, Fusobacterium nucleatum subsp. vincentii ATCC 49256
MKYIVALDQGTTSSRAILFDESQNIIGVAQKEFTQIYPNEGWVEHDPMEIWASQSGVLSEVIARAGISQHDIIALGITNQRETTIVWDKKTGKPVYNAIVWQCRRTAKICDELKKIDGFSDYVKDNTGLLVDAYFSGTKIKWILDNVEGARERAEKGELLFGTVDTWLIWQLTNGKVHATDYTNASRTMLYNIKELKWDEKILKTLNIPKSMLPEVKDSSGTFGYANLGGKGGHRIPIAGVAGDQQSALFGQACFEEGESKNTYGTGCFLLMNTGEKFVKSNNGLITTIAIGLNGKVQYALEGSVFVGGASVQWLRDELKLISESRDTEYFARKVKDNGGVYVVPAFVGLGAPYWDMYARGAILGLTRGANKNHIIRATLESIAYQTKDVLKAMEEDSGIKLNGLKVDGGAAANNFLMEFQADILGESVKRPTVLETTALGAAYLAGLAVGFWENKNEIKQKWVLDKEFTPNMSKEERDKKYAGWLKAVERTKKWEE

SEQ ID NO: 101939 - DNA, 1533 bp, Kineococcus radiotolerans SRS30216
  CDS (1)..(1533): transl_table=11
atggcagacaccaccggaccccagtacgtgggcgccgtcgaccagggaaccacctccagccgcttcatggtcttcgaccacggcggcaacgagatcgcgaagtaccagctcgagcacacccagatcatgcccgagccgggctgggtcgagcacgacccgatcgagatctgggagcgcaccagttccgtcatccagagcggcctgcgccaggccaacctgacggccgaggacctcgccgccctgggcatcaccaaccagcgcgagaccacggtcgtctggaacaggcacacgggccgcccgtactacaacgcgatcgtgtggcaggacacccgcaccgaccgcatcgccgccgcgctggaccgcgacgagcgcggccggacgatccggcagaagaccggcctgcccccggcaccgtacttctccggcggcaagatccagtggatcctggagaacgtccagggcgtgcgcgaggccgcggaggccggcgacgcgatcttcggcaacaccgacgcctggctcatctggaacctcaccggcggcccgcgcggcggcgtccacgtcaccgacgtcaccaacgccagccgcaccatgctcatggacctcgagaccctgcagtgggacgacgagctcctggccatcttcggcatcccccgctcgatgctccccgagatcaagccgtcctcctacaccgcgggctacggcgagaccctggagaccgggccgctgggcgggcgggtcaagctgaccggcatcctcggcgaccagcagtcggccatggtcggccaggtctgcttcgaccccggcatggccaagaacacctacggcaccggcaacttcatgctgctgaacaccggcgaggagctcgtccgctccaaggccgggctgctgaccacggtctgctaccagttcaacgacgagaagccggtctacgccctcgagggctcgatcgccgtgaccggctcggccatccagtggctgcgcgaccagctcggcatcatctccggcgcggcggagtcggagtccctggcccgccaggtgaaggactccggcggctgctacttcgtgcccgcgttctccgggctcttcgccccctactggcgttccgacgcccgcggcgccatcgtcgggctctcgcgctacaacaccaacgcgcacatcgcccgcgccgcgctggaggcgatctgctaccagagccgcgacgtcaccgaggccatgacggccgactccggcgtcgaggtcgaggtcctcaaggtcgacggcggcatcaccgccaaccagctgtgcatgcagctgcaggccgacgtcctcggcgtgcccgtctccaagcccgtcgtggccgagaccaccgcgctcggggcggcctacgcggccggcctggcggtggggttctggaagaacctcgacgagctgcgcgagaactggaacgagggcgcccgctgggagccgacctggaacgaggaccagcgcaaggacggttacgccggctggaagaaggccgtcgagcggacgttgaactgggtggacgtcgactga

SEQ ID NO: 101940 - protein, 510 aa, Kineococcus radiotolerans SRS30216
MADTTGPQYVGAVDQGTTSSRFMVFDHGGNEIAKYQLEHTQIMPEPGWVEHDPIEIWERTSSVIQSGLRQANLTAEDLAALGITNQRETTVVWNRHTGRPYYNAIVWQDTRTDRIAAALDRDERGRTIRQKTGLPPAPYFSGGKIQWILENVQGVREAAEAGDAIFGNTDAWLIWNLTGGPRGGVHVTDVTNASRTMLMDLETLQWDDELLAIFGIPRSMLPEIKPSSYTAGYGETLETGPLGGRVKLTGILGDQQSAMVGQVCFDPGMAKNTYGTGNFMLLNTGEELVRSKAGLLTTVCYQFNDEKPVYALEGSIAVTGSAIQWLRDQLGIISGAAESESLARQVKDSGGCYFVPAFSGLFAPYWRSDARGAIVGLSRYNTNAHIARAALEAICYQSRDVTEAMTADSGVEVEVLKVDGGITANQLCMQLQADVLGVPVSKPVVAETTALGAAYAAGLAVGFWKNLDELRENWNEGARWEPTWNEDQRKDGYAGWKKAVERTLNWVDVD

SEQ ID NO: 101941 - DNA, 1518 bp, Candidatus Desulfococcus oleovorans Hxd3
  CDS (1)..(1518): transl_table=11
atgaccgataaacagtacgtgggcgccattgaccagggcaccaccagcacccgtttcgtggtgtttgacacaaccggcgccatggtggccagccaccaggtggaacaccggcagatttacccggaaccggggttcgtggagcatgaccccatggagattcgggccaacacagccggcatcattgccgaagccctgaaaaaagggctgattgaaccggaccagatcgctgccgtgggcatcaccaaccagcgggaaaccacggtggtgtggaaccggcacaccggcaggcccctttataacgccatagtgtggcaggacacccgcaccgcggacatgtgcaccgcgctaaaacaggagggccacgaaccgctgtttaaggaaaaaaccgggctgccggcagcctcctatttttccggccccaagatcaggtggattcttgataatgtggaaggggcccgggcagcggccgaaaaaggggatgccctgttcggcaacatggacacctggctgatctggtggctcaccggcgggccgggcaagggggtgcatgtcacggacgtgaccaatgccagccgcaccatgctgatgaaccttgaaaccctggcctgggacagcgagcttttaaagatcctcgacattccggaaaagatgctgccccgcatcatggcctccagcgaggtttacggccatgccgcccaaaactggggcctagcaccgggcaccccggtttccggggacctgggggaccagcaggcggccctgttcggccaggtctgctttgagccgggggaagccaaaaacacatacggcaccggctgttttctgctgtccaacaccggccagaaaattattcactcaaaccacggcctgctgaccaccctgggctacaaaattgggaacgagcccccggtctacgcccttgagggatcagtggccgttgccgggtccctggtgcagtggctgcgggacaacctgaacctgatccgcacctcccccgaggttgaagacctggccaaaaccgttgccgacaacggcggcgtctattttgtgccggccttttccggcctgtttgccccacactgggacagctcagcccggggcctgatcatcggcatgacccactacatcaacaaaggccacatcgcccgggcggccctggagtccacggcctttcaggtcaacgagattttcagcgccatggaaaaggattccggcattcccttcaaatccctgaaggtggatggcggcatggcggccaacgacctgctgatgcagttccaggccgacctggtgcgcgttccggtgatccggtccgcggtcctggaatccacagtgctgggcgcggcctatgccgccggcctggccgttggcttctggagcaaaaaggaggacctgcgacgccactggaaggaaaacggccaatggcagccggaaatggcggccgcccttcgggataaaatgtgcgcccagtgggacaaggcgataaaacgggccgccggctggaaggaggaaggatga

SEQ ID NO: 101942 - protein, 505 aa, Candidatus Desulfococcus oleovorans Hxd3
MTDKQYVGAIDQGTTSTRFVVFDTTGAMVASHQVEHRQIYPEPGFVEHDPMEIRANTAGIIAEALKKGLIEPDQIAAVGITNQRETTVVWNRHTGRPLYNAIVWQDTRTADMCTALKQEGHEPLFKEKTGLPAASYFSGPKIRWILDNVEGARAAAEKGDALFGNMDTWLIWWLTGGPGKGVHVTDVTNASRTMLMNLETLAWDSELLKILDIPEKMLPRIMASSEVYGHAAQNWGLAPGTPVSGDLGDQQAALFGQVCFEPGEAKNTYGTGCFLLSNTGQKIIHSNHGLLTTLGYKIGNEPPVYALEGSVAVAGSLVQWLRDNLNLIRTSPEVEDLAKTVADNGGVYFVPAFSGLFAPHWDSSARGLIIGMTHYINKGHIARAALESTAFQVNEIFSAMEKDSGIPFKSLKVDGGMAANDLLMQFQADLVRVPVIRSAVLESTVLGAAYAAGLAVGFWSKKEDLRRHWKENGQWQPEMAAALRDKMCAQWDKAIKRAAGWKEEG

SEQ ID NO: 101943 - DNA, 1551 bp, Pseudomonas putida GB-1
  CDS (1)..(1551): transl_table=11
atgccggcatcacgcccagccctgaaccctttttttgcaaggcctacgaccatgacagacacccaggacaagcactacatcatcgccctggaccagggcaccaccagttcgcgggcgattatcttcgaccgtgatgccaacgtggtgggcacctcccagcgcgagttcgcccagcactacccgcaggcgggctgggtcgagcacgacccgatggagatcttcgccacacagagcgcgaccatggtcgaggccttggcccaggctggtatcagccacgcccaggtcgccgcgctgggcattaccaaccagcgcgaaaccaccgtggtatgggacaaggaaaccgggcgcccggtgtacaacgccattgtctggcagtgccgccgcagcaccgagatctgtgcccagctcaagcgtgacggccatgaagcgtacattcgtgaaaccaccggcctggtcaccgacccgtacttctccggtaccaagctgaagtggatcctcgacaatgtcgaaggcgcccgtgaacgcgccgagcgtggcgaactgttgttcggcaccatcgacacctggctgatctggaagttttcgggtggcaaggtgcacgtcaccgactacaccaacgcctcgcgcacgctgatgttcaacatccacagcctgcagtgggacgacaaactgctggaaatcctgggcatcccgcggcagatgctgcccgaggtgcgcccgtcctcggaagtgtacggccacaccaagagcggcatcgccatcgccggtatcgccggagaccagcagtcggcactgttcggccagatgtgcgtggagccaggccaggccaagaatacctacggcaccggctgcttcctgctgatgaacaccggcgaccaggcggtgaagtcgtcccatggcctgctcaccaccattgcctgcggcccacgcggtgaagtggcctatgcgctggaaggcgcggtattcaacggtggttccaccgtgcaatggctacgtgacgaactgaagatcgtcaacgacgccttggataccgagtacttcgccagcaaggtcaaggacagcaacggcgtctacctggtgccagccttcaccggcctgggtgccccgtactgggacccgtatgcccgtggtgcactgttcggcctgactcgcggcgtgaaggtggaccacatcatccgcgccgcgctggaatcgatcgcctaccagacccgcgacgtgctcgacgccatgcagcaggactgcggccagcacctgtccgagctgcgcgtggacggcggtgcggtggccaacaacttcctcatgcagttccaggcagacatcctcggcacctgcgtggaacggccacagatgcgcgaaaccacggcgctgggcgccgcctacctggcgggcctggcctgtggcttctggagcggcctggacgagctgcgcgacaaggcgatcatcgagcgcgagttcagcccgcagctggacgaaacgcagaaagagaagctgtatgccggctggaagaaggcggtcgagcgaacccgtgactgggaagaccacgaggcataa

SEQ ID NO: 101944 - protein, 516 aa, Pseudomonas putida GB-1
MPASRPALNPFFARPTTMTDTQDKHYIIALDQGTTSSRAIIFDRDANVVGTSQREFAQHYPQAGWVEHDPMEIFATQSATMVEALAQAGISHAQVAALGITNQRETTVVWDKETGRPVYNAIVWQCRRSTEICAQLKRDGHEAYIRETTGLVTDPYFSGTKLKWILDNVEGARERAERGELLFGTIDTWLIWKFSGGKVHVTDYTNASRTLMFNIHSLQWDDKLLEILGIPRQMLPEVRPSSEVYGHTKSGIAIAGIAGDQQSALFGQMCVEPGQAKNTYGTGCFLLMNTGDQAVKSSHGLLTTIACGPRGEVAYALEGAVFNGGSTVQWLRDELKIVNDALDTEYFASKVKDSNGVYLVPAFTGLGAPYWDPYARGALFGLTRGVKVDHIIRAALESIAYQTRDVLDAMQQDCGQHLSELRVDGGAVANNFLMQFQADILGTCVERPQMRETTALGAAYLAGLACGFWSGLDELRDKAIIEREFSPQLDETQKEKLYAGWKKAVERTRDWEDHEA

SEQ ID NO: 101945 - DNA, 1554 bp, Aedes aegypti
  CDS (1)..(1554)
atgtcccacaccaacaagttcggcgacttggttggttccatcgacgagggaaccagctcggcacgattcatcctgttccgggcggaaaccagtgacattgtttgcttccaccaaaaggaactgcgccagatgtacccccaggaaggctgggtcgagcaggatccgaaggagatcctgtccgtggttgaggaatgcatcgagaagaccatcgagaaactgcaggaacttggtggcagcccgaccgacattgtggccgtcggtgtgaccaatcaacgggaaacgaccattgtgtgggacaaaacgacgggagaacccctgtacaatgccatcgtgtggttggatatgcgaacggcttccaccgtcgatcagctgctggaaacggttcccaataagacccggaacaagaactatctgaaaccgttgtgtggattgcccctgtcgccatacttttcggcggtcaagttgcgctggctgatcgacaatgttccaaaggtgaaaacggccatcaagaacggcaactgtctattcgggacggtcgacacatggctgatttggaatctcaccggcggcgtcaatggaggagcacacgttaccgatgtcaccaatgcatcccgtaccatgctgatgaacatcgaaacgctacactacgataggacgttgggcaagttcttcgacattccatttgagatcctgccggagatacggtccagctcggaggtgtacggcaaaatttgtctgaaggccctagaaggagttccgctaagtggatgcctgggagatcagcaagcggctttggtgggacaggagtgccttgttcgaggtaaggccaaggccacctacggaaccgggtgctttttgctgtacaacactggaaatgcgttgattgactcgtcgcatggtttgattacgaccgttgcctatcaaatgggtccggaagctcatccgacgtacgctctggagggatctgtcgctatagcgggcgcggctcttggatggttacgcgacaacatcaacattctgaccagtgccaaagaatccgaagaattggcgttgtcggtggaaaacaatggcgacgtttactttgtacctgccttcagtggcctctacgctccttattggaaccaggaagcacgtggcgttatctgcggaattacggaggatacccaacggggtcacatcgtacgggcgagtctggaagcagtgtgtttccaagttagggacattttggatgccatgaacaaggattgtggaattccgctggtcaaacttaaggttgatggtggaatgaccgccaactcactgttgacccagtggcaggcggacttgattgggctggaagtgcaacggcctgccgtggtggagaccacagctttgggcgcggcaatggctgcgggtcgtgctgtcggctgctgggatgtggagaacgtcagcgtagaaagcaactgtacctctttccggccgaagatcaccgacgatgagcgcgacatgagatacagcaagtggaagatggccgtcgagcgatcgttcggttgggagagtaatgcgatggtgtag

SEQ ID NO: 101946 - protein, 517 aa, Aedes aegypti
MSHTNKFGDLVGSIDEGTSSARFILFRAETSDIVCFHQKELRQMYPQEGWVEQDPKEILSVVEECIEKTIEKLQELGGSPTDIVAVGVTNQRETTIVWDKTTGEPLYNAIVWLDMRTASTVDQLLETVPNKTRNKNYLKPLCGLPLSPYFSAVKLRWLIDNVPKVKTAIKNGNCLFGTVDTWLIWNLTGGVNGGAHVTDVTNASRTMLMNIETLHYDRTLGKFFDIPFEILPEIRSSSEVYGKICLKALEGVPLSGCLGDQQAALVGQECLVRGKAKATYGTGCFLLYNTGNALIDSSHGLITTVAYQMGPEAHPTYALEGSVAIAGAALGWLRDNINILTSAKESEELALSVENNGDVYFVPAFSGLYAPYWNQEARGVICGITEDTQRGHIVRASLEAVCFQVRDILDAMNKDCGIPLVKLKVDGGMTANSLLTQWQADLIGLEVQRPAVVETTALGAAMAAGRAVGCWDVENVSVESNCTSFRPKITDDERDMRYSKWKMAVERSFGWESNAMV

SEQ ID NO: 101947 - DNA, 1590 bp, Oryza sativa subsp
  CDS (1)..(1590)
atggcggaggaggtgtatgtcgcgtcgatcgaccagggcacgacgagcacgcggttcatcgtctacgaccgccacgccaagcccgtcgcgtcgcatcagctcgagttcaagcagcactacccggaggctggatgggttgagcatgatcctatggagattatggagagtgtgaagatatgcatggcgaaggcacttgacaaagctgcagctgatggtcataatatggatgttggactgaaggccattggtattacaaatcagagggaaaccactgttatgtggagcaaatccacaggccttcctctatacaatgccattgtatggatggatgctcgcacaagccccatttgcaggagattggaaagtgatctttctggtggtagaacccactttgtcgagacatgtggattgccaatcagtacctatttcagtgctttgaaggtgttatggttgatcgaaaatgtggatgccgtcaagaatgcagtccgagctggtgatgccttatttggcacaattgacacctggttaatctggaacctcacaggaggcattggcgggacagatcgtgatggaaataaagtatttgggcaccatgtcacagactgctccaatgcatctcgcacaatgcttatgaacctgaaggcacttgactgggacaaaccaacacttgagacgttaggaattcctgctgagatattgcccaaaattatcagtaactcggagagaattggtgtggttgccaatgggtttcccttggcgggcgtccctattgctgggtgcctaggagaccagcatgctgcaatgcttgggcagctgtgccagaaaggtgaagccaaaagcacctacggaactggtgccttcattcttctcaacacaggggaggagcctacccaatcctcccatggtcttcttagcacgattgcttataagcttggcccaagcgcacccactaattatgctctagaaggctccatcgcaattgctggtgccgcagttcagtggttgagagacagccttggaatcattagcacagcagctgatattgaaaagttggctgatactgtgcaggattcaggtggaatatactttgttccagcattcaatgggttgtttgcaccatggtggagggatgatgcaagaggcatatgtataggaatcacacggttcactaacaaggggcacattgctcgagcagtgctcgagagtatgtgctttcaggtgaatgatgtcctcagctccatgcacaaggatgctggggaggcaggagaagtgaagagtgcagaaggggagttcctgctgcgcgttgatggtggtgctactgtcaacaatcttctcatgcagatccaggctgatttattgggtagccctgttgtcagacctgctgacatcgagacaactgcccttggagctgcgtatgcagctggattagctgttggagtctggtcgaaggaacaaattttcgctggtttgcacaaggagaacaccagagtcttccgcccgaaattggatgaggcccacaggaggaagagagcagactcctggtacaaggccgtttcaagatcatttgatttggctgacctttctctttag

SEQ ID NO: 101948 - protein, 529 aa, Oryza sativa subsp
MAEEVYVASIDQGTTSTRFIVYDRHAKPVASHQLEFKQHYPEAGWVEHDPMEIMESVKICMAKALDKAAADGHNMDVGLKAIGITNQRETTVMWSKSTGLPLYNAIVWMDARTSPICRRLESDLSGGRTHFVETCGLPISTYFSALKVLWLIENVDAVKNAVRAGDALFGTIDTWLIWNLTGGIGGTDRDGNKVFGHHVTDCSNASRTMLMNLKALDWDKPTLETLGIPAEILPKIISNSERIGVVANGFPLAGVPIAGCLGDQHAAMLGQLCQKGEAKSTYGTGAFILLNTGEEPTQSSHGLLSTIAYKLGPSAPTNYALEGSIAIAGAAVQWLRDSLGIISTAADIEKLADTVQDSGGIYFVPAFNGLFAPWWRDDARGICIGITRFTNKGHIARAVLESMCFQVNDVLSSMHKDAGEAGEVKSAEGEFLLRVDGGATVNNLLMQIQADLLGSPVVRPADIETTALGAAYAAGLAVGVWSKEQIFAGLHKENTRVFRPKLDEAHRRKRADSWYKAVSRSFDLADLSL

SEQ ID NO: 101949 - DNA, 1653 bp, Phaeosphaeria nodorum
  CDS (1)..(1653)
atggaaaaactctctgcccaggagacgaatccgcaaccgataccaaaggagcaggttgcagacacccaagatggatcacaactcgatgaagaaaagctcaagaacttcttcatcgggtctattgatcaaggaaccacaagtacgcgcttcatcatcttcgacgggttaggcgagcctgtcgcacaacatcagattgaattcacccagaaatatccccagtcaggatggcacgagcacgacccgaaggaaatcatcgcctcggttgaagagtgcatggaacgagcaacttcaatctttgttgacatggagcatgaaatttctgacatcaaggccattggcataaccaatcagcgtgaaaccactgtggtgtgggacactcatacgggcgagccattgtacaatgctattgcttggccagatacgagaaccaagggcttggttcgcgagctcaaagccagggatggtgcggataaactgcaagacatgtgcgggctcccgctttcgacatatccctcatcggtgaagctcatgtggctgcttcaacacgttgatgcggttaaagaggcatacgatgaaggccgcctgtcattcggcacaatcgacacctggatcctgtacaatctcaatggaggaaaggaaagagatcttcacgtgacggacacgacaaacgcctctagaactatgtttatgaatttgcacacggtgcagtacgacgatcaacttctagaattttttgggctggaccaaaagaagctgaaccttccaaaaattgttccctcgtcgtcaccggacgctttcggttccatccagaaaggagagttaaaaggcattcggattgcaggatgcttaggggatcagtcttctgcattggttggccaacaaggcttcacgcctggcgccgcgaaaaacacttatggcaccggttgcttcttgctttataatgttggcgagaagccagtgatatcccatcatggcttgctggctacggttgcatacgattttggcggtaagcgcaagcctgtgtatgcgcttgagggaagtattgctgtcgctgggagtggtgtaaaattcttgatgaacaacatgggcttcataactcactcacacaagatcagtgatctcgcagcaagtgtgcaagacaacggtggatgcgtcttcgtcactgccttctccgggcttttcgccccgtactggattgatgacgccaagggcaccattttcggcatcactcagtttactgagcggggtcatattgctagagcgacccttgaggcgacttgcttccagacgaaggctattcttgacgccatggagaaggacagcggccacaagcttaacatgcttgcggtagacggaggcatgtcgaactcaaatctgtgcatgcagactcaagcaaacattattggtattcccgtcgatcgaccagcaatgcgcgagacaactgcccttggtgctgcaatcgcagctggcttcgccgttgatgtgtggaaagagtttgacgaactaaaagagatcaaccagaaagatcgagtgatctttgaaccaaacattagcagagaggaaggtgcaaaaatgttcaagaagtggggcagagcagtcgaaatgtgcaggggttggctcgacgctgacgagcagaacggcgagttttcatga

SEQ ID NO: 101950 - protein, 550 aa, Phaeosphaeria nodorum
MEKLSAQETNPQPIPKEQVADTQDGSQLDEEKLKNFFIGSIDQGTTSTRFIIFDGLGEPVAQHQIEFTQKYPQSGWHEHDPKEIIASVEECMERATSIFVDMEHEISDIKAIGITNQRETTVVWDTHTGEPLYNAIAWPDTRTKGLVRELKARDGADKLQDMCGLPLSTYPSSVKLMWLLQHVDAVKEAYDEGRLSFGTIDTWILYNLNGGKERDLHVTDTTNASRTMFMNLHTVQYDDQLLEFFGLDQKKLNLPKIVPSSSPDAFGSIQKGELKGIRIAGCLGDQSSALVGQQGFTPGAAKNTYGTGCFLLYNVGEKPVISHHGLLATVAYDFGGKRKPVYALEGSIAVAGSGVKFLMNNMGFITHSHKISDLAASVQDNGGCVFVTAFSGLFAPYWIDDAKGTIFGITQFTERGHIARATLEATCFQTKAILDAMEKDSGHKLNMLAVDGGMSNSNLCMQTQANIIGIPVDRPAMRETTALGAAIAAGFAVDVWKEFDELKEINQKDRVIFEPNISREEGAKMFKKWGRAVEMCRGWLDADEQNGEFS

SEQ ID NO: 101951 - DNA, 1788 bp, Aedes aegypti
  CDS (1)..(1788)
atgaacggaccgtcccgcagcaagttcggcccgctgatcggagtcctaagcgtgggccattccaactgtaaattcctgatttatgcggcgcgaaacgccgaagtgctgacctgccatgatgaaccactggaggtcatttccccgcactcgggctgggtggaattcgacccgggccggatctgggccaaaatccggtgctgcatcgagcgggcggtgcagaatctggaactgctagaaatcgatctgcgggacatggtggccgttggggtgtgcaatcagcgcgaaaccagtgtcctgtgggatcgaattggaggggagccgttatgtaatgccatcggatggtgcgatacgaggacttccggtttagtgggtgggttgctgaccagggtcaaggggaagattaacttcctaaaggcggtttgtgggttgcccttggcgaactgtttcagcgccgggaaggtccgctggatgctggacaatgtctcaggggaggttgagggcaaggaagtgttgttcgggacgctggacagttgggccgtttggaatctgaccggtggaaccaacggaggtattcacgtgacggatgtgaccaatgcctcgaggacgatgctgatgaatctagcggacctgcagtgggatgaccggttgtgccatttcttcaggattccgaaggacattttgccgcagattcggagctgctcggagatttacgggtacatcagcgagggaccattgaggggcattcctatagcaagctgcatgggcgaccagcaagcggcattggtcggtcaaatgtgtctcagcgcaggccagcttacctgtaacgtcgacgaaggatcgtttctcctctttaacacggctcaggaaataatcgactcggacaacgggctcctatcgacggtggccttcaaattgggtccgaaggcgaaaacgttttacgctttggaaggtgccattccccatgcgggaagtactctaagttggttgcacgacaatctccagttacaaagcgattccaatcacaacgggtcgttgacccagagcttcctgggagatccgggagggccctcggctctgctgtcttcggtctgctcgatgagttcatcgtttggggctctccagagcgaggccaacaagttcaaaaacccaaactacgaagtaattctcgttccggccttcagcggttactacacgccttactggcggtacaaagcccggggaatgctgttcggcctgacgctccaaactacggcccagcagatcctgttctccgcctacgaggccatctgcttccaggtgcgcgaagttctggaagcactcaccaaagactgccgaacttggccggccattacgaagctggtggccggtggggatctcagcgagaagccattcctgatgcagatcctggccgacctgtgcggggtgagcatcgagcggccacaaacctccacgccggcctgcctcggaaccatgctggccgccggtttggccatggagattctcaccctggacgagttccgtgcgtgttgcattccgccgaccgatcagtactcgccggccctcaattctagtcatcgagatatgaagttccgtaagtggaaaatcgcagtggatcgctgtctgaacttcgactccgtttcggagacggacctttccaaattccagcaggaggaactggatccggaatactcggtccgttgttcgattcccggagggatctacataatttcctccttcgccctgatcgtactggcgcagattctccaacagagtcgatcggcctcctag

SEQ ID NO: 101952 - protein, 595 aa, Aedes aegypti
MNGPSRSKFGPLIGVLSVGHSNCKFLIYAARNAEVLTCHDEPLEVISPHSGWVEFDPGRIWAKIRCCIERAVQNLELLEIDLRDMVAVGVCNQRETSVLWDRIGGEPLCNAIGWCDTRTSGLVGGLLTRVKGKINFLKAVCGLPLANCFSAGKVRWMLDNVSGEVEGKEVLFGTLDSWAVWNLTGGTNGGIHVTDVTNASRTMLMNLADLQWDDRLCHFFRIPKDILPQIRSCSEIYGYISEGPLRGIPIASCMGDQQAALVGQMCLSAGQLTCNVDEGSFLLFNTAQEIIDSDNGLLSTVAFKLGPKAKTFYALEGAIPHAGSTLSWLHDNLQLQSDSNHNGSLTQSFLGDPGGPSALLSSVCSMSSSFGALQSEANKFKNPNYEVILVPAFSGYYTPYWRYKARGMLFGLTLQTTAQQILFSAYEAICFQVREVLEALTKDCRTWPAITKLVAGGDLSEKPFLMQILADLCGVSIERPQTSTPACLGTMLAAGLAMEILTLDEFRACCIPPTDQYSPALNSSHRDMKFRKWKIAVDRCLNFDSVSETDLSKFQQEELDPEYSVRCSIPGGIYIISSFALIVLAQILQQSRSAS

SEQ ID NO: 101953 - DNA, 1674 bp, Aedes aegypti
  CDS (1)..(1674)
atgggttcgacgcaacgaagcaagctgattgcagtcatcgatgaaggaacgaacagcgcgcgctttgcgatcttcaagctgccccagttcgaggagctatgctcgcaccaggtcagcatcacccagatcatcccgcacgagggctggtccgagcagaaccccgtcgaactgctggaagccgtgcggttgtgtgccgtcgaagcatgccacaaactggaaaccctcggttatctggtgagcgatatcgcctccatcggtatcactaatcagcgcgagacgaccgttgcgtgggacaaatatactggcgatccgctctacaatgcaatcgtttggaacgacatccgcacaaactccacggtggacaaagtgttggcccgaatcccggaccagaatcacaaccacttccggcagatttccggtctgcccatctcgccatacttctccgccctgaagctctgttggttgaaggagaatgtcccggccgtgcggagggcctgtcgggagaagcgttgctacgccggaaccatcgacacctggttgatttggaacctaaccggcgccgccaacgggggtgtattcgtaacggatgtcaccaacgcctcgcgaacgctcctcatgaacatcgagacgctcttctgggatccgatactgatcaagacgttcaacctgcacgtggacatgctgccggaaattcgcagctcgtcggagatctacggccacatcaagtatgggagcatcctggacgggatcccggtgagtgccatcctcggcaaccagcaggccagtttgatagggcagcggtgcattcgggagggtcaggcgaagaacacctaccggaaggggtgcttcctgctgtataacaccggaaccaggtgcgtacattccacacacggactggtgacgacgctagcgtacaagatgggacaggacaagccggcggtttacgcgctggaagggtcgattgctgtcgccggcgtggccatgaagtggcttcgtgataacctcgggctgctgaaggacattccagtcgattcggagcagattgccggcagcgtgttctcaaccggcgatgtctactttgtacctgccttcacgggcctgttcgcgccctactggaggaaagatgctcgaggaataatttgcggtctgaccagtttcaccaccaagcatcacatcattcgggccgcgctggaagccgtctgcttccagacacgtgatattatcgaagcaatgaagaaagactgcgggatcaacctgaccaaactgcacgcggacggtgtcatgaccaacaacacactactgatgcaacttcaggccgatctcgttgggataccagtcttgaaaacggaagtgagcgatcctgcgacactcggaacggcgatggcggcagcgcaggccaagggaatcgaactctacaacatggataacgataatcgtgactacactctccacatcacccacgaaacattcctgcccacaacgacggaggaggaacgcaacgcccggtacaccaagtggaaaatggccgtccagcgcagcttgggctgggccgtcaccaagaagagtgatgccatgacagacgaacgctactccatgctggcgtcgattccggccggactgttcctgttgagttcgttcgtgatgctggtggtctcgcaagccaaacgaagctga

SEQ ID NO: 101954 - protein, 557 aa, Aedes aegypti
MGSTQRSKLIAVIDEGTNSARFAIFKLPQFEELCSHQVSITQIIPHEGWSEQNPVELLEAVRLCAVEACHKLETLGYLVSDIASIGITNQRETTVAWDKYTGDPLYNAIVWNDIRTNSTVDKVLARIPDQNHNHFRQISGLPISPYFSALKLCWLKENVPAVRRACREKRCYAGTIDTWLIWNLTGAANGGVFVTDVTNASRTLLMNIETLFWDPILIKTFNLHVDMLPEIRSSSEIYGHIKYGSILDGIPVSAILGNQQASLIGQRCIREGQAKNTYRKGCFLLYNTGTRCVHSTHGLVTTLAYKMGQDKPAVYALEGSIAVAGVAMKWLRDNLGLLKDIPVDSEQIAGSVFSTGDVYFVPAFTGLFAPYWRKDARGIICGLTSFTTKHHIIRAALEAVCFQTRDIIEAMKKDCGINLTKLHADGVMTNNTLLMQLQADLVGIPVLKTEVSDPATLGTAMAAAQAKGIELYNMDNDNRDYTLHITHETFLPTTTEEERNARYTKWKMAVQRSLGWAVTKKSDAMTDERYSMLASIPAGLFLLSSFVMLVVSQAKRS

SEQ ID NO: 101955 - DNA, 1560 bp, Medicago truncatula
  CDS (1)..(1560)
atgtctaaagaagatgttttcattggtgcaattgaccaaggaacaagcagtagcaggttcataatatatgataaatcagctcaaccaattggatctcatcaggttgaattcactcagttctatccacaagcaggatgggtggagcataatccaatggagatattggagagcgtgaaggtttgtattactaaggcagtggataaggcaacagctaacgggttcaacgtggacaaaggattgaaggctattggtctcaccaatcaaagagagaccactcttgtttggagcaaatccaccggcgctcctcttcacaatgcgcttgtttggatggatgttcgtactacctctgtttgcaggagactggaaaaagagttatctggtggtagaacacactttgtagagagctgtggtttgcctattagcacatatttcagtgctatgaaacttctgtggttgatggaaaatgtggatgctgtcaaggaagctattaagaaaaaagatgcattgtttggaacaatagacacttggttgatttggaacttaaccggtggagtgaaaggaggattgcacgtcactgatgcttcaaatgcatcccgaacaatgttgatgaacctaaaaaccctcaactgggatgaatctaccttgaaagcacttcaaatcccagctgaaattttgcctaaaattatcagtaattcagaaattataggcaatgtttcttctggatggccagttgctggtatccctatcgctggatgtttaggtgatcaacatgcagcaatgcttggacaagcgtgccgtaaaggggaggctaaaagtacttatggtactggtgctttcattctattgaataccggtgaaggagtagttaaatcaaaccatggtcttctgtcaactatagcttataagcttggtccgaatgctccaaccaattatgcactcgaaggttctgttgctattgctggagctgcggtgcagtggcttagagatggtcttggtctcattacaactgctaaagatatagaggctctggcattagaggtagaatccaatggtggtgtttactttgttcctgccttcaatggattgtttgctccgtggtggcgtgatgatgctcgtggggtttgtatcggaataacaaggtatactagcaaggctcacattgctagagccgtgcttgagagcatatgttttcaagtaaaagatgttattgattcaatgcacaaagattctggagcagatcaatccaagaaagatgagtttttgcttagggttgatggtggtgcaactgttaacaacctgttaatgcagactcaggcggatttgttggcaacttcagtaattagaccagctgacattgaaacaacagcacttggagcagcctatgcagctggattagctgttgggatttggaaagaagatttcgttttcgattcgaaggacttgctgaagaatgctagtgttttccgtcctctaatggttgaagaaattaggaaaaagaaagtagattcttggggcaaagctgttagtagatcttttgacttagcagatctttctctttga

SEQ ID NO: 101956 - protein, 519 aa, Medicago truncatula
MSKEDVFIGAIDQGTSSSRFIIYDKSAQPIGSHQVEFTQFYPQAGWVEHNPMEILESVKVCITKAVDKATANGFNVDKGLKAIGLTNQRETTLVWSKSTGAPLHNALVWMDVRTTSVCRRLEKELSGGRTHFVESCGLPISTYFSAMKLLWLMENVDAVKEAIKKKDALFGTIDTWLIWNLTGGVKGGLHVTDASNASRTMLMNLKTLNWDESTLKALQIPAEILPKIISNSEIIGNVSSGWPVAGIPIAGCLGDQHAAMLGQACRKGEAKSTYGTGAFILLNTGEGVVKSNHGLLSTIAYKLGPNAPTNYALEGSVAIAGAAVQWLRDGLGLITTAKDIEALALEVESNGGVYFVPAFNGLFAPWWRDDARGVCIGITRYTSKAHIARAVLESICFQVKDVIDSMHKDSGADQSKKDEFLLRVDGGATVNNLLMQTQADLLATSVIRPADIETTALGAAYAAGLAVGIWKEDFVFDSKDLLKNASVFRPLMVEEIRKKKVDSWGKAVSRSFDLADLSL

SEQ ID NO: 101957 - DNA, 1698 bp, Aspergillus oryzae
  CDS (1)..(1698)
atgaggaacccttttgatatgtccgacctcgactctcttgtcgatgagcaagaggagcagccgtatattgacattcacgcctaccaaacacatgacggcaatcgctctctcctgcagccgaatgaaaaccgtcatggcgacagcttgaaggatcggtttattggtgccattgacactggcaccacgagctcccgctttatcatctttgactgtactggtgtccccgtcgccaagtaccaaatggaattccgtcagatccacgagcattcaggatggcacgaacaagacccgttcgacttggtggattcggtttacacatgtatcgaggaggcgatgaagtctttcatggctcttggccactcaccgtcagagatcgaagccatcggggtcaccagtcagcgagagacaacgcttgtttgggattgggagactggcgagccgttgcataacgctatcgcgtggcccgacaccaggaccaagggtctagttcgggagctgaaggcccaacccggagcggatgagttgaagaacatctgcgggtttcccctctcgacttacccctcctccgtcaccttagtatggatgcttcggaatctaccggaagtcaagaaggcatatgatgaaggaaggctcgctttcggcactgttgacacgtggctcatgtataacctgaatggtggtcctgagggaaacgtcttggtgactgatgtgacgaacgcatcaagaacgatgttcatgaacctgaaaacgcttgattatgacgataatttgttagagttcttcggcattgacaggaagaagatcagacttcctaaaattctcccatcatccgacccggacggatatggatgggtcagagggggaccgcttgatggtgttccgatcaccagctgccttggcgatcagtctgcggcgttagtcggtcattgtgccttcacacctggaacagcgaagaacacatatggcacaggatgcttccttctttacaacgttggcgaggagcccgtaatttccaagcatggcttgctcagcacagttggattccagctgggtaagcatcggaaagccgtttacgcgcttgaaggtagtgtggctgttgccggaagtggtgtttccttcctgatgaacaacatgggtttcttccgtgattcgcggaaagtaagtgaagtggcagcaacggttccagacagcggaggctgtgtgtttgtcaccgcgttcagtggtctgtttgcaccttattggattgatgatgctaagggaactatattcggaataactcagcacacgcagcgtggacacattgctcgtgccaccatggaagctgcctgcttccaaactaaggcaatcctcgatgccatggagatggatagcggacacgcattgtcggaactcgccgtcgatggtggtatgagtaattccgatatttgcatgcagacccaggcagatattatccagatccctgttgaacggccagcgatgcacgagactaccgctctaggtgctgcaatcgcggcggcattcgccattgatatctggaaggactttagcgagctcaagaacatgaaccgcgccaatcgcacaacattccaaccccatatctccgccgcgcagagctctaagttgtataagcgatggagcaaggcagtcgagatgtctcgaggctggacagatcccgctgaagaggcagaggaggaatga

SEQ ID NO: 101958 - protein, 565 aa, Aspergillus oryzae
MRNPFDMSDLDSLVDEQEEQPYIDIHAYQTHDGNRSLLQPNENRHGDSLKDRFIGAIDTGTTSSRFIIFDCTGVPVAKYQMEFRQIHEHSGWHEQDPFDLVDSVYTCIEEAMKSFMALGHSPSEIEAIGVTSQRETTLVWDWETGEPLHNAIAWPDTRTKGLVRELKAQPGADELKNICGFPLSTYPSSVTLVWMLRNLPEVKKAYDEGRLAFGTVDTWLMYNLNGGPEGNVLVTDVTNASRTMFMNLKTLDYDDNLLEFFGIDRKKIRLPKILPSSDPDGYGWVRGGPLDGVPITSCLGDQSAALVGHCAFTPGTAKNTYGTGCFLLYNVGEEPVISKHGLLSTVGFQLGKHRKAVYALEGSVAVAGSGVSFLMNNMGFFRDSRKVSEVAATVPDSGGCVFVTAFSGLFAPYWIDDAKGTIFGITQHTQRGHIARATMEAACFQTKAILDAMEMDSGHALSELAVDGGMSNSDICMQTQADIIQIPVERPAMHETTALGAAIAAAFAIDIWKDFSELKNMNRANRTTFQPHISAAQSSKLYKRWSKAVEMSRGWTDPAEEAEEE

SEQ ID NO: 101959 - DNA, 1542 bp, Aspergillus oryzae
  CDS (1)..(1542)
atgcagccatcagagatcttcgtgggttcgattgaccagggtacgaccagtaccaggtttctgatcttcaatcgcgaaggggaaccggtggcctcgcatcaagtcgaattcccacagatctatccaaaatcagggtggcatgagcataacccacttgaccttgtgtcttccgttgaaacatgcgttgaacaagcagttaaacagtttgaatccactggatattctcgcaatgatatcaaagctgttgggattaccaaccagagagaaactaccgtcgtttgggattatgaaactggcgagccattgtgcaatgccatcgtatggacggacactcgatcacaagcgattgtcaaagacttgaaggagaaaccaggggcttcacgattacagcaaatctgtggcctcccattgtcaacctattcatcctcgtctaagctgctatggatgctcacgaacgtccccagggtcaaggatgcttatgagcgaggtacactagcttttggtacagtcgacacatggctcgtgtatcgtttgaacggtggccaccaagcaaatgtgtttgtttcggaccctaccaatgcgtcacggactatgttcatgaacctagaaactctagagtacgacaactcgctcttggacttctttgatattcgaggaagagttcatctaccaaagattgttccatcctccgataccaaagcctatggagctatctcagatggaatcctcgctggcgtccctatcatgggttgtcttggcgatcaatcctcggcacttgtaggtcaaaaagggttctcaccaggaatggcaaagaacacatacggcacagggtgtttcctcctttacaatgttggcgaaaagcctgttatttccaaacacggattattggccacagtagcctatcattttgatggaaaaccagtgtacgctctggagggaagcatcgctgttggtggctcgggagtcaagttcctgcagaacaatctcgagttcttcaaggaatccaaagaagttaacgatttggccctcacggtggaggataacggaggatgcgtttttgttactgcgttcagtggtctctttgcaccttattggattgacgacgccaaaggaaccatcttcggaattacacagtacacgaaaaaaggccacatcgccagggccacacttgaagcgacctgcttccaaacgaaggcaattttggacgcgatggaaaaagacagcggccacgcgctgtctgagctggcagttgacggaggaatgagtaactctgatcttgcaatgcagacccaagcagacctgatctccattccggtctatcgccctaagatgcgagagacgaccgcgttaggtgccgccattgctgccggtctggcggttgggctttggcgaaattttgccgaactgcgcgatatcaaccgtgctggtggtgcggtctttgaacctaggattagccgtcagcaaagtgccgagtcatttgctctctgggaaaaggcagtcgaatcagatgtctcgagcgagaccacagctctccatccgtga

SEQ ID NO: 101960 - protein, 513 aa, Aspergillus oryzae
MQPSEIFVGSIDQGTTSTRFLIFNREGEPVASHQVEFPQIYPKSGWHEHNPLDLVSSVETCVEQAVKQFESTGYSRNDIKAVGITNQRETTVVWDYETGEPLCNAIVWTDTRSQAIVKDLKEKPGASRLQQICGLPLSTYSSSSKLLWMLTNVPRVKDAYERGTLAFGTVDTWLVYRLNGGHQANVFVSDPTNASRTMFMNLETLEYDNSLLDFFDIRGRVHLPKIVPSSDTKAYGAISDGILAGVPIMGCLGDQSSALVGQKGFSPGMAKNTYGTGCFLLYNVGEKPVISKHGLLATVAYHFDGKPVYALEGSIAVGGSGVKFLQNNLEFFKESKEVNDLALTVEDNGGCVFVTAFSGLFAPYWIDDAKGTIFGITQYTKKGHIARATLEATCFQTKAILDAMEKDSGHALSELAVDGGMSNSDLAMQTQADLISIPVYRPKMRETTALGAAIAAGLAVGLWRNFAELRDINRAGGAVFEPRISRQQSAESFALWEKAVESDVSSETTALHP

SEQ ID NO: 101961 - DNA, 1596 bp, Pandanus amaryllifolius
  CDS (1)..(1596)
atggcgggcaggaaggaggtgttcgtggcggcgatcgaccaggggacgacgagcacgcggttcatcatctacgaccaggatgcgaaggccgtcgcctcccaccaggttgagttcactcagttctaccccgaggccgggtgggtggagcacaacccgatggagatcctggagagcgtgcgggtgtgcatggccaaggcgctggacaaggccacggccgacgggtacaacgtggacggcgggctcagggccatcgggctcaccaaccagagagagaccacggtggcgtggagcaagtccacgggtcttcccctctacaacgccatcgtctggatggacgtccgcaccagctctatctgcaggagattggagaaagagttgtcagggggaagaacccactttgtagagacctgtggcctgcccatcagcacctatttcagtgccctcaagatcctgtggttgatggagaacattagtgctgtcaaagaagccattaagttgggggatgccctgttcggcaccgtcgacacttggctgatatggaacctcactgggggttgttgcggtgtggaccgggagcagaacactgtccatggacttcatatcacggactgttcaaatgcttccaggaccatgcttatgaacctgaagacacttgattgggatcaccccacattagaaaccttgggtattcccatagaaatcttgcctaagatcattagcaattcggagaccattggtgtaattgccaatgggtggcccctatctggtattcctattgccggttgccttggggatcagcatgctgcaatgctaggccagttatgcaggaagggggaagccaagagtacctatgggacgggtgccttcattcttcttaacacaggtgaggaggtcatccagtcatctcatgggctgctcagcacacttgcttacaagttaggcccgcatgcacagacaaattatgcacttgaagggtccactgctattgctggtgcagctgttcagtggctgagggatggccttggtatcatacggtctgcagctgagattgaagaattggcagagggtgtagagaacactggaggagtgtactttgtgccagcattcaatgggctgtttgcaccttggtggcgtgaggatgcacggggggtgtgtttgggtatcacgaggttcacaaacaaggggcacatcgctcgagcagtgctagagagcatgtgcttccaggtgaaagatgtgctcaactcaatgcacaaggatgttggtgatgttggggaggcgaagaacaaggaaggcgagtttttgcttcgtgttgatgggggtgccactgttaacaatcttctgatgcagattcaggctgatctgttgggtagtccagttgtgagacctgccgacattgagactacagcccttggtgcagcatatgcagctggattagctaccggagtttggactgcagaacaaatatttgcttctgggcacatagagaaggctactgtgttccgtccaaaattggatgaggagaagaggaaaaagaggactgagtcttggtgcaaggctgtgtctagaacttttgatttggcagacctatcactttga

SEQ ID NO: 101962 - protein, 531 aa, Pandanus amaryllifolius
MAGRKEVFVAAIDQGTTSTRFIIYDQDAKAVASHQVEFTQFYPEAGWVEHNPMEILESVRVCMAKALDKATADGYNVDGGLRAIGLTNQRETTVAWSKSTGLPLYNAIVWMDVRTSSICRRLEKELSGGRTHFVETCGLPISTYFSALKILWLMENISAVKEAIKLGDALFGTVDTWLIWNLTGGCCGVDREQNTVHGLHITDCSNASRTMLMNLKTLDWDHPTLETLGIPIEILPKIISNSETIGVIANGWPLSGIPIAGCLGDQHAAMLGQLCRKGEAKSTYGTGAFILLNTGEEVIQSSHGLLSTLAYKLGPHAQTNYALEGSTAIAGAAVQWLRDGLGIIRSAAEIEELAEGVENTGGVYFVPAFNGLFAPWWREDARGVCLGITRFTNKGHIARAVLESMCFQVKDVLNSMHKDVGDVGEAKNKEGEFLLRVDGGATVNNLLMQIQADLLGSPVVRPADIETTALGAAYAAGLATGVWTAEQIFASGHIEKATVFRPKLDEEKRKKRTESWCKAVSRTFDLADLSL

SEQ ID NO: 101963 - DNA, 1560 bp, Glycine max
  CDS (1)..(1560)
atggcaaatgaagatgtgtttgttggcgcgatcgaccaaggaacgagcagcagcaggttcataatatacgacgcgaagactggagtagtaggatgccaccacgtggagttcacccagttctacccgcaagccgggtgggtggagcatgaccccatggagatcttggagagtgtgaaggtgtgcgtggccaaggccgtcgataaggccaccgctgatggcttcaacgtcgataaaggcttgaaggccattggtctcaccaatcagagagagaccactctcctctggagcaaatccaccggcctccctcttcacaacgccattgtttggatggatgctcgcacttcttccatttgcaggagattggaaaaggagttatctggcggtagaaaccattttgtggagagttgtggcttgcctattagcacatacttcagtgctttgaagctgctgtggttgatggaaaatgtagatgccgtaaaggaggccataaagaaaaaggatgcgctgtttggaactattgacacttggttgatatggaatctaactggtggggtgaatgggggattgcatgttaccgatgtttcaaatgcatctcgtacaatgctcatgaatctaaaaacccttgactgggatgcatctaccttaaaaacccttaatattcctgctgaaattttgcctaatattgttagtaatgccgaaattataggagaggttgggtctggatggccaattgctggtgtccctattgctggatgtttaggggatcaacatgctgcaatgttaggacaatcatgccgtaaaggggaggctaagagcacttatggcacaggtgctttcatactactaaatactggtgaagggataattcaatcgaagcacggtcttttatccactatagctttcaagcttggcccaaaagctccaaccaattatgcattggaaggatcagttgctattgctggagctgcagtgcagtggcttagagacggtcttggcatcatttctagtgctgcagagatagaggagatggcattacaggttgaatccactggtggggtttactttgttcctgcttttaatggattgtttgccccatggtggcgtgaggatgctcgcggggtttgtattggaataacaaggtttacaagcaagggtcacattgcccgagctgtgcttgagagcatgtgtttccaagtgaaagatgtcttggattcaatgcataaagattcaggagaaagtgaatcccaaaaaacagagtttttgcttagagtggatggtggggcaactgtaaacaacctgctgatgcagattcaggcagatttggtgggatgtccagtaattagacctgctgacatagagacaacagcacttggagcagcctatgctgccggattagctactgggatttggaaagaagattttattttcaatactgaggagaagttgaagaatgctagagttttccgtcctgtaatgactgaggaagtaaggaaaaagaaagttgactcttggtgcaaagctgttagtaaaactttcgacttagctgatcttgctatttaa

SEQ ID NO: 101964 - protein, 519 aa, Glycine max
MANEDVFVGAIDQGTSSSRFIIYDAKTGVVGCHHVEFTQFYPQAGWVEHDPMEILESVKVCVAKAVDKATADGFNVDKGLKAIGLTNQRETTLLWSKSTGLPLHNAIVWMDARTSSICRRLEKELSGGRNHFVESCGLPISTYFSALKLLWLMENVDAVKEAIKKKDALFGTIDTWLIWNLTGGVNGGLHVTDVSNASRTMLMNLKTLDWDASTLKTLNIPAEILPNIVSNAEIIGEVGSGWPIAGVPIAGCLGDQHAAMLGQSCRKGEAKSTYGTGAFILLNTGEGIIQSKHGLLSTIAFKLGPKAPTNYALEGSVAIAGAAVQWLRDGLGIISSAAEIEEMALQVESTGGVYFVPAFNGLFAPWWREDARGVCIGITRFTSKGHIARAVLESMCFQVKDVLDSMHKDSGESESQKTEFLLRVDGGATVNNLLMQIQADLVGCPVIRPADIETTALGAAYAAGLATGIWKEDFIFNTEEKLKNARVFRPVMTEEVRKKKVDSWCKAVSKTFDLADLAI

SEQ ID NO: 101965 - DNA, 1893 bp, Pichia farinosa
  CDS (1)..(1893)
atggtacgtcgtcaaagtaacgcccctacgcatccattaattgcatccattgatattggaaccacttcggcgagaaccatcttgtttgatgaacatggaaccgaaattgccaagaatcagatcgagtattctaccacggcctcggaggcgccggctgattccaaaaataaggaacaatttagaagaaggtcttccttgatgaggcataatgagcccattttcagtgctgagggtattgccatttcgattactgacgatgttatgatcgaaaacaacgctgccagcgttggtccaactttgcgttatcctaagccaggttgggttgagtgtatgcctgtgcacatattggcaaacgcggtccagtgtttagctgcatccttgataaccttgcgtaagatcaaccagaatcccgctctcaagatcaagtacaaggtgaaagcaataggtattgctaacatgagagagaccacgatcgtatggtctcgtaaaacaggaaagccattgagcaatggtatcacctggactgatacgagaactgcagaaatcgtgcagcacttagaacgtatgacagatgacgagaaaaaggctgaattgaaccagaaaaccggtttacctctttcaacctacttttcagctgccaagttacgttggttattagataatgatgatacaattagagaagagtatgagaaaggcgaaggcaatttaatgtttggaactgttgacacttggttaatctacaacatgacgaaagaaaaatcttttgtttcggatgtcacaaacgcctcaagaacatatttcatggacttggaaacgaaggattacgacgatgagttattagagttctgggacatcgatcctactaggatctgtttgccaaagattgtgtcaagttctgaattttatggttcgtttgctactcctaacttatctaacttaggattccataataagattcacaccctgggcttaagaaatcttgaagactcttactgtaccccaatttgtggttgccttggtgatcagtctgcttccttagttggccagttagcgttccgtccaggttctgccaaatgtacatatggtaccggttgtttcttgttgtataacacaggtattcgaaaattgatttcgcaacatggtgccttaagtacaatcggatactggttcccaactttatccgaagacgacgggaagccacgttacgcattggaaggttcaattgcagtcgctggttcgattattcagtggcttagagacaacttgaagcttatagagcaatcgaaagatgtaggtccattggcttccctggttcatgactccggtggtgttgtatttattcctgcattctctggtctttatgctccctactggaacagcggtgcaagaggtactatctttggtatgactcagtacacctcagctagtcatatagccagagcagcccttgaaggtgtatgtttccaagttagatctattcttaaagctatggctgacgacgctggtactagcgcggactttttggaagaagccttaaatactcagaatgagtctactcctttggccacattggcagtagatggtggtatgtccaaggcagatgaagtcttgcaaattcaagctgatattttgggaccctgtgtaactgttaagagggctcagatatctgaatgtacagcattaggtgctgcaattgctgcaggattatctttcaaagacgaaaatgaaagagtgtggaaagattttaatgatgtgtttgaaaaaattgatgctgcaaacggaaacaactccttcaaagccaagttaccagacgcagagagaagaagaaattggagaagatgggaacgtgccattgacagggctaaagattggttggatcagaacaatgactaa

SEQ ID NO: 101966 - protein, 630 aa, Pichia farinosa
MVRRQSNAPTHPLIASIDIGTTSARTILFDEHGTEIAKNQIEYSTTASEAPADSKNKEQFRRRSSLMRHNEPIFSAEGIAISITDDVMIENNAASVGPTLRYPKPGWVECMPVHILANAVQCLAASLITLRKINQNPALKIKYKVKAIGIANMRETTIVWSRKTGKPLSNGITWTDTRTAEIVQHLERMTDDEKKAELNQKTGLPLSTYFSAAKLRWLLDNDDTIREEYEKGEGNLMFGTVDTWLIYNMTKEKSFVSDVTNASRTYFMDLETKDYDDELLEFWDIDPTRICLPKIVSSSEFYGSFATPNLSNLGFHNKIHTLGLRNLEDSYCTPICGCLGDQSASLVGQLAFRPGSAKCTYGTGCFLLYNTGIRKLISQHGALSTIGYWFPTLSEDDGKPRYALEGSIAVAGSIIQWLRDNLKLIEQSKDVGPLASLVHDSGGVVFIPAFSGLYAPYWNSGARGTIFGMTQYTSASHIARAALEGVCFQVRSILKAMADDAGTSADFLEEALNTQNESTPLATLAVDGGMSKADEVLQIQADILGPCVTVKRAQISECTALGAAIAAGLSFKDENERVWKDFNDVFEKIDAANGNNSFKAKLPDAERRRNWRRWERAIDRAKDWLDQNND

SEQ ID NO: 101967 - DNA, 1491 bp, Bacillus subtilis subsp
  CDS (1)..(1491): transl_table=11
atggaaacgtacattttatccttagatcaggggacgacaagttcaagagcgattctgtttaataaagaaggcaaaattgtccactctgctcaaaaggaatttacacaatacttcccgcatcctggctgggttgagcataatgccaatgaaatttggggctctgtcctcgcggttatcgcctcagtcatctctgaatcaggaatcagcgcttctcaaattgccggcatcggcatcacgaaccagcgcgagacgacggttgtgtgggataaagatacaggaagtcctgcctataatgcaatcgtttggcagtccagacagacgcccggcatttgtgaggaacttcgtgaaaaaggatataatgataaattcagaaaaaaaactgggcttttaatcgatccatactactccggcacgaaggtgaagtggattttagacaatgtggaaggcgcgggagaaaaagcggaaaaaggcgagctgctgtttggaacgattgatacgtggctcatttggaaaatgtcaggcggaaaagcgcatgtgaccgattactccaatgcctcaagaacactgatgtttaatatttacgatttaaaatgggacgatgaactgctcgacattctaggcgtaccgaaatccatgctccctgaagtgaagccgtcctctcatgtgtatgcggagactgttgattatcacttcttcggaaaaaatatcccgattgcgggagcggcgggcgaccagcagtccgcattgttcggccaggcatgctttgaagaaggcatggggaaaaacacatacggcacaggatgtttcatgctgatgaataccggggaaaaagcaattaagtccgaacatgggcttttgacaacaatcgcttggggcattgacggaaaagtgaactatgcgttagaaggaagcatttttgtcgcaggctctgccatccagtggcttagagacggtttgagaatgttccaggattcatcgctaagcgaatcttatgcagaaaaagtggattcaactgacggcgtgtatgtcgttccagcatttgtcggactgggaacgccttactgggacagtgatgtgcgcggttcggttttcggcctgacaagagggacaacaaaagagcactttatccgtgcgacactggagtcattggcttatcaggcaaaagatgtgcttgacgcaatggaagcagattcaaacatttcattaaagacgcttcgtgtagatggaggagctgtgaaaaacaatttcctgatgcagttccaaggagacctgttgaatgttcctgtggagcgcccggaaattaatgaaacgactgcgcttggcgcggcttatttggcaggtatcgctgtgggattctggaaggaccgttctgaaatcgcgaaccagtggaatctggataaacggtttgagcctgaattagaagaagaaaaacgaaatgagctgtataaaggctggcaaaaagccgtgaaagcagctatggcttttaaataa

SEQ ID NO: 101968 - protein, 496 aa, Bacillus subtilis subsp
METYILSLDQGTTSSRAILFNKEGKIVHSAQKEFTQYFPHPGWVEHNANEIWGSVLAVIASVISESGISASQIAGIGITNQRETTVVWDKDTGSPAYNAIVWQSRQTPGICEELREKGYNDKFRKKTGLLIDPYYSGTKVKWILDNVEGAGEKAEKGELLFGTIDTWLIWKMSGGKAHVTDYSNASRTLMFNIYDLKWDDELLDILGVPKSMLPEVKPSSHVYAETVDYHFFGKNIPIAGAAGDQQSALFGQACFEEGMGKNTYGTGCFMLMNTGEKAIKSEHGLLTTIAWGIDGKVNYALEGSIFVAGSAIQWLRDGLRMFQDSSLSESYAEKVDSTDGVYVVPAFVGLGTPYWDSDVRGSVFGLTRGTTKEHFIRATLESLAYQAKDVLDAMEADSNISLKTLRVDGGAVKNNFLMQFQGDLLNVPVERPEINETTALGAAYLAGIAVGFWKDRSEIANQWNLDKRFEPELEEEKRNELYKGWQKAVKAAMAFK

SEQ ID NO: 101969 - DNA, 1524 bp, Streptomyces avermitilis
  CDS (1)..(1524): transl_table=11
atgccggacaacgcccagaagtacgtcgccgccatcgaccagggcaccacctcgagccgctgcatcatcttcgaccacggcggcgcgatcgtcgccgtcgaccagcgtgaacaccgccagatcttccccaagcccggctgggtggagcacgacgccaccgagatctggtccaaggtgcaggcggtggtcgcgggggcgatcgccaaggccggactgcgcgccgaccagctcagcgcgctcggcatcaccaaccagcgcgagacgacggtcctgtgggaccgcgccaccggcaagcccgtgcacaacgcgatcgtgtggcaggacacgcgtacgtccgcgctctgccacgaattgggcggctcggacgggcaggaccgtttccgcgagcagaccgggctgccgctggccagctacttctccgggcccaaggcggcctggctgctcgacaacgtgcctgggctcagggcccgtgccgagcgcggcgagatcgccttcggcaccatcgactcctggctcatctggaacctcacgggcggcacggacggcggccggcacgtcaccgatgtgaccaacgcaggccgcacgatgctgatgaacctggagacgctccagtgggaccgttccatcctgtccgcgatgaacgtccccgaggcggtcctccccgagatcaggtcctcgtccgaggtgtacgggacggccgtgggccagctttcgggcgtgcccgtcgcgtcggcgctcggcgaccagcaggcggccgtgttcggacaggcctgctacgacgtgggtacggcgaagaacacctacggcacgggcagcttcctgctgctcaacaccggcaaccggcccgtgccgtcgaagaacggcctgctgacgaccatgggctacaagatcggtggcgaggcgccggtctactgcctcgaagggtcgatcgcgatcacgggcgcgctggtgcagtggttccgcgaccaactcggcatcatccgtacggcggacgagatcgagacccttgcggcgagcgtcgacgacaacggcggggcgtacatcgtgcccgcgttctccggcctgttcgcgccgtactggcgctccgacgcacgcggtgtcgtcaccggcctcacccggtacgtcacgaaggcacacctggcgcgcgcggtactggaggccacgagctggcagacgcgtgaggtcgtcgacgccatgtaccaggactccggggtgcggatcaccaccctgaaggtcgacggcggcatgaccaagaacaatctgctgatgcagcaccaggcggatgtgctcggcgtgccggtcatccgccccagggtctccgagaccacctgcctgggcgccgcctacgcggccgggctcgcgaccggcgtgtggaacgacctcgacgagctgaagtcgcactggcagaaggacgtcgagtggacgccctccatggaggcgtcggagcgcgaccgcgagtaccacaactggcgcaaggcggtggagaagagcttcggctggcacgaggaggacggcgtgaactga

SEQ ID NO: 101970 - protein, 507 aa, Streptomyces avermitilis
MPDNAQKYVAAIDQGTTSSRCIIFDHGGAIVAVDQREHRQIFPKPGWVEHDATEIWSKVQAVVAGAIAKAGLRADQLSALGITNQRETTVLWDRATGKPVHNAIVWQDTRTSALCHELGGSDGQDRFREQTGLPLASYFSGPKAAWLLDNVPGLRARAERGEIAFGTIDSWLIWNLTGGTDGGRHVTDVTNAGRTMLMNLETLQWDRSILSAMNVPEAVLPEIRSSSEVYGTAVGQLSGVPVASALGDQQAAVFGQACYDVGTAKNTYGTGSFLLLNTGNRPVPSKNGLLTTMGYKIGGEAPVYCLEGSIAITGALVQWFRDQLGIIRTADEIETLAASVDDNGGAYIVPAFSGLFAPYWRSDARGVVTGLTRYVTKAHLARAVLEATSWQTREVVDAMYQDSGVRITTLKVDGGMTKNNLLMQHQADVLGVPVIRPRVSETTCLGAAYAAGLATGVWNDLDELKSHWQKDVEWTPSMEASERDREYHNWRKAVEKSFGWHEEDGVN

SEQ ID NO: 101971 - DNA, 1524 bp, Streptomyces coelicolor
  CDS (1)..(1524): transl_table=11
atggcggacttcatcggtgcggtggaccagggaaccaccagcacccggttcatgatcttcgaccacggtggcaacgaggtcgcgaagcaccagctggagcacgagcagatcctcccgcgctccggatgggtcgagcacgacccggtggagatctgggagcgcaccaactcggtgatgcagaacgcgctgcgcaacggcggcctgtcggggacggacctggcggccatcggcatcaccaaccagcgggagaccacggtggtctgggacccgcgcaccggccgcccctactacaacgccatcgtgtggcaggacacccgcaccgacgccatcgcggcgaacctggagcggtcgggccggggcgacgtcatccgccgcaaggccggcctgccgcccgcgacgtacttctccggcgggaagatccagtggatcctggagaacgtcgacggcgtccgcgaggccgcggagcagggacacgcggtgttcggcaacaccgactcctgggtcctgtggaacctcaccggcggccccgacggcggcatccacgccaccgacgtgaccaacgcgagccgcaccatgctgatgaacctggagacgctcgactgggacgacgagctgctgggcttcttcggcatcccgcgcggcatgctgcccaccatcaacccctcctcgcaccccgaggcgttcggcacgacccggacctcccggccgctgcgtgccgccgtgcccatcacgggagtgctgggcgaccagcacgcggcgaccgtcggacaggtctgcttctcgcccggcgaggccaagaacacgtacggcaccggcaacttcctggtcctcaacaccggcacggaactggtccgctcccagcacggcctgctgaccaccgtggcctaccagttcggcgacaacccgccggtctacgcgctggagggctccatcgcggtgaccgggtccgcggtgcagtggctgcgcgaccagatgaagatcatcaagaccgcggccgagagcgaggaactcgcccgcaccgtcgaggacaacggcgggatgtacttcgtccccgcgttctccggcctgttcgccccgtactggcgctccgacgcgcggggcgccatcgtcggcctcgcccggtacaacgacaacgcgcacctggcccgggcgacgctggaggccatctgctaccagagccgcgacgtcgtcgtggccatggagcaggactcctcggtccacctggacgtgctcagggtcgacggcggggtgaccgcgaacgacctgtgcatgcagatccaggcggacatcctcggcgtccccgtcagccgcccggtcgtcgccgagaccaccgccctcggcgcggcctacgcggcgggactggcgaccggcttctggcggcacaccgacgaactgcgcacccactggagcgagtccaggcgctgggagccccagtggtccgaggagcggcgcgcgcaggggtacgcgggctggaagatggcggtggagcgcacgctcgactgggtcaaggtcccggagagctga

SEQ ID NO: 101972 - protein, 507 aa, Streptomyces coelicolor
MADFIGAVDQGTTSTRFMIFDHGGNEVAKHQLEHEQILPRSGWVEHDPVEIWERTNSVMQNALRNGGLSGTDLAAIGITNQRETTVVWDPRTGRPYYNAIVWQDTRTDAIAANLERSGRGDVIRRKAGLPPATYFSGGKIQWILENVDGVREAAEQGHAVFGNTDSWVLWNLTGGPDGGIHATDVTNASRTMLMNLETLDWDDELLGFFGIPRGMLPTINPSSHPEAFGTTRTSRPLRAAVPITGVLGDQHAATVGQVCFSPGEAKNTYGTGNFLVLNTGTELVRSQHGLLTTVAYQFGDNPPVYALEGSIAVTGSAVQWLRDQMKIIKTAAESEELARTVEDNGGMYFVPAFSGLFAPYWRSDARGAIVGLARYNDNAHLARATLEAICYQSRDVVVAMEQDSSVHLDVLRVDGGVTANDLCMQIQADILGVPVSRPVVAETTALGAAYAAGLATGFWRHTDELRTHWSESRRWEPQWSEERRAQGYAGWKMAVERTLDWVKVPES

SEQ ID NO: 101973 - DNA, 1518 bp, Streptomyces avermitilis
  CDS (1)..(1518): transl_table=11
atggcggacttcgtcggcgcggtggaccaggggaccaccagcacccgattcatgatcttcgaccacgccggcaacgaggtggcgaagcaccagctggagcacgcccagatccttccgcgctccgggtgggtcgagcacgacccggtggagatctgggaacgcaccaactcggtgatacagaacgccctgcggcacgggaacctgtccccggacgacctggcggcgatcggcatcaccaaccaacgggagaccaccgtcgtctgggacccgcgcaacggccgtccctactacaacgccatcgtctggcaggacacccgcaccgactccatcgccgcggccctggaacgctcgggccagggcgacgtcatccgccgcaaggcggggctgccgccggcgacctacttctccggcggcaagatccagtggatcctggagaacgtcgacggcgtccgcgaggcagccgagcaggggcacgccgtcttcggcaacacggactgctgggtcctgtggaacctgaccggcggccccgacggcggcatccacgccaccgacgtgaccaacgccagccgcaccatgctgatggacctggaaaccctcgactgggacgacgaactgctgggactcttcgacatcccgcgatcgatgctgcccaccatcaacccgtcctcccacccggaggcctacggccagacccgtacctcccggccgctgcgcgccgccatccccatcgccggggtactcggcgaccagcaggcggccaccgtcggacaggtctgctacgcgcccggcgaagccaagaacacctacggcacgggcaacttcctggtgctgaacaccggcaccgaactggtccgctcccagcacggactcctcaccaccgtggcctaccagttcggcgacagcccggccatctacgccctggagggctccatcgccgtcaccgggtccgcggtgcaatggctgcgcgaccagatgaagatcatcaagtccgcggccgagagcgagacgctggcgcgtaccgtcgaggacaacggcggcatctacttcgtccccgcgttctcgggcctgttcgccccgtactggcgctccgacgcccgcggcgcgatcgtcggcctcgcccggtaccacgacaacggtcacctggcccgcgcgacgctggaagccatctgctatcagagccgtgacgtcgtcgaggccatggagcaggactccggagtccacctcgatgtgctcaaggtcgacggcggcgtgaccgccaacgacctgtgcatgcagatccaggccgacatcctcggcgtaccggtcagccgcccggtcgtcgccgagaccaccgcgctcggcgccgcctacgcggcgggtctggccaccggcttctggcaggacaccgacgaactgcgcacccactggcaggagtccaagcgctgggagccccagtggtccgaggaccggcgggcggagggctacgcgggctggaagaaggcggtggagcgcacgctcgactggtccaaggtggaatag

SEQ ID NO: 101974 - protein, 505 aa, Streptomyces avermitilis
MADFVGAVDQGTTSTRFMIFDHAGNEVAKHQLEHAQILPRSGWVEHDPVEIWERTNSVIQNALRHGNLSPDDLAAIGITNQRETTVVWDPRNGRPYYNAIVWQDTRTDSIAAALERSGQGDVIRRKAGLPPATYFSGGKIQWILENVDGVREAAEQGHAVFGNTDCWVLWNLTGGPDGGIHATDVTNASRTMLMDLETLDWDDELLGLFDIPRSMLPTINPSSHPEAYGQTRTSRPLRAAIPIAGVLGDQQAATVGQVCYAPGEAKNTYGTGNFLVLNTGTELVRSQHGLLTTVAYQFGDSPAIYALEGSIAVTGSAVQWLRDQMKIIKSAAESETLARTVEDNGGIYFVPAFSGLFAPYWRSDARGAIVGLARYHDNGHLARATLEAICYQSRDVVEAMEQDSGVHLDVLKVDGGVTANDLCMQIQADILGVPVSRPVVAETTALGAAYAAGLATGFWQDTDELRTHWQESKRWEPQWSEDRRAEGYAGWKKAVERTLDWSKVE

SEQ ID NO: 101975 - DNA, 1491 bp, Bacillus anthracis
  CDS (1)..(1491): transl_table=11
atgaaaaaatatattctttcattagaccaaggaacaactagctcacgcgcaattcttttcaataaaaaaggtgaaattgttcattcagctcaaaaagaatttacacaacattttccaaagccaggctgggtagagcataacgcgcaagaaatttggggatctattttagcggttatcgcaacttgcttaagtgaagcagatgtaaagccagaacaaatcgctggtatcggtattacgaaccaacgtgaaacagcggttgtatgggataaaacgactggtaaaccaatttataacgcaattgtatggcaatctcgccaaacagctgaaatttgtgatgagttaaaagaaaaaggttatagcgaaatggttcgcgaaaaaacaggtcttttaattgacgcatacttctctggtacgaaagtaaaatggattttagataacgttgaaggtgcaagagagaaagcagaaaacggcgatctattattcggaacaattgatacgtggcttgtatggaaattatctggtggtaaagcgcacgtaacggattactcaaatgcatcacgtacattaatgtttaacattcacgacttacagtgggatgatgagcttctagacatgttaacagtaccaaagagcatgcttccagaagtacgtccatcatctgaagtgtatggagaaacaattgactatcacttcttcggtcaaaatgtaccgattgcaggtgtagctggtgatcaacaagcggcattatttggacaagcttgtttcggtgaaggtatggcgaaaaatacttacggaactggttgcttcatgttaatgaacacgggtgaaaaagcagtagcttctgagcacggtctattaacaacaattgcatggggaatagatggtaaagtaaactacgcattagaaggaagtattttcgtagcgggttctgccattcagtggttacgtgacggaatgcgcatgtttaaagatgcaagtgagagtgaagtatatgcttctcgtgttgaatcaactgacggtgtatacgttgtaccagcattcgtaggattaggtacgccttactgggatagtgaagtacgcggcgctatgtttggtgtaacgcgcggtacgacgaaagaacacttcattcgtgcaacactagaatctttagcttaccaaataaaagacgtattatgcgcaatggaagcagattcaggtattgaactaaaaacattacgcgttgatggcggagcagttaaaaataacttcttaatgaagttccaaagtgatattttagacgttcctgtagagcgtccagtgatcaatgaaacaacagctttaggtgcagcgtacttagctggtcttgcggttggatattggaaaaaccaagatgaaattaaagaacagtggcatatggacaaacgctttgagccaacgatggaagcggaaacaagcgaagagctatatgctggatggaaaaaagcaattgaagcaacaaaagctttcaaataa

SEQ ID NO: 101976 - protein, 496 aa, Bacillus anthracis
MKKYILSLDQGTTSSRAILFNKKGEIVHSAQKEFTQHFPKPGWVEHNAQEIWGSILAVIATCLSEADVKPEQIAGIGITNQRETAVVWDKTTGKPIYNAIVWQSRQTAEICDELKEKGYSEMVREKTGLLIDAYFSGTKVKWILDNVEGAREKAENGDLLFGTIDTWLVWKLSGGKAHVTDYSNASRTLMFNIHDLQWDDELLDMLTVPKSMLPEVRPSSEVYGETIDYHFFGQNVPIAGVAGDQQAALFGQACFGEGMAKNTYGTGCFMLMNTGEKAVASEHGLLTTIAWGIDGKVNYALEGSIFVAGSAIQWLRDGMRMFKDASESEVYASRVESTDGVYVVPAFVGLGTPYWDSEVRGAMFGVTRGTTKEHFIRATLESLAYQIKDVLCAMEADSGIELKTLRVDGGAVKNNFLMKFQSDILDVPVERPVINETTALGAAYLAGLAVGYWKNQDEIKEQWHMDKRFEPTMEAETSEELYAGWKKAIEATKAFK

SEQ ID NO: 101977 - DNA, 1503 bp, Chromobacterium violaceum
  CDS (1)..(1503): transl_table=11
atgaccgatcagtacgtgctggccctggaccagggcaccaccagttcccgcgccattctgttcaaccgcagcggcgacatcgtgtcgctggcgcaaaaggagttccgccagatctacccgcagccgggctgggtcgagcacgatccgcaggaaatctggggcggccaggtgggcgtggccgccgaagcggtggccaaggccggcatcgacggccgcagcatcgccgccatcggcatcaccaaccagcgcgaaaccaccatcgtctgggaccgcgaaaccggccagccggtgtacaacgccatcgtctggcaggaccgccgcaccgccgagttctgcgatgagctgaaggcgcgcggcctcggcgaactgatccgttccaagaccggcctgctggtcgacgcctatttctccggcagcaagatcaagtggatcctggacaacgtgcccggcgcgcgcgaccgcgcccgcgaaggcaagctggccttcggcaccgtggacagctggctgatctggaatttcacccacggcaaggtgcatgtgaccgacgtgtccaacgcctcgcgcaccatgctgtacaacatccacaccctgcagtgggacgccgagctgctggacatcatgggcattccggccagcatgctcccggaagtgaagagctccagcgaagtgtacggccacacccacgccgcccacctcggcgtggaaatcccgatcgccggcgtggccggcgaccagcaggccgcgctgttcggccagcagtgcaccacgcccggcatggtgaagaacacctacggcaccggctgcttcatgatgctgaacaccggcgacaagccgatcgaatcgtccaacaacttgctgaccaccatcgcctggaaggtggacggcaaggtgcagtacgcgctggaaggctcgatcttcatcggcggcgcggtggtgaaatggctgcgcgacggcctcggcatcatccgccattcggccgacgtcggcccgctggcgcaggaagtgaagaacagcgacggcgtctacctggtgccggccttcgccggcctgggcgcgccgcactggaacgccagcgcccgcggcaccatcgtcggcgccacgctgggcaccaaggccgcccacatcgcccgcgccgcgctggacagcatcgcctaccagacccgcgacgtgctgaaggcgatggaagccgacgccgggatgagcatcgccgagctgcgcgtcgatggcggcgccaccgtcaacgaactgctgatgcagttccagtccgacatcctggccgtggacgtggtgcgtcccaagatcaccgaaaccaccgcgctgggcgccgcctacctggctggcctcgccgtcggctactggaagagcgtcgacgacatccagggccaatggcagctggaccgccgcttccagccggcgatggccgccgacgaagtgctggccaacgtcaagggctggcagcgcgcggtgaacgccgccaaggtatgggccgacgaccaggcctga

SEQ ID NO: 101978 - protein, 500 aa, Chromobacterium violaceum
MTDQYVLALDQGTTSSRAILFNRSGDIVSLAQKEFRQIYPQPGWVEHDPQEIWGGQVGVAAEAVAKAGIDGRSIAAIGITNQRETTIVWDRETGQPVYNAIVWQDRRTAEFCDELKARGLGELIRSKTGLLVDAYFSGSKIKWILDNVPGARDRAREGKLAFGTVDSWLIWNFTHGKVHVTDVSNASRTMLYNIHTLQWDAELLDIMGIPASMLPEVKSSSEVYGHTHAAHLGVEIPIAGVAGDQQAALFGQQCTTPGMVKNTYGTGCFMMLNTGDKPIESSNNLLTTIAWKVDGKVQYALEGSIFIGGAVVKWLRDGLGIIRHSADVGPLAQEVKNSDGVYLVPAFAGLGAPHWNASARGTIVGATLGTKAAHIARAALDSIAYQTRDVLKAMEADAGMSIAELRVDGGATVNELLMQFQSDILAVDVVRPKITETTALGAAYLAGLAVGYWKSVDDIQGQWQLDRRFQPAMAADEVLANVKGWQRAVNAAKVWADDQA

SEQ ID NO: 101979 - DNA, 1530 bp, Corynebacterium glutamicum
  CDS (1)..(1530): transl_table=11
atgagaatctcaaaggccaatgcgtatgttgcagcgattgaccaaggcaccacttccactcggtgcatcttcattgatgcccaaggaaaagtggtgtcttctgcttccaaggagcaccgccaaatcttcccacaacagggctgggtagagcacgatcctgaagaaatttgggacaacatccgatctgtcgtcagccaggcgatggtctccattgacatcaccccacacgaggttgcatcgctgggagtcaccaaccagcgcgaaaccaccgtggtgtgggacaagcacaccggcgaacctgtctacaacgcaatcgtgtggcaagacacccgcacctctgacatttgcctagagatcgcgggcgaagaaggccaggaaaagtggcttgaccgcaccggcctgctgatcaactcctacccatcggggcccaaaatcaagtggattctcgacaacgttgagggagctcgcgaacgcgccgaaaagggcgaccttttgtttggcaccatggatacctgggtgctgtggaacctgaccggcggtgtccgcggcgacgacggtgatgatgccatccacgtcaccgatgtcaccaacgcatcccgcacactattgatggatctccgcacgcaacagtgggatccagaactatgcgaagccctagacattccgatgtccatgctccctgagattcgtccctccgtcggagaattccgctccgtgcgccaccgcggaaccctagccgacgtcccgattactggcgtgctcggcgaccagcaagcggccctttttggtcagggcggattccacgaaggtgctgctaaaaatacctacggcaccggcctcttcctgctgatgaacaccggcacctcgttgaagatttccgagcacggcctgctgtccaccatcgcctatcaacgggaaggatccgctccggtctacgcgctggaaggttccgtatccatgggcggttccttggtgcagtggctgcgcgacaacctacagctaatccccaacgcaccagcgattgaaaacctcgcccgagaagtcgaagacaacggtggcgttcatgttgtcccagcattcaccggactgttcgcaccacgttggcgccccgatgctcgtggcgtcattacaggcctcacccgttttgccaaccgcaaacacatcgcccgcgcagtccttgaagccaacgccttccaaacccgcgaagttgtggacgccatggccaaagacgcaggcaaagccctcgaatccctccgcgtcgacggtgcgatggtggaaaatgacctcctcatgcaaatgcaagccgacttcctcggcatcgacgtccaacgtctcgaggacgtagaaaccaccgccgtcggcgtcgcattcgctgcaggtctcggctctggattcttcaaaacaactgacgagatcgaaaaacttattgcagtgaagaaagtctggaaccctgacatgagcgaagaagagcgcgaacgtcgctatgccgaatggaatagggcagtggagcattcttatgaccaggcctag

SEQ ID NO: 101980 - protein, 509 aa, Corynebacterium glutamicum
MRISKANAYVAAIDQGTTSTRCIFIDAQGKVVSSASKEHRQIFPQQGWVEHDPEEIWDNIRSVVSQAMVSIDITPHEVASLGVTNQRETTVVWDKHTGEPVYNAIVWQDTRTSDICLEIAGEEGQEKWLDRTGLLINSYPSGPKIKWILDNVEGARERAEKGDLLFGTMDTWVLWNLTGGVRGDDGDDAIHVTDVTNASRTLLMDLRTQQWDPELCEALDIPMSMLPEIRPSVGEFRSVRHRGTLADVPITGVLGDQQAALFGQGGFHEGAAKNTYGTGLFLLMNTGTSLKISEHGLLSTIAYQREGSAPVYALEGSVSMGGSLVQWLRDNLQLIPNAPAIENLAREVEDNGGVHVVPAFTGLFAPRWRPDARGVITGLTRFANRKHIARAVLEANAFQTREVVDAMAKDAGKALESLRVDGAMVENDLLMQMQADFLGIDVQRLEDVETTAVGVAFAAGLGSGFFKTTDEIEKLIAVKKVWNPDMSEEERERRYAEWNRAVEHSYDQA

SEQ ID NO: 101981 - DNA, 1509 bp, Pasteurella multocida
  CDS (1)..(1509): transl_table=11
atgacggataaaaaatatatcattgccctagatcaaggtacaacaagttcaagagcggttcttcttgatcacgatgccaatattgttgaaattgcccaacgtgaatttacgcaaatttatccacaggctggctgggttgaacataatcccatggagatttgggcaacacaaagttccaccttaaatgaagtggtcgcgaaagccggtatcactgctgatcaaatcgcggcaattgggatcactaatcagcgtgaaaccacgattgtatgggaaaaagaaaccggtaagccaatttacaatgcgattgtgtggcaatgccggcgtacgactgagataaccgataaactgaaagcagatggtcacgaagactatatacgtcaaacgacaggcttagtggtagatccttacttctctggaaccaaaattaaatggattttggataacgtggaaggggcacgggaacaagcagaacgtggcgaattactctttggtacggtggatacttggctagtatggaaattaactcaagggcgtgcacatgtcaccgattacactaacgcctcgcggacgatgttatttaatattcatactctgcaatgggacgataacatgctggcgattttaggtatcccacgtgctatgttgcctgaggtgcgtaattcttctgaaatatatggtcaaaccaatatcggtggcaaaggtggcgtacgtattcctgtagccggtatggcaggagatcaacaagcggccttatatggtcatctttgtgttaatgcgggacaagcgaaaaacacttatggtaccggttgtttcatgttaatgcatacgggcgacaacgccgtacaatcacaaaatggcttattaaccaccattgcctgtaatgccaaaggtgagcctgcatatgctctcgaaggctccatcttcatgggcggggcatccattcaatggctacgcgatgaactcaaaattgtgcatgatagctatgactcagaatattttgctacccgagtacctgattgtaatggtgtctatgtggtacctgcctttactggattaggtgccccttattgggatccctatgcacgcggtgccatttttgggctctcacgtggtgcaaatcgcaaccacattgtgcgcgctaccttagaatccattgcataccaaactcgcgatgtgctagaggcgatgcaatctgactcaggacaaacactgcaagcgctccgcgtggacggtggagcaacggaaaataatttcttaatgcagttccaagcggatatcctcgccaccaaagtagaaagaccaaaagtgaaagaagtcacggcattaggcgccgcctatcttgcaggtcttgcgacgggtttctggaaagatctcagtgaattgcgtgataaagccagcatcgagaaaacttttgttcccgatggagatgaagccaaacgcactcgccgttataaaggctggaaaaaagcagtcaaacgtgcgctcgaatgggaaaaagaggaagagtag

SEQ ID NO: 101982 - protein, 502 aa, Pasteurella multocida
MTDKKYIIALDQGTTSSRAVLLDHDANIVEIAQREFTQIYPQAGWVEHNPMEIWATQSSTLNEVVAKAGITADQIAAIGITNQRETTIVWEKETGKPIYNAIVWQCRRTTEITDKLKADGHEDYIRQTTGLVVDPYFSGTKIKWILDNVEGAREQAERGELLFGTVDTWLVWKLTQGRAHVTDYTNASRTMLFNIHTLQWDDNMLAILGIPRAMLPEVRNSSEIYGQTNIGGKGGVRIPVAGMAGDQQAALYGHLCVNAGQAKNTYGTGCFMLMHTGDNAVQSQNGLLTTIACNAKGEPAYALEGSIFMGGASIQWLRDELKIVHDSYDSEYFATRVPDCNGVYVVPAFTGLGAPYWDPYARGAIFGLSRGANRNHIVRATLESIAYQTRDVLEAMQSDSGQTLQALRVDGGATENNFLMQFQADILATKVERPKVKEVTALGAAYLAGLATGFWKDLSELRDKASIEKTFVPDGDEAKRTRRYKGWKKAVKRALEWEKEEE

SEQ ID NO: 101983 - DNA, 1500 bp, Pseudomonas putida
  CDS (1)..(1500): transl_table=11
atgacagacacccaggataagaactacatcatcgccctggaccagggtaccaccagttcgcgggcgatcattttcgaccgtgacgccaatgttgtaggtacctcccagcgcgagttcgcacagcattacccgcaggcgggctgggtcgagcatgacccgatggagattttcgccacacaaagcgccaccatggtcgaggcccttgcccaggcgggtatcagccacgcccaggtcgctgcgctgggcatcaccaaccaacgcgaaaccacggtggtgtgggacaaggaaaccgggcgtccggtgtacaacgccattgtctggcagtgccgccgcagcaccgagatctgtgctcagctcaagcgtgacggccatgaagactacattcgtgaaaccaccggcctggtcaccgacccgtatttctccggcaccaagctgaaatggatcctcgacaatgtcgacggcgcccgtgaacgcgccgagcgtggcgaactgctgttcggcaccatcgacacctggctgatctggaagcttacgggtgggaaggttcacgtcaccgactacaccaatgcctcgcgcacgctgatgttcaacatccacagcctgcagtgggacgacaagctgctggaaatcctgggcatcccgcggcagatgctgcctgaggtgcgcccatcctcggaagtgtacggccacaccaagagcggcatagccatcgccggtatcgccggcgaccagcaatcggcactgttcggccagatgtgcgtggagccgggccaagccaagaatacctacggcactggctgcttcctgttgatgaacacgggcgaccaggcggtgaagtcgtcccacggcctgctcacgaccattgcctgcggcccgcgtggtgaggtggcctatgcactggaaggcgcggtattcaatggtggctctaccgtgcaatggctgcgtgacgaactgaagatcgtcaacgacgccctggataccgagtatttcgccagcaaggtcaaggacagcaatggcgtgtacctggtgccagcctttaccggcctgggtgccccgtactgggacccgtatgcccgtggtgcgttgttcggcctgacacgtggcgtgaaggtagaccacatcatccgcgccgcactggagtccatcgcctaccagacccgcgatgtcctcgacgccatgcagcaggactgtggccagcgcctgtccgagctgcgcgtggacggtggtgccgtggccaacaacttcctcatgcagttccaggccgacatcctcggcacctgcgtggagcggccgcagatgcgcgaaaccacggcgctgggcgccgcctatctggcaggcctggcctgtggcttctggagtggcctggacgagctgcgcgacaaggcgatcatcgagcgtgagttcagcccgcaactggacgaaacgcagaaagaaaagctgtatgccggctggaagaaggcggtcgagcgtacccgtgactgggaagatcacgaggcatga

SEQ ID NO: 101984 - protein, 499 aa, Pseudomonas putida
MTDTQDKNYIIALDQGTTSSRAIIFDRDANVVGTSQREFAQHYPQAGWVEHDPMEIFATQSATMVEALAQAGISHAQVAALGITNQRETTVVWDKETGRPVYNAIVWQCRRSTEICAQLKRDGHEDYIRETTGLVTDPYFSGTKLKWILDNVDGARERAERGELLFGTIDTWLIWKLTGGKVHVTDYTNASRTLMFNIHSLQWDDKLLEILGIPRQMLPEVRPSSEVYGHTKSGIAIAGIAGDQQSALFGQMCVEPGQAKNTYGTGCFLLMNTGDQAVKSSHGLLTTIACGPRGEVAYALEGAVFNGGSTVQWLRDELKIVNDALDTEYFASKVKDSNGVYLVPAFTGLGAPYWDPYARGALFGLTRGVKVDHIIRAALESIAYQTRDVLDAMQQDCGQRLSELRVDGGAVANNFLMQFQADILGTCVERPQMRETTALGAAYLAGLACGFWSGLDELRDKAIIEREFSPQLDETQKEKLYAGWKKAVERTRDWEDHEA

SEQ ID NO: 101985 - DNA, 1494 bp, Rhizobium meliloti
  CDS (1)..(1494): transl_table=11
atgggcggatatattctcgcgatcgatcagggcacgacgtccacgcgcgcgatcgttttcgacggcaaccagaaaatcgcgggcgtcgggcagaaagagttcaagcagcactttccgaagtcaggctgggtggagcacgatccggaggagatctggcagacggtcgtcagcacggtcaaggaagcgatcgagaagtccggcatcaccgcgaacgatattgccgcgatcggcatcaccaaccagcgggagacggttgtcgtctgggatcgcgagaccggcaagccgatccacaatgccatcgtctggcaggaccgccgcactgccgccttctgcgacaagctcaagaagaagggactggaaaagaccttcgtgaagaagaccggtctgctgctcgatccctatttttcgggaacgaagctcaactggctgctttccaatgtgaagggcgcgcaggtgcgcgcagccaaaggcgaactctgcttcggcactatcgacaccttcctgatctggcggttgacgggcggcgagtgcttctgcaccgacgcgacgaatgcctcgcgtaccctcttatacaatatcgccgagaatgcctgggacgacgagctcaccgaggtcctgcgcgtgccgaaggagatgctgccggaagtgaaggactgcgcggccgacttcggcgtcacggatccgtctctcttcggcgcggcgatcccgatcctcggcgttgccggcgaccagcaggcggcaacgatcggtcaggcctgtttcaagccgggcatgctgaaatcgacctacggtacgggctgcttcgccttgctcaacaccggcaaggacatggtccgctcgaagaaccgccttctgaccaccatcgcctaccgcctcgacggtgaaacgacctatgcgctcgaaggctcgatcttcgtagccggtgctgccgtgcaatggctgcgcgacgggctcaaggtgatcaaggcggcgcccgatacgggctcgcttgccgagagcgccgatccctcgcaggaggtctatctggtgccggccttcaccggcctcggagcgccccattgggatccggatgcgcggggcgcgatcttcggcatgacgcgcaataccggcccggcagagttcgcacgggcggcactcgaggccgtctgctaccagacccgcgacctgctcgaggccatgcacaaggattggcgccgcaacggcaatgatacggtcctgcgcgtcgatggcggcatggtcgcctccgactggacgatgcagcgcctgtcggacctgctcgacgctccggtcgaccgcccggtcattctcgaaaccaccgcgctcggcgtcgcctggcttgcaggcagccgcgccggcgtctggccaaaccaggaggcgttcgccaagtcctgggcccgcgaccgccgcttcgagccgcatatggacgaggccacgcgcaaggtgaagctcaagggctggcgcagcgcagtcaagcggacgttgattgctgcctga

SEQ ID NO: 101986 - protein, 497 aa, Rhizobium meliloti
MGGYILAIDQGTTSTRAIVFDGNQKIAGVGQKEFKQHFPKSGWVEHDPEEIWQTVVSTVKEAIEKSGITANDIAAIGITNQRETVVVWDRETGKPIHNAIVWQDRRTAAFCDKLKKKGLEKTFVKKTGLLLDPYFSGTKLNWLLSNVKGAQVRAAKGELCFGTIDTFLIWRLTGGECFCTDATNASRTLLYNIAENAWDDELTEVLRVPKEMLPEVKDCAADFGVTDPSLFGAAIPILGVAGDQQAATIGQACFKPGMLKSTYGTGCFALLNTGKDMVRSKNRLLTTIAYRLDGETTYALEGSIFVAGAAVQWLRDGLKVIKAAPDTGSLAESADPSQEVYLVPAFTGLGAPHWDPDARGAIFGMTRNTGPAEFARAALEAVCYQTRDLLEAMHKDWRRNGNDTVLRVDGGMVASDWTMQRLSDLLDAPVDRPVILETTALGVAWLAGSRAGVWPNQEAFAKSWARDRRFEPHMDEATRKVKLKGWRSAVKRTLIAA

SEQ ID NO: 101987 - DNA, 1509 bp, Salmonella typhimurium
  CDS (1)..(1509): transl_table=11
atgactgaaaaaaaatatatcgttgcgctcgaccagggtaccaccagctcccgcgcggtcgttatggatcatgacgcgaatatcgtcagcgtatcacagcgtgaatttgagcaaatttatcctaagccaggctgggtagaacacgacccgatggaaatttgggcgtcccaaagctcaacgctggtagaagtgctggctaaggccgatatcagttccgatcagattgccgctatcggtatcaccaaccaacgtgaaaccgcgatcgtctgggaacgtgaaaccggcaaaccgatatacaacgctattgtctggcagtgccgtcgtaccgccgatatttgcgaacagcttaaacgcgacggcctggaagattacatccgcgacaataccggtctggtcgtcgacccgtacttctctggcactaaagtgaaatggatccttgaccatgtggaaggttcgcgcgaacgcgcgaagcgtggcgagctgctgttcggtacggtggatacctggcttatctggaagatgacgcagggccgcgtccacgttacggattacaccaacgcctcacgaaccatgctgttcaacatccatgatttggactgggacgataagatgctggacgtgctggatatcccacgcgcgatgctgccccaggtacgtaagtcctccgaagtctacggccagaccaatattggcggtaaaggcggtacacgtattcctatcgccgggattgccggggatcagcaggccgcgttattcggtcaactgtgcgtaaaggaaggaatggcaaagaatacctacggcaccggctgctttatgctgatgaacaccggcgagaaagcggtaaaatcggaaaacggcctgctgatcaccatcgcctgcggcccaagcggcgaagtcaactatgcgctggaaggcgcggtgtttatggcgggagcgtccattcaatggctgcgtgatgaaatgaagctcatcagcgacgcgttcgactccgaatatttcgccacgaaagtgaaagataccaacggtgtctacgtggttccggccttcaccggtctgggcgcgccgtactgggacccgtatgcccgcggcgccatttttggcctgacccgcggcgtgaactctaatcacattatccgcgcgacgctcgaatccatcgcttaccagacccgcgacgtactggaagcgatgcaggccgactccggtatccgcctgcacgctctgcgtgtggacggcggcgcagtggccaacaacttcctgatgcagttccagtcagatattctcggcacgcgggtggaacgcccggaagtgcgcgaagtgaccgcgctgggcgccgcctatctggctggcctggccgtcggttactggcagaacctggacgagctgcaggaaaaagccgtcattgagcgagaattccgccccggcattgaaaccaccgagcgtaactaccgttacagcggctggaagaaagcggttaaacgcgcaatggcgtgggaagagcacgacaagtaa

SEQ ID NO: 101988 - protein, 502 aa, Salmonella typhimurium
MTEKKYIVALDQGTTSSRAVVMDHDANIVSVSQREFEQIYPKPGWVEHDPMEIWASQSSTLVEVLAKADISSDQIAAIGITNQRETAIVWERETGKPIYNAIVWQCRRTADICEQLKRDGLEDYIRDNTGLVVDPYFSGTKVKWILDHVEGSRERAKRGELLFGTVDTWLIWKMTQGRVHVTDYTNASRTMLFNIHDLDWDDKMLDVLDIPRAMLPQVRKSSEVYGQTNIGGKGGTRIPIAGIAGDQQAALFGQLCVKEGMAKNTYGTGCFMLMNTGEKAVKSENGLLITIACGPSGEVNYALEGAVFMAGASIQWLRDEMKLISDAFDSEYFATKVKDTNGVYVVPAFTGLGAPYWDPYARGAIFGLTRGVNSNHIIRATLESIAYQTRDVLEAMQADSGIRLHALRVDGGAVANNFLMQFQSDILGTRVERPEVREVTALGAAYLAGLAVGYWQNLDELQEKAVIEREFRPGIETTERNYRYSGWKKAVKRAMAWEEHDK

SEQ ID NO: 101989 - DNA, 1488 bp, Thermus brockianus
  CDS (1)..(1488): transl_table=11
atgaaataccttttagccctagaccaaggcaccacgtccagctgggccattctcttcaccctggagggggaggtggtggccgtggcgcagcgggcctttgcccagcactaccccgagccaggcttggtggagcacgatccttgggagatctgggagagccagctttgggcggccaaggaggccctgcgccgggcgggggtggggccggaggcggtgctggccctgggcatcgccaaccagcgggagaccaccctggtgtgggagagggatacggggcggcccctccaccccgccatcgtctggcaggaccgcaggaccgcttccctttgcgaggccctgcgggagcgggggttggaggggcttttccgggcgcgcacggggctcctgctggacccctacttctccgccaccaagctcctttggcttttggagcgcgtgcctgggctaagggagcgtgcggagaggggagaggtgtgcttcggcaccgtggacacctggctcctttggaacctcacggggggcagggtccacgccaccgaccccaccaacgccagccgcaccctcctcttccacctggaaaccctgacctgggacgaggaactcctccgcgtgctaggtatcccgaaggccctcctccccgaggtgcggccctcggacggggactttggcgagaccctgcccgggcttttgggggcccctattcccatccgaggggtcctgggggaccagcaggcggcccttctggggcaggcggccttgggggcgggggaggggaagtgcacctacggcacgggggcgttcctcctcctaaacacgggggagcggcccgtctgggcggaggggggcctcctcaccaccttggcctggcacctggagggcaaggcggcctacgccctggagggaagcgtcttcgtggcgggggcggcggtggggtggcttagggaggtgggcctccttggggaaagccacgaggtggagagcctagcccggcaggtggaggatgcgggcggggtctacttcgtccccgccttcacggggcttggggccccccactgggacccctacgcccggggggccatcctggggcttacccgggggacaacccgggcccacctggcccgggcggccctggagggggtggccttctccgtgggggaggtggcctgggccatggcgggggcggcggggctagggctcaaggccctgaaggcggacgggggcatggcgcagaacgaccttttcctggagatccaggcggaccttctgggggtgccggtgctgaggccaagggtcacggagaccaccgccctgggggcggcgtgggcgcgcgggatcggggcgggggcgctttccctgggggaccttcccgccctttggcgggaagaggcccggttcctgccccggatgccggaggcgaggcgggaggccctttaccggggctggcgtcgggcggtggaacgggccaagggctgggtccaggaggggtag

SEQ ID NO: 101990 - protein, 495 aa, Thermus brockianus
MKYLLALDQGTTSSWAILFTLEGEVVAVAQRAFAQHYPEPGLVEHDPWEIWESQLWAAKEALRRAGVGPEAVLALGIANQRETTLVWERDTGRPLHPAIVWQDRRTASLCEALRERGLEGLFRARTGLLLDPYFSATKLLWLLERVPGLRERAERGEVCFGTVDTWLLWNLTGGRVHATDPTNASRTLLFHLETLTWDEELLRVLGIPKALLPEVRPSDGDFGETLPGLLGAPIPIRGVLGDQQAALLGQAALGAGEGKCTYGTGAFLLLNTGERPVWAEGGLLTTLAWHLEGKAAYALEGSVFVAGAAVGWLREVGLLGESHEVESLARQVEDAGGVYFVPAFTGLGAPHWDPYARGAILGLTRGTTRAHLARAALEGVAFSVGEVAWAMAGAAGLGLKALKADGGMAQNDLFLEIQADLLGVPVLRPRVTETTALGAAWARGIGAGALSLGDLPALWREEARFLPRMPEARREALYRGWRRAVERAKGWVQEG

SEQ ID NO: 101991 - DNA, 1494 bp, Thermoanaerobacter tengcongensis
  CDS (1)..(1494): transl_table=11
atggcgaaatatgtaatggctttggaccaggggacgacgagttcccgcgctataatttttgaccacagcggtaaaatgattgcttctttaaacaaagagtttaggcagatttatcctaaacccggttgggttgagcatgacccaatggaaatatgggaatcccagatagaagttgcaaaaggagtaatagagaaggcagggattaaaccagaggatattgcggcaataggaattacaaaccagagggagacaacagtcgtatgggacaaaaacacagggaaacctatttacaatgcaatagtgtggcagtgcaggaggacagctcctatatgcgatgaccttaagaacaaaggctttgataagaaaataagagaaaagactggccttgttgtagatgcttatttctcgggtaccaaagtgaagtggattttggacaatgttgaaggagctcgtgaaaaagcagaaagaggagaattgctttttggaaatattgacacatggcttatctggaatttgacaaggggcaaagtgcatgtgactgactattcaaatgcttcaaggacaatgcttttcaacatacacgaattgaagtgggataaggagatattagaagagctcaatgtgccagagaacatgcttccagaagtaaagccatcaagccatgtctatggctatacggataaatcgatctttggagtagaaatacctattgcaggagatgcaggagaccagcaggctgctttatttggccaggcttgctttaaacccggaatggcaaagaacacttacggtacagggtgctttatgctgatgaacacaggcgaaaaagctgttccctccaagaccgggcttttgaccacaatagcttggggtattgatggaaaagtagagtatgccttagaaggaagtattttcataacaggtgcagctattcagtggttgagggatgagctcagaataattgacaatgcacctcaaagtgaggaatacgccttaaaggttgaagatacaaatggagtgtacgtagttcctgcttttgtgggtctaggtgctccttactgggatatgtacgctagaggtgttatagttggccttacaaggggagcaaagagagagcacataataagggcaacattggagtctattgcttaccagacgagagacgttctagaagcaatgcaggaggattccggaataaagcttcaggctttgaaggttgatggaggagcaagtgcaaataacttcttaatgcagttccaggcagacattttaggcgttccggtagataggcctcaggtgatagagactactgcattaggtgctgcataccttgcagggctggcggtgggcttctggaacagcagagaagaaatagagaaaaattggaatatagacaggcgctttgaacctgccatggaggaagaaaagagggagaaactttacagaggctggaaaaaagcggttgaaagagctatgaagtgggctgaagaataa

SEQ ID NO: 101992 - protein, 497 aa, Thermoanaerobacter tengcongensis
MAKYVMALDQGTTSSRAIIFDHSGKMIASLNKEFRQIYPKPGWVEHDPMEIWESQIEVAKGVIEKAGIKPEDIAAIGITNQRETTVVWDKNTGKPIYNAIVWQCRRTAPICDDLKNKGFDKKIREKTGLVVDAYFSGTKVKWILDNVEGAREKAERGELLFGNIDTWLIWNLTRGKVHVTDYSNASRTMLFNIHELKWDKEILEELNVPENMLPEVKPSSHVYGYTDKSIFGVEIPIAGDAGDQQAALFGQACFKPGMAKNTYGTGCFMLMNTGEKAVPSKTGLLTTIAWGIDGKVEYALEGSIFITGAAIQWLRDELRIIDNAPQSEEYALKVEDTNGVYVVPAFVGLGAPYWDMYARGVIVGLTRGAKREHIIRATLESIAYQTRDVLEAMQEDSGIKLQALKVDGGASANNFLMQFQADILGVPVDRPQVIETTALGAAYLAGLAVGFWNSREEIEKNWNIDRRFEPAMEEEKREKLYRGWKKAVERAMKWAEE

SEQ ID NO: 101993 - DNA, 1518 bp, Vibrio vulnificus
  CDS (1)..(1518): transl_table=11
atgactgagcagaagtacatcgttgcactggaccaaggcaccaccagctctcgtgctgtggttttagatcacgacgcgaacatcgtttctgtctcccagcgcgaattcactcagatttacccacaagcaggctgggtagaacatgatccaatggaaatttacgccactcagagctcgacactcgttgaagcattgggtaaaaaaggcatccgcagtgaccaagtggctgccatcggtatcaccaaccaacgtgaaaccaccatcgtttggaacaaagaaacaggcaaacctgtttacaacgccattgtttggcagtgccgtcgtaccgccgacatctgtgaggacctaaaagcgcgcggattggaatcttacattcgcgaaaacaccggccttgtacttgacccttacttctcgggcaccaaagtaaaatggattctcgacaatgttgaaggggcacgtgaagacgccgaagcgggcaaactgctgtttggtactgtcgatacttggctagtctggaagatgacccaaggccgcgtgcacgtcaccgactacaccaacgcctctcgcaccatgctgttcaacatcaatgacctatgttgggatagcaaactgctcgaagaaatgggcattccagcgtcaatgatgccggaagtaaaacgctcatcagaaatttacggccaaaccaacatcggtggtaaaggcggtacgcgtattcctatctcaggcattgcgggtgaccaacaagcggcgctgtacggccaaatgtgtgttgaagctggccaagcgaaaaatacctacggaactggctgtttcttgttgatgaacaccggacaagagaaagtgacctcacgcaacggtttgttgaccacactcgcgtgtggaccaaaaggtgagccagcctacgcactggaaggtgcggtatttatgggcggcgcttcgattcagtggctgcgtgatgagctgaaactgatttccgatgcgcacgattccgaatacttcgccacaaaagtggacacctcaaacggcgtgtatgtggtgccagcctttacgggcttaggcgcaccgtactgggatgcctatgctcgcggtaccattgttggcctcactcgtggcgttaactcaaaccacatcatccgtgcaacgttagaaggcattgcctaccaaacccgtgatgtactggacgcaatgcaagcagactcaggcattaagctttctgccctacgcgttgatggcggcgctgtcgccaacaacttcctcatgcagttccaatctgatgtgcttgataccgaagtgcatcgtccaaaagtcaccgaagtgaccgcgctgggcgctgcgtacctagcgggcttagccgtggggtactggaacagtattgatgaacttcaaggcaaagcagagatcgaccgcagcttccttcctcatcaagatgaagagaaacgcagccgacgctataaaggctggaaacgcgcagtcaaatgtgcgcaaacttggtctgaattgcgcgatctcgaagattaa

SEQ ID NO: 101994 - protein, 505 aa, Vibrio vulnificus
MTEQKYIVALDQGTTSSRAVVLDHDANIVSVSQREFTQIYPQAGWVEHDPMEIYATQSSTLVEALGKKGIRSDQVAAIGITNQRETTIVWNKETGKPVYNAIVWQCRRTADICEDLKARGLESYIRENTGLVLDPYFSGTKVKWILDNVEGAREDAEAGKLLFGTVDTWLVWKMTQGRVHVTDYTNASRTMLFNINDLCWDSKLLEEMGIPASMMPEVKRSSEIYGQTNIGGKGGTRIPISGIAGDQQAALYGQMCVEAGQAKNTYGTGCFLLMNTGQEKVTSRNGLLTTLACGPKGEPAYALEGAVFMGGASIQWLRDELKLISDAHDSEYFATKVDTSNGVYVVPAFTGLGAPYWDAYARGTIVGLTRGVNSNHIIRATLEGIAYQTRDVLDAMQADSGIKLSALRVDGGAVANNFLMQFQSDVLDTEVHRPKVTEVTALGAAYLAGLAVGYWNSIDELQGKAEIDRSFLPHQDEEKRSRRYKGWKRAVKCAQTWSELRDLED

SEQ ID NO: 101995 - DNA, 1599 bp, Hordeum vulgare
  CDS (1)..(1599)
atggcagggaagggggaggaggtgtacgtggcgtcgatcgatcaggggacgaccagcaccaggttcatcgtctacgaccgccacgccagccccgtcgcctcccaccagctcgagttcaagcagcactacccggaggccggatgggtcgagcatgatcctatggagatcatggagagtgtgaaggtctgcatggcaaagacactcgaaaaagctgcagccagtggacttaatgtggatgctagtttgaaggccattggaatcacaaatcagagggagactaccgttgtgtggagcaaatccacaggccttccgctctacaatgccattgtgtggatggatgttcgcactagctctatttgcaggagactggaaagtaagctatcaggtggtagaacgcactttgtggagacatgtggtttaccaatcagtacctacttcagtgctctgaagttattatggttgatggagaatgttgacgctgtcaaggatgcagtcaaggctggtgatgcattatttggcacaatcgatacctggttgatctggaacctaactggaggcattggtgggaaagactgtgatggaaaggagttagttgggcggcatgtcacagactgctcaaacgcatcacggacaatgcttatgaatctgaaggcacttgactgggacaagcctacacttgaggcattaggcattcctgctggcatcttgccaaagattgtcagcaactccgagaaaattggtgttgttgccagtgggttccctttggctggtgtgtctatctcagggtgtctaggagatcagcatgctgcgatgcttgggcagctatgccagaaaggtgaagcaaaaagcacctatggaactggtgccttcatccttctcaacacaggggaggaggttactcagtccacccacggtcttcttagcaccattgcttacaaacttggcccagatgtgccaactaattatgctctagaagggtcaattgcaattgctggtgcagcagttcagtggttgagggacagccttggaatcatttcctcggctgcagaaattgaagggttagctgaaagtgtgcaggattcaggtggcatatactttgtgccagcattcaatggattgttcgcgccatggtggagggatgatgctagggggatctgcataggaatcacgaggttcaccaacaaggggcacattgctcgagcagtgctcgagagtatgtgctttcaggtgaatgatgtcctcagctccatgcataaggatgctggggaggcaggagaagtcaagagtgcagaaggggagttcttgctacgtgttgatggtggtgctactgttaacaaccttctcatgcagatccaggctgatttgctgggtagccctgttgtcaggccagccgacattgagacaacggccctcggggccgcatacgcagcagggttagctgccggagtctggacgaaggaggaaatattcgcaggcctgcacaaggagaacacaacggtgttccgccccaagttagacgatgcacacaggaagaaaagaggagactcctggtacaaggcggtttcgagatcatttgacctggctgacctttctctctag

SEQ ID NO: 101996 - protein, 532 aa, Hordeum vulgare
MAGKGEEVYVASIDQGTTSTRFIVYDRHASPVASHQLEFKQHYPEAGWVEHDPMEIMESVKVCMAKTLEKAAASGLNVDASLKAIGITNQRETTVVWSKSTGLPLYNAIVWMDVRTSSICRRLESKLSGGRTHFVETCGLPISTYFSALKLLWLMENVDAVKDAVKAGDALFGTIDTWLIWNLTGGIGGKDCDGKELVGRHVTDCSNASRTMLMNLKALDWDKPTLEALGIPAGILPKIVSNSEKIGVVASGFPLAGVSISGCLGDQHAAMLGQLCQKGEAKSTYGTGAFILLNTGEEVTQSTHGLLSTIAYKLGPDVPTNYALEGSIAIAGAAVQWLRDSLGIISSAAEIEGLAESVQDSGGIYFVPAFNGLFAPWWRDDARGICIGITRFTNKGHIARAVLESMCFQVNDVLSSMHKDAGEAGEVKSAEGEFLLRVDGGATVNNLLMQIQADLLGSPVVRPADIETTALGAAYAAGLAAGVWTKEEIFAGLHKENTTVFRPKLDDAHRKKRGDSWYKAVSRSFDLADLSL

SEQ ID NO: 101997 - DNA, 1560 bp, Glycine max
  CDS (1)..(1560)
atgtcgaaagaggatgtgtttgttggcgcgatcgaccaaggaacgagcagcagcaggttcataatatacgacgcgaagactggagtagtaggatgccaccacgtggagttcacccagttctacccgcaagccgggtgggtggagcatgaccccatggagatcttggagagtgtgaaggtgtgcgtggccaaggccgtcgataaggccaccgctgatggcttcaacgtcgataaaggcttgaaggccattggtctcaccaatcagagagagaccactctcctctggagcaaatccaccggcctccctcttcacaacgccattgtttggatggatgctcgcacttcttccatttgcaggagattggaaaaggagttatctggcggtagaaaccattttgtggagagttgtggcttgcctattagcacatacttcagtgctttgaagctgctgtggttgatggaaaatgtagatgccgtaaaggaggccataaagaaaaaggatgcgctgtttggaactattgacacttggttgatatggaatctaactggtggggtgaatgggggattgcatgttaccgatgtttcaaatgcatctcgtacaatgctcatgaatctaaaaacccttgactgggatgcatctaccttaaaaacccttaatattcctgctgaaattttgcctaatattgttagtaatgccgaaattataggagaggttgggtctggatggccaattgctggtgtccctattgctggatgtttaggggatcaacatgctgcaatgttaggacaatcatgccgtaaaggggaggctaagagcacttatggcacaggtgctttcatactactaaatactggtgaagggataattcaatcgaagcacggtcttttatccactatagctttcaagcttggcccaaaagctccaaccaattatgcattggaaggatcagttgctattgctggagctgcagtgcagtggcttagagacggtcttggcatcatttctagtgctgcagagatagaggagatggcattacaggttgaatccactggtggggtttactttgttcctgcttttaatggattgtttgccccatggtggcgtgaggatgctcgcggggtttgtattggaataacaaggtttacaagcaagggtcacattgcccgagctgtgcttgagagcatgtgtttccaagtgaaagatgtcttggattcaatgcataaagattcaggagaaagtgaatcccaaaaaacagagtttttgcttagagtggatggtggggcaactgtaaacaacctgctgatgcagattcaggcagatttggtgggatgtccagtaattagacctgctgacatagagacaacagcacttggagcagcctatgctgccggattagctactgggatttggaaagaagattttattttcaatactgaggagaagttgaagaatgctagagttttccgtcctgtaatgactgaggaagtaaggaaaaagaaagttgactcttggtgcaaagctgttagtaaaactttcgacttagctgatcttgctctttga

SEQ ID NO: 101998 - protein, 519 aa, Glycine max
MSKEDVFVGAIDQGTSSSRFIIYDAKTGVVGCHHVEFTQFYPQAGWVEHDPMEILESVKVCVAKAVDKATADGFNVDKGLKAIGLTNQRETTLLWSKSTGLPLHNAIVWMDARTSSICRRLEKELSGGRNHFVESCGLPISTYFSALKLLWLMENVDAVKEAIKKKDALFGTIDTWLIWNLTGGVNGGLHVTDVSNASRTMLMNLKTLDWDASTLKTLNIPAEILPNIVSNAEIIGEVGSGWPIAGVPIAGCLGDQHAAMLGQSCRKGEAKSTYGTGAFILLNTGEGIIQSKHGLLSTIAFKLGPKAPTNYALEGSVAIAGAAVQWLRDGLGIISSAAEIEEMALQVESTGGVYFVPAFNGLFAPWWREDARGVCIGITRFTSKGHIARAVLESMCFQVKDVLDSMHKDSGESESQKTEFLLRVDGGATVNNLLMQIQADLVGCPVIRPADIETTALGAAYAAGLATGIWKEDFIFNTEEKLKNARVFRPVMTEEVRKKKVDSWCKAVSKTFDLADLAL

SEQ ID NO: 101999 - DNA, 1572 bp, Zea mays
  CDS (1)..(1572)
atggcggggaaaggggaggaggtgtacgtggccgccatcgaccagggcaccacaagcacccggttcatcgtctacgaccgccacgccaaacccgtcgcatcgcaccagctcgagttcaagcaacactacccggaggcagggtgggttgagcatgatcctatggagattatagagactgttaaggtgtgtatgaaagaggcagttggcaaagccaaagctggtaaacacaatgtggttgctggtttgaaggccattgggatcacaaatcagagggaaaccactgttatgtggagtaaatccactggccgtccactgtataatgctattgtgtggatggatgctcgcacaagccctgtttgcaggagattggaaaatgagctgtcaggcggtaggacccacttcgtggagacatgcgggttgccaatcagtacctatttcagtgctctgaaattattatggttgatggaaaatgtggatgctgtcaaggatgcagtccggactggtgacgctttattcggcacgatcgacacctggttgatttggaaccttacaggaggtgttgctggtgggcagcatgtcacggattgctcaaatgcatctcgtacaatgcttatgaatctaaagacacttgactgggataagccaacacttgctgtgttaggagttcctgttgagattttgccaaagattatcagtaattcagagaaaatcggtgtggtcgccaaagagttcccgtttgcaggagttcccatctcggggtgtcttggagatcagcatgctgctatgcttgggcagctgtgccagaagggtgaagcgaaaagcacctatggaactggtgccttcatccttcttaacacaggggaagagcctacccaatcctcccatggccttcttagtaccattgcttacaagcttggtccagctgcacccactaactatgctcttgaagggtccattgcaattgcaggcgcagcagttcagtggctgagggacagccttggaatcattcagtcagcagctgagatcgaaaagttggctgaaacagtgccagattcaggtggagtgtactttgtgccagcatttaatgggttgtttgcaccatggtggagagatgatgcgaggggaatttgcatcggaatcacaaggttcacaaataaggggcacattgctcgagcagtgctcgagagtatgtgttttcaggtgaatgatgtcctcagctccatgcacaaggatgctggagaggcaggagaagtaaagagcgcagaaggagagttcttattgcgtgttgatggtggtgctactgttaataatcttctaatgcagatccaggctgatttattaggcagccctgttgtcagaccagctgacatagagaccacagccctcggagctgcatatgctgctgggttggctgcaggagtttggaccaaggagaaggtttttgcaggtttgcacaaggagaacacgacagtcttccgcccgaaactggatgaggcgcacaggaaaaagagggcggattcatggtacaaggcggtttcaagatcattcgatctggctgatctttctctgtaa

SEQ ID NO: 102000 - protein, 523 aa, Zea mays
MAGKGEEVYVAAIDQGTTSTRFIVYDRHAKPVASHQLEFKQHYPEAGWVEHDPMEIIETVKVCMKEAVGKAKAGKHNVVAGLKAIGITNQRETTVMWSKSTGRPLYNAIVWMDARTSPVCRRLENELSGGRTHFVETCGLPISTYFSALKLLWLMENVDAVKDAVRTGDALFGTIDTWLIWNLTGGVAGGQHVTDCSNASRTMLMNLKTLDWDKPTLAVLGVPVEILPKIISNSEKIGVVAKEFPFAGVPISGCLGDQHAAMLGQLCQKGEAKSTYGTGAFILLNTGEEPTQSSHGLLSTIAYKLGPAAPTNYALEGSIAIAGAAVQWLRDSLGIIQSAAEIEKLAETVPDSGGVYFVPAFNGLFAPWWRDDARGICIGITRFTNKGHIARAVLESMCFQVNDVLSSMHKDAGEAGEVKSAEGEFLLRVDGGATVNNLLMQIQADLLGSPVVRPADIETTALGAAYAAGLAAGVWTKEKVFAGLHKENTTVFRPKLDEAHRKKRADSWYKAVSRSFDLADLSL

SEQ ID NO: 102001 - DNA, 1560 bp, Glycine max
  CDS (1)..(1560)
atgtcgaaagaggatgtgtttgttggcgcgatcgaccaaggaacgagcagcagcaggttcataatatacgacgcgaagactggagtagtaggatgccaccacgtggagttcacccagttctacccgcaagccgggtgggtggagcatgaccccatggagatcttggagagtgtgaaggtgtgcgtggccaaggccgtcgataaggccaccgctgatggcttcaacgtcgataaaggcttgaaggccattggtctcaccaatcagagagagaccactctcctctggagcaaatccaccggcctccctcttcacaacgccattgtttggatggatgctcgcacttcttccatttgcaggagattggaaaaggagttatctggcggtagaaaccattttgtggagagttgtggcttgcctattagcacatacttcagtgctttgaagctgctgtggttgatggaaaatgtagatgccgtaaaggaggccataaagaaaaaggatgcgctgtttggaactattgacacttggttgatatggaatctaactggtggggtgaatgggggattgcatgttaccgatgtttcaaatgcatctcgtacaatgctcatgaatctaaaaacccttgactgggatgcatctaccttaaaaacccttaatattcctgctgaaattttgcctaatattgttagtaatgccgaaattataggagaggttgggtctggatggccaattgctggtgtccctattgctggatgtttaggggatcaacatgctgcaatgttaggacaatcatgccgtaaaggggagactaagagcacttatggcacaggtgctttcatactactaaatactggtgaagggataattcaatcgaagcacggtcttttatccactatagctttcaagcttggcccaaaagctccaaccaattatgcattggaaggatcagttgctattgctggagctgcagtgcagtggcttagagacggtcttggcatcatttctagtgctgcagagatagaggagatggcattacaggttgaatccactggtggggtttactttgttcctgcttttaatggattgtttgccccatggtggcgtgaggatgctcgcggggtttgtattggaataacaaggtttacaagcaagggtcacattgcccgagctgtgcttgagagcatgtgtttccaagtgaaagatgtcttggattcaatgcataaagattcaggagaaagtgaatcccaaaaaacagagtttttgcttagagtggatggtggggcaactgtaaacaacctgctgatgcagattcaggcagatttggtgggatgtccagtaattagacctgctgacatagagacaacagcacttggagcagcctatgctgccggattagctactgggatttggaaagaagattttattttcaatactgaggagaagttgaagaatgctagagttttccgtcctgtaatgactgaggaagtaaggaaaaagaaagttgactcttggtgcaaagctgttagtaaaactttcgacttagctgatcttgctctttga

SEQ ID NO: 102002 - protein, 519 aa, Glycine max
MSKEDVFVGAIDQGTSSSRFIIYDAKTGVVGCHHVEFTQFYPQAGWVEHDPMEILESVKVCVAKAVDKATADGFNVDKGLKAIGLTNQRETTLLWSKSTGLPLHNAIVWMDARTSSICRRLEKELSGGRNHFVESCGLPISTYFSALKLLWLMENVDAVKEAIKKKDALFGTIDTWLIWNLTGGVNGGLHVTDVSNASRTMLMNLKTLDWDASTLKTLNIPAEILPNIVSNAEIIGEVGSGWPIAGVPIAGCLGDQHAAMLGQSCRKGETKSTYGTGAFILLNTGEGIIQSKHGLLSTIAFKLGPKAPTNYALEGSVAIAGAAVQWLRDGLGIISSAAEIEEMALQVESTGGVYFVPAFNGLFAPWWREDARGVCIGITRFTSKGHIARAVLESMCFQVKDVLDSMHKDSGESESQKTEFLLRVDGGATVNNLLMQIQADLVGCPVIRPADIETTALGAAYAAGLATGIWKEDFIFNTEEKLKNARVFRPVMTEEVRKKKVDSWCKAVSKTFDLADLAL

SEQ ID NO: 102003 - DNA, 1572 bp, Zea mays
  CDS (1)..(1572)
atggcggggaaagggaaggaggtgtacgtggccgccatcgaccagggcaccacaagcacccggttcatcgtctacgaccgccacgccaaacccgtcgcatcgcaccagctcgagttcaagcaacactacccggaggcagggtgggttgagcatgatcctatggagattatagagactgttaaggtgtgtatgaaagaggcagttggcaaagccaaagatggtaaacacaatgtggttgctggtttgaaggccattgggatcacaaatcagagggaaaccactgttatgtggagtaaatccactggccgtccactgtataatgctattgtgtggatggatgctcgcacaagccctgtttgcaggagattggaaaatgagctgtcaggcggtaggacccacttcgtggagacatgcgggttgccaatcagtacctatttcagtgctctgaaattattgtggttgatggaaaatgtggatgctgtcaaggatgcagtccggactggtgacgccttattcggcacgatcgacacctggttgatttggaaccttacgggaggtgttgctggtgggcagcatgtcacggattgctcaaatgcatctcgtacaatgcttatgaatctaaagacacttgactgggataagccaacacttgatgtgttaggagttcctgttgagattttgccaaagattatcagtaattcagagaaaatcggtgtggtcgccaaagagttcccgtttgcaggagttcccatctcggggtgtcttggagatcagcatgctgctatgcttgggcagctgtgccaaaagggtgaagcgaaaagcacctatggaactggtgccttcatccttcttaacacaggggaagagcctacccaatcctcccatggccttcttagtaccattgcttacaagcttggtccagctgcgcccactaactatgctcttgaagggtccattgcaattgcaggcgcagcagttcagtggctgagggacagccttggaatcattcagacagcagctgagatcgaaaagttggctgaaacagtgccagattctggtggcgtgtactttgtgccagcatttaatgggttgtttgcaccatggtggagagatgacgcaagagggatttgcatcggaatcacaaggttcacaaataaggggcacattgctcgagcagtgctcgagagtatgtgttttcaggtgaatgatgtcctgagctccatgcacaaggatgctggagaggcaggagaagtaaagagcgcagaaggagagttcttattgcgtgttgatggcggtgctactgttaataatcttctaatgcagatccaggctgatttattaggcagccctgttgtcagaccagctgacatagagaccacagccctcggagctgcatatgctgctgggttggctgcaggagtttggaccaaggagaaggtttttgcaggtttgcacaaggagaacacgacagtcttccgcccgaaactggatgaggcgcacaggaaaaagagggcggattcatggtacaaggcggtttcaagatcattcgatctggctgatctttctctgtaa

SEQ ID NO: 102004 - protein, 523 aa, Zea mays
MAGKGKEVYVAAIDQGTTSTRFIVYDRHAKPVASHQLEFKQHYPEAGWVEHDPMEIIETVKVCMKEAVGKAKDGKHNVVAGLKAIGITNQRETTVMWSKSTGRPLYNAIVWMDARTSPVCRRLENELSGGRTHFVETCGLPISTYFSALKLLWLMENVDAVKDAVRTGDALFGTIDTWLIWNLTGGVAGGQHVTDCSNASRTMLMNLKTLDWDKPTLDVLGVPVEILPKIISNSEKIGVVAKEFPFAGVPISGCLGDQHAAMLGQLCQKGEAKSTYGTGAFILLNTGEEPTQSSHGLLSTIAYKLGPAAPTNYALEGSIAIAGAAVQWLRDSLGIIQTAAEIEKLAETVPDSGGVYFVPAFNGLFAPWWRDDARGICIGITRFTNKGHIARAVLESMCFQVNDVLSSMHKDAGEAGEVKSAEGEFLLRVDGGATVNNLLMQIQADLLGSPVVRPADIETTALGAAYAAGLAAGVWTKEKVFAGLHKENTTVFRPKLDEAHRKKRADSWYKAVSRSFDLADLSL

SEQ ID NO: 102005 - DNA, 24 bp, Artificial sequence
  primer
atgtttccctctctcttccgactt

SEQ ID NO: 102006 - DNA, 26 bp, Artificial sequence
  primer
ttattggaagttttctagaacctgtt

SEQ ID NO: 102007 - protein, 694 aa, Artificial sequence
  consensus sequence
  Variant (2)..(2): Xaa in position 2 is any amino acid
  Variant (5)..(5): Xaa in position 5 is any amino acid
  Variant (7)..(7): Xaa in position 7 is any amino acid
  Variant (9)..(22): Xaa in position 9 to 22 is any amino acid
  Variant (23)..(23): Xaa in position 23 is any or no amino acid
  Variant (25)..(25): Xaa in position 25 is any amino acid
  Variant (27)..(28): Xaa in position 27 to 28 is any amino acid
  Variant (30)..(31): Xaa in position 30 to 31 is any amino acid
  Variant (32)..(96): Xaa in position 32 to 96 is any or no amino acid
  Variant (98)..(99): Xaa in position 98 to 99 is any amino acid
  Variant (104)..(105): Xaa in position 104 to 105 is any amino acid
  Variant (107)..(107): Xaa in position 107 is any amino acid
  Variant (110)..(134): Xaa in position 110 to 134 is any amino acid
  Variant (135)..(144): Xaa in position 135 to 144 is any or no amino acid
  Variant (154)..(155): Xaa in position 154 to 155 is any amino acid
  Variant (157)..(159): Xaa in position 157 to 159 is any amino acid
  Variant (162)..(162): Xaa in position 162 is any amino acid
  Variant (164)..(165): Xaa in position 164 to 165 is any amino acid
  Variant (167)..(167): Xaa in position 167 is any amino acid
  Variant (172)..(172): Xaa in position 172 is any amino acid
  Variant (174)..(174): Xaa in position 174 is any amino acid
  Variant (177)..(182): Xaa in position 177 to 182 is any amino acid
  Variant (184)..(196): Xaa in position 184 to 196 is any amino acid
  Variant (197)..(201): Xaa in position 197 to 201 is any or no amino acid
  Variant (204)..(207): Xaa in position 204 to 207 is any amino acid
  Variant (208)..(208): Xaa in position 208 is any or no amino acid
  Variant (212)..(213): Xaa in position 212 to 213 is any amino acid
  Variant (215)..(216): Xaa in position 215 to 216 is any amino acid
  Variant (218)..(220): Xaa in position 218 to 220 is any amino acid
  Variant (223)..(232): Xaa in position 223 to 232 is any amino acid
  Variant (233)..(237): Xaa in position 233 to 237 is any or no amino acid
  Variant (241)..(241): Xaa in position 241 is any amino acid
  Variant (243)..(243): Xaa in position 243 is any amino acid
  Variant (246)..(248): Xaa in position 246 to 248 is any amino acid
  Variant (251)..(251): Xaa in position 251 is any amino acid
  Variant (253)..(253): Xaa in position 253 is any amino acid
  Variant (254)..(266): Xaa in position 254 to 266 is any or no amino acid
  Variant (268)..(268): Xaa in position 268 is any amino acid
  Variant (271)..(272): Xaa in position 271 to 272 is any amino acid
  Variant (278)..(280): Xaa in position 278 to 280 is any amino acid
  Variant (282)..(286): Xaa in position 282 to 286 is any amino acid
  Variant (289)..(291): Xaa in position 289 to 291 is any amino acid
  Variant (293)..(301): Xaa in position 293 to 301 is any amino acid
  Variant (302)..(303): Xaa in position 302 to 303 is any or no amino acid
  Variant (306)..(314): Xaa in position 306 to 314 is any amino acid
  Variant (315)..(316): Xaa in position 315 to 316 is any or no amino acid
  Variant (318)..(323): Xaa in position 318 to 323 is any amino acid
  Variant (324)..(347): Xaa in position 324 to 347 is any or no amino acid
  Variant (350)..(350): Xaa in position 350 is any amino acid
  Variant (352)..(353): Xaa in position 352 to 353 is any amino acid
  Variant (357)..(357): Xaa in position 357 is any amino acid
  Variant (360)..(361): Xaa in position 360 to 361 is any amino acid
  Variant (364)..(367): Xaa in position 364 to 367 is any amino acid
  Variant (368)..(368): Xaa in position 368 is any or no amino acid
  Variant (370)..(370): Xaa in position 370 is any amino acid
  Variant (373)..(373): Xaa in position 373 is any amino acid
  Variant (379)..(379): Xaa in position 379 is any amino acid
  Variant (381)..(381): Xaa in position 381 is any amino acid
  Variant (383)..(383): Xaa in position 383 is any amino acid
  Variant (387)..(389): Xaa in position 387 to 389 is any amino acid
  Variant (390)..(391): Xaa in position 390 to 391 is any or no amino acid
  Variant (393)..(394): Xaa in position 393 to 394 is any amino acid
  Variant (398)..(398): Xaa in position 398 is any amino acid
  Variant (400)..(409): Xaa in position 400 to 409 is any amino acid
  Variant (410)..(421): Xaa in position 410 to 421 is any or no amino acid
  Variant (428)..(431): Xaa in position 428 to 431 is any amino acid
  Variant (433)..(436): Xaa in position 433 to 436 is any amino acid
  Variant (441)..(454): Xaa in position 441 to 454 is any amino acid
  Variant (455)..(455): Xaa in position 455 is any or no amino acid
  Variant (457)..(458): Xaa in position 457 to 458 is any amino acid
  Variant (460)..(467): Xaa in position 460 to 467 is any amino acid
  Variant (468)..(499): Xaa in position 468 to 499 is any or no amino acid
  Variant (504)..(504): Xaa in position 504 is any amino acid
  Variant (507)..(507): Xaa in position 507 is any amino acid
  Variant (510)..(510): Xaa in position 510 is any amino acid
  Variant (512)..(514): Xaa in position 512 to 514 is any amino acid
  Variant (518)..(520): Xaa in position 518 to 520 is any amino acid
  Variant (522)..(522): Xaa in position 522 is any amino acid
  Variant (524)..(529): Xaa in position 524 to 529 is any amino acid
  Variant (531)..(532): Xaa in position 531 to 532 is any amino acid
  Variant (535)..(535): Xaa in position 535 is any amino acid
  Variant (538)..(541): Xaa in position 538 to 541 is any amino acid
  Variant (543)..(546): Xaa in position 543 to 546 is any amino acid
  Variant (548)..(549): Xaa in position 548 to 549 is any amino acid
  Variant (551)..(552): Xaa in position 551 to 552 is any amino acid
  Variant (554)..(554): Xaa in position 554 is any amino acid
  Variant (555)..(556): Xaa in position 555 to 556 is any or no amino acid
  Variant (558)..(562): Xaa in position 558 to 562 is any amino acid
  Variant (563)..(583): Xaa in position 563 to 583 is any or no amino acid
  Variant (585)..(585): Xaa in position 585 is any amino acid
  Variant (590)..(596): Xaa in position 590 to 596 is any amino acid
  Variant (599)..(599): Xaa in position 599 is any amino acid
  Variant (603)..(607): Xaa in position 603 to 607 is any amino acid
  Variant (608)..(609): Xaa in position 608 to 609 is any or no amino acid
  Variant (611)..(611): Xaa in position 611 is any amino acid
  Variant (613)..(616): Xaa in position 613 to 616 is any amino acid
  Variant (618)..(618): Xaa in position 618 is any amino acid
  Variant (625)..(626): Xaa in position 625 to 626 is any amino acid
  Variant (629)..(629): Xaa in position 629 is any amino acid
  Variant (631)..(631): Xaa in position 631 is any amino acid
  Variant (633)..(646): Xaa in position 633 to 646 is any amino acid
  Variant (647)..(673): Xaa in position 647 to 673 is any or no amino acid
  Variant (675)..(675): Xaa in position 675 is any amino acid
  Variant (677)..(682): Xaa in position 677 to 682 is any amino acid
  Variant (684)..(689): Xaa in position 684 to 689 is any amino acid
  Variant (691)..(692): Xaa in position 691 to 692 is any amino acid
DXGTXSXRXXXXXXXXXXXXXXXQXEXXQXXXXXXXXXXXXXXXXXXXXXXXXXXXXXXXXXXXXXXXXXXXXXXXXXXXXXXXXXXXXXXXXXXXPXXGWVEXXPXEIXXXXXXXXXXXXXXXXXXXXXXXXXXXXXXXXXXXGITNQRETTXXWXXXTGXPXXNXAIVWXDXRTXXXXXXLXXXXXXXXXXXXXXXXXXGLXXXXXYFSXXKXXWXXXNVXXXXXXXXXXXXXXXFGTXDXWLXXXLTXGXXXXXXXXXXXXXXHXTDXXNASRTXXXNXXXXXWDXXXLXXXXXXXXXXXLPXXXXXXXXXXXGXXXXXXXXXXXXXXXXXXXXXXXXXXXXXXPIXGXXGDQXAAXXGQXXXXXGXAKXTYGTGXFXLXNTGXXXXXSXXGLLXTXXXXXXXXXXXXXXXXXXXXXXYALEGSXXXXGXXXXWLRDXXXXXXXXXXXXXXXAXXVXXXXXXXXXXXXXXXXXXXXXXXXXXXXXXXXXXXXXXXXVPAFXGLXAPXWXXXARGXXXGXTXXXXXXHXXRAXLEXXXXQXXXXLXXMXXDXXXGXXXXXXXXXXXXXXXXXXXXXXXXXXLXVDGGXXXXXXXMQXQADXXXXXXXVXRXXXXEXTALGAAXXAGXAXGXXXXXXXXXXXXXXXXXXXXXXXXXXXXXXXXXXXXXXXXXFXPXXXXXXRXXXXXXWXXAV

SEQ ID NO: 102008 - protein, 54 aa, Artificial sequence
  protein pattern
  Variant (3)..(3): Xaa in position 3 is Ala, Asn, Ser, Thr or Val
  Variant (6)..(6): Xaa in position 6 is any amino acid
  Variant (9)..(9): Xaa in position 9 is any amino acid
  Variant (11)..(12): Xaa in position 11 to 12 is any or no amino acid
  Variant (14)..(15): Xaa in position 14 to 15 is any or no amino acid
  Variant (17)..(17): Xaa in position 17 is Lys or Arg
  Variant (18)..(18): Xaa in position 18 is Ala, Gly or Ser
  Variant (19)..(21): Xaa in position 19 to 21 is any amino acid
  Variant (23)..(23): Xaa in position 23 is Ile, Leu or Met
  Variant (24)..(24): Xaa in position 24 is Ala, Ser or Thr
  Variant (25)..(30): Xaa in position 25 to 30 is any amino acid
  Variant (32)..(32): Xaa in position 32 is Phe, Ile, Leu or Val
  Variant (33)..(33): Xaa in position 33 is Ala, Ile or Val
  Variant (34)..(34): Xaa in position 34 is Lys or Arg
  Variant (36)..(36): Xaa in position 36 is Ala, Ser, Thr or Val
  Variant (37)..(37): Xaa in position 37 is Leu, Met or Val
  Variant (38)..(38): Xaa in position 38 is Asp, Glu or Gln
  Variant (39)..(39): Xaa in position 39 is Ala, Gly or Ser
  Variant (40)..(40): Xaa in position 40 is any amino acid
  Variant (41)..(41): Xaa in position 41 is Ala, Cys or Ser
  Variant (42)..(42): Xaa in position 42 is any amino acid
  Variant (44)..(44): Xaa in position 44 is Ala, Ser, Thr or Val
  Variant (45)..(45): Xaa in position 45 is any amino acid
  Variant (46)..(46): Xaa in position 46 is Ala, Asp or Glu
  Variant (47)..(47): Xaa in position 47 is Ile, Leu or Val
  Variant (48)..(49): Xaa in position 48 to 49 is any amino acid
  Variant (50)..(50): Xaa in position 50 is Ala, Cys or Ser
  Variant (52)..(53): Xaa in position 52 to 53 is any amino acid
AFXGLXAPXWXXDXXAXXXXXGXXXXXXXXHXXXAXXXXXXXQXXXXXXXMXXD

SEQ ID NO: 102009 - protein, 18 aa, Artificial sequence
  protein pattern
  Variant (2)..(3): Xaa in position 2 to 3 is any amino acid
  Variant (5)..(5): Xaa in position 5 is Ala, Cys, Asn or Ser
  Variant (11)..(11): Xaa in position 11 is Ala, Cys, Asn or Ser
  Variant (13)..(13): Xaa in position 13 is any or no amino acid
  Variant (15)..(15): Xaa in position 15 is any amino acid
  Variant (16)..(16): Xaa in position 16 is any or no amino acid
  Variant (18)..(18): Xaa in position 18 is Ala, Thr or Val
GXXKXTYGTGXFXLXXNX

SEQ ID NO: 102010 - protein, 24 aa, Artificial sequence
  protein pattern
  Variant (2)..(3): Xaa in position 2 to 3 is any or no amino acid
  Variant (8)..(8): Xaa in position 8 is Ile or Val
  Variant (9)..(9): Xaa in position 9 is any amino acid
  Variant (10)..(10): Xaa in position 10 is Ile, Met or Val
  Variant (11)..(11): Xaa in position 11 is Ala, Gly or Thr
  Variant (13)..(14): Xaa in position 13 to 14 is any amino acid
  Variant (15)..(15): Xaa in position 15 is Ile, Leu, Met or Val
  Variant (16)..(16): Xaa in position 16 is any amino acid
  Variant (17)..(17): Xaa in position 17 is Phe or Trp
  Variant (19)..(19): Xaa in position 19 is any amino acid
  Variant (20)..(20): Xaa in position 20 is Asp, Glu or Asn
  Variant (21)..(23): Xaa in position 21 to 23 is any amino acid
  Variant (24)..(24): Xaa in position 24 is Phe, Ile, Leu, Met or Val
AXXLEGSXXXXGXXXXXLXXXXXX

SEQ ID NO: 102011 - protein, 22 aa, Artificial sequence
  protein pattern
  Variant (3)..(3): Xaa in position 3 is Ala, Gly, Ile or Val
  Variant (4)..(4): Xaa in position 4 is any amino acid
  Variant (5)..(5): Xaa in position 5 is Ala, Cys, Ser, Thr or Val
  Variant (6)..(6): Xaa in position 6 is any amino acid
  Variant (7)..(7): Xaa in position 7 is Ala, Asn or Ser
  Variant (8)..(8): Xaa in position 8 is Ala, Asp, Glu, Gly, Asn, Gln, Ser or Thr
  Variant (9)..(11): Xaa in position 9 to 11 is any amino acid
  Variant (13)..(13): Xaa in position 13 is any amino acid
  Variant (15)..(15): Xaa in position 15 is Ala, Gly or Ser
  Variant (17)..(21): Xaa in position 17 to 21 is any amino acid
DGXXXXXXXXXQXQXDXXXXXV

SEQ ID NO: 102012 - protein, 19 aa, Artificial sequence
  protein pattern
  Variant (2)..(2): Xaa in position 2 is Ile, Leu or Val
  Variant (3)..(3): Xaa in position 3 is any amino acid
  Variant (4)..(4): Xaa in position 4 is Ala, Gly or Ser
  Variant (5)..(5): Xaa in position 5 is any amino acid
  Variant (6)..(6): Xaa in position 6 is Ala or Leu
  Variant (8)..(8): Xaa in position 8 is Asp or Asn
  Variant (10)..(10): Xaa in position 10 is any amino acid
  Variant (11)..(11): Xaa in position 11 is any or no amino acid
  Variant (13)..(14): Xaa in position 13 to 14 is any amino acid
  Variant (15)..(15): Xaa in position 15 is any or no amino acid
  Variant (17)..(18): Xaa in position 17 to 18 is any amino acid
  Variant (19)..(19): Xaa in position 19 is Ala, Cys or Gly
PXXXXXGXQXXAXXXGXXX

SEQ ID NO: 102013 - protein, 11 aa, Artificial sequence
  protein pattern
  Variant (2)..(2): Xaa in position 2 is any amino acid
  Variant (5)..(5): Xaa in position 5 is Ser or Thr
  Variant (7)..(7): Xaa in position 7 is Ala, Ser or Thr
  Variant (9)..(9): Xaa in position 9 is any amino acid
  Variant (10)..(10): Xaa in position 10 is Ile, Leu, Met or Val
  Variant (11)..(11): Xaa in position 11 is Ile, Leu or Val
DXGTXSXRXXX

SEQ ID NO: 102014 - protein, 16 aa, Artificial sequence
  protein pattern
  Variant (2)..(2): Xaa in position 2 is Cys, Ser, Thr or Val
  Variant (4)..(4): Xaa in position 4 is any amino acid
  Variant (8)..(9): Xaa in position 8 to 9 is any or no amino acid
  Variant (11)..(12): Xaa in position 11 to 12 is any amino acid
  Variant (13)..(14): Xaa in position 13 to 14 is any or no amino acid
  Variant (16)..(16): Xaa in position 16 is Ala, Gly, Asn, Thr or Val
EXTXLGAXXAXXXXAX

SEQ ID NO: 102015 - DNA, 1542 bp, Saccharomyces cerevisiae
  CDS (1)..(1542)
atgactgctggttctgccccccctgttgattacacttccttaaagaagaacttccaaccgtttctctccagaagagtagaaaatagatctctgaaaagcttttgggatgcttctgatatctcagatgacgtcattgagctagctggtggaatgccaaacgagagattttttcctatcgaatctatggatttgaaaatatcaaaagttccttttaatgataacccaaaatggcataattcgtttaccacggcgcatttggacttgggatcccccagtgagctacccattgcacgttctttccaatatgcagaaaccaagggtttaccccctctcttacattttgttaaagattttgtgtccagaattaatcgcccagccttttccgatgagacggagtctaactgggatgtcatcctttctggcgggtccaacgattcaatgtttaaggtttttgaaacaatttgcgacgaatcgaccactgtgatgattgaagagtttactttcaccccggctatgtccaatgtggaggctacaggagcaaaagtcatccccatcaagatgaacctgaccttcgacagagagtcccagggtattgatgtcgaatatctaacgcagttgctcgataattggtcaactggaccatacaaagacttaaacaagccaagggtcctatataccattgcaacgggccaaaatcctaccgggatgtctgtcccccagtggaaaagagagaaaatttaccagttggcccaaagacacgatttcctcattgttgaagatgatccctacggttatctgtactttccttcctataatccgcaagagccattagaaaacccttaccattctagcgacctgactactgaacggtatttgaatgattttttaatgaaatcattcttgactttggatacagatgcccgtgtcatccgtttggagactttttctaaaatttttgctcctggattaaggttatccttcatcgttgctaataaattccttttgcaaaaaatcttggatttggccgacattactacaagggcccccagtggtacctcacaagctattgtttattctacaataaaggcaatggctgagtccaacttatcgtcctctctttctatgaaagaagcaatgtttgagggttggataagatggataatgcagattgcttctaaatacaatcataggaaaaatcttactttgaaagccttatacgaaacagaatcttaccaagctggtcagtttaccgttatggaaccctccgcgggtatgttcatcattattaaaatcaattgggggaatttcgatagacctgacgatttgccgcaacagatggatattttagataagttcttgctgaagaatggtgttaaagtagtgcttggttataaaatggctgtttgcccaaattattcaaagcagaattcagattttctaagactcaccatcgcctatgcaagggatgatgatcagttgattgaagcttccaaaagaatcggtagtggcataaaagaattttttgacaactataaaagttga

SEQ ID NO: 102016 - protein, 513 aa, Saccharomyces cerevisiae
MTAGSAPPVDYTSLKKNFQPFLSRRVENRSLKSFWDASDISDDVIELAGGMPNERFFPIESMDLKISKVPFNDNPKWHNSFTTAHLDLGSPSELPIARSFQYAETKGLPPLLHFVKDFVSRINRPAFSDETESNWDVILSGGSNDSMFKVFETICDESTTVMIEEFTFTPAMSNVEATGAKVIPIKMNLTFDRESQGIDVEYLTQLLDNWSTGPYKDLNKPRVLYTIATGQNPTGMSVPQWKREKIYQLAQRHDFLIVEDDPYGYLYFPSYNPQEPLENPYHSSDLTTERYLNDFLMKSFLTLDTDARVIRLETFSKIFAPGLRLSFIVANKFLLQKILDLADITTRAPSGTSQAIVYSTIKAMAESNLSSSLSMKEAMFEGWIRWIMQIASKYNHRKNLTLKALYETESYQAGQFTVMEPSAGMFIIIKINWGNFDRPDDLPQQMDILDKFLLKNGVKVVLGYKMAVCPNYSKQNSDFLRLTIAYARDDDQLIEASKRIGSGIKEFFDNYKS

SEQ ID NO: 102017 - DNA, 1203 bp, Sulfolobus tokodaii str. 7
  CDS (1)..(1203): transl_table=11
atgttcgaaagatttctttcaaaagacgtatcaaatttaaggtcgtcagaaattagagatttattaaaactgactgaaggaaaaaaagttattagtttagctggcggtttaccagatcctactacttttcccgttgaagagattagaaaaataactgacgatgtactcagagaaaaatctgatagagccctacaatattcaacaacgtctgggataactgagttcaaaaaagagcttgttaacctatcaagatacagaggaataagcggtataaatgaaaataatacattcgtaactgtaggaagccaagaagccttatttatgatatttaatctcctagtagatccaggagatactgtaatcgtggaaatgcccacatatcttgctgcacttaatattcttagagcaagaaaacccaatttcattggcgtccatcttacacaaaatggtccagaccttgatgaattagagagaaaagtaaaagagagcataagtaatggcaaaaaaccgaagctaatgtatgttatacctacagctcaaaaccctggaggaacaacaatgagtttagatgataggaaaagacttcttgaaatagctcaaaaatacgactttttacttatagaagatgatgcttatggctttttagtttttgacggagaagcaccaccaccacttataagtttagataaagaaggaagagtaatatatacatctacattcagtaaaattttagctccaggtttaagattaggatgggttatagcacaagaagagtttattagagaaatggagttatacaagcagaatatagatttgcatactcctacacttactcaaatgatagcaatggaggcaataaagagaggagttatacaaaatcagttaccattgattagaagagtatatagagaaaaaagagatgtaatgctagcagcaatagagaaatacttcccgaaagaagctacgtggagcagaccagttggaggaatgtttgtttttgcctggttaccagaaaaaatagatacagtaaagatgttagaggaaagcatgagaagaggagtagcctatgttcctggatctagtttctaccatgattattctgggagaaatactatgagattaaacttcagctatcctactaagcaagaactagaagaaggtattaaaatcctaggaaatactatattagattttcttaaataa

SEQ ID NO: 102018 - protein, 400 aa, Sulfolobus tokodaii str. 7
MFERFLSKDVSNLRSSEIRDLLKLTEGKKVISLAGGLPDPTTFPVEEIRKITDDVLREKSDRALQYSTTSGITEFKKELVNLSRYRGISGINENNTFVTVGSQEALFMIFNLLVDPGDTVIVEMPTYLAALNILRARKPNFIGVHLTQNGPDLDELERKVKESISNGKKPKLMYVIPTAQNPGGTTMSLDDRKRLLEIAQKYDFLLIEDDAYGFLVFDGEAPPPLISLDKEGRVIYTSTFSKILAPGLRLGWVIAQEEFIREMELYKQNIDLHTPTLTQMIAMEAIKRGVIQNQLPLIRRVYREKRDVMLAAIEKYFPKEATWSRPVGGMFVFAWLPEKIDTVKMLEESMRRGVAYVPGSSFYHDYSGRNTMRLNFSYPTKQELEEGIKILGNTILDFLK

SEQ ID NO: 102019 - DNA, 1413 bp, Schizosaccharomyces pombe 972h-
  CDS (1)..(1413)
atggataatttaaaaaaaaaatatcaacatcatttatccctagaaagcgcatcccgtgagtatggtccgtttcagatgttaggtcgtattcaaagtgactcggatatcaaaatgctttcctttgctggtggagaacccaatcccagtaaattcccgattcataaactttcggtctccttcccagaagtaaattcttgggaaaaagacacgaacaaggacgcaactgtgtcttatgaattaagtaataatgcaaatgagggttctctggatttactgggagctttacagtacggccagtgccaaggaattccagaattggtcaagtttataaaagatcacgttggacaaatccacatgccacaatataaggactgggatataaaaataacaaatggaaatacgatcggccttgagtattgcttgcgattgctcgtcaaccgtggtgattgtattctcatagaaaaatatacataccctgccgcaattaccgcaatgcgtccccttggtgtgaaatttattcccattgacatggatgaaaacggcatgctaccagaaagttttgagaaagttatggaaacatgggattcatcgttaggagcaaggccccatgttttgtatactataccgactgggcaaaacccaactggatccacgttaactttggaaagaagaaagaagtttctaaccttggcaaaaaaatacgatattatcattgtcgaagatgaaccatactattttttgcaaatggaaaaatatgatgcaaattggaaacctgacaagcaagctttcaatatttcgtcattcaaaaaaaagctaattccctctttactccatctagataccgacggtagggttttgcgagttgattccttttccaaattgattgtaccgggattacgtttgggatggataactggaaattctctattcatcgatcgcataacccgttacgcagaagtttgtactgagagcccatccggcgtctctcaagtggttctctatgctatattaaatcgttggggacaaaatggttttttggagtggctacaagatttgcaaaactcatatactatgcgtcgaaatgctcttcttttggcagctgacaaacatcttccaaaatctgtttgtaaatatcattctcctaaagctggattgtttctatgggttgaacttgacaaaaaccgtcttatttgctcaaatatggacaagtccatttcggaaattgagatggaaatttttgtagaacttgttaacaatggggtaaagcctgtttgtggacagctatttatgggagaaccaaattcggcggacaaaattttttttcgatttgcttattcccttgctgacctaagcacttttgaagctggtttagagcggtttactagtactatacaaaaatattttcaattgtga

SEQ ID NO: 102020 - protein, 470 aa, Schizosaccharomyces pombe 972h-
MDNLKKKYQHHLSLESASREYGPFQMLGRIQSDSDIKMLSFAGGEPNPSKFPIHKLSVSFPEVNSWEKDTNKDATVSYELSNNANEGSLDLLGALQYGQCQGIPELVKFIKDHVGQIHMPQYKDWDIKITNGNTIGLEYCLRLLVNRGDCILIEKYTYPAAITAMRPLGVKFIPIDMDENGMLPESFEKVMETWDSSLGARPHVLYTIPTGQNPTGSTLTLERRKKFLTLAKKYDIIIVEDEPYYFLQMEKYDANWKPDKQAFNISSFKKKLIPSLLHLDTDGRVLRVDSFSKLIVPGLRLGWITGNSLFIDRITRYAEVCTESPSGVSQVVLYAILNRWGQNGFLEWLQDLQNSYTMRRNALLLAADKHLPKSVCKYHSPKAGLFLWVELDKNRLICSNMDKSISEIEMEIFVELVNNGVKPVCGQLFMGEPNSADKIFFRFAYSLADLSTFEAGLERFTSTIQKYFQL

SEQ ID NO: 102021 - DNA, 1446 bp, Schizosaccharomyces pombe 972h-
  CDS (1)..(1446)
atgatccggaatagtgaggattttagccatcatttgtcgagagaaagcaaggctcgtgagaaaggcccttttcaaatgttaggaagaattaaaagtagtacagggattgacgctatatctttttcctcaggtttacctcatcctaacaagtttgctatccgtgagctttctatcaagtttcctcaacttggttgctttaaggaggaaaatgggacatacgccaaagaggttaatgtaacatttaacataaaagctgatccttctgagggtcttttaaatttctctcagtccttgcagtatggccaatgccaaggaatttctgaattggtgggatttataaaggaacacattcggcggattcatgctccccgatacgaaaactgggatattaagatgagtaatggtaatacaagtggtttggaatattgtttacgactgctagtcaattatggggatcatgtcttgacagaaaagtacacttatcctgctgccatcaccgcaatgcgagccctaggtgttcaatttgtatctgttgatatggattcggaaggtatgcttcctgaaagtcttgaagaaattatgagagactgggatatatctctgggacctagacctcatgtcttgtacacagttcctactggtcaaaatcctactggttctactttgtcattaagtcggcgcaaaaagcttttagcattagcaaggaaatacgatatcatcatcgttgaagatgagccatactattttctacaaatggaagattataacggaagtttaaaccctgcacagcaaaaatgtgatgggtcaacgtttttaaagagtttggtcccttcattgctaagtttagacacagaaggtcgagttttgcgacttgattcgttctctaaactgattgctccaggaacccgccttggctatattactggaaattcaatgtttattgatcatattacacggattgcagaagtatgcacggaaagcccgtctggtatttgccaatctgtattgtatgcaatgctgcataattggggtcaagagggcttttgtgcatggttacaggagctgcaatattcttatactgttcgtcgaaacgcattccttaatgtagcaaacaagtatctaccaaattctgtttgtatttatcacgtaccaagagctggattattcttgtgggttgagttaaacttaaatcattaccgcttttcggatacgaaaaagtcagtttcccaaattgaaatggaaatattcctagcgcttgtagaaaaaggtgtaaaaactgtttgtggtcagttttttatggcaaatccagaacgtagtactaagatctttttccgtttcgcatattcaattgctgactttgaggactttgaggagggaattaagcgatttacatcagtcataaatgagcattttaatgtcgaaagcagagtacgaatctgcccttga

SEQ ID NO: 102022 - protein, 481 aa, Schizosaccharomyces pombe 972h-
MIRNSEDFSHHLSRESKAREKGPFQMLGRIKSSTGIDAISFSSGLPHPNKFAIRELSIKFPQLGCFKEENGTYAKEVNVTFNIKADPSEGLLNFSQSLQYGQCQGISELVGFIKEHIRRIHAPRYENWDIKMSNGNTSGLEYCLRLLVNYGDHVLTEKYTYPAAITAMRALGVQFVSVDMDSEGMLPESLEEIMRDWDISLGPRPHVLYTVPTGQNPTGSTLSLSRRKKLLALARKYDIIIVEDEPYYFLQMEDYNGSLNPAQQKCDGSTFLKSLVPSLLSLDTEGRVLRLDSFSKLIAPGTRLGYITGNSMFIDHITRIAEVCTESPSGICQSVLYAMLHNWGQEGFCAWLQELQYSYTVRRNAFLNVANKYLPNSVCIYHVPRAGLFLWVELNLNHYRFSDTKKSVSQIEMEIFLALVEKGVKTVCGQFFMANPERSTKIFFRFAYSIADFEDFEEGIKRFTSVINEHFNVESRVRICP

SEQ ID NO: 102023 - DNA, 1149 bp, Apis mellifera
  CDS (1)..(1149)
atggcgtattccgcgccgaagaacgtggtctcgttggccgagggtatgccgaacgaagaaaccttccctttcacggagatctccatcaaacttaacgatggatcgtctttcaccctagacgaacgagaattgggcgcagctttgcaatatattcccactcagggttacccgccgcttcttcagaccctgagggagttccagagaagggcgcacgcacctcccttatgggagagccgcgacatcataatcgtctccggttctcaagatggattaagcaaaactctcgaggccatactcgaacctggcgactcgctcttggtgcacgatcctttctatccaggcgtggacattgtggtctcgccgtataagatagagttgatcccgatccctcaggatgagcacggtttgattccggatattttgagggaaacgttaagaaacagaaagctgtccgggaagaaaatgccgaaaataatgtacataaatgccaccggaatgaatcccaccggtgtcgttattcctttggaaagacgaaaggagatctataggatagcttgcgaatacaacttcttgatcctggacgatgatccttaccacttcttgcacttcgaggaggtggagccaaaatcgttcttatcactggacaccgaaggaagggtaattaggcttgactccttctctaaagtggtcagtagcggtatcagattgggcttcatcacggcggcggctccattgatagccagtatagagctccacttgcaaagcagccatctccacgcccctacgttatcccaggcgatactgtacaggctgatgaaattatggggatacgacgggatgataaaccatttcaaatggataaggcatttctataagaaacggagggatattatcgctaggttcgctgaaaaacacttgaatggtttagtagatttcaccattccaagtggaggttttttcttatggattaaagtacgagatattaaagacacttggaaaatgcttatgcagcgaggaattacagaaggtgtgctaatggcacctggtgcacctttcatgaaagattcttccaaaccttgcaacgccatcagggctagtttcagcaaagcttcttacgaagaaatgaatctggtaaattttaacgattaa

SEQ ID NO: 102024 - protein, 382 aa, Apis mellifera
MAYSAPKNVVSLAEGMPNEETFPFTEISIKLNDGSSFTLDERELGAALQYIPTQGYPPLLQTLREFQRRAHAPPLWESRDIIIVSGSQDGLSKTLEAILEPGDSLLVHDPFYPGVDIVVSPYKIELIPIPQDEHGLIPDILRETLRNRKLSGKKMPKIMYINATGMNPTGVVIPLERRKEIYRIACEYNFLILDDDPYHFLHFEEVEPKSFLSLDTEGRVIRLDSFSKVVSSGIRLGFITAAAPLIASIELHLQSSHLHAPTLSQAILYRLMKLWGYDGMINHFKWIRHFYKKRRDIIARFAEKHLNGLVDFTIPSGGFFLWIKVRDIKDTWKMLMQRGITEGVLMAPGAPFMKDSSKPCNAIRASFSKASYEEMNLVNFND

SEQ ID NO: 102025 - DNA, 1311 bp, Nasonia vitripennis
  CDS (1)..(1311)
atgcataagttcaacaacaagaacaaattcaagatggactatactgagttcaaaacagatgtttctatgcgaagaagatcggcggcaacaagagaactgactaaaatcgcttactcggcgccgcatagcgttatctctctggccgagggtatgccgaacgaggaaaccttcccttttacccaaatttcggtgaagcttaacgacggctccgactttgtcttggaaggagaagaactggctgctgctctccagtacatccccagtcaaggtttccctcctctgctgcaggctatcagagaatttcaaagaaaagctcatgcaccgccgatttgggagagccgcgaggttgtgatcgtcgccggtggccaggatggcctgagcaaggcactggaggccattatcggccccggagatccgattctagtgcagaatccgttttatcccggcgtcagtgtggtgattggaccacacgaggcggaactcataccgatcgatcaagacgattacggcataagctccatttgcctgcgcgaacgtctgcaggagcgcgaggcttccggccagaagatgcctaagattatgtacatcaacgccaccggggcaaatcccaccggtacagtcatgcctctcgagaggaggaaggagatctacaggatagcctgcgagtacaatttcctcattctcgatgacgatccctatcacttcatgtacttcaccgacgaagctccgcgatctttcctgtcgttggacacagaaggccgcgttatcaggctcgactcgttctcgaaggtcctgagcagcggtttgagaatcggtgtgatcacagcagctgcgccgctagtctcagccattgaactacacatgcaaagcagtcatctacacgccccgacactatcacaggtgattctgtacaagctcctgaaaatctggggatacgacaaaatgatggaccacttctgtaggataaggaacttctacaagcaccgacgtgatctcatcgtaaaacttgcgcgggaacatttacgagacgtcgcggaattcagtgtaccgagtgcaggattcttcttgtggataactgttcccggcatccaggacacctggaaaatggtgatgcagcgaggtgtcacccacggtgtgctcgtggctccaggcgctgctttcatggctaatccgtccgagccttgtaacgccatcagggtgagctttgctaaagcttcccacaaagagatgaatttggcgttggagcggttgtcgttgcttataaaagacgaattggcaaaaaataggtcgagcttgcacggcaacacgtga

SEQ ID NO: 102026 - protein, 436 aa, Nasonia vitripennis
MHKFNNKNKFKMDYTEFKTDVSMRRRSAATRELTKIAYSAPHSVISLAEGMPNEETFPFTQISVKLNDGSDFVLEGEELAAALQYIPSQGFPPLLQAIREFQRKAHAPPIWESREVVIVAGGQDGLSKALEAIIGPGDPILVQNPFYPGVSVVIGPHEAELIPIDQDDYGISSICLRERLQEREASGQKMPKIMYINATGANPTGTVMPLERRKEIYRIACEYNFLILDDDPYHFMYFTDEAPRSFLSLDTEGRVIRLDSFSKVLSSGLRIGVITAAAPLVSAIELHMQSSHLHAPTLSQVILYKLLKIWGYDKMMDHFCRIRNFYKHRRDLIVKLAREHLRDVAEFSVPSAGFFLWITVPGIQDTWKMVMQRGVTHGVLVAPGAAFMANPSEPCNAIRVSFAKASHKEMNLALERLSLLIKDELAKNRSSLHGNT

SEQ ID NO: 102027 - DNA, 1110 bp, Nasonia vitripennis
  CDS (1)..(1110)
atggactacggcaaattcatgacggagatcagtaagcggcggaagcccaatctcattcggcagctcactgaagcctacatgaagaatccagacgccctgttcttcgccggcggactgccgaatccccaaatgttccccttcaaggagatttccgtcacctacagcgggggcactcggatgaaactggagaataaggatctcgtctcggcccttcaatacggacagacgcaaggacacccgccgttgctgaaaaagtggcgcgagctccagtcaaagtggcactcgccgccgtacagcgagtgggacgtgcacttcgtaaccggctcgatggacggctgcagcaaaatattcgagctgctgatcgaggagggcagccccgtgatgctccagacgccgacctacaccggcatcctcggcgcggcgatgccgatgcagccccacatcgtaccgatcgagatggacgaggacggggtcctgccggaggacatctccaaggcctgcgaggagcggctcaagagcggcaagcctctgcccaagttcctgtacgtcaacccgactggcgcgaatccagttggaacggtctacagcaacgagcgcaaggaggagatctacaagctggcccagaaatacgactttctcatcctcgaggacgacgcctactatttcctgcacttcctcgacgagcagcccaggtccttcctctcgctggacgtcgacgggagggttctcaggctggactccttcagcaagatcttgagcgcgggaatcaggctcggagtggtcacggggcccaagccgttgctccagaagataggactgcacctggcctgctccaccctgcacccctcctcgctctcgcaggtgctggtctgcaagctcctcgaggcctggagcgacgacgacttgagcgctcacttcgccgagatacggagattctatcgcgacaagcgcgacctcatgctcaagggaacgagcaagccctgcccttacctacgtatctgctacagccaagctcaacccgacgacgtggaagagggattagccaaattagcagcgctgattagacaggtggcaaaaaagggagacgagccagtgatcaacggagcttga

SEQ ID NO: 102028 - protein, 369 aa, Nasonia vitripennis
MDYGKFMTEISKRRKPNLIRQLTEAYMKNPDALFFAGGLPNPQMFPFKEISVTYSGGTRMKLENKDLVSALQYGQTQGHPPLLKKWRELQSKWHSPPYSEWDVHFVTGSMDGCSKIFELLIEEGSPVMLQTPTYTGILGAAMPMQPHIVPIEMDEDGVLPEDISKACEERLKSGKPLPKFLYVNPTGANPVGTVYSNERKEEIYKLAQKYDFLILEDDAYYFLHFLDEQPRSFLSLDVDGRVLRLDSFSKILSAGIRLGVVTGPKPLLQKIGLHLACSTLHPSSLSQVLVCKLLEAWSDDDLSAHFAEIRRFYRDKRDLMLKGTSKPCPYLRICYSQAQPDDVEEGLAKLAALIRQVAKKGDEPVINGA

SEQ ID NO: 102029 - DNA, 1515 bp, Candida glabrata CBS 138
  CDS (1)..(1515)
atgactctgccagaatctaaagatttcacttacttcttctctgaagaaaccaaggctcgtaagccttctccattaaagacatgcattcaatacttttctgatcctaacatgatctttcttggtggtggtcttccaatgagtgcttacttcccttgggataacttggctgctgatacaccattgccacctttcaccaatggtatcggtgcaactataaccggctctcaagaagacacctcaaagttttcagtcaagaaggaatctaaagtccatgaaggtgacattcctctggctcgttccttgcaatatggtaagagtatgggtcaaccagaattgactgatttcttgaaggagcacactaagatgattcacgatatgaaatacagcgactgggatgttgttgctactacaggtaacaccaacgcttgggaatccaccttaagagtcttctgtaacagaggcgatgttattcttgctgaagctcactcattctcttcttctttagcttctgcagaagcccagggtatcattactttcccagttcctatcgatgctcacggtattattccagaaaagctagaagcattgctggacaactggaccgagggtgctccaaagccaaagctattgtataccattccaacgggccaaaacccaacagggtcttctttgaatgccgaaagaaagaaggagatttacagaattgctcaaaagcatgacttcttgattatagaggacgaaccatactacttcttgcaagttggtgaatatatcagtgacctaagtaagagagctgaagttgcccaaaagaacgcaaacatttcacatgaagatttcctaaagtcactagctcttactttcttgtctgttgataccgatggtagagtcatcagaatggactctttctccaaggttttagctccaggtactagattgggttggattactggttcatctaaactactccaagcatacttaagtctacatgaaatgactattcaatctccatccggtttctctcaatctcttgtgagtggtactttgaaccgttggggccaaaagggttacattgactggttgatcggtctacgtcatgaatacactgccaagcgtgaccattgtattgactccttgtataaattcattccaaaggataacaacaaagaaggtaaaccaatttttactatcaacccaccaattgctggtatgttctttactgttgacatggacgctagcgcccatcctgaatttgctaccacttacgaatcagatccaaccaaggttgaagaagcattatatcaaaaggttatcaagtctggtgtcctagtcgttccaggtatatggttcaaggccgatggtgaaactacaccagctcaaccagcttcatcaaaggaaaaccctaacccaaaccaaattttcttcagaggtacttacgctgctgttgaaccttctaagctggacgaaggtttgaagagattaggccaatgtctacgtgaagaatttcaattggcataa

SEQ ID NO: 102030 - protein, 504 aa, Candida glabrata CBS 138
MTLPESKDFTYFFSEETKARKPSPLKTCIQYFSDPNMIFLGGGLPMSAYFPWDNLAADTPLPPFTNGIGATITGSQEDTSKFSVKKESKVHEGDIPLARSLQYGKSMGQPELTDFLKEHTKMIHDMKYSDWDVVATTGNTNAWESTLRVFCNRGDVILAEAHSFSSSLASAEAQGIITFPVPIDAHGIIPEKLEALLDNWTEGAPKPKLLYTIPTGQNPTGSSLNAERKKEIYRIAQKHDFLIIEDEPYYFLQVGEYISDLSKRAEVAQKNANISHEDFLKSLALTFLSVDTDGRVIRMDSFSKVLAPGTRLGWITGSSKLLQAYLSLHEMTIQSPSGFSQSLVSGTLNRWGQKGYIDWLIGLRHEYTAKRDHCIDSLYKFIPKDNNKEGKPIFTINPPIAGMFFTVDMDASAHPEFATTYESDPTKVEEALYQKVIKSGVLVVPGIWFKADGETTPAQPASSKENPNPNQIFFRGTYAAVEPSKLDEGLKRLGQCLREEFQLA

SEQ ID NO: 102031 - DNA, 1614 bp, Candida glabrata CBS 138
  CDS (1)..(1614)
atggcttcatgcatagcctgcgatgacacatatatagttttcatatacattttcttacatagcagctttgtaccaattaggatactacaagcgatgacgacgatgattgatttagaggaaaagtttggacagtttttgtcctggaggatgcagaacaggaagttggtggctttctgggatgatgaagtgttgggtgacgatgtcattgagttgaccgccggtatgcccaacgagcagtttttccccatcaaggccatggacatgaccattgtcaacaagccatttgagtcagccgatgacacctctaagcacctgcactgtaagatgtccacttacgagcccaagagtttgcccatcgctagaagtttccagtacaacgaggtgccaggtttgccccagatcagaaactttgccaagtacttggtcaacaagatcaacaagccagcttactctgctgatcagtgggatgtgctgttgtcctcgggctcgtgtgactccatgttcaagttctttgagtgtttctgtgatgagaaatccacagtgcttatggaagagttcacattcacaccggtgatctctcacgtcaaggccactggtgctgaatgtatcccattgaagatgaacttgaccaaggatccaagcactcaaggtatcgatgtcgactacctgactcaattgctagacaactggtcctcaggcccttacaaacacttgaacaagccaagaattctttacaccatatgcactgggcaaaacccaactggtgtcaccatcccaatggagaaccgtaggaagatttacgagttggctcataagcataacttcttgatcttggaggatgacccatacggatatttgtcatttccatcttataaaccggaggacccattgaagaacgattatctagaagacggcttcacagtggaaaagtacactaacgaattcctagtggactcgttcttgaccatcgatacggacgctcgtgttattcgtatggagaccttctcaaaagtatttgcacctggcctaagactggggttcatcgtggctaacaagtatatcatcagcaacttgcttgaatacgccgagatcaccactagggcaccaagtggtgtctctcaggccgtgctgtacaacactttggagaccatggcgctataccaagatggcgatgacaaggaagacccagagaaaaagcaagaggcgctgttccaaggttggatgcattggatcatgaaggtggctgctgagtacacccacagaagaaacataacattgaaggcactatatgagaccgatgcctacaagaacggcctgttcacagtgatcgagccatctgctggtatgtttgtcggagtcaagatcaaatgggacaaagcgcccggtgagatcggtaacatccccgagcaaatgaagaaactcgacagattccttgtgcaaaatggtatcaagacagtgctgggatacagaatgggtgtgtcttccgagttgtcccacgacaactccgacttcttaagagtcacaattgcttacgccaaggatgaccagcagctagtagaggcctctcatagaatcggctccggtatcgagcaattcttcaaagagctaaaataa

SEQ ID NO: 102032 - protein, 537 aa, Candida glabrata CBS 138
MASCIACDDTYIVFIYIFLHSSFVPIRILQAMTTMIDLEEKFGQFLSWRMQNRKLVAFWDDEVLGDDVIELTAGMPNEQFFPIKAMDMTIVNKPFESADDTSKHLHCKMSTYEPKSLPIARSFQYNEVPGLPQIRNFAKYLVNKINKPAYSADQWDVLLSSGSCDSMFKFFECFCDEKSTVLMEEFTFTPVISHVKATGAECIPLKMNLTKDPSTQGIDVDYLTQLLDNWSSGPYKHLNKPRILYTICTGQNPTGVTIPMENRRKIYELAHKHNFLILEDDPYGYLSFPSYKPEDPLKNDYLEDGFTVEKYTNEFLVDSFLTIDTDARVIRMETFSKVFAPGLRLGFIVANKYIISNLLEYAEITTRAPSGVSQAVLYNTLETMALYQDGDDKEDPEKKQEALFQGWMHWIMKVAAEYTHRRNITLKALYETDAYKNGLFTVIEPSAGMFVGVKIKWDKAPGEIGNIPEQMKKLDRFLVQNGIKTVLGYRMGVSSELSHDNSDFLRVTIAYAKDDQQLVEASHRIGSGIEQFFKELK

SEQ ID NO: 102033 - DNA, 1593 bp, Kluyveromyces lactis NRRL Y-1140
  CDS (1)..(1593)
atgacggtaaccattgatgataagacgttagaagagcattattcgaagttcttgaatcgtcacgttgacagaagagttattctgcaattctgggatgattatttgcccaaggatgtgaaaccgcatccaaacccatatgttttggcagctggtatgccaaacgagggtttgttccctgtggaatctgtgcatgtcaatgtggttgaacgtccgttccagcatttggagtacccattcaaaagtgaaaagatccatgtcggtgctgctggtgaaatcggtgtcaatgaagctgaatacgtgaaatctagggtcgatgatggtagtatggttgatatttggaggtacgatccatctcatggtgataacattccaattgcccaggcactacaatattctgacacgaaagggttcccgcaattgattgatttctcaaagaagttggttagttacttaaacaagccagcttacgacaattgggatgttatgttagcaaatggatcttctgattctttatctaaagttttcaccactttaacagatgaagacgttaccgtgttaatggaagaatttactttcactccgactatctccaacgtcactgcaaatggtgggattccgattccattgaaagttgatatcacggatgatgcttctcagcagggtattaacgtcgagtatatggaccaattgcttgagaattggtcaacaggtgaatattctcacttatctaagcctagactgttatacacaatcgtcacagggcaaaatccaaccggtatgacacaatgcaaagagaagagacagaaaatatacgatctatgcgaaaaacatgacattataattgtggaagatgatccgtatggttacctaaagtttttaccctttgacaagtctgatccattaaagaatcaatataacgatggcactatcactttcgataaatattgtaaagaaatattagccccctcatatttgaccatagacacatcagggagagtcattagattagaaactttctccaaagtcttcgcccctgggatgcgtctttccttcattgtcgccaataaatttatcctagacaagttattgaaatatgcagacatttctgttagatcgccatgtggtcttgcccaagctatgaccattaatataatagacaaatgggcagaaaatttcaatggagacaaggtcagagcttggctatcatgggtcatgaaagttgctggtgagtatacacatagaagaaatgtgcttttccaagcattggaagctacaccagcttataaagaagaattatttgaattgattgaaccctctgccggtatgttcattagtatcaagatcaattttgataagttcggagaaatctcggataaattaaaggccatgaatttcttaaactacaagttgttggaagaaggttgcattgtaatcttgggttacagaatggcagttgacaagaaattttcatatgacaggtccaactttttaagaattacatttgctatggctccagatgaagagcatttacaaacagctgctgaaaggctaggtaaaggtgttgagagattcttcaaagagtatcacaactga

SEQ ID NO: 102034 - protein, 530 aa, Kluyveromyces lactis NRRL Y-1140
MTVTIDDKTLEEHYSKFLNRHVDRRVILQFWDDYLPKDVKPHPNPYVLAAGMPNEGLFPVESVHVNVVERPFQHLEYPFKSEKIHVGAAGEIGVNEAEYVKSRVDDGSMVDIWRYDPSHGDNIPIAQALQYSDTKGFPQLIDFSKKLVSYLNKPAYDNWDVMLANGSSDSLSKVFTTLTDEDVTVLMEEFTFTPTISNVTANGGIPIPLKVDITDDASQQGINVEYMDQLLENWSTGEYSHLSKPRLLYTIVTGQNPTGMTQCKEKRQKIYDLCEKHDIIIVEDDPYGYLKFLPFDKSDPLKNQYNDGTITFDKYCKEILAPSYLTIDTSGRVIRLETFSKVFAPGMRLSFIVANKFILDKLLKYADISVRSPCGLAQAMTINIIDKWAENFNGDKVRAWLSWVMKVAGEYTHRRNVLFQALEATPAYKEELFELIEPSAGMFISIKINFDKFGEISDKLKAMNFLNYKLLEEGCIVILGYRMAVDKKFSYDRSNFLRITFAMAPDEEHLQTAAERLGKGVERFFKEYHN

SEQ ID NO: 102035 - DNA, 1476 bp, Debaryomyces hansenii CBS767
  CDS (1)..(1476)
atgtctaaaccagaagctaaggatttgagccacttgttgagtgaagaagctaagtcgagaaaaaactctccattgaaggctgctttcaagtattacaaacaaccaggaatgacgttcttgggcggtggattaccattatcagattgttttccgttcaataaagtgacagcggacattccatcggtaccattttcagaaggtatttcggctccgctctctgatgaaaataaaactgtcgtagaggtatacaaaagagccgaaatgaacaagacagaagacaagcagatcgagcttgccagatcattgcaatatggacacactgaaggtcaagccgagattattgatttcttgaaggagcacacggaaaagattcacaatgttccatataaggattgggatcttattgcatctgttggtaacacgcaatcgtgggatgcaaccttgagatcgtttgtcaccagaggtgattctatcttggttgaagaatattcgttcagttcggcattggaaactgcccacgcacaaggcgttaataccattccagttccaatggacgccaagggaattcttccggaagcattggaaaagcagttagaccaatgggttggaccaaagccaaagttgttatataccatttgtactggtcaaaacccaaccgggtcttgtctctcggctgaaagaagaagggccatctacaaattggcatgcaagcacgatttcatcattattgaggacgagccttattacttcttgcaaatggaagattataccacggacgaaaagtcaagagctagcaacaaggtcgacagccacgacgaattcgtcaaggctttagttccatcctacatctccatggatgtcgaaggaagagttatcagattagactcattctctaaggttttggcacctggtttgagattcggttggattgtcggacaagccaaattactcgagagatatgtcagaatccatgaagtttctatccagtgtccatctggttttactcaatccatctgtaattccttgttgcaaaaatggggtcaaaagggttacttagattggttaatgggcttacgtgccgactacacccacaagagagatgtcgctattgatgcagttaacaagtacttccctaaggaagttgtatcatttatcccaccagtggccggtatgtttttcacaactaccatcgacgcttccaagcaccctaaattcaagtccgagtttaacgaggacccactccaggttgaaaatgccgtctacgagcaagctttgaaacaaggttgtttgatgatcccaggttcttggttcaaggccgacggtaaatcaaatcctccacaacctgaattaccagaaaaccctgctagcaaaaacaccttcttctttagaggtacatatgctgccgttccattagatcaattagtcataggattagaaaaattcggtaaagcaattaaggttgaatacggtctttaa

SEQ ID NO: 102036 - protein, 491 aa, Debaryomyces hansenii CBS767
MSKPEAKDLSHLLSEEAKSRKNSPLKAAFKYYKQPGMTFLGGGLPLSDCFPFNKVTADIPSVPFSEGISAPLSDENKTVVEVYKRAEMNKTEDKQIELARSLQYGHTEGQAEIIDFLKEHTEKIHNVPYKDWDLIASVGNTQSWDATLRSFVTRGDSILVEEYSFSSALETAHAQGVNTIPVPMDAKGILPEALEKQLDQWVGPKPKLLYTICTGQNPTGSCLSAERRRAIYKLACKHDFIIIEDEPYYFLQMEDYTTDEKSRASNKVDSHDEFVKALVPSYISMDVEGRVIRLDSFSKVLAPGLRFGWIVGQAKLLERYVRIHEVSIQCPSGFTQSICNSLLQKWGQKGYLDWLMGLRADYTHKRDVAIDAVNKYFPKEVVSFIPPVAGMFFTTTIDASKHPKFKSEFNEDPLQVENAVYEQALKQGCLMIPGSWFKADGKSNPPQPELPENPASKNTFFFRGTYAAVPLDQLVIGLEKFGKAIKVEYGL

SEQ ID NO: 102037 - DNA, 1599 bp, Yarrowia lipolytica CLIB122
  CDS (1)..(1599)
atgtccttccacgacaagttcatttctgaccgttcaaaggcccggtctcattcccatttcacgctcaaccagacggccaagacaaccaaaccccattccaacccgattttcatctctggaggtcttcccaaccccattgggttccccattgacgagatcaccgtcaatctgaccaccagtcccaatccccgacctcgatttgtgcctgctgcgactctgttttccaagccaggactggtcgagttccccgacatcaccgagaatagcacccggttgagccagaacctcaagatcctcaagtttgccgagtcgctggaaactgcgacaaacggcaatggcggccagctgactctcgagcgatctctccagtacggcgaacaagatggtcacccgcagctcaagaaatttgtgacggccctcaccaagcgcctccatccccccaagctggacgagaaggactggaacgtgatcatcaccaatggcggtggagacggtattcacaaggccgtggacctgctcattaaccctggagaccatgtccttgttgaggagtactgcttctctccctcctttgacaacattaaatctgtcggaggtattcttgttcccatcaagctagattatgacgagggactcgacgtgactggtctcaaacggatccttgaaaactgggatgaggccaagcagggacccaaaccccgagttctgtatagtgttccttctggccagaatccctacggagtctcccagtctctggagagacgtaaagcaatctatgctgttctgaaagaacatgggatcgtcatcatcgaagatgatccctacggagccctggcctacgagtcctacaacaagaaattcaccaacggcaactcctccaagtctctgaacactccggagaaggctcatgacgagtctgtcgactctgaggcacgtgaatccgacatctccaaggctgatatcgaccattacacctccttgatcgctccctcttacctcaccattgatgatgtaggactggttgttcgaattgacactttctccaaggtattttctccgggacttcgacttgggtggattgtcagtcacgtcaacttcattgagaagctatctctatacacttctctttcaacccgggccgcttccggcgtttctcagctgctgatcaacaacattgctcactcttggggtcttgagggctggttgcgttggtgtcttctgttgcgaaaccagtatctggagcgacgaaaccaccttctagcccagctggacaagctcgaccagtccaagatcacctacatcacgcctgtctgtggtatgtttgtgtctgcgcttgttcattttgataagattgcgtcttcgtcgtttaatggcgtcactcttccctaccagtcgcgactggtggagcttggaatcgaggaaggagttctgattgtttctggatccaatatggctgcttccgaagagctgcgtcaaacggccaagttcattcgactcacttttgcctatgaggatcccgatctgctcgacgaggctatcaagcgattgggtaaggcggtggaccggctttttgaggagggtgagattaagcagaagtag

SEQ ID NO: 102038 - protein, 532 aa, Yarrowia lipolytica CLIB122
MSFHDKFISDRSKARSHSHFTLNQTAKTTKPHSNPIFISGGLPNPIGFPIDEITVNLTTSPNPRPRFVPAATLFSKPGLVEFPDITENSTRLSQNLKILKFAESLETATNGNGGQLTLERSLQYGEQDGHPQLKKFVTALTKRLHPPKLDEKDWNVIITNGGGDGIHKAVDLLINPGDHVLVEEYCFSPSFDNIKSVGGILVPIKLDYDEGLDVTGLKRILENWDEAKQGPKPRVLYSVPSGQNPYGVSQSLERRKAIYAVLKEHGIVIIEDDPYGALAYESYNKKFTNGNSSKSLNTPEKAHDESVDSEARESDISKADIDHYTSLIAPSYLTIDDVGLVVRIDTFSKVFSPGLRLGWIVSHVNFIEKLSLYTSLSTRAASGVSQLLINNIAHSWGLEGWLRWCLLLRNQYLERRNHLLAQLDKLDQSKITYITPVCGMFVSALVHFDKIASSSFNGVTLPYQSRLVELGIEEGVLIVSGSNMAASEELRQTAKFIRLTFAYEDPDLLDEAIKRLGKAVDRLFEEGEIKQK

SEQ ID NO: 102039 - DNA, 1590 bp, Aspergillus nidulans FGSC A4
  CDS (1)..(1590)
atgtctccgccggcagctttggacatggataccaacggcattggcgctcctaagccgttgactgtcgatggaattgctgctgtgagggcgaagagcgccccaatgcctgctggggttgctcctgctaccagtagtgatatgttcaagagtccggcctgttacaccaaaccaaaggcgaagagatgggacaatttcttcactcttgaagctaagtcacgaaagacctcgacattaaaaggagcggcgaagtttttgaaaaacccaggccttatttccttgggtggcgggctgccctccccagaatacttcccgttcgaagaactctctttcaaagtgcctaccccgcctggcttttcccccgaagcaacgcgacagtccggcactactttggtcgccggaaaacatgatattcgtgagggcaagagcctgtacgatcttgaggtttctctgaactacgggcaatcgactggatcccctcagctgctccgatttgtgacggaacataccgagctcattcataaccccccatactctgactggcaatgcgctttgactgccggaagtacctatgcctgggatacagctctccggttgttctgtgaaaggggtgattaccttctgatggaagagtatactttctctagcgcccaagaaaccgcccttccccagggagtcaacgttgcccccgttaagatggacgaacaaggacttctgcctggagacctggatgatgtcctgagcaactgggatgagaaagtccgcggtgctcggaagcctttcgttctctataccatcccgaccggccagaaccccacaggcgctacgcaatccgcagaacggcgaaaggagatctacaaagtcgctcagaagcacaacatttatatcattgaggacgagccgtactacttcttgcaaatgcagccgtacacaggagccgatagtgcgccagtgccgcctcctgcgaaccacgaagaatttgtcaagtcccttattccttcatatctgagcattgatgtcgatggccgtgttcttcgtgttgagtcattctccaaagtcctggcccctggctcgcgtaccggctgggtcgtcggctctgagcaggtcattgaacgctttcttcgaaacaccgaagtttccgcccagcatccgagcggtatctcccagctgatgctcttcaagctgttggatgagcactggggacaccttgggtacttcgattggcttatcaacctgcgcatgcaatacaccaaccgcagaaatattatggttcaagcatgcgagaagcatcttcctcaggagattgctagctggatcgcccctgcagcgggcatgttccactggattcaagtggactggaagaagcaccctgaactcacatctggtaagactcgcgactccatcgaagaggctcttttccatgccgctatcaacaacggcgtccttgtgtcgcgtggaagctggttcaaggccgctggagcaagcgaagacaagcttttcttccgtgctacattcgcggctgccagtgaggagaatatcacagaggcgatcaggagatttggtgatgcgctccgggttgagttcaagctatag

SEQ ID NO: 102040 - protein, 529 aa, Aspergillus nidulans FGSC A4
MSPPAALDMDTNGIGAPKPLTVDGIAAVRAKSAPMPAGVAPATSSDMFKSPACYTKPKAKRWDNFFTLEAKSRKTSTLKGAAKFLKNPGLISLGGGLPSPEYFPFEELSFKVPTPPGFSPEATRQSGTTLVAGKHDIREGKSLYDLEVSLNYGQSTGSPQLLRFVTEHTELIHNPPYSDWQCALTAGSTYAWDTALRLFCERGDYLLMEEYTFSSAQETALPQGVNVAPVKMDEQGLLPGDLDDVLSNWDEKVRGARKPFVLYTIPTGQNPTGATQSAERRKEIYKVAQKHNIYIIEDEPYYFLQMQPYTGADSAPVPPPANHEEFVKSLIPSYLSIDVDGRVLRVESFSKVLAPGSRTGWVVGSEQVIERFLRNTEVSAQHPSGISQLMLFKLLDEHWGHLGYFDWLINLRMQYTNRRNIMVQACEKHLPQEIASWIAPAAGMFHWIQVDWKKHPELTSGKTRDSIEEALFHAAINNGVLVSRGSWFKAAGASEDKLFFRATFAAASEENITEAIRRFGDALRVEFKL

SEQ ID NO: 102041 - DNA, 1572 bp, Candida albicans SC5314
  CDS (1)..(1572): transl_table=12
atgtctgatcctactcatttaatttctaagcgagctgctggaagaacttcggtacattttacaaatgctccatctgataagcctccggcaaatttcaagcctcatgaaaaaccgttggcattgtcttatggtatgccgaatcacgggtttttcccaattgattccatagatgtcaatttagttgattacccattccaaaaaattaccacaccttctactacttcgtctactgcagaagaagaacctccttcttcttctttgaatggttccgagaacggtcatcaaaccaaaactccgccttccagtatacacacaccacagtcaactgttcatatcagcagacatactactgatccaaaattaattgatttggctagaggattacaatatgctgctgttgaaggtcatgcaccattattacaatttgcaagagatttcatcattcgtacacataaaccaaattatgacgattggaatgttttcattactactggtgccagtgatggattaaataaagctgctgatgtatttttagatgatggtgatgttatcttagttgaggaatttacatttagtccatttttaagatttctggataatgctggtgctaaagctgttccagtgaaaatcaattttgataatgattctgatggaattgatttgactcaatttgttgatttattggagaattgggagaaacattatccaaacttacctaaaccaaaggcattatatactattgccacaggacaaaatccaactggatttactcaatctttagaatttagaaagaaaatttatgatttggctgtcaaatatgattttgccattattgaagatgatccttatggttatttgacattaccaaaatatgaaaaacctaatataggtggtagtggtagtggcaataatgaattgaaaaacgatcttgaaattgacgattatttgaaaaatcatttgactccatcttaccttgaattggacactactggtagagttcttagagttgagaccttttccaaattatttgctccaggtttgagattaggatttattgttggtcataaagaagtcattgacgcagttaagaattatagtgacgttgttaatcgaggtgctctgggtttaacacaaactattgttaataatgttattcaagaaaactttaaaggtgttgatggatggctagaatggattttaaaaatgagattgaattattcttacagaaaagatttgttattatattcaatttttgaatcacaagcttataaaaaaggttatgttgatgttattgaccctaaagctggtatgtttgttacttttaaaattaatttgccaaaagatgttgatgttttacaaaaaatgaaattattattatggaaattgatttcttatggaattttggttgttccaggatataatatgacggttgatttagagtttagtaaagatagaagcaatttctttagattatgttatgctcttgctaataatgatgaagaaattcttgaaagtggtaaaagattgactgatgcagtttatgaattctttagtaatgggttagagttttaa

SEQ ID NO: 102042 - protein, 523 aa, Candida albicans SC5314
MSDPTHLISKRAAGRTSVHFTNAPSDKPPANFKPHEKPLALSYGMPNHGFFPIDSIDVNLVDYPFQKITTPSTTSSTAEEEPPSSSLNGSENGHQTKTPPSSIHTPQSTVHISRHTTDPKLIDLARGLQYAAVEGHAPLLQFARDFIIRTHKPNYDDWNVFITTGASDGLNKAADVFLDDGDVILVEEFTFSPFLRFSDNAGAKAVPVKINFDNDSDGIDLTQFVDLLENWEKHYPNLPKPKALYTIATGQNPTGFTQSLEFRKKIYDLAVKYDFAIIEDDPYGYLTLPKYEKPNIGGSGSGNNELKNDLEIDDYLKNHLTPSYLELDTTGRVLRVETFSKLFAPGLRLGFIVGHKEVIDAVKNYSDVVNRGASGLTQTIVNNVIQENFKGVDGWLEWILKMRLNYSYRKDLLLYSIFESQAYKKGYVDVIDPKAGMFVTFKINLPKDVDVLQKMKLLLWKLISYGILVVPGYNMTVDLEFSKDRSNFFRLCYALANNDEEILESGKRLTDAVYEFFSNGLEF

SEQ ID NO: 102043 - DNA, 1572 bp, Candida albicans SC5314
  CDS (1)..(1572): transl_table=12
atgtctgatcctactcatttaatttctaagcgagctgctggaagaacttcggtgcattttacaaatgctccatctgataagcctccggcaaatttcaagcctcatgaaaaaccgttggcattgtcttatggtatgccgaatcacgggtttttcccaattgattccatagatgtcaatctagttgattacccatttcaaaaaattaccacaccttctactacttcgtctactgcagaagaagaacctccttcttcttctttgaatggttccgagaacggtcatcaaaccaaaactccgccttccagtatacacacaccacagtcaactgttcatatcagcagacatactactgatccaaaattaattgatttggctagaggattacaatatgctgctgttgaaggtcatgcaccattattacaatttgcaagagatttcatcattcgtacacataaaccaaattatgacgattggaatgttttcattactactggtgccagtgatggattaaataaagctgctgatgtatttttagatgatggtgatgttatcttagttgaggaatttacatttagtccatttttaagatttctggataatgctggtgctaaggctgttccagtgaaaatcaattttgataatgattccgatggaattgatttgactcaatttgttgatttattggagaattgggagaaacattatccaaacttacctaaaccaaaggcattatatactattgccacaggacaaaatccaactggatttactcaatctttagaatttagaaagaaaatttatgatttggctgtcaaatatgattttgccattattgaagatgatccttatggttatttgacattaccaaaatatgaaaaacctaatataggtggtagtggtagtggcaataatgaattgaaaaacgatcttgaaattgatgattatttgaagaatcatttgactccatcttaccttgaattggacactactggtagagttcttagagttgagaccttttccaaattatttgctccaggtttgagattaggatttattgttggtcataaaaaagtcattgacgcagttaagaattatagtgacgttgttaatcgaggtgctctgggtttaacacaaactattgttaataatgttattcaagaaaactttaaaggtgttgatggatggctagaatggattttaaaaatgagattgaattattcttatagaaaagatttattattatattcaatttttgaatcacaagcttataaaaaaggttatgttgatgttattgaccctaaagctggtatgtttgttacttttaaaattaatttgccaaaagatgttgatgttttacaaaaaatgaaattattattatggaaattgatttcttatggaattttggttgttccaggatataatatgacggttgatttagagtttagtaaagatagaagcaatttctttagattatgttatgctcttgctaataatgatgaagaaattcttgaaagtggtaaaagattgactgatgcagtttatgaattctttagtaatgggttagagttttaa

SEQ ID NO: 102044 - protein, 523 aa, Candida albicans SC5314
MSDPTHLISKRAAGRTSVHFTNAPSDKPPANFKPHEKPLALSYGMPNHGFFPIDSIDVNLVDYPFQKITTPSTTSSTAEEEPPSSSLNGSENGHQTKTPPSSIHTPQSTVHISRHTTDPKLIDLARGLQYAAVEGHAPLLQFARDFIIRTHKPNYDDWNVFITTGASDGLNKAADVFLDDGDVILVEEFTFSPFLRFSDNAGAKAVPVKINFDNDSDGIDLTQFVDLLENWEKHYPNLPKPKALYTIATGQNPTGFTQSLEFRKKIYDLAVKYDFAIIEDDPYGYLTLPKYEKPNIGGSGSGNNELKNDLEIDDYLKNHLTPSYLELDTTGRVLRVETFSKLFAPGLRLGFIVGHKKVIDAVKNYSDVVNRGASGLTQTIVNNVIQENFKGVDGWLEWILKMRLNYSYRKDLLLYSIFESQAYKKGYVDVIDPKAGMFVTFKINLPKDVDVLQKMKLLLWKLISYGILVVPGYNMTVDLEFSKDRSNFFRLCYALANNDEEILESGKRLTDAVYEFFSNGLEF

SEQ ID NO: 102045 - DNA, 1476 bp, Cryptococcus neoformans var. neoformans B-3501A
  CDS (1)..(1476)
atgccctccgttgcagccgtccctgttaagctcgattatcaatctttccttagtcaggaggcgaagggacgagtaaggtctccattgagagatctcaggtattttcatgccatccctggtatgatcagtttcggaggaggcttaccccatccatccacctggccagtcaacgctatgacgctgtctgtcccattcgccaaaaagtctatcttcattcccgggtatgagagcaatgacccaaccagtctctatcctttggctccgtatatcccgcctacgaagctcaatagtgtgactgagcccttaatccctgatctcgcgcgggatctccaatattcatcgaactttggtttgccatactttgttgactggctcactcagcacgtgaaaagaatacatgatcccccctaccctgaaaaccagtggcaggttctcgccaccgctggtaacacggatgcgtcggatggggtagtcagaacactgtgcagcccaggagactctatactacttgaagaatttgctttcccaggctctttaactcattacaagtcactcggcatcaaatgtgctggtgttccaatggatggtgaaggaattgtccccagcgcacttgaaaagatactggccgaatgggacgacgaagctcgaggcggtccaaagccgaaagttatccttattgtacccacttgctcaaacccctcagggatcacttacccggcctccaggaaacgtgaaatatacgcagtctgtcgaaaatggaatttgcttatcattgaggatgatccttattgctaccttcaggtaaggcccaatggagcggacaccccattaattccgtcattcttgtccttggatcttgatggtcgagtggtgcgcttggactctttttctaaattcatagcccctgggagcaggtgtggttggatcacaggagcgaaggagctggtaaccactatcatggtaaaggcagaagcgagctccaatggaccttcaggttttgcagttgcttccatctccgctgtgatcaaggcatggggcggccatgaagggctggaaagggattatcttccccacatctcggatacatattccaagcggtccaatcttatggtgtctctcattcgcaaatatgtccctgcagaagcggctgaatgccctgatgggtctggagggatgttcctctgggtacgactgcgagttgaatcccatccccagctatccactctctcacctgaagagatttcagacaaagtgtttcacactctcatcggagagaaagtaatggtagccccgtctagctacttcaaaacacctggagggccggtatggtctaaagacgaagaatctaaaaggatctttgtcaggttgagcttctctctctctaccgcagatgaaatggaagagggcgtgaagagattcgctagaggattgagaaaggaatggggaatccggaatcttgatgaagctgagcattag

SEQ ID NO: 102046 - protein, 491 aa, Cryptococcus neoformans var. neoformans B-3501A
MPSVAAVPVKLDYQSFLSQEAKGRVRSPLRDLRYFHAIPGMISFGGGLPHPSTWPVNAMTLSVPFAKKSIFIPGYESNDPTSLYPLAPYIPPTKLNSVTEPLIPDLARDLQYSSNFGLPYFVDWLTQHVKRIHDPPYPENQWQVLATAGNTDASDGVVRTLCSPGDSILLEEFAFPGSLTHYKSLGIKCAGVPMDGEGIVPSALEKILAEWDDEARGGPKPKVILIVPTCSNPSGITYPASRKREIYAVCRKWNLLIIEDDPYCYLQVRPNGADTPLIPSFLSLDLDGRVVRLDSFSKFIAPGSRCGWITGAKELVTTIMVKAEASSNGPSGFAVASISAVIKAWGGHEGLERDYLPHISDTYSKRSNLMVSLIRKYVPAEAAECPDGSGGMFLWVRLRVESHPQLSTLSPEEISDKVFHTLIGEKVMVAPSSYFKTPGGPVWSKDEESKRIFVRLSFSLSTADEMEEGVKRFARGLRKEWGIRNLDEAEH

SEQ ID NO: 102047 - DNA, 1302 bp, Tribolium castaneum; identical to SEQ ID NO: 10202
  CDS (1)..(1302)

SEQ ID NO: 102048 - protein, 433 aa, Tribolium castaneum; identical to SEQ ID NO: 10203

SEQ ID NO: 102049 - DNA, 1755 bp, Aspergillus oryzae
  CDS (1)..(1755)
atggcgcctcctcttgacttatcccatcattatgcatccaccaccaaacgacgtcagggaagcggcatcaaagacctatataagtacttcttcatcccaggcattgcgaacctggctggtggcttaccaaacccctcatacttcccatacgataccctcgaggctaccgtcgcgacaccccagcgtttccaaccttccaacaatggcacaaccaagaagtctggagatgacgctaagtcatccatgcggttgatcgttcctaaggagagtcacgcgaccgatgtacagaatagaatcgatatcgccacagccctgcagtatgtcacagctgatggcctcccccctatggcctcatttgttcgccaattcgcccgtcaccatcttcatcccaacgttccatatgccggaggtcccgaaaccatcctcaccactggagcgaccgatggcttctcaaaatcaatcgaagtattcacgaatgtctggaacccagacagagactggaccagtcagcgcgagggcattctttgtgaggaatttgtatatatgaatgctgttacaaccgtcaagccaagaggcctcaacgtcgtgccggtcgccatcgatgtacagggaatgttggcacgcggtaaaggagggttggccgatgttcttgaaaactgggacttccgaaaaggacgtcgtccgcatttaatgtacaccatcacgattggccagaaccccacgggcggtaccctatccgtcgagcgtagaaaagaaatctacgcactctgtcatcgatacgatatcatcataatcgaggacgatccttactggaacttgcaatacccatcggcggccgcgttagaagcccagcatcggggcacgcccatggatacagcttcagtaaagcgcaattacaatgcgcatggaaagtcctccgggtatgaattcctggactcgttggttccatcgtatttgtccttggacacggatggacgcgttgtgcgtctcgacactttctccaagaccattgcccctggttgtcgcttgggctggataactgcacaaccggccgtgattgagaggttgactcgggtcaccgaaaccgcaacgcaggcaccttcgggctttgttcaagccctggtagccaaactgattctgggtcaacagacagatcacaagtctaccaattcgaacaagagcgatcgtagctggcaaatggatggctgggtccgttggctggagggtttgcgcggtggatatgaacgacgcatgcaagacatgtgcagcactctagaggagggtagatttattatcgcctcggaagccggcctcgagtccagcgaggaaagctgggaagtcgtagataaagtacagatgtatgactttgcttggcccaccggcggtatgttcgtctggattaagctccgtctcgacacccatcccttgcatggaagatacgacccagccaggctttccaaggcattatgggtacatttgatgcagaaaccccacctctgtctcctaggtcccggagacttgtttgctccctcgcaggagaccttgaatcgttcttggcagtattaccgactttgctttgccgctatgcctgaagctgatgtgaaggatatcacggtgagattggtggatgggttccgggcgttctggaagaagaccgacttagatggtctcgagggagacggtgcagatatttcgcaggtggttcagagtatgggcatggagcgcgtaggaaatttcttgggaagtggatgttag

SEQ ID NO: 102050 - protein, 584 aa, Aspergillus oryzae
MAPPLDLSHHYASTTKRRQGSGIKDLYKYFFIPGIANLAGGLPNPSYFPYDTLEATVATPQRFQPSNNGTTKKSGDDAKSSMRLIVPKESHATDVQNRIDIATALQYVTADGLPPMASFVRQFARHHLHPNVPYAGGPETILTTGATDGFSKSIEVFTNVWNPDRDWTSQREGILCEEFVYMNAVTTVKPRGLNVVPVAIDVQGMLARGKGGLADVLENWDFRKGRRPHLMYTITIGQNPTGGTLSVERRKEIYALCHRYDIIIIEDDPYWNLQYPSAAALEAQHRGTPMDTASVKRNYNAHGKSSGYEFLDSLVPSYLSLDTDGRVVRLDTFSKTIAPGCRLGWITAQPAVIERLTRVTETATQAPSGFVQALVAKLILGQQTDHKSTNSNKSDRSWQMDGWVRWLEGLRGGYERRMQDMCSTLEEGRFIIASEAGLESSEESWEVVDKVQMYDFAWPTGGMFVWIKLRLDTHPLHGRYDPARLSKALWVHLMQKPHLCLLGPGDLFAPSQETLNRSWQYYRLCFAAMPEADVKDITVRLVDGFRAFWKKTDLDGLEGDGADISQVVQSMGMERVGNFLGSGC

SEQ ID NO: 102051 - DNA, 1503 bp, Saccharomyces cerevisiae
  CDS (1)..(1503)
atgactttacctgaatcaaaagacttttcttacttgttttcggatgaaaccaatgctcgtaaaccatccccattgaaaacctgcatccatcttttccaagatcctaacattatctttttgggtggtggcctgccattaaaagattatttcccatgggataatctatctgtagattcacccaagcctccttttccccagggtattggagctccaattgacgagcagaattgcataaaatacaccgtcaacaaagattacgctgataaaagtgccaatccttccaacgatattcctttgtcaagagctttgcaatacgggttcagtgctggtcaacctgaactattaaacttcattagagatcataccaagattatccacgatttgaagtataaggactgggacgttttagccactgcaggtaacacaaatgcctgggaatctactttaagagtcttttgtaaccgaggtgatgtcatcttagttgaggcacattctttttcctcttcattggcttctgcagaggctcaaggtgtcattaccttccccgtgccaattgacgctgatggtatcattcctgaaaaattagctaaagtcatggaaaactggacacctggtgctcctaaaccaaagttgttatacactattccaacgggccaaaatccaactggtacttccattgcagaccatagaaaggaggcaatttacaagatcgctcaaaagtacgacttcctaattgtggaagatgaaccttattatttcttacaaatgaatccctacatcaaagacttgaaggaaagagagaaggcacaaagttctccaaagcaggaccatgacgaatttttgaagtccttggcaaacactttcctttccttggatacagaaggccgtgttattagaatggattccttttcaaaagttttggccccagggacaagattgggttggattactggttcatccaaaatcttgaagccttacttgagtttgcatgaaatgacgattcaagccccagcaggttttacacaagttttggtcaacgctacgctatccaggtggggtcaaaagggttacttggactggttgcttggcctgcgtcatgaatacactttgaaacgtgactgtgccatcgatgccctttacaagtatctaccacaatctgatgctttcgtgatcaatcctccaattgcaggtatgtttttcaccgtgaacattgacgcatctgtccaccctgagtttaaaacaaaatacaactcagacccttaccagctagaacagagtctttaccacaaagtggttgaacgtggtgttttagtggttcccggttcttggttcaagagtgagggtgagacggaacctcctcaacccgctgaatctaaagaagtcagtaatccaaacataattttcttcagaggtacctatgcagctgtctctcctgagaaactgactgaaggtctgaagagattaggtgatactttatacgaagaatttggtatttccaaatag

SEQ ID NO: 102052 - protein, 500 aa, Saccharomyces cerevisiae
MTLPESKDFSYLFSDETNARKPSPLKTCIHLFQDPNIIFLGGGLPLKDYFPWDNLSVDSPKPPFPQGIGAPIDEQNCIKYTVNKDYADKSANPSNDIPLSRALQYGFSAGQPELLNFIRDHTKIIHDLKYKDWDVLATAGNTNAWESTLRVFCNRGDVILVEAHSFSSSLASAEAQGVITFPVPIDADGIIPEKLAKVMENWTPGAPKPKLLYTIPTGQNPTGTSIADHRKEAIYKIAQKYDFLIVEDEPYYFLQMNPYIKDLKEREKAQSSPKQDHDEFLKSLANTFLSLDTEGRVIRMDSFSKVLAPGTRLGWITGSSKILKPYLSLHEMTIQAPAGFTQVLVNATLSRWGQKGYLDWLLGLRHEYTLKRDCAIDALYKYLPQSDAFVINPPIAGMFFTVNIDASVHPEFKTKYNSDPYQLEQSLYHKVVERGVLVVPGSWFKSEGETEPPQPAESKEVSNPNIIFFRGTYAAVSPEKLTEGLKRLGDTLYEEFGISK

SEQ ID NO: 102053 - DNA, 1542 bp, Saccharomyces cerevisiae
  CDS (1)..(1542)
atgactgctggttctgccccccctgttgattacacttccttaaagaagaacttccaaccgtttctctccagaagagtagaaaatagatctctgaaaagcttttgggatgcttctgatatctcagatgacgtcattgagctagctggtggaatgccaaacgagagattttttcctatcgaatctatggatttgaaaatatcaaaagttccttttaatgataacccaaaatggcataattcgtttaccacggcgcatttggacttgggatcccccagtgagctacccattgcacgttctttccaatacgcagaaaccaagggtttaccccctctcttacattttgttaaagattttgtgtccagaattaatcgcccagccttttccgatgagacggagtctaactgggatgtcatcctttctggcgggtccaacgattcaatgtttaaggtttttgaaacaatttgcgacgaatcgaccactgtgatgattgaagagtttactttcaccccggctatgtccaatgtggaggctacaggagcaaaagtcatccccatcaagatgaacctgaccttcgacagagagtcccagggtattgatgtcgaatatctaacgcagttgctcgataattggtcaactggaccatacaaagacttaaacaagccaagggtcctatataccattgcaacgggccaaaatcctaccgggatgtctgtcccccagtggaaaagagagaaaatttaccagttggcccaaagacacgatttcctcattgttgaagatgatccctacggttatctgtactttccttcctataatccgcaagagccattagaaaacccttaccattctagcgacctgactactgaacggtatttgaatgattttttaatgaaatcattcttgactttggatacagatgcccgtgtcatccgtttggagactttttctaaaatttttgctcctggattaaggttatccttcatcgttgctaataaattccttttgcaaaaaatcttggatttggccgacattactacaagggcccccagtggtacctcacaagctattgtttattctacaataaaggcaatggctgagtccaacttatcgtcctctctttctatgaaagaagcaatgtttgagggttggataagatggataatgcagattgcttctaaatacaatcataggaaaaatcttactttgaaagccttatacgaaacagaatcttaccaagctggtcagtttaccgttatggaaccctccgcgggtatgttcatcattattaaaatcaattgggggaatttcgatagacctgacgatttgccgcaacagatggatattttagataagttcttgctgaagaatggtgttaaactagtgcttggttataaaatggctgtttgcccaaattattcaaagcagaattcagattttctaagactcaccatcgcctatgcaagggatgatgatcagttgattgaagcttccaaaagaatcggtagtggcataaaagaattttttgacaactataaaagttga

SEQ ID NO: 102054 - protein, 513 aa, Saccharomyces cerevisiae
MTAGSAPPVDYTSLKKNFQPFLSRRVENRSLKSFWDASDISDDVIELAGGMPNERFFPIESMDLKISKVPFNDNPKWHNSFTTAHLDLGSPSELPIARSFQYAETKGLPPLLHFVKDFVSRINRPAFSDETESNWDVILSGGSNDSMFKVFETICDESTTVMIEEFTFTPAMSNVEATGAKVIPIKMNLTFDRESQGIDVEYLTQLLDNWSTGPYKDLNKPRVLYTIATGQNPTGMSVPQWKREKIYQLAQRHDFLIVEDDPYGYLYFPSYNPQEPLENPYHSSDLTTERYLNDFLMKSFLTLDTDARVIRLETFSKIFAPGLRLSFIVANKFLLQKILDLADITTRAPSGTSQAIVYSTIKAMAESNLSSSLSMKEAMFEGWIRWIMQIASKYNHRKNLTLKALYETESYQAGQFTVMEPSAGMFIIIKINWGNFDRPDDLPQQMDILDKFLLKNGVKLVLGYKMAVCPNYSKQNSDFLRLTIAYARDDDQLIEASKRIGSGIKEFFDNYKS

SEQ ID NO: 102055 - DNA, 21 bp, Artificial sequence
  primer
atgactgctggttctgccccc

SEQ ID NO: 102056 - DNA, 28 bp, Artificial sequence
  primer
tcaacttttatagttgtcaaaaaattct

SEQ ID NO: 102057 - protein, 566 aa, Artificial sequence
  consensus sequence
  Variant (2)..(21): Xaa in position 2 to 21 is any amino acid
  Variant (22)..(29): Xaa in position 22 to 29 is any or no amino acid
  Variant (31)..(31): Xaa in position 31 is any amino acid
  Variant (33)..(36): Xaa in position 33 to 36 is any amino acid
  Variant (39)..(57): Xaa in position 39 to 57 is any amino acid
  Variant (58)..(113): Xaa in position 58 to 113 is any or no amino acid
  Variant (117)..(120): Xaa in position 117 to 120 is any amino acid
  Variant (122)..(137): Xaa in position 122 to 137 is any amino acid
  Variant (138)..(138): Xaa in position 138 is any or no amino acid
  Variant (140)..(150): Xaa in position 140 to 150 is any amino acid
  Variant (151)..(155): Xaa in position 151 to 155 is any or no amino acid
  Variant (157)..(175): Xaa in position 157 to 175 is any amino acid
  Variant (176)..(185): Xaa in position 176 to 185 is any or no amino acid
  Variant (187)..(187): Xaa in position 187 is any amino acid
  Variant (189)..(207): Xaa in position 189 to 207 is any amino acid
  Variant (209)..(214): Xaa in position 209 to 214 is any amino acid
  Variant (215)..(220): Xaa in position 215 to 220 is any or no amino acid
  Variant (222)..(238): Xaa in position 222 to 238 is any amino acid
  Variant (239)..(247): Xaa in position 239 to 247 is any or no amino acid
  Variant (249)..(251): Xaa in position 249 to 251 is any amino acid
  Variant (253)..(255): Xaa in position 253 to 255 is any amino acid
  Variant (258)..(258): Xaa in position 258 is any amino acid
  Variant (263)..(269): Xaa in position 263 to 269 is any amino acid
  Variant (271)..(272): Xaa in position 271 to 272 is any amino acid
  Variant (275)..(283): Xaa in position 275 to 283 is any amino acid
  Variant (285)..(285): Xaa in position 285 is any amino acid
  Variant (288)..(288): Xaa in position 288 is any amino acid
  Variant (291)..(292): Xaa in position 291 to 292 is any amino acid
  Variant (294)..(301): Xaa in position 294 to 301 is any amino acid
  Variant (302)..(345): Xaa in position 302 to 345 is any or no amino acid
  Variant (347)..(347): Xaa in position 347 is any amino acid
  Variant (349)..(350): Xaa in position 349 to 350 is any amino acid
  Variant (352)..(353): Xaa in position 352 to 353 is any amino acid
  Variant (357)..(357): Xaa in position 357 is any amino acid
  Variant (359)..(361): Xaa in position 359 to 361 is any amino acid
  Variant (365)..(367): Xaa in position 365 to 367 is any amino acid
  Variant (370)..(370): Xaa in position 370 is any amino acid
  Variant (372)..(372): Xaa in position 372 is any amino acid
  Variant (374)..(374): Xaa in position 374 is any amino acid
  Variant (376)..(400): Xaa in position 376 to 400 is any amino acid
  Variant (402)..(423): Xaa in position 402 to 423 is any amino acid
  Variant (424)..(444): Xaa in position 424 to 444 is any or no amino acid
  Variant (446)..(454): Xaa in position 446 to 454 is any amino acid
  Variant (455)..(489): Xaa in position 455 to 489 is any or no amino acid
  Variant (491)..(492): Xaa in position 491 to 492 is any amino acid
  Variant (494)..(494): Xaa in position 494 is any amino acid
  Variant (496)..(516): Xaa in position 496 to 516 is any amino acid
  Variant (517)..(530): Xaa in position 517 to 530 is any or no amino acid
  Variant (532)..(536): Xaa in position 532 to 536 is any amino acid
  Variant (538)..(546): Xaa in position 538 to 546 is any amino acid
  Variant (547)..(565): Xaa in position 547 to 565 is any or no amino acid
RXXXXXXXXXXXXXXXXXXXXXXXXXXXXGXPXXXXFPXXXXXXXXXXXXXXXXXXXXXXXXXXXXXXXXXXXXXXXXXXXXXXXXXXXXXXXXXXXXXXXXXXXXXXXXXXXLQYXXXXGXXXXXXXXXXXXXXXXXPXXXXXXXXXXXXXXXXGXXXXXXXXXXXXXXXXXXXXXXXXXXXXXLXEXXXXXXXXXXXXXXXXXXXPXXXXXXXXXXXXGXXXXXXXXXXXXXXXXXXXXXXXXXXPXXXYXXXTGXNPTGXXXXXXXRXXIYXXXXXXXXXIXEDXPYXXLXXXXXXXXXXXXXXXXXXXXXXXXXXXXXXXXXXXXXXXXXXXXXXXXXXXXSXLXXDXXGRVXRXXXFSKXXXPGXRXGXIXXXXXXXXXXXXXXXXXXXXXXXXXQXXXXXXXXXXXXXXXXXXXXXXXXXXXXXXXXXXXXXXXXXXXYXXXXXXXXXXXXXXXXXXXXXXXXXXXXXXXXXXXXXXXXXXXXPXXGXFXXXXXXXXXXXXXXXXXXXXXXXXXXXXXXXXXXXGXXXXXGXXXXXXXXXXXXXXXXXXXXXXXXXXXXR

SEQ ID NO: 102058 - protein, 29 aa, Artificial sequence
  protein pattern
  Variant (2)..(2): Xaa in position 2 is any amino acid
  Variant (3)..(3): Xaa in position 3 is Ile, Leu or Val
  Variant (5)..(5): Xaa in position 5 is any amino acid
  Variant (6)..(6): Xaa in position 6 is Asp, Glu, Ser or Thr
  Variant (7)..(7): Xaa in position 7 is Ala or Gly
  Variant (10)..(10): Xaa in position 10 is Ile, Leu or Val
  Variant (12)..(12): Xaa in position 12 is Leu, Met or Val
  Variant (13)..(13): Xaa in position 13 is Asp or Glu
  Variant (14)..(14): Xaa in position 14 is Ser or Thr
  Variant (18)..(18): Xaa in position 18 is any amino acid
  Variant (19)..(19): Xaa in position 19 is Phe, Ile, Leu or Val
  Variant (20)..(20): Xaa in position 20 is Ala, Ser or Val
  Variant (21)..(21): Xaa in position 21 is Ala, Pro or Ser
  Variant (23)..(23): Xaa in position 23 is any amino acid
  Variant (25)..(25): Xaa in position 25 is any amino acid
  Variant (26)..(26): Xaa in position 26 is Gly or Ser
  Variant (27)..(27): Xaa in position 27 is any amino acid
  Variant (28)..(28): Xaa in position 28 is Ile or Val
  Variant (29)..(29): Xaa in position 29 is Thr or Val
LXXDXXXRVXRXXXFSKXXXXGXRXXXXX

SEQ ID NO: 102059 - protein, 21 aa, Artificial sequence
  protein pattern
  Variant (3)..(3): Xaa in position 3 is any amino acid
  Variant (4)..(4): Xaa in position 4 is Ile, Leu or Val
  Variant (5)..(5): Xaa in position 5 is Ala or Cys
  Variant (6)..(6): Xaa in position 6 is any amino acid
  Variant (7)..(7): Xaa in position 7 is Glu, Lys or Arg
  Variant (8)..(8): Xaa in position 8 is His, Trp or Tyr
  Variant (9)..(9): Xaa in position 9 is Asp or Asn
  Variant (10)..(10): Xaa in position 10 is Phe, Ile or Leu
  Variant (11)..(11): Xaa in position 11 is any amino acid
  Variant (13)..(13): Xaa in position 13 is Ile, Leu or Val
  Variant (14)..(14): Xaa in position 14 is Asp or Glu
  Variant (16)..(16): Xaa in position 16 is Asp or Glu
  Variant (17)..(17): Xaa in position 17 is Ala or Pro
  Variant (19)..(20): Xaa in position 19 to 20 is any amino acid
  Variant (21)..(21): Xaa in position 21 is Leu or Met
IYXXXXXXXXXIXXDXXYXXX

SEQ ID NO: 102060 - protein, 19 aa, Artificial sequence
  protein pattern
  Variant (2)..(3): Xaa in position 2 to 3 is any amino acid
  Variant (4)..(4): Xaa in position 4 is Leu or Met
  Variant (6)..(7): Xaa in position 6 to 7 is any amino acid
  Variant (8)..(8): Xaa in position 8 is Ala, Cys, Pro or Val
  Variant (11)..(11): Xaa in position 11 is any amino acid
  Variant (14)..(15): Xaa in position 14 to 15 is any or no amino acid
  Variant (17)..(17): Xaa in position 17 is Gly or Val
  Variant (18)..(18): Xaa in position 18 is any amino acid
  Variant (19)..(19): Xaa in position 19 is Cys, Ser, Thr or Val
PXXXYXXXTGXNPXXTXXX

SEQ ID NO: 102061 - DNA, 2733 bp, Saccharomyces cerevisiae
  CDS (1)..(2733)
atgagcagcaaaatatcagatcttacatctacacaaaataagcccctccttgttacgcaacaactaatcgaaaaatattacgaacagatcctgggcacttcccagaacataattcctattttaaatccgaagaacaagtttattaggcccagtaaggataattcagatgttgaaagggtggaggaggatgctggtaaaagactgcaaactggcaagaacaaaactacgaacaaagtaaatttcaacctggatactggaaacgaggataaacttgacgatgaccaagagacagtaacagaaaatgaaaataatgatatcgagatggttgagacagacgaaggcgaagatgaaaggcaagggtcatctttagccagtaaatgcaaatcatttctttacaacgtttttgtgggaaactatgaaagagacattcttattgacaaagtctgttcacaaaagcaacatgcgatgtcatttgaagaatggtgttctgcgggcgccagattggatgacctcactgggaaaacagaatggaagcagaaattggaaagtcccttgtatgattacaagctaataaaagatttaacatctagaatgcgtgaggagcgcttgaataggaattacgctcaattgttgtacatcattaggacgaattgggtacgaaacctgggaaatatggggaatgtaaacctatataggcactcccatgtaggcaccaaatatttaattgacgagtatatgatggagtctaggttagcgctagaatctttaatggagtctgatcttgatgatagttaccttttgggtatactgcaacaaacgagaagaaatattggtcgtaccgctttagttctcagtgggggtggaacttttggtcttttccacatcggtgtccttggtactctatttgaattggatttattacccagagtgattagtggtagcagtgctggtgcaattgtagcaagcatattatctgtccatcacaaagaagaaattccggttttactaaatcatattttggataaagaattcaacattttcaaagacgataaacagaaaagtgaaagcgagaatttgttaataaaaatatctaggttcttcaaaaacggtacgtggtttgataacaagcatctggtaaatacaatgatagaatttttgggagatttgacatttagggaagcttacaatagaacgggtaaaattttgaatataaccgtttcgccggcatctttatttgaacaaccgcgcttgctgaataatttgactgcaccaaacgtcctgatttggtccgccgtatgtgcatcatgttcactaccgggaattttcccctcgagcccactttacgaaaaagatccaaaaacgggagaaaggaaaccatggactggtagtagttcggtcaaatttgtcgatggttctgtggacaatgacttgcccatttctcgtctttctgaaatgtttaatgtagaccatattatcgcatgccaggtgaatattcacgtatttccctttttgaaactatcactatcctgtgttggcggggaaattgaggacgaatttagtgcaagattaaagcaaaacttatcaagtatatacaattttatggccaatgaagctattcatattctagaaattggaagtgagatgggaattgccaaaaacgcgcttacaaaactgagatcggtattatctcaacaatattctggtgacatcactattttgcccgacatgtgtatgctttttagaataaaggagctgttgtcaaacccaacaaaagaatttttattaagggaaatcaccaatggtgcaaaagctacgtggcccaaggtttccattattcaaaatcactgtggccaggaatttgctctggataaggcgatttcttatatcaaaggtaggatgattgtcacctcctctttaaaaacccccttccaatttgctgattcagtcattggattaattaaagctccagagcaaacgtcagatgagtccaaaaacccagaaaattcaacattgctaactaggactccaaccaagggtgacaatcatatttccaatgttttagatgacaacttattagaatcagaatcgacaaactctttgctattgttacgtgagaatgcaagcacatatgggcggtcaccttccgggtttagaccgcggtattccattacgtccgcttctctcaatccgcgtcaccaaagaaggaaatcagatactatttcaacttcaaggcgaccagccaaatccttttcattttcagttgcttctcccacatcaaggatgttgaggcaatccagcaaaatcaatggacacccaccgccaattctgcagaaaaaaacaagtatgggccggctaatgtttcctatggatgccaagacctatgacccggaaagccatgaacttatcccacattctgccagcattgaaacacctgccatggtagacaagaaattgcattttggccgaaagagtagatacttgaggcatatgaacaaaaaatgggtcagcagtagcaacatattatacacagattcggataaagaagaccatcctacattgagactgataagtaacttcgattcagacgcaatgattcatagtgatttagcgggcaatttcaggcgtcatagcattgatggaagacccccttctcaagctacaaagagctcaccgtttcgatcgaggccttcttcttcaacgcagcacaaaagcaccaccagttttactcaataa

SEQ ID NO: 102062 - protein, 910 aa, Saccharomyces cerevisiae
MSSKISDLTSTQNKPLLVTQQLIEKYYEQILGTSQNIIPILNPKNKFIRPSKDNSDVERVEEDAGKRLQTGKNKTTNKVNFNLDTGNEDKLDDDQETVTENENNDIEMVETDEGEDERQGSSLASKCKSFLYNVFVGNYERDILIDKVCSQKQHAMSFEEWCSAGARLDDLTGKTEWKQKLESPLYDYKLIKDLTSRMREERLNRNYAQLLYIIRTNWVRNLGNMGNVNLYRHSHVGTKYLIDEYMMESRLALESLMESDLDDSYLLGILQQTRRNIGRTALVLSGGGTFGLFHIGVLGTLFELDLLPRVISGSSAGAIVASILSVHHKEEIPVLLNHILDKEFNIFKDDKQKSESENLLIKISRFFKNGTWFDNKHLVNTMIEFLGDLTFREAYNRTGKILNITVSPASLFEQPRLLNNLTAPNVLIWSAVCASCSLPGIFPSSPLYEKDPKTGERKPWTGSSSVKFVDGSVDNDLPISRLSEMFNVDHIIACQVNIHVFPFLKLSLSCVGGEIEDEFSARLKQNLSSIYNFMANEAIHILEIGSEMGIAKNALTKLRSVLSQQYSGDITILPDMCMLFRIKELLSNPTKEFLLREITNGAKATWPKVSIIQNHCGQEFALDKAISYIKGRMIVTSSLKTPFQFADSVIGLIKAPEQTSDESKNPENSTLLTRTPTKGDNHISNVLDDNLLESESTNSLLLLRENASTYGRSPSGFRPRYSITSASLNPRHQRRKSDTISTSRRPAKSFSFSVASPTSRMLRQSSKINGHPPPILQKKTSMGRLMFPMDAKTYDPESHELIPHSASIETPAMVDKKLHFGRKSRYLRHMNKKWVSSSNILYTDSDKEDHPTLRLISNFDSDAMIHSDLAGNFRRHSIDGRPPSQATKSSPFRSRPSSSTQHKSTTSFTQ

SEQ ID NO: 102063 - DNA, 2652 bp, Candida glabrata CBS 138
  CDS (1)..(2652)
atggctgttcctgttaaaactctgaaaaggtacatctccgagaggcaatcctcgtttgatgacttggctaggctgatagaagaagaccacgaatttgaccaaatagatggtggagtacagcaggctattacacaacctctgatagagagatattaccagtacttgcttggtaggaatagtcaaactgaggccaatacaacggctgaggaagaaccatcagaaccattagaacctatccttgactatgcatttgaccgagctaccaaagagaagctgaagaccaccagcgcagaatctctagtatcagaagacacacctacagatcctttgaagtctgaaaatatacctcaactgtatagagatgatgatgaggaacctgaagagctgcatgaaaattctgtatctgagagcaaccctagcaacgaacaatccgaaatatcatatttggagtccttaaaacaatattacgattcaacaaaaagaactctttataacaccttcattgggaactatgataaaaatgttcttatagacagatatctgcgtaagaagaagctcgcccaatcctatgaagaatggaaatatgcctgtttgaagctggattctttaacgaataccaacgaatggaaagaagaacaggaatcaacattgtatgactatacacttataaaaactgttacgaataaaatgagagagttgagactacagaatgattatttgggattgctatatgtaataaggacaaattgggttagaaacctaggtaatatgggaaatgtaaacttataccgccactctcatgtgggaaccaagctactaatagaccattacataacagagtcaaagctttgtttagaagcgttattacagtcagacctggatgataattatttacttggaattttgcaacagacccgaagaaatataggtaggacagctctagtgttgagcggaggaggcagttttgggttgtttcatatcggtgtactggctacattgtttgaattagatttattaccaagagttattagcggtagtagtgcaggcgctattgttgcaagtattttgtgcgtccgccataaagaagaaatacccgaacttctacaaaaagttgcctcaaaagactttaatatatttaatgatgataaacaaaaaactgagagtgaaaatctattaataaaaatatccaggttttttaaaaatggtacttggtttgataataagcaactggctaacacagttatagagttcttaggtgacatgacattcagagaggcatataatagaacgggtaaaattctgaacatcacagtctccccagcgacaatgttcgagcaacccaggttattgaataatttaacggcaccgaacgtcttgatttggtccgctgtttgtgcttcatgctcattaccaggtatatttccatcaagcccattatatgaaaaagacccaattacatcggaggtcagagaatggtcaggaagtgcatctgttcgttttgtggacggttcagtagataatgatttaccaatatcaagattatctgaaatgtttaacatagaccacatcatcgcatgccaagttaacatacacgtttttccatttttgaagctttctttgtcgtgtgttggaggtgaaattgaagatgaatttagtgcaagactgaagcaaaatttatcacatatctacaaatttgtttcaaatgagatgattcacttgtttgagttaggtagtgaattaggtattgccaaaaatttgttactaaagttacgatctgtactttctcaacaatattctggggatatcactattttacccgatatgatgactctgtacaggataaatgagctgctatgtaatccaacgaaggagttcattttacgtgagatcactaatggcgcccaagccacctggccaaaaatttcaattatccaaaatcactgtggccaggagtttgctcttgataaggctatttcattcattaagggtaggatgattgtatcctcatcaaccaaatcaccgttgcaattttttgacgcccctattggactaattcaaaataatattcagaaggagactaacggatattcacatgttttagatgacaatcttttggagtctgagtccgccaaatcactttcattactctcagaaaagaatacaacacatcaattgcattcaaccgaaaacttatctttatactcaacaccaatgtcagcaagacataggaggagaacatccgatgtttccattagagccattgccaaaaataagtccaaatcattttctgtaacttcaccaagctcaatgattctcaaagggaatcgcaactactccaacaattcccaaatcaatagagtagatctagcagaaaaggaatcgaacgaatgtcacagatctggtgattataaatttagtagaaacaaaaatgttggtttccaaataaatgtgaataaggttgtagagacaccgaggagcacgcaaacttccagccaatctacatctgtaggtggttcacctcgaatggagagacaggaatacttcaggaagtcaggccgtagaatactaaacagtaaccgacctgcgaaaattttaagaagtagaagtagcagtgcatcctttggcgaatcttctgtaagcctgagccgatag

SEQ ID NO: 102064 - protein, 883 aa, Candida glabrata CBS 138
MAVPVKTLKRYISERQSSFDDLARLIEEDHEFDQIDGGVQQAITQPLIERYYQYLLGRNSQTEANTTAEEEPSEPLEPILDYAFDRATKEKLKTTSAESLVSEDTPTDPLKSENIPQLYRDDDEEPEELHENSVSESNPSNEQSEISYLESLKQYYDSTKRTLYNTFIGNYDKNVLIDRYLRKKKLAQSYEEWKYACLKLDSLTNTNEWKEEQESTLYDYTLIKTVTNKMRELRLQNDYLGLLYVIRTNWVRNLGNMGNVNLYRHSHVGTKLLIDHYITESKLCLEALLQSDLDDNYLLGILQQTRRNIGRTALVLSGGGSFGLFHIGVLATLFELDLLPRVISGSSAGAIVASILCVRHKEEIPELLQKVASKDFNIFNDDKQKTESENLLIKISRFFKNGTWFDNKQLANTVIEFLGDMTFREAYNRTGKILNITVSPATMFEQPRLLNNLTAPNVLIWSAVCASCSLPGIFPSSPLYEKDPITSEVREWSGSASVRFVDGSVDNDLPISRLSEMFNIDHIIACQVNIHVFPFLKLSLSCVGGEIEDEFSARLKQNLSHIYKFVSNEMIHLFELGSELGIAKNLLLKLRSVLSQQYSGDITILPDMMTLYRINELLCNPTKEFILREITNGAQATWPKISIIQNHCGQEFALDKAISFIKGRMIVSSSTKSPLQFFDAPIGLIQNNIQKETNGYSHVLDDNLLESESAKSLSLLSEKNTTHQLHSTENLSLYSTPMSARHRRRTSDVSIRAIAKNKSKSFSVTSPSSMILKGNRNYSNNSQINRVDLAEKESNECHRSGDYKFSRNKNVGFQINVNKVVETPRSTQTSSQSTSVGGSPRMERQEYFRKSGRRILNSNRPAKILRSRSSSASFGESSVSLSR

SEQ ID NO: 102065 - DNA, 2307 bp, Candida glabrata CBS 138
  CDS (1)..(2307)
atggtgctgactagacgtacgctgccggtgacggagtttctcatagacaaatactatgaagttgcgcagtatgggcgagtactgcatgaaggagaaggaagcgacacagagggaggtgaagaggagcacactaagctagagtttgagacggaggaggctgtgcctgactcccgtgagagcacgcctagctattctgagatggtttatgcgcagcgggctgcgctgaaccagcggctggcgaactcccagtggcttaaaataccaatgcccctgctggataaattgaatagcactcttcggtggttaaccggcaaggatctgactacgtgggagattgaatatgagttgaagaagaatagacaattagcgaggtcatatgatgattggaaggctatcagtttacaattggatgaattgcaaggtaaagctgattggaaagttgatgacgagacagatctttatgattaccaagctgttcgcgcactgacgcataagatgaaagaactacgtgagaacaagaattatgcagaattactatattatatcaggacgacatggacaagaaactttgggaatatgggcaatgttaacttgtatagacacacgaatcatggtacaaaaaagctcatagaagcgtacttagctgagtctaaactatgtgtggaagaacttgtatctaaatcaggctttgaaaatgagtacttgttggggattctgcaacagacgaggcgaaatatcggtaaatcagctctggtgttgagcggtggggcaacatttgggatgtttcatattggtgtactggctgctttatttgaggctgatctaattcctagagtaatcagtggcactagcgcaggcgctattgttgctagtatattttgtactcatactactgaggagataccaagtttactagaaagcgtgcttggtatgagattcaaaattttcagagatgaagacgatttagagaccacagaaaatgtatttgtccagatggcacgtttttttaagcatggaacctggtttgataataggcatttaataaaaactatgaaaggctttttaggcgacttaactttcagagaagcatataatagaactggaaagattctcaatattagtgtctcaactgcaagcatatttgaacagccccgattattaaataacttgactgcaccaaatgtactgatatggtctgctgtttgtgcatcctgttctgttccaggcgtgtttcctacgtgcccattgtacgagaaagatccaattacaaaccagtgtaccgtttggggtggaagtacatctgtaaaatttatggatgggtctgtggataacgatttgccgatctctaggctgtcagaaatgttcaatattgatcatatcatagcttgccaagttaatgttcacgtctacccatttctaaaactatcggtgtcttgtgtaggtggggaattgcaaaatgagactagtgcaagggtcaagcaacatattaccggattttgtaattacttttccgatgaattggtgcattatttggaaattttgtctgaacttggcattgcagaaactctatgtaacaagttaaggtccgtgatatcacaaaaatattcaggcgatgtcactatattacctaaattagacatgatatcttgtgtgaatgaactcctgagcaatccatctcaagaattcttgcttaaagaaacgacgttaggtgccagagcaacttggccaaatattccaataataaaaagtaactgcacacaagagtttattttggacaaggcaattgcatatttgaaagagcaaataatcgtatcatcctcatctgatatccctgctaatatttcttacggtgctatggaaagggtgatgctttctaatgatcccaaaaagaggcaattatcaaaccagagtaccgacgatacttttgaggaaaataatgttctagatgataatttgatggagaatgaacctactaactctacattattgttaagggagaatgctttcacaacaatccatgacccattgtttccaagagagaaatacctggcgccaataccaaagaaaagaagaaatcacaggaaatcagaagcatcaactagagtacgttcaagatatgctgtgggctcttgttccttttccgttggatctgcaacaaaaaccatggaaatacttcaggttaaaacctcgaagtcggcttcaccaaaaaagtatcagaatatgcgtatcagtccagctattaaaacctcagatcgtgtgatatttggtagtaatagaaatgtttttgactatttacaaagagattga

SEQ ID NO: 102066 - protein, 768 aa, Candida glabrata CBS 138
MVLTRRTLPVTEFLIDKYYEVAQYGRVLHEGEGSDTEGGEEEHTKLEFETEEAVPDSRESTPSYSEMVYAQRAALNQRLANSQWLKIPMPLLDKLNSTLRWLTGKDLTTWEIEYELKKNRQLARSYDDWKAISLQLDELQGKADWKVDDETDLYDYQAVRALTHKMKELRENKNYAELLYYIRTTWTRNFGNMGNVNLYRHTNHGTKKLIEAYLAESKLCVEELVSKSGFENEYLLGILQQTRRNIGKSALVLSGGATFGMFHIGVLAALFEADLIPRVISGTSAGAIVASIFCTHTTEEIPSLLESVLGMRFKIFRDEDDLETTENVFVQMARFFKHGTWFDNRHLIKTMKGFLGDLTFREAYNRTGKILNISVSTASIFEQPRLLNNLTAPNVLIWSAVCASCSVPGVFPTCPLYEKDPITNQCTVWGGSTSVKFMDGSVDNDLPISRLSEMFNIDHIIACQVNVHVYPFLKLSVSCVGGELQNETSARVKQHITGFCNYFSDELVHYLEILSELGIAETLCNKLRSVISQKYSGDVTILPKLDMISCVNELLSNPSQEFLLKETTLGARATWPNIPIIKSNCTQEFILDKAIAYLKEQIIVSSSSDIPANISYGAMERVMLSNDPKKRQLSNQSTDDTFEENNVLDDNLMENEPTNSTLLLRENAFTTIHDPLFPREKYLAPIPKKRRNHRKSEASTRVRSRYAVGSCSFSVGSATKTMEILQVKTSKSASPKKYQNMRISPAIKTSDRVIFGSNRNVFDYLQRD

SEQ ID NO: 102067 - DNA, 2328 bp, Kluyveromyces lactis NRRL Y-1140
  CDS (1)..(2328)
atgccgaatgtcatgaacacgcccagcgtgactgatattaaagatgacccgattactagttatgtcattaagaactactacaagagggccaataagggcgccgaaatgacagaagaacagagtcgcaatgattctggacaagatgaaccgcagttgaactttttctcctcgctgtgcaatagcttttacaaatttattaggggagccgatagtactcatgaacaaatagctcgtctcatagagcagaaacagaatgcgagatctttacaggaatggcttgcggcggcaacgaagctagacgatattacaaatgctgaacaatggaaatcaaagcgggagtctgtattgtatgattattgccttgtcgaatccagcacagaagcgatgaaaaaagcgcgcttggcaaaggattggcctaacctcttatatcttataagaaccacttgggttcggaaccgtggtggtatggggaatgtaaacctttataggcattcgtatgttggaaccaagcatatcattgaggattacgtggcagaatcgtctagatctttacaagaactagtttataattcagatttggacgacacttacttgctggggatgctcacacagacaagaaagaatataggtagaaccgcattagtgttgagtggtggtggcacctttggattgttccacatcggtatccttgtgacgcttttcgagcaagaattacttcctcgagtaatcagcggcagtagtgctggtgcaattgttgcttcgattcttgcttctagacaagaacatgaactcatgggcttaatggatgaaatcctcgtaaaagacttcaatatctttaaagatgacttagaaatgagcgaaagtgaaaaccttcttataaagatctcccggttcttcaagaatggtacttggtttgacaacaaaaatcttgttagtacaatgatcaatttcttggggaaccttaccttcagggaagcatataacaggagcgggaagattttgaatattacagtctcgcctgcatccgttcatgaacaaccgcggcttttgaacaatctaacatctccgaatgtcttgatttggtccgcggtttgtgcctcttgttctctgcctggcatttttccatcttctcccttgtacgaaaaggatccaaagaccggagaaacaaaacagtggaattcaagttcggtcaagtttgtcgatggatcagtcgacaatgatttaccggtttccaaactttctgagatgttcaacgttgaccatattattgcatgtcaggtcaacatacacgtcttcccctttttgaagttatctgtatcctgcgtaggaggagaaatagaagatgagttcagtgcaagattcaagatggcattagggaaagtttacaaatacatggccagcgaagtgatacatgcattagagattgctaccgaaattggtatcggaaccaatgtcctgacaaagctaagatcagtgttgtcacaacaatatagcggtgatatcactatacttcctgaaatgaatacactactacgattcaacgaactactatctaatcccacccaagaatttctactaagggaagctactaatggtgttcgtgctagttggccaaaaatatcaatcataaaaaatcactgtggtcaagaatttgaactagataagatgattaattatctaaaggggaagatcatatctaatacagatatcaaaggaaatcccttccaaatttcaaatcgggacgttcctttgattaacagtccagttcttgctaatagcgaaaagaaggcaatacaagtatttgatgatgtgctattaaatgctgataatttggataactttatggtagtacccgacggaacaggttccttaaaatcacaagatttaaacaatcctccgagatattcaaatgagtttggaagcagggcgcacaaccgtcgcaaatcagactctgcaaccaacggaaatcgaaagggtaagcgtcataactctatatcgctaccatattcgtcttcatcttcgccattatcagagaagaagtattctatgataaatttccgtccttcgtttgacaaaaagacgagcacaggcgatctacaggtaaggaaaccgtacccatatcctccaaagagcagcagtttctctagaatcgattacgatccgagatccaattctctgactccgatacttgatcatgctgtgggaacccgcagggatgactcaattttacactctgatgtgaaatctaatcccaactctcccttgaggttaagaacgaaaagctccgtttcaagaagagcatctcgaaagaatcccgatactgcgtaa

SEQ ID NO: 102068 - protein, 775 aa, Kluyveromyces lactis NRRL Y-1140
MPNVMNTPSVTDIKDDPITSYVIKNYYKRANKGAEMTEEQSRNDSGQDEPQLNFFSSLCNSFYKFIRGADSTHEQIARLIEQKQNARSLQEWLAAATKLDDITNAEQWKSKRESVLYDYCLVESSTEAMKKARLAKDWPNLLYLIRTTWVRNRGGMGNVNLYRHSYVGTKHIIEDYVAESSRSLQELVYNSDLDDTYLLGMLTQTRKNIGRTALVLSGGGTFGLFHIGILVTLFEQELLPRVISGSSAGAIVASILASRQEHELMGLMDEILVKDFNIFKDDLEMSESENLLIKISRFFKNGTWFDNKNLVSTMINFLGNLTFREAYNRSGKILNITVSPASVHEQPRLLNNLTSPNVLIWSAVCASCSLPGIFPSSPLYEKDPKTGETKQWNSSSVKFVDGSVDNDLPVSKLSEMFNVDHIIACQVNIHVFPFLKLSVSCVGGEIEDEFSARFKMALGKVYKYMASEVIHALEIATEIGIGTNVLTKLRSVLSQQYSGDITILPEMNTLLRFNELLSNPTQEFLLREATNGVRASWPKISIIKNHCGQEFELDKMINYLKGKIISNTDIKGNPFQISNRDVPLINSPVLANSEKKAIQVFDDVLLNADNLDNFMVVPDGTGSLKSQDLNNPPRYSNEFGSRAHNRRKSDSATNGNRKGKRHNSISLPYSSSSSPLSEKKYSMINFRPSFDKKTSTGDLQVRKPYPYPPKSSSFSRIDYDPRSNSLTPILDHAVGTRRDDSILHSDVKSNPNSPLRLRTKSSVSRRASRKNPDTA

SEQ ID NO: 102069 - DNA, 3078 bp, Debaryomyces hansenii CBS767
  CDS (1)..(3078)
atgagtgagttaatgttgacagtagcagggatggaagtgaataccaacgtaggtccttttgattttgatataattgaatcgttgtataaccagtactcacatttgttagaagatgagccgagcagccccacatattcgtttattccttcaataaggtcaataccgataataaataggataattccagcgttggatgaaaaacagatacttatcaaaaagttattgtcggaccagaagtctgcgattagttataaagagtggttcgaaatatcgttaaaattagacgaattattaaataatgatcagtggaaagtgaatccagaatcgaacctatatgactatgagctagtacacaataatcttatggagatgcgaaatgcccgtatttccaaggattacaagttattattatatctaatcagaacaaaatggactaggaatttaggtaacatgggagacatcaatctatataggcattcgcatgtcggcacgaaaacattaatagaagactatataaaagaatgtgaaatgtcactagactacttaataaataataaggaagtgagtttggatgatcgttatttgttaggtatgcttattcaaacgagaaaaaatattggaagaacagcactagttctttctggaggtagcacgtttggtatatttcatattggggtggtcataacactactagagtctagtttattaccaagaattataagtggatcttctgccggctcaattattgcaagcattatatgttctcattcaaatgaagagactgtgtctattttgaatgatattatggttagaaggtttgatatttttgaaagcggagatattgaaaaagaaaaagacggagaaagttataagaaagtactaaagaatcttagtcatttgttgaaatatggaacactctttgatattgactcattacaaaatacaatgattggtcttgtgggagatttaacgttcagagaagcgtataatagaacaggtagaattttgaatattaccgtgtccccaacttcaattcatgaacaaacaagattattgaattacttaacagcaccaaattgtcttatttggtctgctgtatgtgcatcatgctcattaccgggtgtttttccatctacgttaatctatgaaaaagttcctaacactaatggtgtacaagaatggaataatgacgcatccatgaaatttgttgatggctctgttgataatgatttacctatcacaaggttactggagatgtttaacgcagaccatatcattgcgtgtcaagttaatcctcacgttgttccaattcttaaagtatcgattagttctattggtggtgaagtagaaaatgaaattaattacaaattcaaaaactttttaaacaactgttatgatttcatgacaagtgaaatcattcattaccttcagattttgaatgaaatggatgtctataagactttatctaataagttaataacgcttatttcgcaacattattccggggatataacaattctacctgattttaaaagcaaagatttctttaaagttttcaaaaaccccaccccagcattcttgctcgattttataatcagaggtgccagagcttcatggcccaaggtgactgttatatataatcattgtggggttgaattcgcgttggataaggctataagtttattacgaggaagattgattacgaccaataataagttaacttatagaacttcaaactcaactaataacaatgtaaatcaaaacataaccttggtgaatcttccagtcatgaattatgatgattcaatttcatctccagttacaccagaaaaatcaagaataaacagcttcagtcatgttccccctaatataaagagacataattcggcatcatcgtcaataggtttaccgaccaatacaaataggactccggcttttaaaagaaattcaataagcgttgccgtaccatcgactcataaagctacagataaacttttgaaaggtagatcaactacgtctttggcttcgttatcttctcaatattcccaccagaatagtagtatatcagcggaaaccactttaatcaatgacgatgataggtatggaaggtttgcacccctgaataaaagattagaaaagcaccacagcttcccagataacattaaaaacccaagtggctatagcgaagataatgaatcaaatggttggaagcaggaaaaagaccgccatgaaagacaaaaggtacggaaggctaaaagttctgggaacttccatattgctggaagaaagccggaccctaatagccaaaaattgaagtatcaaactgaaagaataccgttttataaaggaaacccatatttagatgcatcttctaagcatgcacactttgattttgtgggtcctaaagagtgtgcagaaaatgttttaattagtgaaactgataacaacatggaaaaagaaaaacctaacctaccgaaattgtcaaataataattccttgaagaactcgtatattggtttgaatagacttaaggataattatttatcaagatctaataataattctaattacaatctaaaggatgcatataacagtgatctaatcaagactagattgatgaacttacactccccagatttaagaaggtcgttttctaagagttatctaaatgataataagtactctcaagtattcaacactacagataacgaggaggaaagcgaggaactcagaaataatgaattgattccagtaaagggggacgttaaagcatcaaagtttaaagcaaaggataatgataaagatgctaaaaataaaattaatgaaaataaagcaattgatgatagggcagaaaataaagaagaaaatgacctagaatgtgacgaagataatgaacaggataatgacacggatagcaatagtggtaatgacgaaggtaacactggaaattctgaagaggaaggcaaagacgaaaaaggagcgaagataattgagcttttggaggataattgcattggagataaacaatccgaaggaacggagaacgatgaaaatgatgatttttacgaatgtaactaa

SEQ ID NO: 102070 - protein, 1025 aa, Debaryomyces hansenii CBS767
MSELMLTVAGMEVNTNVGPFDFDIIESLYNQYSHLLEDEPSSPTYSFIPSIRSIPIINRIIPALDEKQILIKKLLSDQKSAISYKEWFEISLKLDELLNNDQWKVNPESNLYDYELVHNNLMEMRNARISKDYKLLLYLIRTKWTRNLGNMGDINLYRHSHVGTKTLIEDYIKECEMSLDYLINNKEVSLDDRYLLGMLIQTRKNIGRTALVLSGGSTFGIFHIGVVITLLESSLLPRIISGSSAGSIIASIICSHSNEETVSILNDIMVRRFDIFESGDIEKEKDGESYKKVLKNLSHLLKYGTLFDIDSLQNTMIGLVGDLTFREAYNRTGRILNITVSPTSIHEQTRLLNYLTAPNCLIWSAVCASCSLPGVFPSTLIYEKVPNTNGVQEWNNDASMKFVDGSVDNDLPITRLLEMFNADHIIACQVNPHVVPILKVSISSIGGEVENEINYKFKNFLNNCYDFMTSEIIHYLQILNEMDVYKTLSNKLITLISQHYSGDITILPDFKSKDFFKVFKNPTPAFLLDFIIRGARASWPKVTVIYNHCGVEFALDKAISLLRGRLITTNNKLTYRTSNSTNNNVNQNITLVNLPVMNYDDSISSPVTPEKSRINSFSHVPPNIKRHNSASSSIGLPTNTNRTPAFKRNSISVAVPSTHKATDKLLKGRSTTSLASLSSQYSHQNSSISAETTLINDDDRYGRFAPLNKRLEKHHSFPDNIKNPSGYSEDNESNGWKQEKDRHERQKVRKAKSSGNFHIAGRKPDPNSQKLKYQTERIPFYKGNPYLDASSKHAHFDFVGPKECAENVLISETDNNMEKEKPNLPKLSNNNSLKNSYIGLNRLKDNYLSRSNNNSNYNLKDAYNSDLIKTRLMNLHSPDLRRSFSKSYLNDNKYSQVFNTTDNEEESEELRNNELIPVKGDVKASKFKAKDNDKDAKNKINENKAIDDRAENKEENDLECDEDNEQDNDTDSNSGNDEGNTGNSEEEGKDEKGAKIIELLEDNCIGDKQSEGTENDENDDFYECN

SEQ ID NO: 102071 - DNA, 2451 bp, Yarrowia lipolytica CLIB122
  CDS (1)..(2451)
atgttcacctccagagtttccgaagcaagcaccaccaactttatccggccgacggcacggtctcacatccacttttttttcgccttcatcgccgcaaccgtccaccaactgctgctcatgctctaccaactgcttggagacggctacctcaagtcgtttgtcgacacaggtatcacgctggcccaacagtcggggctttcgggtatcgtcaacgccttgacttcagaggccaaactgcggatcgataaacggtccatcatcaaaaagctgctagaggaccaggaaaacgccgagtcgtactttgactggctcaaggcgtccagcgaactcgactatctgctcggcaaccaggaatggaaggaaagagacgagtgtccagcttacgattacgaatacgtccgactccgattggacgaactgagacacgcccgaaccaataacgacaccacccgactgctttacctcgtgcgaacaacgtggagtagaaacctcggcaacctcggagacgtcaagctctaccacaactcctttaccggaaccaaacgactcatcgaagactacattctggaatgcgaactggctctcaacgcgctcctggcagccggaaacgacaagatcccggaccaggagctgctcacggagctgctcaacaccagaaaggcatttggacgaactgcccttctgctgtccggcggaggatgtctcggtctgctccacaccggtgttctccaggccctctcagacacatcgctcttgccccacgtcatatcgggttcgtcggcaggctcaatcatggccgcgggactgtgcattcacaaagacgaagaacacgaggctttcatcaccgagctcatggagcgagactttgacattttcgaagagtccggaaacgaagacacggtgctcgaacgagtgtctcgaatgctcaaacatggatcgctactcgacaacagatatatgcaggacactatgcgagaattatttggcgacatgacctttctggaggcctacaaccggactcgccgtattctcaacgttacggtatcgtctgctggcatctacgaaatgcctcgtttgctcaactacctgacggcccccaacgtactcatttggtcggctgtctgcgcctcctgctcggtgcctctcattttcaatgcctacactctgcttgaaaaggagcccaaaacaggagctattcagacctggaacgcttcttcgctgcggttcattgacggatccgtctatgccgacgtgcccattgcgcgtctctcagaaatgttcaatgtaaatcatttcattgtctcgcaggtaaaccctcacgttgctcctttcctcaagctcacagaagacaaggccaacccggactcggtcgacgaaatctacacgctcaagctttggcacaacttcaagacgctggtcaccgacgaggtcatgcaccagttgcaggtgctgtacgagtttggcatcttcaagaacctgtgttcgaaaatgggaggcgtactgtcccagcgatacaagggagacatcacaatcctgccccaggtccatctctcagagctcccgggaattcttactaaccccactgccgcatacatgaaggacaccaaccgacgaggtgcccaggccacttatcgaaagatctcgctcattcgaaaccactgtgccattgagttggcgctggatcgagctatccacgaactcaaggcccgtatgctcccctccaagcttggatcaggacgtacatccccgcaaggtacttttaagcattcgcagtcgtccaaccagatttctgcgctcaaacctccttctcgtcacatgtctgcttcatcggcaaccacagcacatacgcgtcttcggaaccgaaagtcgttttctcatgcacgtatcaagagtgatgcggccgctgtgttcgacaaggagcctattcacgagacgcccaagtcgtcgcctcagagctcgtatgtcaacttgcaccgatctgcaagtgagcggtcgagacgacccaagtctgcattcaatctgggctctctgccgacctctcctctttatcatccgcatctgacccactccatgtctatggggggagccaatcaggcgcctctgtacaatcctgggcgcggttctgtgtctcagaacacctcccctgggaccaaaatccccggaaacgctgatccgtcgtactttgatggacccaacaatgtgcgtttccactgggacagcgacgacgacgatgtgcgagagacggagttcctcaacaacatgtcttcgtcgtcttcacgaagagtttctcctgtccagagtcgtcgagccagtgttgatggactgcgaaactctgtcgtatccaccgccaccagtgtcaccgacggttccgtgtccagcagaccgtcccgagcgtgggagagcatttcccagctgtttgaaggggacgagaactgttctgactcgtgctaa

SEQ ID NO: 102072 - protein, 816 aa, Yarrowia lipolytica CLIB122
MFTSRVSEASTTNFIRPTARSHIHFFFAFIAATVHQLLLMLYQLLGDGYLKSFVDTGITLAQQSGLSGIVNALTSEAKLRIDKRSIIKKLLEDQENAESYFDWLKASSELDYLLGNQEWKERDECPAYDYEYVRLRLDELRHARTNNDTTRLLYLVRTTWSRNLGNLGDVKLYHNSFTGTKRLIEDYILECELALNALLAAGNDKIPDQELLTELLNTRKAFGRTALLLSGGGCLGLLHTGVLQALSDTSLLPHVISGSSAGSIMAAGLCIHKDEEHEAFITELMERDFDIFEESGNEDTVLERVSRMLKHGSLLDNRYMQDTMRELFGDMTFLEAYNRTRRILNVTVSSAGIYEMPRLLNYLTAPNVLIWSAVCASCSVPLIFNAYTLLEKEPKTGAIQTWNASSLRFIDGSVYADVPIARLSEMFNVNHFIVSQVNPHVAPFLKLTEDKANPDSVDEIYTLKLWHNFKTLVTDEVMHQLQVLYEFGIFKNLCSKMGGVLSQRYKGDITILPQVHLSELPGILTNPTAAYMKDTNRRGAQATYRKISLIRNHCAIELALDRAIHELKARMLPSKLGSGRTSPQGTFKHSQSSNQISALKPPSRHMSASSATTAHTRLRNRKSFSHARIKSDAAAVFDKEPIHETPKSSPQSSYVNLHRSASERSRRPKSAFNLGSLPTSPLYHPHLTHSMSMGGANQAPLYNPGRGSVSQNTSPGTKIPGNADPSYFDGPNNVRFHWDSDDDDVRETEFLNNMSSSSSRRVSPVQSRRASVDGLRNSVVSTATSVTDGSVSSRPSRAWESISQLFEGDENCSDSC

SEQ ID NO: 102073 - DNA, 2850 bp, Candida albicans SC5314
  CDS (1)..(2850): transl_table=12
atgagctctgaagtaacgttggtacccactgtatcaacaacgtcgtcagacgccatcatcaaagaattattccaacaatacatatcgttacatccaaacgacaacactacttccaacaacaacaaacaaacagagcgtactggtttttcacttcgatcgttaccgattataggtaactttttccccgagatggacgataagaaaaaagccattaatgagttattagagatacaaaaagtgacaacttcgtatcgagaatggtacgatacatctttgaaactagatgagttgttgggtaacaatgcatggaaatctgatccgaaaagcgatatatacgactatgatttgatctacaaaaatctaaatgaaatgaggcgagccagattgaaccacgattacaaactacttttgtattacattagaacaaaatggataagaaatataggtaatatgggagatgcaaatttatacagacacgcttatgtgggaaccaagaagttaattgaagagtatgttcgagagtgtcaattatcgttggagtatttggtcaccaacgacgaagtcaacttgaacgataggtatttattgggtatgttgatccaaactagaaaaaatattggacgtaccgcattggtgctttcaggaggtagcacatttggaatattccatatcggtgtgttgacgactttatttgaagcaaatttattaccaaggattataagtggttcatctgctggttctattgtggcaagtattttgtgctgtcataataatgaagaaacctttgagttattgagcactattaccaccaaaaaattcaatatttttgatgttgttgactgtgacacctcccaaattcaaggctcttttaaaaaagtgttgtattatttgggtcactggatacaatatggaactatatttgatattgaaggcttacaagatacaatgattgggtttttaggtgacttgacattccgggaggcgtacaatagaacagggaaaatcttgaatattactgtatccccagcatctgtacacgagcaaacacggttgttgaactatttgactgcacccaactgtctaatttggtcggctgtatgtgccagttgttcagttccaggaatattcccttcatgttctgtctacgagaaaaaccccaaaacaaacgaaatccacgaatggaataatgacgagtctatgaagtatgtggacggatcagtggataatgatttgccaattacgagattactggaaatgtttaatgttgatcatattattgccgttcaagttaacccacatgttgtgcccatattgagagtgtcagtgagcaatataggtggtcaagtcgaaaacgatttgatatacaaaatgaaacatcttttgaataatgtctatgattttgtttcgtgtgaagcaatccactatttgcaattgctcaatgaattggatgtttacaagaatttgtctaataagatgatatcaattttgtctcaaaactattctggtgatatcactattattcctgaatacaagatgagcgactttgttaatttatttgagaatccagatacagaattcatgcttgattttatatgccgtggagccaaagtgtcgtggcccaaagtgtctataattcataaccactgtagtgttgaatttgcgttggacaaggcaataacgattttgagaggaagaattattacgtctgcaaactatcgaatcacatccaacagtagtggtgttagacgcagccagctgtactacaaaccaaaacagcaaataatgaacttggttacttctccggtaatgaatgacagtactcaattcaacacggcaccagcaacgccgcttaaacaaaagcaaagaccactaggagttcaaagacaccattctacgtcgaatacaatttccaataaacaccaaccaagatccaagagaaattcaatgagtgccacggatggcgggcaagccgaagccgttgctgctgcgtactcaactgtaggcggtgcaactactcctcagaaaaagcttttaaaagggatttcaaccacagcactagtgcaattgacacagggatacgtttctggagattctacattggtaaacgatgattcagaaaattccaatggaccagcaactacaactagacgcgggattagaaaagctaggagttcagggaatattagaaataatatggactacaataatgctgatcgtccagtatcaaggctgactattgataggattccctataaaaacaatccatatttacaacaaagatcaaaagaatcgttggagtcattcagtaaggccgaggaaggtctaagtcaaaggaagaaaccaaatttaccaagtgtatcaagatccaattcccaccgaaactcgtatattgggttgaacaggttgaaagataataatctatcaaagcagaataataatctgtactacaacttaaagcagttaggtaaaggtcccaacaaccaagaattgatcaacaaattggaacaagaaagaaaaggaatattgaagaacggtaatcgagagagtatagcgaatttggagttgtttgctaatagtgacgatgatgacttgtgtaaactcgaattgtctcatgacagtagtttaggtgatgatgaacatagcaatgagaaagagtatacaccaggtgatgacgatgacgatgatgatgactcagatgaagaagatagccaatctcacagtgacgaagaagaggaggattacggtgaaaaggccaatggaagcagcttgaaagtggcttttgaatctgtggagatgacaaaccgttcagagagtgttgttgatgatattgatccgtattttggtaattga

SEQ ID NO: 102074 - protein, 949 aa, Candida albicans SC5314
MSSEVTLVPTVSTTSSDAIIKELFQQYISLHPNDNTTSNNNKQTERTGFSLRSLPIIGNFFPEMDDKKKAINELLEIQKVTTSYREWYDTSLKLDELLGNNAWKSDPKSDIYDYDLIYKNLNEMRRARLNHDYKLLLYYIRTKWIRNIGNMGDANLYRHAYVGTKKLIEEYVRECQLSLEYLVTNDEVNLNDRYLLGMLIQTRKNIGRTALVLSGGSTFGIFHIGVLTTLFEANLLPRIISGSSAGSIVASILCCHNNEETFELLSTITTKKFNIFDVVDCDTSQIQGSFKKVLYYLGHWIQYGTIFDIEGLQDTMIGFLGDLTFREAYNRTGKILNITVSPASVHEQTRLLNYLTAPNCLIWSAVCASCSVPGIFPSCSVYEKNPKTNEIHEWNNDESMKYVDGSVDNDLPITRLSEMFNVDHIIAVQVNPHVVPILRVSVSNIGGQVENDLIYKMKHLLNNVYDFVSCEAIHYLQLLNELDVYKNLSNKMISILSQNYSGDITIIPEYKMSDFVNLFENPDTEFMLDFICRGAKVSWPKVSIIHNHCSVEFALDKAITILRGRIITSANYRITSNSSGVRRSQSYYKPKQQIMNLVTSPVMNDSTQFNTAPATPLKQKQRPLGVQRHHSTSNTISNKHQPRSKRNSMSATDGGQAEAVAAAYSTVGGATTPQKKLLKGISTTALVQLTQGYVSGDSTLVNDDSENSNGPATTTRRGIRKARSSGNIRNNMDYNNADRPVSRSTIDRIPYKNNPYLQQRSKESLESFSKAEEGLSQRKKPNLPSVSRSNSHRNSYIGLNRLKDNNLSKQNNNSYYNLKQLGKGPNNQELINKLEQERKGILKNGNRESIANLELFANSDDDDLCKLELSHDSSLGDDEHSNEKEYTPGDDDDDDDDSDEEDSQSHSDEEEEDYGEKANGSSLKVAFESVEMTNRSESVVDDIDPYFGN

SEQ ID NO: 102075 - DNA, 2821 bp, Saccharomyces cerevisiae
  CDS (108)..(2357)
aacaaaaaaaaataaaaaaataaaaaaaaaaaaaaataaaattcgaaaacaataggagacaaaagacatcataaacagcacaaggaagacggttctgtttcgttgctatgtctaataccttgccagtaacagaatttcttttatccaaatactacgaactttccaacactcctgccacagactcatcatcgctcttcaaatggttataccacaagactctctcccgtaaacagctgctcatatccgatttgtcttcccagaaaaaacacgccatctcctacgatcaatggaatgacatagcgtcgcgattagacgacttaacgggactttccgaatggaaaacaatcgacgagtcctcgttgtataactataagctgctgcaagacttgaccatccgtatgcgccatttgagaaccactcacgactaccaccgcctgctttatctgattagaactaagtgggtccgtaatcttggcaacatgaataacgttaatctttacaggcactcgcataccggcacaaaacaaattatacatgactacctagaagagtctcaagcagtgctcaccgcgctgatccatcagtcaaatatgaacgatcactatctcctcggtattttgcaacagacgagaagaaacatagggcgcacggctctcgtgcttagcggtgggagcactttcggccttttccacattggtgttcttgccgccctttttgaatcggacctgatgcctaaggtgatcagcggtagcagtgctggcgccattgttgccagcatattttgcgtccacacgacccaggaaattccctccttgttgaccaatgtacttaatatggagtttaacatcttcaatgacgacaattccaaatctcccaacgaaaacttactaatcaagatatcgaggttctgccaaaacggtacctggttcaataatcaacctttgattaacacaatgctttcgtttttaggaaacttgacctttagggaagcctacaacaagactggaaaaatcctgaatatcacagtctcgcctgcttccatatacgaacagccgaaactactaaacaatttaaccgctccaaacgttctcatctggtctgccgtatgcgcatcttgttctctacctggagttttcccctccacgccgctattcgagaaagatcctcacactggaaagattaaagagtggggggcaacaaatttacatttatcaaacatgaaattcatggacggatctgtagataatgacatgcccatttctcgtctttctgaaatgttcaatgtcgaccacattatcgcctgccaggtaaatatacatgtctttcccctgttaaagttttcaaacacttgcgttgggggtgaaattgaaaaggaaattaccgcccgtttcagaaaccaagtaacaaagatcttcaaatttttttccgacgaaactattcattttttagacatcctaaaggagcttgagttccatccctatttgatgaccaaattgaaacacctttttttacaacaatactctggcaatgtcacaattttacccgatctatcaatggttggtcaattccacgaagtattgaagaacccatctcaacttttcctattgcaccaaactactttaggtgcaagagctacttggccgaaaatttccatgattcaaaataactgtggccaagaattcgccttggataaggccatcacattcctaaaggagaaaataataatctcttcgtcaataaaaaaccctttacaattctaccaacctcgattcagtgagcaaatcaaatctctttccataatggatgctgacttgccgggagttgacttggaagaatcctcctccaattcactatcaattatcaagtctcccaacaaaacagcggcaccgggaagatttcctcttcagccattgccttctccatcttctaccttcaacaagaggaaaatggatatgttatcgccttctccatcgccttctacatctccacaacgttcaaaatcttcattcacgcagcagggtacaaggcagaaggcaaattctttatcgtttgccatcggtgcatctagtttacggctaaagaaatcaccattgaaggttccatcacgacctcaattcaaaaaaagatcttcttattataatcaaaatatgtcggcagagatgaggaaaaatagaaaaaaatctggaacaatttcctcttatgatgttcaaacaaactcagaagattttcccataccggctattgaaaacggttcatttgataacactttattcaatccaagcaggttccccatggacgctatgtcggctgccacaaacgacaatttcatgaacaattcagacatttttcaaaattgaaatgaaagacaataagtacatttttatataaaaagctttctatattctcacctccatcaactccaaaaggtacatgccattttgttatattaaatattctaagaattttccgaaggatactgcattatcatcagtgatttattaatctatgagtatgaatatgaattaattccaaattttctccatacatctctttcataaacacaatccacttgagtaactaagttctgcgctcggatcatattaactgtgatatgagacacttgggaacatccgtcaatatttaaatatgccagtggttgacctcccgcttcgttgtcatgatccatctgaaatttttttagaaattcatatattgatattcctgtaatttcaaaattgtgcgaaatgtcaagcctctttaaattttccaaaaatggtacattaataatgaatgacttcatcgtactatcattcaaggagct

SEQ ID NO: 102076 - protein, 749 aa, Saccharomyces cerevisiae
MSNTLPVTEFLLSKYYELSNTPATDSSSLFKWLYHKTLSRKQLLISDLSSQKKHAISYDQWNDIASRLDDLTGLSEWKTIDESSLYNYKLLQDLTIRMRHLRTTHDYHRLLYLIRTKWVRNLGNMNNVNLYRHSHTGTKQIIHDYLEESQAVLTALIHQSNMNDHYLLGILQQTRRNIGRTALVLSGGSTFGLFHIGVLAALFESDLMPKVISGSSAGAIVASIFCVHTTQEIPSLLTNVLNMEFNIFNDDNSKSPNENLLIKISRFCQNGTWFNNQPLINTMLSFLGNLTFREAYNKTGKILNITVSPASIYEQPKLLNNLTAPNVLIWSAVCASCSLPGVFPSTPLFEKDPHTGKIKEWGATNLHLSNMKFMDGSVDNDMPISRLSEMFNVDHIIACQVNIHVFPLLKFSNTCVGGEIEKEITARFRNQVTKIFKFFSDETIHFLDILKELEFHPYLMTKLKHLFLQQYSGNVTILPDLSMVGQFHEVLKNPSQLFLLHQTTLGARATWPKISMIQNNCGQEFALDKAITFLKEKIIISSSIKNPLQFYQPRFSEQIKSLSIMDADLPGVDLEESSSNSLSIIKSPNKTAAPGRFPLQPLPSPSSTFNKRKMDMLSPSPSPSTSPQRSKSSFTQQGTRQKANSLSFAIGASSLRLKKSPLKVPSRPQFKKRSSYYNQNMSAEMRKNRKKSGTISSYDVQTNSEDFPIPAIENGSFDNTLFNPSRFPMDAMSAATNDNFMNNSDIFQN

SEQ ID NO: 102077 - DNA, 26 bp, Artificial sequence
  primer
atgagcagcaaaatatcagatcttac

SEQ ID NO: 102078 - DNA, 25 bp, Artificial sequence
  primer
ttattgagtaaaactggtggtgctt

SEQ ID NO: 102079 - protein, 528 aa, Artificial sequence
  consensus sequence
  Variant (2)..(16): Xaa in position 2 to 16 is any amino acid
  Variant (17)..(25): Xaa in position 17 to 25 is any or no amino acid
  Variant (27)..(35): Xaa in position 27 to 35 is any amino acid
  Variant (36)..(36): Xaa in position 36 is any or no amino acid
  Variant (38)..(38): Xaa in position 38 is any amino acid
  Variant (40)..(42): Xaa in position 40 to 42 is any amino acid
  Variant (44)..(49): Xaa in position 44 to 49 is any amino acid
  Variant (52)..(52): Xaa in position 52 is any amino acid
  Variant (54)..(58): Xaa in position 54 to 58 is any amino acid
  Variant (61)..(63): Xaa in position 61 to 63 is any amino acid
  Variant (65)..(67): Xaa in position 65 to 67 is any amino acid
  Variant (71)..(79): Xaa in position 71 to 79 is any amino acid
  Variant (81)..(83): Xaa in position 81 to 83 is any amino acid
  Variant (85)..(91): Xaa in position 85 to 91 is any amino acid
  Variant (95)..(95): Xaa in position 95 is any amino acid
  Variant (99)..(99): Xaa in position 99 is any amino acid
  Variant (101)..(101): Xaa in position 101 is any amino acid
  Variant (104)..(104): Xaa in position 104 is any amino acid
  Variant (109)..(110): Xaa in position 109 to 110 is any amino acid
  Variant (116)..(118): Xaa in position 116 to 118 is any amino acid
  Variant (122)..(123): Xaa in position 122 to 123 is any amino acid
  Variant (125)..(126): Xaa in position 125 to 126 is any amino acid
  Variant (128)..(129): Xaa in position 128 to 129 is any amino acid
  Variant (131)..(134): Xaa in position 131 to 134 is any amino acid
  Variant (136)..(137): Xaa in position 136 to 137 is any amino acid
  Variant (139)..(144): Xaa in position 139 to 144 is any amino acid
  Variant (145)..(147): Xaa in position 145 to 147 is any or no amino acid
  Variant (149)..(149): Xaa in position 149 is any amino acid
  Variant (154)..(154): Xaa in position 154 is any amino acid
  Variant (156)..(156): Xaa in position 156 is any amino acid
  Variant (160)..(160): Xaa in position 160 is any amino acid
  Variant (173)..(174): Xaa in position 173 to 174 is any amino acid
  Variant (177)..(177): Xaa in position 177 is any amino acid
  Variant (184)..(185): Xaa in position 184 to 185 is any amino acid
  Variant (187)..(187): Xaa in position 187 is any amino acid
  Variant (189)..(190): Xaa in position 189 to 190 is any amino acid
  Variant (192)..(192): Xaa in position 192 is any amino acid
  Variant (194)..(195): Xaa in position 194 to 195 is any amino acid
  Variant (203)..(203): Xaa in position 203 is any amino acid
  Variant (205)..(205): Xaa in position 205 is any amino acid
  Variant (209)..(215): Xaa in position 209 to 215 is any amino acid
  Variant (217)..(228): Xaa in position 217 to 228 is any amino acid
  Variant (230)..(230): Xaa in position 230 is any amino acid
  Variant (233)..(241): Xaa in position 233 to 241 is any amino acid
  Variant (242)..(249): Xaa in position 242 to 249 is any or no amino acid
  Variant (251)..(259): Xaa in position 251 to 259 is any amino acid
  Variant (262)..(262): Xaa in position 262 is any amino acid
  Variant (265)..(267): Xaa in position 265 to 267 is any amino acid
  Variant (269)..(270): Xaa in position 269 to 270 is any amino acid
  Variant (273)..(276): Xaa in position 273 to 276 is any amino acid
  Variant (278)..(279): Xaa in position 278 to 279 is any amino acid
  Variant (290)..(290): Xaa in position 290 is any amino acid
  Variant (298)..(298): Xaa in position 298 is any amino acid
  Variant (300)..(302): Xaa in position 300 to 302 is any amino acid
  Variant (305)..(305): Xaa in position 305 is any amino acid
  Variant (310)..(310): Xaa in position 310 is any amino acid
  Variant (316)..(316): Xaa in position 316 is any amino acid
  Variant (328)..(328): Xaa in position 328 is any amino acid
  Variant (331)..(331): Xaa in position 331 is any amino acid
  Variant (334)..(338): Xaa in position 334 to 338 is any amino acid
  Variant (341)..(341): Xaa in position 341 is any amino acid
  Variant (343)..(343): Xaa in position 343 is any amino acid
  Variant (345)..(349): Xaa in position 345 to 349 is any amino acid
  Variant (351)..(353): Xaa in position 351 to 353 is any amino acid
  Variant (354)..(358): Xaa in position 354 to 358 is any or no amino acid
  Variant (360)..(361): Xaa in position 360 to 361 is any amino acid
  Variant (363)..(363): Xaa in position 363 is any amino acid
  Variant (371)..(371): Xaa in position 371 is any amino acid
  Variant (374)..(374): Xaa in position 374 is any amino acid
  Variant (382)..(382): Xaa in position 382 is any amino acid
  Variant (388)..(388): Xaa in position 388 is any amino acid
  Variant (392)..(392): Xaa in position 392 is any amino acid
  Variant (395)..(395): Xaa in position 395 is any amino acid
  Variant (397)..(397): Xaa in position 397 is any amino acid
  Variant (400)..(400): Xaa in position 400 is any amino acid
  Variant (402)..(405): Xaa in position 402 to 405 is any amino acid
  Variant (408)..(411): Xaa in position 408 to 411 is any amino acid
  Variant (413)..(428): Xaa in position 413 to 428 is any amino acid
  Variant (429)..(430): Xaa in position 429 to 430 is any or no amino acid
  Variant (432)..(433): Xaa in position 432 to 433 is any amino acid
  Variant (435)..(435): Xaa in position 435 is any amino acid
  Variant (437)..(440): Xaa in position 437 to 440 is any amino acid
  Variant (442)..(450): Xaa in position 442 to 450 is any amino acid
  Variant (452)..(456): Xaa in position 452 to 456 is any amino acid
  Variant (459)..(459): Xaa in position 459 is any amino acid
  Variant (464)..(464): Xaa in position 464 is any amino acid
  Variant (469)..(480): Xaa in position 469 to 480 is any amino acid
  Variant (481)..(481): Xaa in position 481 is any or no amino acid
  Variant (484)..(486): Xaa in position 484 to 486 is any amino acid
  Variant (488)..(488): Xaa in position 488 is any amino acid
  Variant (490)..(494): Xaa in position 490 to 494 is any amino acid
  Variant (497)..(497): Xaa in position 497 is any amino acid
  Variant (499)..(499): Xaa in position 499 is any amino acid
  Variant (503)..(505): Xaa in position 503 to 505 is any amino acid
  Variant (507)..(507): Xaa in position 507 is any amino acid
  Variant (509)..(509): Xaa in position 509 is any amino acid
  Variant (511)..(512): Xaa in position 511 to 512 is any amino acid
  Variant (515)..(515): Xaa in position 515 is any amino acid
  Variant (521)..(527): Xaa in position 521 to 527 is any amino acid
LXXXXXXXXXXXXXXXXXXXXXXXXIXXXXXXXXXXAXSXXXWXXXXXXLDXLXXXXXWKXXXEXXXYDYXXXXXXXXXMXXXRXXXXXXXLLYXIRTXWXRNXGNMGXXNLYRHXXXGTKXXIXXYXXEXXXXLXXLXXXXXXXXXDXYLLGXLXQTRXNIGRTALVLSGGXXFGXFHIGVLXXLXEXXLXPXXISGSSAGXIXASIXXXXXXXEXXXXXXXXXXXXFXIFXXXXXXXXXXXXXXXXXLXXXXXXXXXGTXFDXXXLXXTMXXXXGXXTFREAYNRTGXILNITVSXAXXXEQXRLLNXLTAPNXLIWSAVCASCSXPGXFPXXXXXEKXPXTXXXXXWXXXXXXXXSXXFXDGSVDNDXPIXRLSEMFNXDHIIAXQVNXHVXPXLKXSXXXXGGXXXXEXXXXXXXXXXXXXXXXXXEXXHXLXXXXEXXXXXXXXXKXXXXXSQXYSGDXTILPXXXXXXXXXXXXXNPXXXFXLXXXXXGAXAXWPKXXXIXNXCXXEFXLDKAIXXXXXXXI

SEQ ID NO: 102080 - protein, 60 aa, Artificial sequence
  protein pattern
  Variant (2)..(2): Xaa in position 2 is any or no amino acid
  Variant (4)..(4): Xaa in position 4 is Asp or Asn
  Variant (5)..(5): Xaa in position 5 is Leu or Met
  Variant (13)..(13): Xaa in position 13 is Lys or Arg
  Variant (14)..(14): Xaa in position 14 is Ser or Thr
  Variant (16)..(16): Xaa in position 16 is Lys or Arg
  Variant (21)..(21): Xaa in position 21 is Ser or Thr
  Variant (24)..(24): Xaa in position 24 is Pro or Thr
  Variant (25)..(25): Xaa in position 25 is Ala or Thr
  Variant (26)..(26): Xaa in position 26 is Ser or Thr
  Variant (27)..(27): Xaa in position 27 is Ile, Leu, Met or Val
  Variant (28)..(28): Xaa in position 28 is Phe, His or Tyr
  Variant (31)..(31): Xaa in position 31 is Pro or Thr
  Variant (32)..(32): Xaa in position 32 is Lys or Arg
  Variant (36)..(36): Xaa in position 36 is any amino acid
  Variant (39)..(39): Xaa in position 39 is Ala or Ser
  Variant (42)..(42): Xaa in position 42 is Cys or Val
  Variant (54)..(54): Xaa in position 54 is Leu or Val
  Variant (57)..(57): Xaa in position 57 is Ile or Val
  Variant (60)..(60): Xaa in position 60 is Ser or Thr
LXGXXTFREAYNXXGXILNIXVSXXXXXEQXXLLNXLTXPNXLIWSAVCASCSXPGXFPX

SEQ ID NO: 102081 - protein, 60 aa, Artificial sequence
  protein pattern
  Variant (2)..(2): Xaa in position 2 is any amino acid
  Variant (4)..(4): Xaa in position 4 is any amino acid
  Variant (8)..(8): Xaa in position 8 is Lys or Arg
  Variant (12)..(12): Xaa in position 12 is Lys or Arg
  Variant (13)..(13): Xaa in position 13 is Ser or Thr
  Variant (21)..(21): Xaa in position 21 is Ala, Gly or Ser
  Variant (22)..(22): Xaa in position 22 is Ser or Thr
  Variant (25)..(25): Xaa in position 25 is Ile, Leu or Met
  Variant (30)..(30): Xaa in position 30 is Ile or Val
  Variant (31)..(31): Xaa in position 31 is Leu or Val
  Variant (32)..(32): Xaa in position 32 is any amino acid
  Variant (33)..(33): Xaa in position 33 is Ala or Thr
  Variant (35)..(35): Xaa in position 35 is Phe or Leu
  Variant (37)..(37): Xaa in position 37 is any amino acid
  Variant (38)..(38): Xaa in position 38 is Asp, Glu, Asn or Ser
  Variant (40)..(40): Xaa in position 40 is Ile, Leu or Met
  Variant (42)..(42): Xaa in position 42 is Lys or Arg
  Variant (43)..(43): Xaa in position 43 is Ile or Val
  Variant (47)..(47): Xaa in position 47 is Ser or Thr
  Variant (51)..(51): Xaa in position 51 is Ala or Ser
  Variant (53)..(53): Xaa in position 53 is Ile or Val
  Variant (57)..(57): Xaa in position 57 is Phe, Ile or Leu
  Variant (58)..(58): Xaa in position 58 is Ala, Cys or Ser
  Variant (59)..(59): Xaa in position 59 is Cys, Ser, Thr or Val
  Variant (60)..(60): Xaa in position 60 is His or Arg
GXLXQTRXNIGXXALVLSGGXXFGXFHIGXXXXLXEXXLXPXXISGXSAGXIXASIXXXX

SEQ ID NO: 102082 - protein, 58 aa, Artificial sequence
  protein pattern
  Variant (2)..(6): Xaa in position 2 to 6 is any amino acid
  Variant (7)..(10): Xaa in position 7 to 10 is any or no amino acid
  Variant (17)..(17): Xaa in position 17 is Leu or Met
  Variant (19)..(19): Xaa in position 19 is Ile or Val
  Variant (20)..(20): Xaa in position 20 is Ser or Thr
  Variant (21)..(21): Xaa in position 21 is Lys or Arg
  Variant (23)..(23): Xaa in position 23 is any amino acid
  Variant (28)..(28): Xaa in position 28 is Ala, Ile or Val
  Variant (34)..(34): Xaa in position 34 is Cys or Val
  Variant (38)..(38): Xaa in position 38 is Ile, Pro or Val
  Variant (41)..(41): Xaa in position 41 is any amino acid
  Variant (43)..(43): Xaa in position 43 is Phe, Ile or Leu
  Variant (45)..(45): Xaa in position 45 is Lys or Arg
  Variant (46)..(46): Xaa in position 46 is Phe, Leu or Val
  Variant (48)..(48): Xaa in position 48 is any amino acid
  Variant (49)..(49): Xaa in position 49 is Ser or Thr
  Variant (50)..(50): Xaa in position 50 is Cys, Asn or Ser
  Variant (51)..(51): Xaa in position 51 is Ile or Val
  Variant (54)..(54): Xaa in position 54 is Glu or Gln
  Variant (55)..(55): Xaa in position 55 is Ile, Leu or Val
  Variant (56)..(56): Xaa in position 56 is Glu or Gln
  Variant (57)..(57): Xaa in position 57 is any amino acid
  Variant (58)..(58): Xaa in position 58 is Asp or Glu
SXXXXXXXXXGSVDNDXPXXXLXEMFNXDHIIAXQVNXHVXPXLXXSXXXXGGXXXXX

SEQ ID NO: 102083 - protein, 60 aa, Artificial sequence
  protein pattern
  Variant (4)..(5): Xaa in position 4 to 5 is any amino acid
  Variant (6)..(6): Xaa in position 6 is Ile or Val
  Variant (7)..(12): Xaa in position 7 to 12 is any amino acid
  Variant (13)..(13): Xaa in position 13 is Leu or Met
  Variant (14)..(14): Xaa in position 14 is Lys or Arg
  Variant (15)..(16): Xaa in position 15 to 16 is any amino acid
  Variant (18)..(18): Xaa in position 18 is any amino acid
  Variant (19)..(19): Xaa in position 19 is Ala, Asn, Gln or Ser
  Variant (20)..(20): Xaa in position 20 is any amino acid
  Variant (21)..(21): Xaa in position 21 is Asp or Asn
  Variant (22)..(24): Xaa in position 22 to 24 is any amino acid
  Variant (28)..(28): Xaa in position 28 is any amino acid
  Variant (29)..(29): Xaa in position 29 is Ile or Val
  Variant (32)..(32): Xaa in position 32 is any amino acid
  Variant (34)..(34): Xaa in position 34 is any amino acid
  Variant (37)..(37): Xaa in position 37 is any amino acid
  Variant (39)..(39): Xaa in position 39 is Gly or Asn
  Variant (40)..(40): Xaa in position 40 is Leu or Met
  Variant (42)..(42): Xaa in position 42 is Asp or Asn
  Variant (43)..(43): Xaa in position 43 is Ala, Ile or Val
  Variant (44)..(44): Xaa in position 44 is any amino acid
  Variant (47)..(47): Xaa in position 47 is His or Arg
  Variant (48)..(48): Xaa in position 48 is any amino acid
  Variant (49)..(49): Xaa in position 49 is Ala, Ser or Thr
  Variant (50)..(51): Xaa in position 50 to 51 is any amino acid
  Variant (55)..(55): Xaa in position 55 is any amino acid
  Variant (56)..(56): Xaa in position 56 is Ile or Leu
  Variant (58)..(58): Xaa in position 58 is Asp or Glu
  Variant (59)..(59): Xaa in position 59 is any amino acid
YDYXXXXXXXXXXXXXRXXXXXXXLLYXXRTXWXRNXGXXGXXXLYXXXXXGTKXXIXXY

SEQ ID NO: 102084 - protein, 52 aa, Artificial sequence
  protein pattern
  Variant (2)..(6): Xaa in position 2 to 6 is any or no amino acid
  Variant (8)..(8): Xaa in position 8 is Asp, Ser or Thr
  Variant (9)..(10): Xaa in position 9 to 10 is any amino acid
  Variant (12)..(12): Xaa in position 12 is Ile, Leu or Met
  Variant (14)..(14): Xaa in position 14 is Asp, His, Lys or Arg
  Variant (15)..(18): Xaa in position 15 to 18 is any amino acid
  Variant (20)..(20): Xaa in position 20 is Ala or Val
  Variant (21)..(21): Xaa in position 21 is any amino acid
  Variant (22)..(22): Xaa in position 22 is Ala or Val
  Variant (23)..(23): Xaa in position 23 is Ser or Thr
  Variant (26)..(26): Xaa in position 26 is any amino acid
  Variant (27)..(27): Xaa in position 27 is Ile or Val
  Variant (28)..(28): Xaa in position 28 is Pro, Ser or Thr
  Variant (29)..(29): Xaa in position 29 is Ile, Met or Val
  Variant (31)..(31): Xaa in position 31 is any amino acid
  Variant (32)..(32): Xaa in position 32 is Asn or Ser
  Variant (33)..(33): Xaa in position 33 is any amino acid
  Variant (35)..(35): Xaa in position 35 is Gly, Ser or Thr
  Variant (36)..(36): Xaa in position 36 is any amino acid
  Variant (39)..(39): Xaa in position 39 is any amino acid
  Variant (43)..(43): Xaa in position 43 is any amino acid
  Variant (45)..(45): Xaa in position 45 is Ala, Asn, Ser or Thr
  Variant (46)..(46): Xaa in position 46 is any amino acid
  Variant (47)..(47): Xaa in position 47 is Ile or Leu
  Variant (48)..(48): Xaa in position 48 is Lys or Arg
  Variant (49)..(49): Xaa in position 49 is Glu or Gly
  Variant (50)..(50): Xaa in position 50 is any amino acid
  Variant (51)..(51): Xaa in position 51 is Ile, Leu or Met
NXXXXXPXXXFXLXXXXXGXXXXWPXXXXIXXXCXXEFXLDKXIXXXXXXXI

SEQ ID NO: 102085 - protein, 40 aa, Artificial sequence
  protein pattern
  Variant (2)..(2): Xaa in position 2 is any amino acid
  Variant (3)..(3): Xaa in position 3 is Ile, Met or Val
  Variant (5)..(5): Xaa in position 5 is any amino acid
  Variant (6)..(6): Xaa in position 6 is Phe or Leu
  Variant (7)..(7): Xaa in position 7 is Glu or Gln
  Variant (8)..(8): Xaa in position 8 is Ile, Leu or Val
  Variant (9)..(9): Xaa in position 9 is Ala, Gly or Leu
  Variant (10)..(10): Xaa in position 10 is any amino acid
  Variant (12)..(12): Xaa in position 12 is Phe, Ile, Leu or Met
  Variant (13)..(13): Xaa in position 13 is Asp or Gly
  Variant (14)..(14): Xaa in position 14 is Ile or Val
  Variant (15)..(16): Xaa in position 15 to 16 is any amino acid
  Variant (17)..(17): Xaa in position 17 is Asn or Thr
  Variant (18)..(18): Xaa in position 18 is Ala, Leu or Val
  Variant (19)..(20): Xaa in position 19 to 20 is any amino acid
  Variant (22)..(22): Xaa in position 22 is Leu or Met
  Variant (23)..(23): Xaa in position 23 is any amino acid
  Variant (24)..(24): Xaa in position 24 is Gly, Ser or Thr
  Variant (25)..(25): Xaa in position 25 is Ile, Leu or Val
  Variant (26)..(26): Xaa in position 26 is Ile or Leu
  Variant (29)..(29): Xaa in position 29 is any amino acid
  Variant (31)..(31): Xaa in position 31 is any amino acid
  Variant (34)..(35): Xaa in position 34 to 35 is any or no amino acid
  Variant (37)..(37): Xaa in position 37 is any amino acid
  Variant (38)..(39): Xaa in position 38 to 39 is any or no amino acid
EXXHXXXXXXEXXXXXXXXXKXXXXXSQXYXGDXXIXXXP

SEQ ID NO: 102086 - DNA, 786 bp, Arabidopsis thaliana
  CDS (1)..(786)
atgagtctgcaaaatgtatcaaagtcgagcaatgcccttgagggtatccacggggttcatgtcacgtctcattctcctttctcatttgagaagacaactcaagttgtgacattctcagcttttgaaacggtttcagttactgatttagtttctctgttacagacgtttttggcagcaaagacctccatgcttaaggccaatctgttgcagcattcgcgatggttgatcggtctttttattatgcaatcgaaacatatgacaggtgaccagagtgtcttagaaacagctgctaatgtggctacttcacttcctttcatcttcctcggaatgcaggcaccaaggaagaatctgaacacaaaggtgtacgcaaactccctaattggagttggaattgcgtcgagtctgtatcatgcctctaggggaaagttgaggaagtacctgagatgggtagattacacaatgatagccacaacaacaatatgtctctcaagggctctaaggaatgagaacccaaaatttctgatggctgcatcagctttagttctaccttttcaacctctcatggtctctgccgttcacactggaatgatggaggtcgcatttgctaaaagaagcttaaaggatccagatctcaaaacagctcataacgtacacaagatgtcttccttgctaggaggtgctctgttcatagctgatgatttcttccccgagacacctttccttcacgcaggctggcacctcgctgcagccattggagttggaacatgcaataaacttcttgagtag

SEQ ID NO: 102087 - protein, 261 aa, Arabidopsis thaliana
MSLQNVSKSSNALEGIHGVHVTSHSPFSFEKTTQVVTFSAFETVSVTDLVSLLQTFLAAKTSMLKANLLQHSRWLIGLFIMQSKHMTGDQSVLETAANVATSLPFIFLGMQAPRKNLNTKVYANSLIGVGIASSLYHASRGKLRKYLRWVDYTMIATTTICLSRALRNENPKFLMAASALVLPFQPLMVSAVHTGMMEVAFAKRSLKDPDLKTAHNVHKMSSLLGGALFIADDFFPETPFLHAGWHLAAAIGVGTCNKLLE

SEQ ID NO: 102088 - DNA, 1277 bp, Oryza sativa
  CDS (206)..(958)
ggcttcagctcttcttctcccccaccacgagggaggagaagatcctgtcgggatcggaatccccccctcctcctccgctcctcgccctctccgtcgaggaggaggcggtggtggtggtggtggcgcggccgctccaacaatcgcgaggtgaggagtaccatttgttcttcttagttaatagtgttcacataaataaagtgaataaatgggagtccgtgaagattcaagacctttgggaggtctagatggactctacggggtacaacttgcaggccggtcaatgtacagtgatgatgaagccgtcaaaactagcattatagatcctttggctcgtgaaccgcaggagggtgttggcacaagccgaagattgctaatccggcggctctggcagcagagacccccatgtctgaggcctatccactgtagtctctcatgcgataaacatccgggcgaaactattgctaatgttgtcacctctattcctttcattgttcttgggctgcagacaccaagaaagaacttgaacactgcactttacgcgaactcactaattggagttggaatagcttctagtttgtatcatacgtcaagaggacgaatcagaaaatatatgcgatgggcagactatacaatgattgccactacaacactttgtttaagcagagcactccgaaatgggcatccaaaattactgatggcagcatccacattgctcctacctttccagccattggtggtttcagccgtccacactgggataatggaggtttcattcgcgaagcgagcatccatggaaccagagctcaggatggcccataacctacacaagatgtcctccctactgggaggcgcgctgttcatcgccgacgacgccttcccggagaccccctatctccatgcggcatggcatctagctgcagcattgggggtgggcacatgcaacaagcttcttgaatgatcacgtccttcctgcctatctaggctatagctagttttcaacaaccagttgatatgaatatgatagcattatagcaatacatcaacctgccgacactgatcgcgtcacattgtgtaggttcacattgaaccggagaaatattggcacagtagggtagactggtagtgcattcatagccaggtgtatatggtaccatcttgtgcctgtattactgtatattgtagtcgtatgttgtattgttgttccgtgaataatgtaccctagtatgtaaactttggtctcaaagaaatatatatatcgtagctaaacatgcatgttc

SEQ ID NO: 102089 - protein, 250 aa, Oryza sativa
MGVREDSRPLGGLDGLYGVQLAGRSMYSDDEAVKTSIIDPLAREPQEGVGTSRRLLIRRLWQQRPPCLRPIHCSLSCDKHPGETIANVVTSIPFIVLGLQTPRKNLNTALYANSLIGVGIASSLYHTSRGRIRKYMRWADYTMIATTTLCLSRALRNGHPKLLMAASTLLLPFQPLVVSAVHTGIMEVSFAKRASMEPELRMAHNLHKMSSLLGGALFIADDAFPETPYLHAAWHLAAALGVGTCNKLLE

SEQ ID NO: 102090 - DNA, 756 bp, Glycine max
  CDS (1)..(756)
atgactcaaaacagcatactgaatcacagtagagctcttgagggtgtccatggggtccaagtggcccctaactcgccatttgatttgacagaaactaatcaaagtggggactttcgtacttcaactggtggagcatcaactacagaagcaaatcagctgctgttgatgcaaagactatggcaacagagaccagcatgcttgagacccatccattgtggtattagttgtcacggtgatcagactcttgctgaaacagttgctaatgtgcttacttcaattccttttatagctcttggaatccatgcccccaggaagaatctcaattctaagttgtatgctaattcactaattggagttggagtggcctcaagcatttaccattcttcaagaggaaggttgaggaaatttttgagatgggttgactacacaatgatagccacaacaactatttgtttgtcaatggccctccgaaatgagaatccaaagttactgatggcagcatctgcaatatgtcttccagttaatccaatgatggtttcagttattcacactgggatgatggaggtagcatttgctagaagggcattgaaggatccagacttgagaatggctcacacagtgcataagacatcgtcgttacttggtggtatgctttttgtagctgatgatttatttcctaaaactccttaccttcatgctgcatggcatcttgctgctgctgttggtgtaggcacctgcaataagcttcttgagtag

SEQ ID NO: 102091 - protein, 251 aa, Glycine max
MTQNSILNHSRALEGVHGVQVAPNSPFDLTETNQSGDFRTSTGGASTTEANQLLLMQRLWQQRPACLRPIHCGISCHGDQTLAETVANVLTSIPFIALGIHAPRKNLNSKLYANSLIGVGVASSIYHSSRGRLRKFLRWVDYTMIATTTICLSMALRNENPKLLMAASAICLPVNPMMVSVIHTGMMEVAFARRALKDPDLRMAHTVHKTSSLLGGMLFVADDLFPKTPYLHAAWHLAAAVGVGTCNKLLE

SEQ ID NO: 102092 - DNA, 747 bp, Arabidopsis thaliana
  CDS (1)..(747)
atgagtctgcaaaatgtatcaaagtcgagcaatgcccttgagggtatccacggggttcatgtcacgtctcattctcctttctcatttgagaagacaactcaagttagtgactttcagaccaacaccaaatcctctgtcatggaatcaaatcaaagactttccatcgaacgtttttggcagcaaagacctccatgcttaaggccaatctgttgcagcattcgcggtgaccagagtgtcttagaaacagctgctaatgtggctacttcacttcctttcatcttcctcggaatgcaggcaccaaggaagaatctgaacacaaaggtgtacgcaaactccctaattggagttggaattgcgtcgagtctgtatcatgcctctaggggaaagttgaggaagtacctgagatgggtagattacacaatgatagccacaacaacaatatgtctctcaagggctctaaggaatgagaacccaaaatttctgatggctgcatcagctttagttctaccttttcaacctctcatggtctctgccgttcacactggaatgatggaggtcgcatttgctaaaagaagcttaaaggatccagatctcaaaacagctcataacgtacacaagatgtcttccttgctaggaggtgctctgttcatagctgatgatttcttccccgagacacctttccttcacgcaggctggcacctcgctgcagccattggagttggaacatgcaataaacttcttgagtag

SEQ ID NO: 102093 - protein, 248 aa, Arabidopsis thaliana
MSLQNVSKSSNALEGIHGVHVTSHSPFSFEKTTQVSDFQTNTKSSVMESNQRLSIERFWQQRPPCLRPICCSIRGDQSVLETAANVATSLPFIFLGMQAPRKNLNTKVYANSLIGVGIASSLYHASRGKLRKYLRWVDYTMIATTTICLSRALRNENPKFLMAASALVLPFQPLMVSAVHTGMMEVAFAKRSLKDPDLKTAHNVHKMSSLLGGALFIADDFFPETPFLHAGWHLAAAIGVGTCNKLLE

SEQ ID NO: 102094 - DNA, 735 bp, Arabidopsis thaliana
  CDS (1)..(735)
atgagccctcagagcgtatcgaagactagcaaatcccttgagggtgtccatggggttcatgttgtatctcattctcatttcggatttgaaagtattggccaagtctctggctttgagtctgcggatgcaggaacaaagcagagacttttcattgaacgtgtttggcaacaaagacctccatgcctaagacccatccattgcagcatccatggtgatcagagtatcttagaaacagctgctaatgtgatcacatcgatccctttcattttcctcggtatgcaggcaccgaggaaaaacctgaacatgaaggtatatgcaaactccttaatcggagttggaattgcatcgagtttgtatcattcttcaagagggaagtttaggaagtaccttagatgggctgattacacaatgatagctacagcgacaatatgtctaacgagggcgcttagagaagagaacccaaagttcttgatggctgcatcagctttggctctaccgtttcagcctctcgtggtatcagctgttcacactggaatgatggaggtagcatttgcgaaacgagccttagaggatccggatttgaaaatggctcatgatgtacacaagatgtcttcgttattaggcggagcattgttcatagctgatgatcttttccctgaaacaccattcattcacgccggttggcatctcgccgcagccattggcgttggaacttgcaataagcttcttcagtaa

SEQ ID NO: 102095 - protein, 244 aa, Arabidopsis thaliana
MSPQSVSKTSKSLEGVHGVHVVSHSHFGFESIGQVSGFESADAGTKQRLFIERVWQQRPPCLRPIHCSIHGDQSILETAANVITSIPFIFLGMQAPRKNLNMKVYANSLIGVGIASSLYHSSRGKFRKYLRWADYTMIATATICLTRALREENPKFLMAASALALPFQPLVVSAVHTGMMEVAFAKRALEDPDLKMAHDVHKMSSLLGGALFIADDLFPETPFIHAGWHLAAAIGVGTCNKLLQ

SEQ ID NO: 102096 - DNA, 675 bp, Oryza sativa subsp
  CDS (1)..(675)
atgggagtccgtgaagattcaagacctttgggaggtctagatggactctacggggtacaacttgcaggccggtcaatgtacagtgatgatgaagccgtcaaaactagcattatagatcctttggctcgtgaaccgcaggagggtgttggcacaagccgaagattgctaatccggcggctctggcagcagagacccccatgtctgaggcctatccactgtagtctctcatgcgataaacatccgggcgaaactattgctaatgttgtcacctctattcctttcattgttcttgggctgcagacaccaaggcgatgccaactaacagtcatgtgccagtcctgcagaaagaacttgaacactgcactttacgcgaactcactaattggagttggaatagcttctagtttgtatcatacgtcaagaggacgaatcagaaaatatatgcgatgggcagactatacaatgattgccactacaacacttgtttcattcgcgaagcgagcatccatggaaccagagctcaggatggcccataacctacacaagatgtcctccctactgggaggcgcgctgttcatcgccgacgacgccttcccggagaccccctatctccatgcggcatggcatctagctgcagcattgggggtgggcacatgcaacaagcttcttgaatga

SEQ ID NO: 102097 - protein, 224 aa, Oryza sativa subsp
MGVREDSRPLGGLDGLYGVQLAGRSMYSDDEAVKTSIIDPLAREPQEGVGTSRRLLIRRLWQQRPPCLRPIHCSLSCDKHPGETIANVVTSIPFIVLGLQTPRRCQLTVMCQSCRKNLNTALYANSLIGVGIASSLYHTSRGRIRKYMRWADYTMIATTTLVSFAKRASMEPELRMAHNLHKMSSLLGGALFIADDAFPETPYLHAAWHLAAALGVGTCNKLLE

SEQ ID NO: 102098 - DNA, 747 bp, Vitis vinifera
  CDS (1)..(747)
atgagtcaccagagcaaatcaaatcctagtagagctctagatggtgtacatggagtgcgtgtggtgcctcattcaccatttgcactggaggagattactaaacctggggactttgatcgatcaacttgtgaaagatcatctattgaagctaatcagcggctattaatgcaagtatggcagcaaagaccagcatgtctgagacccgttcgatgttgtcttaatggcgatgagagtcttggggaaacagttgctaatgttcttacttcacttccctttattgctcttggaattcaagccccaaggaagaatcttaactgcaagttgtatgctaattcattaattggagttgggattgcctcaggtttataccactcttcaagaggaaaactgaggaagtatttgaggtgggctgactatacaatgatagccacagcaacagtttgtctatcaagagctatcagaaatgagaatccaaagttgttgatggcagcatcggccttttttctgcctatccagcctctgatggtttcagccgttcatactgggatgatggaggtcgcatttgcaaaaagagcattagatgatccagacctgaggatggtccacaatgtccataagatgtcatcactgttggggggtgctcttttcattgctgatgacgtctttcccagaactccattcattcatgccgcttggcatctcgctgcggctgttggtgtaggaacctgtaataaactacttgaatag

SEQ ID NO: 102099 - protein, 248 aa, Vitis vinifera
MSHQSKSNPSRALDGVHGVRVVPHSPFALEEITKPGDFDRSTCERSSIEANQRLLMQVWQQRPACLRPVRCCLNGDESLGETVANVLTSLPFIALGIQAPRKNLNCKLYANSLIGVGIASGLYHSSRGKLRKYLRWADYTMIATATVCLSRAIRNENPKLLMAASAFFLPIQPLMVSAVHTGMMEVAFAKRALDDPDLRMVHNVHKMSSLLGGALFIADDVFPRTPFIHAAWHLAAAVGVGTCNKLLE

SEQ ID NO: 102100 - DNA, 756 bp, Medicago truncatula
  CDS (1)..(756)
atgagtcaacagaggacactgaatcatagtagagcccttgagggtgtccatggggttcacgtggtgcctcattcaccgttttctttgacagagagtaatcaaactggaggtcttcatccatcaacaggtggaccttcaactaccgaagcaaatcagcttctgttaatgcaacgggtatggcaacaaagaccagcatgcttgagacccatccattgcagtgctagttgtcatggtgatcaacatcttgctgaaacaattgcaaatgtgcttacttcaattccttttatagctcttggagtgaatgccccaaggaagaatctcagttgtaagttgtatgccaattcattaattggagttggagtggcgtcaagtgtgtatcattgttcaagagggaaactgaggaaatatttgagatggcttgactacacaatgatagctacaacaactgtttgtctgtcaagagctctcagaaacgaaaacccgaagttgctgatggcggcatctgcagcatttcttccagttaatccattaatggttacacttattcacactgggatgatggaggtagcatttgctaaaagggcattgaaagatccagacttgagaatggctcacactgtgcacaaaatgtcatcattaatggggggcatgctttttgtagccgatgatttattccctaaaactccataccttcatgctgcatggcatcttgctgctgctgttggtgtaggcacctgcaataagcttcttgagtag

SEQ ID NO: 102101 - protein, 251 aa, Medicago truncatula
MSQQRTLNHSRALEGVHGVHVVPHSPFSLTESNQTGGLHPSTGGPSTTEANQLLLMQRVWQQRPACLRPIHCSASCHGDQHLAETIANVLTSIPFIALGVNAPRKNLSCKLYANSLIGVGVASSVYHCSRGKLRKYLRWLDYTMIATTTVCLSRALRNENPKLLMAASAAFLPVNPLMVTLIHTGMMEVAFAKRALKDPDLRMAHTVHKMSSLMGGMLFVADDLFPKTPYLHAAWHLAAAVGVGTCNKLLE

SEQ ID NO: 102102 - DNA, 747 bp, Arabidopsis thaliana
  CDS (1)..(747)
  misc_feature (716)..(716): k is g or t
atgagtctgcaaaatgtatcaaagtcgagcaatgcccttgagggtatccacggggttcatgtcacgtctcattctcctttctcatttgagaagacaactcaagttagtgactttcagaccaacaccaaatcctctgtcatggaatcaaatcaaagactttccatcgaacgtttttggcagcaaagacctccatgcttaaggccaatctgttgcagcattcgcggtgaccagagtgtcttagaaacagctgctaatgtggctacttcacttcctttcatcttcctcggaatgcaggcaccaaggaagaatctgaacacaaaggtgtacgcaaactccctaattggagttggaattgcgtcgagtctgtatcatgcctctaggggaaagttgaggaagtacctgagatgggtagattacacaatgatagccacaacaacaatatgtctctcaagggctctaaggaatgagaacccaaaatttctgatggctgcatcagctttagttctaccttttcaacctctcatggtctctgccgttcacactggaatgatggaggtcgcatttgctaaaagaagcttaaaggatccagatctcaaaacagctcataacgtacacaagatgtcttccttgctaggaggtgctctgttcatagctgatgatttcttccccgagacacctttccttcacgcaggctggcacctcgctgcagccattgkagttggaacatgcaataaacttcttgagtag

SEQ ID NO: 102103 - protein, 248 aa, Arabidopsis thaliana
  misc_feature (239)..(239): The Xaa at location 239 stands for Gly, or Val.
MSLQNVSKSSNALEGIHGVHVTSHSPFSFEKTTQVSDFQTNTKSSVMESNQRLSIERFWQQRPPCLRPICCSIRGDQSVLETAANVATSLPFIFLGMQAPRKNLNTKVYANSLIGVGIASSLYHASRGKLRKYLRWVDYTMIATTTICLSRALRNENPKFLMAASALVLPFQPLMVSAVHTGMMEVAFAKRSLKDPDLKTAHNVHKMSSLLGGALFIADDFFPETPFLHAGWHLAAAIXVGTCNKLLE

SEQ ID NO: 102104 - DNA, 735 bp, Arabidopsis thaliana
  CDS (1)..(735)
atgagccctcagagcgtatcgaagactagcaaatcccttgagggtgtccatggggttcatgttgtatctcattctcatttcggatttgaaagtattggccaagtctctggctttgagtctgcggatgcaggaacaaagcagagacttttcattgaacgtgtttggcaacaaagacctccatgcctaagacccatccattgcagcatccatggtgatcagagtatcttagaaacagctgctaatgtgatcacatcgatccctttcattttcctcggtatgcaggcaccgaggaaaaacctgaacatcaaggtatatgcaaactccttaatcggagttggaattgcatcgagtttgtatcattcttcaagagggaagtttaggaagtaccttagatgggctgattacacaatgatagctacagcgacaatatgtctaacgagggcgcttagagaagagaacccaaagttcttgatggctgcatcagctttggctctaccgtttcagcctctcgtggtatcagctgttcacactggaatgatggaggtagcatttgcgaaacgagccttagaggatccggatttgaaaatggctcatgatgtacacaagatgtcttcgttattaggcggagcattgttcatagctgatgatcttttccctgaaacaccattcattcacgccggttggcatctcgccgcagccattggcgttggaacttgcaataagcttcttcagtaa

SEQ ID NO: 102105 - protein, 244 aa, Arabidopsis thaliana
MSPQSVSKTSKSLEGVHGVHVVSHSHFGFESIGQVSGFESADAGTKQRLFIERVWQQRPPCLRPIHCSIHGDQSILETAANVITSIPFIFLGMQAPRKNLNIKVYANSLIGVGIASSLYHSSRGKFRKYLRWADYTMIATATICLTRALREENPKFLMAASALALPFQPLVVSAVHTGMMEVAFAKRALEDPDLKMAHDVHKMSSLLGGALFIADDLFPETPFIHAGWHLAAAIGVGTCNKLLQ

SEQ ID NO: 102106 - DNA, 753 bp, Oryza sativa
  CDS (1)..(753)
atgggagtccgtgaagattcaagacctttgggaggtctagatggactctacggggtacaacttgcaggccggtcaatgtacagtgatgatgaagccgtcaaaactagcattatagatcctttggctcgtgaaccgcaggagggtgttggcacaagccgaagattgctaatccggcggctctggcagcagagacccccatgtctgaggcctatccactgtagtctctcatgcgataaacatccgggcgaaactattgctaatgttgtcacctctattcctttcattgttcttgggctgcagacaccaagaaagaacttgaacactgcactttacgcgaactcactaattggagttggaatagcttctagtttgtatcatacgtcaagaggacgaatcagaaaatatatgcgatgggcagactatacaatgattgccactacaacactttgtttaagcagagcactccgaaatgagcatccaaaattactgatggcagcatccacattgctcctacctttccagccattggtggtttcagccgtccacactgggataatggaggtttcattcgcgaagcgagcatccatggaaccagagctcaggatggcccataacctacacaagatgtcctccctactgggaggcgcgctgttcatcgccgacgacgccttcccggagaccccctatctccatgcggcatggcatctagctgcagcattgggggtgggcacatgcaacaagcttcttgaatga

SEQ ID NO: 102107 - protein, 250 aa, Oryza sativa
MGVREDSRPLGGLDGLYGVQLAGRSMYSDDEAVKTSIIDPLAREPQEGVGTSRRLLIRRLWQQRPPCLRPIHCSLSCDKHPGETIANVVTSIPFIVLGLQTPRKNLNTALYANSLIGVGIASSLYHTSRGRIRKYMRWADYTMIATTTLCLSRALRNEHPKLLMAASTLLLPFQPLVVSAVHTGIMEVSFAKRASMEPELRMAHNLHKMSSLLGGALFIADDAFPETPYLHAAWHLAAALGVGTCNKLLE

SEQ ID NO: 102108 - DNA, 735 bp, Brassica napus
  CDS (1)..(735)
atgagccctcaaagcgtatcgaagacgagcaaatcccttgagggtctccatggggttcatgtggtgtctcattcgcctttcgcattcgagggcatcagccaagtatctagctttggatcctcagatgcaggaacaaagcagagtctattcattgaacgtgtctggcaacaaaggccaccatgcctaagacctatccactgctgcatccacggtgatcagagtctcttagaaacagctgctaatgtgatcacatcgcttcctttcattttcctcggtatgcagaccccaaggaaaaaccagaacatgaaggtgtatgcaaactccttaatcggagttggagtcgcgtcgagtttgtatcattcttcgagagggaagttgaggaagtatctgcgttgggctgattacacaatgatagccacagccacagtatgtctttcaagggctcttagggaagagaacccaaagttcttgatggctgcatcagctttggctctacccttccagcctctcgtggtttcagctgttcacaccggaatgatggaggtagcatttgcgaaaagagccttaaaggatcctgatttgaaaactgctcataacgtacacaagatgtctacattgttgggcggagctttgttcatagctgacgatcttttccctgaaacaccattcattcacgccggttggcatctcgctgcagccattggcgttgggacttgcaataagcttcttcagtag

SEQ ID NO: 102109 - protein, 244 aa, Brassica napus
MSPQSVSKTSKSLEGLHGVHVVSHSPFAFEGISQVSSFGSSDAGTKQSLFIERVWQQRPPCLRPIHCCIHGDQSLLETAANVITSLPFIFLGMQTPRKNQNMKVYANSLIGVGVASSLYHSSRGKLRKYLRWADYTMIATATVCLSRALREENPKFLMAASALALPFQPLVVSAVHTGMMEVAFAKRALKDPDLKTAHNVHKMSTLLGGALFIADDLFPETPFIHAGWHLAAAIGVGTCNKLLQ

SEQ ID NO: 102110 - DNA, 756 bp, Glycine max
  CDS (1)..(756)
atgactcaaaacagcatactgaatcacagtagagctcttgagggtgtccatggggtccaagtggcccctaactcgccatttgatttgacagaaactaatcaaagtggggactttcgtacttcaactggtggagcatcaactacagaagcaaatcagctgctgttgatgcaaagactatggcaacagagaccagcatgcttgagacccatccattgtggtattagttgtcacggtgatcagactcttgctgaaacagttgctaatgtgcttacttcaattccttttatagctcttggaatccatgcccccaggaagaatctcaattctaagttgtatgctaattcactaattggagttggagtggcctcaagcatttactattcttcaagaggaaggttgaggaaatctttgagatgggttgactacacaatgatagccacaacaactatttgtttgtcaatggccctccgaaatgagaatccaaagttactgatggcagcatctgcaatatgtcttccagttaatccaatgatggtttcagttattcacactgggatgatggaggtagcatttgctagaagggcattgaaggatccagacttgagaatggctcacacagtgcataagacatcgtcgttacttggtggtatgctttttgtagctgatgatttatttcctaaaactccttaccttcatgctgcatggcatcttgctgctgctgttggtgtaggcacctgcaataagcttcttgagtag

SEQ ID NO: 102111 - protein, 251 aa, Glycine max
MTQNSILNHSRALEGVHGVQVAPNSPFDLTETNQSGDFRTSTGGASTTEANQLLLMQRLWQQRPACLRPIHCGISCHGDQTLAETVANVLTSIPFIALGIHAPRKNLNSKLYANSLIGVGVASSIYYSSRGRLRKSLRWVDYTMIATTTICLSMALRNENPKLLMAASAICLPVNPMMVSVIHTGMMEVAFARRALKDPDLRMAHTVHKTSSLLGGMLFVADDLFPKTPYLHAAWHLAAAVGVGTCNKLLE

SEQ ID NO: 102112 - DNA, 20 bp, Artificial sequence
  primer
atgagtctgcaaaatgtatc

SEQ ID NO: 102113 - DNA, 20 bp, Artificial sequence
  primer
ctactcaagaagtttattgc

SEQ ID NO: 102114 - protein, 276 aa, Artificial sequence
  consensus sequence
  Variant (2)..(12): Xaa in position 2 to 12 is any amino acid
  Variant (14)..(14): Xaa in position 14 is any amino acid
  Variant (16)..(17): Xaa in position 16 to 17 is any amino acid
  Variant (20)..(24): Xaa in position 20 to 24 is any amino acid
  Variant (26)..(48): Xaa in position 26 to 48 is any amino acid
  Variant (49)..(54): Xaa in position 49 to 54 is any or no amino acid
  Variant (56)..(58): Xaa in position 56 to 58 is any amino acid
  Variant (60)..(60): Xaa in position 60 is any amino acid
  Variant (66)..(66): Xaa in position 66 is any amino acid
  Variant (71)..(83): Xaa in position 71 to 83 is any amino acid
  Variant (85)..(85): Xaa in position 85 is any amino acid
  Variant (87)..(90): Xaa in position 87 to 90 is any amino acid
  Variant (91)..(92): Xaa in position 91 to 92 is any or no amino acid
  Variant (94)..(97): Xaa in position 94 to 97 is any amino acid
  Variant (100)..(100): Xaa in position 100 is any amino acid
  Variant (104)..(104): Xaa in position 104 is any amino acid
  Variant (107)..(107): Xaa in position 107 is any amino acid
  Variant (111)..(111): Xaa in position 111 is any amino acid
  Variant (114)..(116): Xaa in position 114 to 116 is any amino acid
  Variant (119)..(130): Xaa in position 119 to 130 is any amino acid
  Variant (135)..(137): Xaa in position 135 to 137 is any amino acid
  Variant (147)..(147): Xaa in position 147 is any amino acid
  Variant (151)..(151): Xaa in position 151 is any amino acid
  Variant (154)..(154): Xaa in position 154 is any amino acid
  Variant (158)..(159): Xaa in position 158 to 159 is any amino acid
  Variant (163)..(163): Xaa in position 163 is any amino acid
  Variant (166)..(166): Xaa in position 166 is any amino acid
  Variant (174)..(174): Xaa in position 174 is any amino acid
  Variant (176)..(176): Xaa in position 176 is any amino acid
  Variant (179)..(180): Xaa in position 179 to 180 is any amino acid
  Variant (184)..(184): Xaa in position 184 is any amino acid
  Variant (186)..(186): Xaa in position 186 is any amino acid
  Variant (189)..(189): Xaa in position 189 is any amino acid
  Variant (195)..(197): Xaa in position 195 to 197 is any amino acid
  Variant (200)..(201): Xaa in position 200 to 201 is any amino acid
  Variant (203)..(204): Xaa in position 203 to 204 is any amino acid
  Variant (207)..(208): Xaa in position 207 to 208 is any amino acid
  Variant (212)..(212): Xaa in position 212 is any amino acid
  Variant (216)..(216): Xaa in position 216 is any amino acid
  Variant (221)..(224): Xaa in position 221 to 224 is any amino acid
  Variant (226)..(226): Xaa in position 226 is any amino acid
  Variant (228)..(229): Xaa in position 228 to 229 is any amino acid
  Variant (232)..(233): Xaa in position 232 to 233 is any amino acid
  Variant (243)..(243): Xaa in position 243 is any amino acid
  Variant (246)..(246): Xaa in position 246 is any amino acid
  Variant (250)..(250): Xaa in position 250 is any amino acid
  Variant (253)..(253): Xaa in position 253 is any amino acid
  Variant (256)..(257): Xaa in position 256 to 257 is any amino acid
  Variant (260)..(260): Xaa in position 260 is any amino acid
  Variant (267)..(267): Xaa in position 267 is any amino acid
MXXXXXXXXXXXLXGXXGVXXXXXSXXXXXXXXXXXXXXXXXXXXXXXXXXXXXLXXXRXWQQRPXCLRPXXXXXXXXXXXXXIXCXXXXXXDXXXXETXANVXTSXPFIXLGXXXPRXXXXXXXXXXXXKNLNXXXYANSLIGVGXASSXYHXSRGXXRKYXRWXDYTMIATXTXCLXXALRXEXPKXLMAASXXXLPXXPXXVSXXHTGXMEVXFAKRXXXXPXLXXAHXXHKMSSLLGGXLFXADDXFPXTPXXHAXWHLAAAXGVGTCNKLL

SEQ ID NO: 102115 - protein, 54 aa, Artificial sequence
  protein pattern
  Variant (3)..(3): Xaa in position 3 is Ile, Leu, Met or Val
  Variant (4)..(4): Xaa in position 4 is any amino acid
  Variant (5)..(5): Xaa in position 5 is Ala or Thr
  Variant (11)..(11): Xaa in position 11 is Asn or Ser
  Variant (12)..(13): Xaa in position 12 to 13 is any amino acid
  Variant (14)..(14): Xaa in position 14 is Leu or Val
  Variant (24)..(24): Xaa in position 24 is Ile or Val
  Variant (27)..(27): Xaa in position 27 is Gly or Ser
  Variant (28)..(28): Xaa in position 28 is Ile, Leu or Val
  Variant (30)..(30): Xaa in position 30 is His or Tyr
  Variant (31)..(31): Xaa in position 31 is Ala, Cys, Ser or Thr
  Variant (35)..(35): Xaa in position 35 is Lys or Arg
  Variant (36)..(36): Xaa in position 36 is Phe, Ile or Leu
  Variant (39)..(39): Xaa in position 39 is any amino acid
  Variant (40)..(40): Xaa in position 40 is Leu or Met
  Variant (43)..(43): Xaa in position 43 is Ala, Leu or Val
  Variant (51)..(51): Xaa in position 51 is Ala or Thr
  Variant (53)..(53): Xaa in position 53 is Ile, Leu or Val
LGXXXPRKNLXXXXYANSLIGVGXASXXYXXSRGXXRKXXRWXDYTMIATXTXC

SEQ ID NO: 102116 - protein, 59 aa, Artificial sequence
  protein pattern
  Variant (4)..(4): Xaa in position 4 is Ala or Ser
  Variant (5)..(6): Xaa in position 5 to 6 is any amino acid
  Variant (7)..(7): Xaa in position 7 is Asp or Glu
  Variant (9)..(9): Xaa in position 9 is Asp or Glu
  Variant (11)..(11): Xaa in position 11 is Lys or Arg
  Variant (12)..(12): Xaa in position 12 is any amino acid
  Variant (13)..(13): Xaa in position 13 is Ala or Val
  Variant (15)..(15): Xaa in position 15 is Asp, Asn or Thr
  Variant (16)..(16): Xaa in position 16 is Leu or Val
  Variant (21)..(21): Xaa in position 21 is Ser or Thr
  Variant (23)..(23): Xaa in position 23 is Leu or Met
  Variant (26)..(26): Xaa in position 26 is any amino acid
  Variant (29)..(29): Xaa in position 29 is Ile or Val
  Variant (33)..(33): Xaa in position 33 is any amino acid
  Variant (36)..(36): Xaa in position 36 is Glu, Lys or Arg
  Variant (39)..(39): Xaa in position 39 is Phe or Tyr
  Variant (40)..(40): Xaa in position 40 is Ile or Leu
  Variant (43)..(43): Xaa in position 43 is Ala or Gly
  Variant (50)..(50): Xaa in position 50 is Ile, Leu or Val
  Variant (51)..(51): Xaa in position 51 is any amino acid
AKRXXXXPXLXXXHXXHKMSXLXGGXLFXADDXFPXTPXXHAXWHLAAAXXVGTCNKLL

SEQ ID NO: 102117 - protein, 29 aa, Artificial sequence
  protein pattern
  Variant (2)..(3): Xaa in position 2 to 3 is any amino acid
  Variant (6)..(6): Xaa in position 6 is any amino acid
  Variant (7)..(7): Xaa in position 7 is any or no amino acid
  Variant (9)..(9): Xaa in position 9 is Ala or Thr
  Variant (10)..(11): Xaa in position 10 to 11 is any amino acid
  Variant (14)..(14): Xaa in position 14 is Phe, Ile or Val
  Variant (15)..(15): Xaa in position 15 is Asn or Gln
  Variant (17)..(17): Xaa in position 17 is Leu or Met
  Variant (18)..(18): Xaa in position 18 is Met or Val
  Variant (20)..(20): Xaa in position 20 is Ser or Thr
  Variant (21)..(21): Xaa in position 21 is Ala, Leu or Val
  Variant (22)..(22): Xaa in position 22 is Ile or Val
  Variant (26)..(26): Xaa in position 26 is Ile or Met
PXXLMXXSXXXLPXXPXXVXXXHTGXMEV

SEQ ID NO: 102118 - protein, 11 aa, Artificial sequence
  protein pattern
  Variant (3)..(3): Xaa in position 3 is Ala, Ile or Val
  Variant (7)..(7): Xaa in position 7 is Ala, Ile, Leu or Val
  Variant (10)..(10): Xaa in position 10 is Ile or Leu
ETXANVXTSXP

SEQ ID NO: 102119 - DNA, 1311 bp, Arabidopsis thaliana; identical to SEQ ID NO: 18138
  CDS (1)..(1311)

SEQ ID NO: 102120 - protein, 436 aa, Arabidopsis thaliana; identical to SEQ ID NO: 18139

SEQ ID NO: 102121 - DNA, 2171 bp, Zea mays
  CDS (522)..(1844)
gcctgacctcccaccctccctcttgaatccgctcaagttcccgatctcccaccttgtcctccagctcgatcgcgttcgcggcaccccactccgtgctccagaaataagtagccggcggtttcctcgccccaggttttgcggttgctggggagtgggaattcgttcggctccggtctggccaatgctcctgcggtttcttgtagaggccgctgagattgggatccaaactgcgttaggcgagcagcagcagtagccgcatcgagattcgccgtcgttgtccgagggattctccgtttcttgggcggggatttcggttgcggcggaaaaaaaaagaattctttcaccggactggcccaactcctcggttgatccggtgatccgttacaaaaggcctccgctgtatgttagggtagcctttccgacgcgtttctttcgtcgccccagatccgtctccccgcccgattctttcggaggaatcggcggcggatcggaggcagaggggtttggaggcctgagctccgatggagatgcacgccgacgtcgacgggtgcagcgtgcccctggccgtgctcctcaagcgggagctgtgcaaccagaaggtggagaggccggacatcctgttcggggaggccaacaagagcaagaaaggggaggacttcacgctcctcgtgcccaggtgccaccgcaccccgggcggcagtggcggcggcgagaatgccggcgacgacgacaccatttccgtatttgcgattttcgacggacacaatggctctgcagctgccatatacacccgggagaatctaataagcagtgtgttggctgctattcctccaaatctcacaagtgaggagtggaaagctgcgctgccaagggcactagttgctggttttgtaaaaacagataaaaacttccaaataaaagctgcacgctcagggaccactgtgacttttgttataatagatggatgggttgtcactgtagcatcagttggcgattcacgatgcattctagaatctgctgagggctcagtatattttttatcagcagatcatcgcctggatgctaatgaagaggaggtggagcgtgtaacagcaagtggtggtgaagttgggagaataaatatcgctgggggtgctgggattggtccactcagatgctggccaggtggattgtgtttatcaaggtcaataggtgatatcgacgtcggggaatttatagttcctgtcccacacgtgaagcaagtaaagttgtccaatgctggtgggcggcttgtcattgccagtgatggtgtgtgggatgcactgcgctttcaagaggctctgaactacaccaggggcctgccagctgaagctgctgctaatcgaattgttaaggaagctgtcacttcgaagggattaagagatgatactacttgcatagtagttgatatactacctccagagaagttaagccccccactgaagagacctggaaaaggagtcatcaaagctctattccggcggaggccctctgatgaaatgtctgaagatcagatggacagaggatgtttagaaattgatgttgtggaggaaatatatgaggagggctctgcaatgcttgctcgaaggttgaatataaattatccagaaggaaatatgttcaagctgcatgattgtgctgtctgccaattggagatgaaacctggtgagggcacctctgttcatggtaacatgcccaagcattcaagagttgacccctggggtggcccttttctctgttcctcctgtcaattgaaaaaggaggccatggaagggaagctacattcaagaaattcccaatctgctgttcaacctctgcctaagtaggcattccttgacgggttctatacattggttcatagacactaactaccactaacaacagcattagcaaataaagtagactcgtcaatgccatcttattcatcaatcaatgtttgacagagtcatgaattttcacctactacattcttatcaaatggcgatcggtacagattttagagatttatggtgtcgtttatatgatgcactacagttgttcggtagtagaaggttcaagtctgagccttatcaagtctatattcagagagaccacagctggcctctaggatcaaatgaactggtggccttaaggtgtgctgctttctgtagttc

SEQ ID NO: 102122 - protein, 440 aa, Zea mays
MEMHADVDGCSVPLAVLLKRELCNQKVERPDILFGEANKSKKGEDFTLLVPRCHRTPGGSGGGENAGDDDTISVFAIFDGHNGSAAAIYTRENLISSVLAAIPPNLTSEEWKAALPRALVAGFVKTDKNFQIKAARSGTTVTFVIIDGWVVTVASVGDSRCILESAEGSVYFLSADHRLDANEEEVERVTASGGEVGRINIAGGAGIGPLRCWPGGLCLSRSIGDIDVGEFIVPVPHVKQVKLSNAGGRLVIASDGVWDALRFQEALNYTRGLPAEAAANRIVKEAVTSKGLRDDTTCIVVDILPPEKLSPPLKRPGKGVIKALFRRRPSDEMSEDQMDRGCLEIDVVEEIYEEGSAMLARRLNINYPEGNMFKLHDCAVCQLEMKPGEGTSVHGNMPKHSRVDPWGGPFLCSSCQLKKEAMEGKLHSRNSQSAVQPLPK

SEQ ID NO: 102123 - DNA, 2009 bp, Zea mays subsp. mays; identical to SEQ ID NO: 18134
  CDS (259)..(1551)

SEQ ID NO: 102124 - protein, 430 aa, Zea mays subsp. mays; identical to SEQ ID NO: 18135

SEQ ID NO: 102125 - DNA, 1329 bp, Oryza sativa (japonica cultivar-group); identical to SEQ ID NO: 18140
  CDS (1)..(1329)

SEQ ID NO: 102126 - protein, 442 aa, Oryza sativa (japonica cultivar-group); identical to SEQ ID NO: 18141

SEQ ID NO: 102127 - DNA, 1299 bp, Oryza sativa (japonica cultivar-group); identical to SEQ ID NO: 18142
  CDS (1)..(1299)

SEQ ID NO: 102128 - protein, 432 aa, Oryza sativa (japonica cultivar-group); identical to SEQ ID NO: 18143

SEQ ID NO: 102129 - DNA, 1335 bp, Oryza sativa (japonica cultivar-group); identical to SEQ ID NO: 18144
  CDS (1)..(1335)

SEQ ID NO: 102130 - protein, 444 aa, Oryza sativa (japonica cultivar-group); identical to SEQ ID NO: 18145

SEQ ID NO: 102131 - DNA, 1446 bp, Oryza sativa (japonica cultivar-group); identical to SEQ ID NO: 18146
  CDS (1)..(1446)

SEQ ID NO: 102132 - protein, 481 aa, Oryza sativa (japonica cultivar-group); identical to SEQ ID NO: 18147

SEQ ID NO: 102133 - DNA, 1296 bp, Oryza sativa (japonica cultivar-group); identical to SEQ ID NO: 18148
  CDS (1)..(1296)

SEQ ID NO: 102134 - protein, 431 aa, Oryza sativa (japonica cultivar-group); identical to SEQ ID NO: 18149

SEQ ID NO: 102135 - DNA, 1269 bp, Oryza sativa (japonica cultivar-group); identical to SEQ ID NO: 18150
  CDS (1)..(1269)

SEQ ID NO: 102136 - protein, 422 aa, Oryza sativa (japonica cultivar-group); identical to SEQ ID NO: 18151

SEQ ID NO: 102137 - DNA, 1287 bp, Arabidopsis thaliana; identical to SEQ ID NO: 18152
  CDS (1)..(1287)

SEQ ID NO: 102138 - protein, 428 aa, Arabidopsis thaliana; identical to SEQ ID NO: 18153

SEQ ID NO: 102139 - DNA, 1287 bp, Arabidopsis thaliana; identical to SEQ ID NO: 18122
  CDS (1)..(1287)

SEQ ID NO: 102140 - protein, 428 aa, Arabidopsis thaliana; identical to SEQ ID NO: 18123

SEQ ID NO: 102141 - DNA, 1230 bp, Oryza sativa subsp; identical to SEQ ID NO: 18154
  CDS (1)..(1230)

SEQ ID NO: 102142 - protein, 409 aa, Oryza sativa subsp; identical to SEQ ID NO: 18155

SEQ ID NO: 102143 - DNA, 1320 bp, Oryza sativa subsp; identical to SEQ ID NO: 18158
  CDS (1)..(1320)

SEQ ID NO: 102144 - protein, 439 aa, Oryza sativa subsp; identical to SEQ ID NO: 18159

SEQ ID NO: 102145 - DNA, 1278 bp, Oryza sativa subsp; identical to SEQ ID NO: 18162
  CDS (1)..(1278)

SEQ ID NO: 102146 - protein, 425 aa, Oryza sativa subsp; identical to SEQ ID NO: 18163

SEQ ID NO: 102147 - DNA, 1203 bp, Oryza sativa subsp; identical to SEQ ID NO: 18168
  CDS (1)..(1203)

SEQ ID NO: 102148 - protein, 400 aa, Oryza sativa subsp; identical to SEQ ID NO: 18169

SEQ ID NO: 102149 - DNA, 1197 bp, Oryza sativa subsp
  CDS (1)..(1197)
atggcggcggcggcggcggcggcgacggtggaggcgctgttcgatgggcacaacgggagcggcgccgcggtgtacgccaaggagaatatcctcagcaacgtcatgtgctgcgttcctgccgatctgagcggcgacgagtggctcgcagcgctcccgagggcgctggtggccgggttcgtcaagacggacaaggattttcaaacaagaggaacaaccgtgacgtttgtcataatcgatgggtacgttgtgaccgttgcatccgttggcgattcgcggtgcgtccttgaagctgagggtaccatttaccatttgtccgctgaccatcgcttcgatgctagcgaagaggaggttggacgtgtaacagaatgcggaggtgaagttggaaggctaaatgttgtcggcggagctgagattgggccacttagatgttggcctggtggcttgtgcctatcaagatcaattggtgatcaggatgtaggtgaatttatcattcccgtgccttatgtgaagcagatcaagctatcaagtgctggaggcagaatcattatttcaagtgatggtgtttgggatgccttgactgtggatacggcttttagttgtgcacgagggcttcctccagaagctgcagcggatcaaattgtcaaagaagcaattgcatcaaaaggattgagagatgatacgacttgtattgtcattgacataatacctccagaaaaaataagccccactgtgcaacctgcaaaaaaggcagggaaaggacttttcaaaaatatcttttacaagaaagcaacatcagactcaccatgtcatgcagataaggaccaatgtacccagccagatttggtggaggaagtctttgaggatggatgtccttccctttcaagacggctagattctgaatatccagttcggaatatgttcaagctcttcatatgtgcaatttgtcaagtagagttagagtctggtcagggtatatccatacatgagggtttgtcaaagtcaggaaagctgcgtccatgggatgggcctttcctttgccacagttgccaggaaaagaaagaagcaatggaaggaaaacgtcactcacgagcggtatcttctttaccaagcattttgcacgagtgctgttgtgaggactggtatgagttcactacatgtttgcttgttcttgagtacagaaagatgcgttcaccgtaa

SEQ ID NO: 102150 - protein, 398 aa, Oryza sativa subsp
MAAAAAAATVEALFDGHNGSGAAVYAKENILSNVMCCVPADLSGDEWLAALPRALVAGFVKTDKDFQTRGTTVTFVIIDGYVVTVASVGDSRCVLEAEGTIYHLSADHRFDASEEEVGRVTECGGEVGRLNVVGGAEIGPLRCWPGGLCLSRSIGDQDVGEFIIPVPYVKQIKLSSAGGRIIISSDGVWDALTVDTAFSCARGLPPEAAADQIVKEAIASKGLRDDTTCIVIDIIPPEKISPTVQPAKKAGKGLFKNIFYKKATSDSPCHADKDQCTQPDLVEEVFEDGCPSLSRRLDSEYPVRNMFKLFICAICQVELESGQGISIHEGLSKSGKLRPWDGPFLCHSCQEKKEAMEGKRHSRAVSSLPSILHECCCEDWYEFTTCLLVLEYRKMRSP

SEQ ID NO: 102151 - DNA, 1590 bp, Oryza sativa subsp; identical to SEQ ID NO: 18170
  CDS (1)..(1590)

SEQ ID NO: 102152 - protein, 529 aa, Oryza sativa subsp; identical to SEQ ID NO: 18171

SEQ ID NO: 102153 - DNA, 1374 bp, Oryza sativa; identical to SEQ ID NO: 18172
  CDS (1)..(1374)

SEQ ID NO: 102154 - protein, 457 aa, Oryza sativa; identical to SEQ ID NO: 18173

SEQ ID NO: 102155 - DNA, 1287 bp, Medicago truncatula; identical to SEQ ID NO: 18174
  CDS (1)..(1287)

SEQ ID NO: 102156 - protein, 428 aa, Medicago truncatula; identical to SEQ ID NO: 18175

SEQ ID NO: 102157 - DNA, 1323 bp, Medicago truncatula; identical to SEQ ID NO: 18176
  CDS (1)..(1323)

SEQ ID NO: 102158 - protein, 440 aa, Medicago truncatula; identical to SEQ ID NO: 18177

SEQ ID NO: 102159 - DNA, 1952 bp, Physcomitrella patens; identical to SEQ ID NO: 18178
  CDS (267)..(1388)

SEQ ID NO: 102160 - protein, 373 aa, Physcomitrella patens; identical to SEQ ID NO: 18179

SEQ ID NO: 102161 - DNA, 1374 bp, Oryza sativa subsp; identical to SEQ ID NO: 18180
  CDS (1)..(1374)

SEQ ID NO: 102162 - protein, 457 aa, Oryza sativa subsp; identical to SEQ ID NO: 18181

SEQ ID NO: 102163 - DNA, 1287 bp, Arabidopsis thaliana; identical to SEQ ID NO: 18184
  CDS (1)..(1287)

SEQ ID NO: 102164 - protein, 428 aa, Arabidopsis thaliana; identical to SEQ ID NO: 18185

SEQ ID NO: 102165 - DNA, 1386 bp, Oryza sativa; identical to SEQ ID NO: 18186
  CDS (1)..(1386)

SEQ ID NO: 102166 - protein, 461 aa, Oryza sativa; identical to SEQ ID NO: 18187

SEQ ID NO: 102167 - DNA, 1179 bp, Oryza sativa
  CDS (1)..(1179)
atggcggcggcggcggcggcggcgacggtggaggcggtgggggtggcgggggggaggaggaggcggagcgggagcgtggcgctcggggacctgctgcggcgtgaggcgtcggcggagcgcgcttcggcgtcggcgtcggcgggtgcgggcgggcgggagcgggagcggcggcccagcgtcgcggcggggcaggcgtgtagggctaagaagggggaggacttcgcgctgctcaagccggcctgcgagcgcctcccggccggcggcgcccccttctccgccttcgccctgttcgatgggcacaacgggagcggcgccgcggtgtacgccaaggagaatatcctcagcaacgtcatgtgctgcgttcctgccgatctgagcggcgacgagtggctcgcagcgctcccgagggcgctggtggccgggttcgtcaagacggacaaggattttcaaacaagagcccattcttcaggaacaaccgtgacgtttgtcataatcgatgggtacgttgtgaccgttgcatccgttggcgattcgcggtgcgtccttgaagctgagggtaccatttaccatttgtccgctgaccatcgcttcgatgctagcgaagaggaggttggacgtgtaacagaatgcggaggtgaagttggaaggctaaatgttgtcggcggagctgagattgggccacttagatgttggcctggtggcttgtgcctatcaagatcaattggtgatcaggatgtaggtgaatttatcattcccgtgccttatgtgaagcagatcaagctatcaagtgctggaggcagaatcattatttcaagtgatggtgtttgggatgccttgactgtggatacggcttttagttgtgcacgagggcttcctccagaagctgcagcggatcaaattgtcaaagaagcaattgcatcaaaaggattgagagatgatacgacttgtattgtcattgacataatacctccagaaaaaataagccccactgtgcaacctgcaaaaaaggcagggaaaggacttttcaaaaatatcttttacaagaaagcaacatcagactcaccatgtcatgcagataaggaccaatgtacccagccagatttggtggaggaagtctttgaggatggatgtccttccctttcaagacggtttgtactttgtaccctttatccatcttga

SEQ ID NO: 102168 - protein, 392 aa, Oryza sativa
MAAAAAAATVEAVGVAGGRRRRSGSVALGDLLRREASAERASASASAGAGGRERERRPSVAAGQACRAKKGEDFALLKPACERLPAGGAPFSAFALFDGHNGSGAAVYAKENILSNVMCCVPADLSGDEWLAALPRALVAGFVKTDKDFQTRAHSSGTTVTFVIIDGYVVTVASVGDSRCVLEAEGTIYHLSADHRFDASEEEVGRVTECGGEVGRLNVVGGAEIGPLRCWPGGLCLSRSIGDQDVGEFIIPVPYVKQIKLSSAGGRIIISSDGVWDALTVDTAFSCARGLPPEAAADQIVKEAIASKGLRDDTTCIVIDIIPPEKISPTVQPAKKAGKGLFKNIFYKKATSDSPCHADKDQCTQPDLVEEVFEDGCPSLSRRFVLCTLYPS

SEQ ID NO: 102169 - DNA, 1296 bp, Oryza sativa; identical to SEQ ID NO: 968
  CDS (1)..(1296)

SEQ ID NO: 102170 - protein, 431 aa, Oryza sativa; identical to SEQ ID NO: 969

SEQ ID NO: 102171 - DNA, 1296 bp, Zea mays
  CDS (1)..(1296)
atggcgatggcgttgtcgccggggacggtgcctttgggagtgctgctgcggcgggaggtcaccaaggagcggatggagcggccggacgtgctgtgcggcgaggccaacctcagccgcaagggcgaggacttcacgctgctccgcgccgacgcaggccagcgcatccccggcgacccgtccacctccttctccgtcttcgcgatttttgatgggcacaacggatcaggagctgccatatacgcaagggagaatctgttgaaaaacgtcttgcgtgccattcctacatgtttctgcagggaggagtggcttgccgtgctcccacgtgcgcttgttgcagcgttcgtcaagactgataaagattttcaggcagtggatgaaacttctggcacaactgtgacatttgtgataatagacgagtgggttgtgactgtagcatctgtcggtgattcacgttgcatactagaatctgccgatggctcaatctactttttatcagctgatcatcgctttgactccaacccagatgaggtcaagcgcgtgacagcatgtgggagcaaagttgggaaaatggatattgtcggtggaccagaggttggtcctctaagatgttggccaggtggtttgtgtctatctagatccataggggatcttgatgttggtgaatgcatcattgctgttcctcatgttaagcaagtgaagctttctaatgctggaggcagaattatcattgcaagcgatggtgtgtgggatgatttgacttgtgaaatggctcttgattgttcccgtgggttctcatcagatgtagctgccaatcgaattgttaatgaagcaacccggcctcgtggaatcagggatgatactacttgcatcgtaatcgacattctaccaccagaaaatatagtcccgagtcctcgtaagagaccccgcaggattacattcaataatgtgtttcgcaaaagacatctagacgtcccccccgaaacaaatagatcagaatatgctgaaccggatgtggtggaagaaatatttgaagatggctctccgatgctttctaaaaggctaactaccggatatacacttgagaaaacttttgcaccctccagttgtgcagtttgtctggtacggttgaaatctggacagggaatttcagtgcatgataacccattgcaatatgagaaactacaaggttggcagggtcctttcctgtgcccgagctgtcatgaaaagaaagaagcaatggaagggaaacgccggccaaaaggatcttcatcaaacgtctttggtcacatgtgctag

SEQ ID NO: 102172 - protein, 431 aa, Zea mays; identical to SEQ ID NO: 18131

SEQ ID NO: 102173 - DNA, 1314 bp, Zea mays; identical to SEQ ID NO: 1470
  CDS (1)..(1314)

SEQ ID NO: 102174 - protein, 437 aa, Zea mays; identical to SEQ ID NO: 1471

SEQ ID NO: 102175 - DNA, 1290 bp, Brassica napus; identical to SEQ ID NO: 992
  CDS (1)..(1290)

SEQ ID NO: 102176 - protein, 429 aa, Brassica napus; identical to SEQ ID NO: 993

SEQ ID NO: 102177 - DNA, 1281 bp, Glycine max; identical to SEQ ID NO: 18194
  CDS (1)..(1281)

SEQ ID NO: 102178 - protein, 426 aa, Glycine max; identical to SEQ ID NO: 18195

SEQ ID NO: 102179 - DNA, 1287 bp, Glycine max; identical to SEQ ID NO: 22141
  CDS (1)..(1287)

SEQ ID NO: 102180 - protein, 428 aa, Glycine max; identical to SEQ ID NO: 18125

SEQ ID NO: 102181 - DNA, 1296 bp, Glycine max; identical to SEQ ID NO: 1016
  CDS (1)..(1296)

SEQ ID NO: 102182 - protein, 431 aa, Glycine max; identical to SEQ ID NO: 1017

SEQ ID NO: 102183 - DNA, 1290 bp, Glycine max; identical to SEQ ID NO: 18198
  CDS (1)..(1290)

SEQ ID NO: 102184 - protein, 429 aa, Glycine max; identical to SEQ ID NO: 18199

SEQ ID NO: 102185 - DNA, 1284 bp, Brassica napus; identical to SEQ ID NO: 18200
  CDS (1)..(1284)

SEQ ID NO: 102186 - protein, 427 aa, Brassica napus; identical to SEQ ID NO: 18201

SEQ ID NO: 102187 - DNA, 1290 bp, Zea mays; identical to SEQ ID NO: 18202
  CDS (1)..(1290)

SEQ ID NO: 102188 - protein, 429 aa, Zea mays; identical to SEQ ID NO: 18203

SEQ ID NO: 102189 - DNA, 1323 bp, Zea mays; identical to SEQ ID NO: 18204
  CDS (1)..(1323)

SEQ ID NO: 102190 - protein, 440 aa, Zea mays; identical to SEQ ID NO: 18205

SEQ ID NO: 102191 - DNA, 1455 bp, Zea mays; identical to SEQ ID NO: 18206
  CDS (1)..(1455)

SEQ ID NO: 102192 - protein, 484 aa, Zea mays; identical to SEQ ID NO: 18207

SEQ ID NO: 102193 - DNA, 1335 bp, Zea mays; identical to SEQ ID NO: 18208
  CDS (1)..(1335)

SEQ ID NO: 102194 - protein, 444 aa, Zea mays; identical to SEQ ID NO: 18209

SEQ ID NO: 102195 - DNA, 1290 bp, Zea mays; identical to SEQ ID NO: 18210
  CDS (1)..(1290)

SEQ ID NO: 102196 - protein, 429 aa, Zea mays; identical to SEQ ID NO: 18211

SEQ ID NO: 102197 - DNA, 1290 bp, Zea mays; identical to SEQ ID NO: 18212
  CDS (1)..(1290)

SEQ ID NO: 102198 - protein, 429 aa, Zea mays; identical to SEQ ID NO: 18213

SEQ ID NO: 102199 - DNA, 1455 bp, Zea mays; identical to SEQ ID NO: 18214
  CDS (1)..(1455)

SEQ ID NO: 102200 - protein, 484 aa, Zea mays; identical to SEQ ID NO: 18215

SEQ ID NO: 102201 - DNA, 1341 bp, Zea mays; identical to SEQ ID NO: 18216
  CDS (1)..(1341)

SEQ ID NO: 102202 - protein, 446 aa, Zea mays; identical to SEQ ID NO: 18217

SEQ ID NO: 102203 - DNA, 1341 bp, Zea mays; identical to SEQ ID NO: 1604
  CDS (1)..(1341)

SEQ ID NO: 102204 - protein, 446 aa, Zea mays; identical to SEQ ID NO: 1605

SEQ ID NO: 102205 - DNA, 1332 bp, Zea mays; identical to SEQ ID NO: 18220
  CDS (1)..(1332)

SEQ ID NO: 102206 - protein, 443 aa, Zea mays; identical to SEQ ID NO: 18221

SEQ ID NO: 102207 - DNA, 1314 bp, Zea mays; identical to SEQ ID NO: 1612
  CDS (1)..(1314)

SEQ ID NO: 102208 - protein, 437 aa, Zea mays; identical to SEQ ID NO: 1613

SEQ ID NO: 102209 - DNA, 1290 bp, Zea mays; identical to SEQ ID NO: 22241
  CDS (1)..(1290)

SEQ ID NO: 102210 - protein, 429 aa, Zea mays; identical to SEQ ID NO: 18137

SEQ ID NO: 102211 - DNA, 1293 bp, Zea mays; identical to SEQ ID NO: 22243
  CDS (1)..(1293)

SEQ ID NO: 102212 - protein, 430 aa, Zea mays; identical to SEQ ID NO: 18129

SEQ ID NO: 102213 - DNA, 21 bp, Artificial sequence
  primer
atggcgtctagagaaggaaag

SEQ ID NO: 102214 - DNA, 20 bp, Artificial sequence
  primer
ctagatgactttaactccac

SEQ ID NO: 102215 - protein, 572 aa, Artificial sequence
  consensus sequence
  Variant (2)..(10): Xaa in position 2 to 10 is any amino acid
  Variant (11)..(33): Xaa in position 11 to 33 is any or no amino acid
  Variant (36)..(37): Xaa in position 36 to 37 is any amino acid
  Variant (39)..(40): Xaa in position 39 to 40 is any amino acid
  Variant (43)..(50): Xaa in position 43 to 50 is any amino acid
  Variant (51)..(87): Xaa in position 51 to 87 is any or no amino acid
  Variant (89)..(92): Xaa in position 89 to 92 is any amino acid
  Variant (94)..(98): Xaa in position 94 to 98 is any amino acid
  Variant (100)..(100): Xaa in position 100 is any amino acid
  Variant (104)..(105): Xaa in position 104 to 105 is any amino acid
  Variant (107)..(110): Xaa in position 107 to 110 is any amino acid
  Variant (112)..(112): Xaa in position 112 is any amino acid
  Variant (113)..(113): Xaa in position 113 is any or no amino acid
  Variant (115)..(122): Xaa in position 115 to 122 is any amino acid
  Variant (123)..(137): Xaa in position 123 to 137 is any or no amino acid
  Variant (139)..(139): Xaa in position 139 is any amino acid
  Variant (142)..(142): Xaa in position 142 is any amino acid
  Variant (143)..(181): Xaa in position 143 to 181 is any or no amino acid
  Variant (188)..(189): Xaa in position 188 to 189 is any amino acid
  Variant (192)..(195): Xaa in position 192 to 195 is any amino acid
  Variant (197)..(197): Xaa in position 197 is any amino acid
  Variant (200)..(201): Xaa in position 200 to 201 is any amino acid
  Variant (203)..(204): Xaa in position 203 to 204 is any amino acid
  Variant (206)..(206): Xaa in position 206 is any amino acid
  Variant (208)..(214): Xaa in position 208 to 214 is any amino acid
  Variant (216)..(217): Xaa in position 216 to 217 is any amino acid
  Variant (232)..(233): Xaa in position 232 to 233 is any amino acid
  Variant (236)..(237): Xaa in position 236 to 237 is any amino acid
  Variant (238)..(240): Xaa in position 238 to 240 is any or no amino acid
  Variant (245)..(245): Xaa in position 245 is any amino acid
  Variant (247)..(247): Xaa in position 247 is any amino acid
  Variant (249)..(250): Xaa in position 249 to 250 is any amino acid
  Variant (253)..(254): Xaa in position 253 to 254 is any amino acid
  Variant (266)..(266): Xaa in position 266 is any amino acid
  Variant (268)..(270): Xaa in position 268 to 270 is any amino acid
  Variant (271)..(271): Xaa in position 271 is any or no amino acid
  Variant (273)..(276): Xaa in position 273 to 276 is any amino acid
  Variant (278)..(279): Xaa in position 278 to 279 is any amino acid
  Variant (283)..(285): Xaa in position 283 to 285 is any amino acid
  Variant (287)..(287): Xaa in position 287 is any amino acid
  Variant (290)..(291): Xaa in position 290 to 291 is any amino acid
  Variant (295)..(296): Xaa in position 295 to 296 is any amino acid
  Variant (305)..(306): Xaa in position 305 to 306 is any amino acid
  Variant (309)..(309): Xaa in position 309 is any amino acid
  Variant (311)..(311): Xaa in position 311 is any amino acid
  Variant (330)..(330): Xaa in position 330 is any amino acid
  Variant (335)..(335): Xaa in position 335 is any amino acid
  Variant (337)..(337): Xaa in position 337 is any amino acid
  Variant (339)..(339): Xaa in position 339 is any amino acid
  Variant (341)..(341): Xaa in position 341 is any amino acid
  Variant (349)..(349): Xaa in position 349 is any amino acid
  Variant (357)..(357): Xaa in position 357 is any amino acid
  Variant (361)..(361): Xaa in position 361 is any amino acid
  Variant (366)..(369): Xaa in position 366 to 369 is any amino acid
  Variant (371)..(374): Xaa in position 371 to 374 is any amino acid
  Variant (377)..(377): Xaa in position 377 is any amino acid
  Variant (380)..(380): Xaa in position 380 is any amino acid
  Variant (382)..(382): Xaa in position 382 is any amino acid
  Variant (385)..(387): Xaa in position 385 to 387 is any amino acid
  Variant (390)..(390): Xaa in position 390 is any amino acid
  Variant (392)..(395): Xaa in position 392 to 395 is any amino acid
  Variant (398)..(398): Xaa in position 398 is any amino acid
  Variant (404)..(404): Xaa in position 404 is any amino acid
  Variant (409)..(409): Xaa in position 409 is any amino acid
  Variant (411)..(429): Xaa in position 411 to 429 is any amino acid
  Variant (430)..(434): Xaa in position 430 to 434 is any or no amino acid
  Variant (436)..(438): Xaa in position 436 to 438 is any amino acid
  Variant (439)..(458): Xaa in position 439 to 458 is any or no amino acid
  Variant (462)..(462): Xaa in position 462 is any amino acid
  Variant (465)..(465): Xaa in position 465 is any amino acid
  Variant (467)..(469): Xaa in position 467 to 469 is any amino acid
  Variant (471)..(472): Xaa in position 471 to 472 is any amino acid
  Variant (475)..(478): Xaa in position 475 to 478 is any amino acid
  Variant (479)..(517): Xaa in position 479 to 517 is any or no amino acid
  Variant (520)..(520): Xaa in position 520 is any amino acid
  Variant (523)..(523): Xaa in position 523 is any amino acid
  Variant (524)..(546): Xaa in position 524 to 546 is any or no amino acid
  Variant (548)..(548): Xaa in position 548 is any amino acid
  Variant (551)..(551): Xaa in position 551 is any amino acid
  Variant (554)..(555): Xaa in position 554 to 555 is any amino acid
  Variant (557)..(558): Xaa in position 557 to 558 is any amino acid
  Variant (559)..(564): Xaa in position 559 to 564 is any or no amino acid
  Variant (567)..(567): Xaa in position 567 is any amino acid
MXXXXXXXXXXXXXXXXXXXXXXXXXXXXXXXXPLXXLXXREXXXXXXXXXXXXXXXXXXXXXXXXXXXXXXXXXXXXXXXXXXXXXPXXXXGXXXXXKXGEDXXLXXXXCXXRXXXXXXXXXXXXXXXXXXXXXXXSXFAXXXXXXXXXXXXXXXXXXXXXXXXXXXXXXXXXXXXXXXXFDGHNGXXAAXXXXEXLLXXVXXAXPXXXXXXXWXXALPRALVAGFVKTDXXFQXXXXXSGTTXTXVXXDGXXVTVASVGDSRCXLXXXXGXXXXLXXDHRXXXNXEEXXRVTXXGGEVGRLNXXGGXEXGPLRCWPGGLCLSRSIGDXDVGEXIXPXPXVKQVKLSXAGGRLIIXSDGXWDALXXXXAXXXXRGXLPXEXAAXXXVKXAXXXXGLXDDTTCXVVDIXPXXXXXXXXXXXXXXXXXXXXXXXXFXXXXXXXXXXXXXXXXXXXXXXXVEEXFEXGXXXLXXRLXXXXXXXXXXXXXXXXXXXXXXXXXXXXXXXXXXXXXXXXXXXCAXCQXXXXXXXXXXXXXXXXXXXXXXXXWXGPXLCXXCXXXXXXXXKKXAMEGK

SEQ ID NO: 102216 - protein, 58 aa, Artificial sequence
  protein pattern
  Variant (3)..(3): Xaa in position 3 is any amino acid
  Variant (4)..(4): Xaa in position 4 is any or no amino acid
  Variant (6)..(6): Xaa in position 6 is Ile or Val
  Variant (25)..(25): Xaa in position 25 is any amino acid
  Variant (29)..(29): Xaa in position 29 is Glu or Gln
  Variant (30)..(30): Xaa in position 30 is any amino acid
  Variant (32)..(32): Xaa in position 32 is Ile or Val
  Variant (33)..(33): Xaa in position 33 is Ala or Pro
  Variant (34)..(34): Xaa in position 34 is Ile or Val
  Variant (36)..(36): Xaa in position 36 is any amino acid
  Variant (37)..(37): Xaa in position 37 is Leu or Val
  Variant (40)..(40): Xaa in position 40 is Ile or Val
  Variant (43)..(43): Xaa in position 43 is Pro or Ser
  Variant (44)..(45): Xaa in position 44 to 45 is any amino acid
  Variant (49)..(49): Xaa in position 49 is Ile or Leu
  Variant (50)..(50): Xaa in position 50 is Ile or Val
  Variant (52)..(52): Xaa in position 52 is Ala or Ser
  Variant (56)..(56): Xaa in position 56 is Ile or Val
GGXXEXGPLRCWPGGLCLSRSIGDXDVGXXIXXXPXXKQXKLXXXGGRXXIXSDGXWD

SEQ ID NO: 102217 - protein, 45 aa, Artificial sequence
  protein pattern
  Variant (2)..(2): Xaa in position 2 is any amino acid
  Variant (4)..(4): Xaa in position 4 is Ala or Gly
  Variant (5)..(5): Xaa in position 5 is Ile, Leu or Val
  Variant (12)..(13): Xaa in position 12 to 13 is any amino acid
  Variant (16)..(16): Xaa in position 16 is Ile, Met or Val
  Variant (17)..(17): Xaa in position 17 is Phe or Tyr
  Variant (18)..(18): Xaa in position 18 is Ala, Ser or Thr
  Variant (19)..(19): Xaa in position 19 is Lys or Arg
  Variant (20)..(20): Xaa in position 20 is Glu or Lys
  Variant (21)..(21): Xaa in position 21 is any amino acid
  Variant (22)..(22): Xaa in position 22 is Ile, Leu or Met
  Variant (23)..(23): Xaa in position 23 is Ile or Leu
  Variant (24)..(25): Xaa in position 24 to 25 is any amino acid
  Variant (26)..(26): Xaa in position 26 is Ile, Leu or Val
  Variant (27)..(27): Xaa in position 27 is Ile, Leu, Met or Val
  Variant (28)..(28): Xaa in position 28 is any amino acid
  Variant (29)..(29): Xaa in position 29 is Ala or Cys
  Variant (30)..(30): Xaa in position 30 is Ile, Leu or Val
  Variant (31)..(31): Xaa in position 31 is Pro or Ser
  Variant (32)..(32): Xaa in position 32 is any amino acid
  Variant (33)..(33): Xaa in position 33 is Cys, Asp, Gly or Asn
  Variant (34)..(34): Xaa in position 34 is any amino acid
  Variant (35)..(35): Xaa in position 35 is Cys, Gly, Asn, Ser or Thr
  Variant (36)..(36): Xaa in position 36 is any amino acid
  Variant (37)..(37): Xaa in position 37 is Asp or Glu
  Variant (38)..(38): Xaa in position 38 is Ala, Asp or Glu
  Variant (40)..(41): Xaa in position 40 to 41 is any amino acid
  Variant (42)..(42): Xaa in position 42 is Ala or Val
SXFXXFDGHNGXXAAXXXXXXXXXXXXXXXXXXXXXXXWXXXLPR

SEQ ID NO: 102218 - protein, 33 aa, Artificial sequence
  protein pattern
  Variant (2)..(3): Xaa in position 2 to 3 is any or no amino acid
  Variant (6)..(7): Xaa in position 6 to 7 is any amino acid
  Variant (8)..(8): Xaa in position 8 is Ile or Val
  Variant (11)..(11): Xaa in position 11 is Glu or Gln
  Variant (12)..(12): Xaa in position 12 is Ala or Ser
  Variant (13)..(13): Xaa in position 13 is Ile, Leu or Val
  Variant (14)..(16): Xaa in position 14 to 16 is any amino acid
  Variant (19)..(19): Xaa in position 19 is Lys or Arg
  Variant (25)..(25): Xaa in position 25 is Ile, Leu or Val
  Variant (27)..(27): Xaa in position 27 is Ile or Val
  Variant (30)..(30): Xaa in position 30 is any amino acid
  Variant (31)..(31): Xaa in position 31 is any or no amino acid
  Variant (33)..(33): Xaa in position 33 is Asp, Glu, Pro, Gln or Ser
AXXAAXXXVKXXXXXXGLXDDTTCXVXDIXXPX

SEQ ID NO: 102219 - protein, 28 aa, Artificial sequence
  protein pattern
  Variant (2)..(2): Xaa in position 2 is Ser or Thr
  Variant (3)..(3): Xaa in position 3 is Ala or Val
  Variant (7)..(7): Xaa in position 7 is Phe or Leu
  Variant (8)..(8): Xaa in position 8 is Asp or Glu
  Variant (9)..(9): Xaa in position 9 is any amino acid
  Variant (10)..(10): Xaa in position 10 is Asn or Ser
  Variant (11)..(11): Xaa in position 11 is any amino acid
  Variant (14)..(15): Xaa in position 14 to 15 is any or no amino acid
  Variant (17)..(18): Xaa in position 17 to 18 is any or no amino acid
  Variant (21)..(21): Xaa in position 21 is Ala or Glu
  Variant (22)..(22): Xaa in position 22 is Cys or Ser
  Variant (25)..(25): Xaa in position 25 is Asp or Glu
  Variant (27)..(27): Xaa in position 27 is Gly or Ser
LXXDHRXXXXXEEXXRXXVTXXGGXVXR

SEQ ID NO: 102220 - protein, 11 aa, Artificial sequence
  protein pattern
  Variant (2)..(3): Xaa in position 2 to 3 is any amino acid
  Variant (6)..(6): Xaa in position 6 is Asp or Glu
CXXKKXAMEGK

SEQ ID NO: 102221 - protein, 19 aa, Artificial sequence
  protein pattern
  Variant (4)..(4): Xaa in position 4 is Ile, Leu or Val
  Variant (5)..(5): Xaa in position 5 is Phe or Tyr
  Variant (7)..(7): Xaa in position 7 is Asp or Glu
  Variant (9)..(10): Xaa in position 9 to 10 is any or no amino acid
  Variant (12)..(13): Xaa in position 12 to 13 is any amino acid
  Variant (14)..(15): Xaa in position 14 to 15 is any or no amino acid
  Variant (17)..(18): Xaa in position 17 to 18 is any amino acid
  Variant (19)..(19): Xaa in position 19 is Glu, Arg or Ser
VEEXXEXGXXSXXXXLXXX

SEQ ID NO: 102222 - protein, 13 aa, Artificial sequence
  protein pattern
  Variant (3)..(3): Xaa in position 3 is Ile or Val
  Variant (6)..(6): Xaa in position 6 is Ile, Leu or Val
  Variant (7)..(7): Xaa in position 7 is Asp, Glu or Gln
  Variant (8)..(9): Xaa in position 8 to 9 is any amino acid
  Variant (10)..(10): Xaa in position 10 is Ala, Pro or Ser
  Variant (11)..(11): Xaa in position 11 is any amino acid
  Variant (12)..(12): Xaa in position 12 is Asp, Glu, Asn or Gln
  Variant (13)..(13): Xaa in position 13 is Ala, Asp, Gly or Ser
CAXCQXXXXXXXX

SEQ ID NO: 102223 - DNA, 3498 bp, Arabidopsis thaliana
  CDS (1)..(3498)
atggcggcctcctcttcctccaccggtctcccaccacaacatcaagtattcatcaatttccgtggagaagatttacgactcggattcgtaagccatctagtagaagctttagaaaacgataacataaaagtcttcatcgacaactacgcagacaaaggcgaacctttagaaacacttttaaccaagatacatgactccaaaatcgctctagctatcttctccgggaagtacactgaatcaacatggtgcttgagagagctagcgatgataaaagattgtgtggagaaaggtaaacttgttgctattcctatcttctacaaggtagatccatccactgttagaggtgttagagggcagttcggtgatgcttttagagatcttgaggaacgtgatgtgattaagaagaaagagtggaaacaagctttgaagtggattcctggcttaattggtatcactgttcacgataaaagtcctgagagtgaaatactcaacgaaatcgttaaggaggttaagaaagtgttgaagaaagtttcattggagggaagccaaaaggtggtctctgtggatccatcacaaagtattgacactctaagttcggtaggaggtgaaaaggataagacttttggaatcaaacaacggttgaaggagttggaagagaagttggatcttgttaaatacaagggaactcgtgtcattggagttgttgggatgcctggaattggcaaaaccacactggtgaaagagctctataagacctggcagggcaagttttcgaggtatgcgttgatcgatcaaatccgtgggaagtcaaataacttcaggttagagtgcttgcctactttgcttttagagaagctactaccggagttgaataatcctcaactagatagtattgaagaaccatacaaaactcataagggtctactgcgtgaacgcaaagttctcgtcgtccttgatgatgttagtagaagggaacaaatatatgctcttcttgggaaatatgatcttcacagtaaacatgagtggatcaaagatggcagcaggatcatcattgcaacgaacgatatctcctcattgaagggtctcgttcatgacacttatgtggttcggcaattaaaccacagagacggcttacaactttttcgctatcacgcctttcattatgatcaagccactcctccaaaggtggatttcatgaagctttctgatgagtttgtgcattatgctagaggccatccactagctctcaaaatattgggtagagagctttatgagaaaaatatgaagcattgggaaacaaaactgataatacttgctcaaagtcccaccacttatattggagaagtcgtgcaagtaagttatgatgaattgagtttggcgcagaaagatgcatttctcgacatagcttgtttcagatcacaggatgtggattatgtagaaagtttactggtttcgtctgaccctggatctgctgaagcaataaaagctctcaagaataagttcttgattgatacatgtgacggccgtgtggagatgcatgatctactgtatagattttctagggaacttgatcttaaagcatccactcaaggtggtagcaaacaacgaaggttatgggtccgtcaagacataattaatgtacagcagaaaacaatgggagctgcaaatgttagaggtattttcctagatttgtctgaagtgaaggttgaaacaagcttagaccgtgaacacttcaagaatatgcgcaatctccggtatctcaagttatacaattcacattgccctcacgaatgtctaaccaataataagataaacatgcctgatggacttgagctaccattgaaagaggttcgatgccttcactggctgaaattcccattagaggaacttccaaacgattttgacccgattaatctcgtcgaccttaagctgccatacagtgagattgaacgactttgggatggtgttaaggatacaccagtcttaaaatgggtcgatctcaatcactcaagtaagttgtgcagcttgtcaggattatcaaaggctcaaaatcttcaaagactgaaccttgaagggtgcacaagtcttgaatctcttcgagatgtgaatttgacgtctttgaaaactctcaccctcagcaactgctcaaacttcaaggaatttccattgattccagaaaatttaaaagctttatacttggacgggacatcgataagtcaacttcctgacaacgtggggaacctcaaaagacttgtcttattgaatatgaaggactgcaaagtgctggagactatccctacctgtgttagtgagctgaaaactcttcaaaaacttgtactttcaggttgttcaaagctcaaggaatttccagaaatcaacaagagctctttaaaaattttacttctagatgggacatccatcaaaacgatgccgcagttaccctcagtacagtatttatgcttaagcagaaatgatcatctcatctaccttccagctggcatcaatcaagtttctcagttaacacggctggatttgaagtattgtacgaagcttacatatgttccagagttgccaccaactctccagtacttagatgcacatggctgtagctcactgaagaatgttgcaaaaccactggcccgtatcatgtcaaccgtgcagaaccattacactttcaatttcaccaactgtggtaacctggagcaagctgcaaaggaggaaatcacatcgtatgctcaaagaaaatgtcagttgctgtcagatgcacgtaaacactacaatgagggttcagaggctttgttcagcacttgctttcctggatgtgaggtgccttcgtggtttggtcatgaagcggttggatctctgttgcaaagaaaactcctcccacattggcatgacaagaggctttctggaatagctctatgtgctgtagtctcatttcctgacagccaagatcaactcagctgcttctcggtgacatgcacctttaaaataaaagctgaagacaagtcttgggtcccctttacttgcccggtaggaatttggactagagagggaaacaagaaagacaggattgagtcggatcatgttttcatagcctacattagtagcccacattcaataaggtgtctcgaagagaagaactctgataaatgcaattttagtgaagcctcccttgagtttacggtgacaagtgatacaagtggtattggagtattcaaggttttgaagtgtggattgagtttggtgtatgaaaatgacaaaaacaaaaacagttctcttgaggcaaagtatgatgttcctgttgaagtgagctttcaagaaccagaacacgggataatggaggaggagagatatataaacaaaagaagaagtgatgatagacgaccaaaaaagaagaggaagacaaaaagggatgatattatgataatatccactgtcactcaaacttgtgttccaagtgtaaatgcaagaatagaagataaagtcactggttaa

SEQ ID NO: 102224 - protein, 1165 aa, Arabidopsis thaliana
MAASSSSTGLPPQHQVFINFRGEDLRLGFVSHLVEALENDNIKVFIDNYADKGEPLETLLTKIHDSKIALAIFSGKYTESTWCLRELAMIKDCVEKGKLVAIPIFYKVDPSTVRGVRGQFGDAFRDLEERDVIKKKEWKQALKWIPGLIGITVHDKSPESEILNEIVKEVKKVLKKVSLEGSQKVVSVDPSQSIDTLSSVGGEKDKTFGIKQRLKELEEKLDLVKYKGTRVIGVVGMPGIGKTTLVKELYKTWQGKFSRYALIDQIRGKSNNFRLECLPTLLLEKLLPELNNPQLDSIEEPYKTHKGLLRERKVLVVLDDVSRREQIYALLGKYDLHSKHEWIKDGSRIIIATNDISSLKGLVHDTYVVRQLNHRDGLQLFRYHAFHYDQATPPKVDFMKLSDEFVHYARGHPLALKILGRELYEKNMKHWETKLIILAQSPTTYIGEVVQVSYDELSLAQKDAFLDIACFRSQDVDYVESLLVSSDPGSAEAIKALKNKFLIDTCDGRVEMHDLLYRFSRELDLKASTQGGSKQRRLWVRQDIINVQQKTMGAANVRGIFLDLSEVKVETSLDREHFKNMRNLRYLKLYNSHCPHECLTNNKINMPDGLELPLKEVRCLHWLKFPLEELPNDFDPINLVDLKLPYSEIERLWDGVKDTPVLKWVDLNHSSKLCSLSGLSKAQNLQRLNLEGCTSLESLRDVNLTSLKTLTLSNCSNFKEFPLIPENLKALYLDGTSISQLPDNVGNLKRLVLLNMKDCKVLETIPTCVSELKTLQKLVLSGCSKLKEFPEINKSSLKILLLDGTSIKTMPQLPSVQYLCLSRNDHLIYLPAGINQVSQLTRLDLKYCTKLTYVPELPPTLQYLDAHGCSSLKNVAKPLARIMSTVQNHYTFNFTNCGNLEQAAKEEITSYAQRKCQLLSDARKHYNEGSEALFSTCFPGCEVPSWFGHEAVGSLLQRKLLPHWHDKRLSGIALCAVVSFPDSQDQLSCFSVTCTFKIKAEDKSWVPFTCPVGIWTREGNKKDRIESDHVFIAYISSPHSIRCLEEKNSDKCNFSEASLEFTVTSDTSGIGVFKVLKCGLSLVYENDKNKNSSLEAKYDVPVEVSFQEPEHGIMEEERYINKRRSDDRRPKKKRKTKRDDIMIISTVTQTCVPSVNARIEDKVTG

SEQ ID NO: 102225 - DNA, 3660 bp, Arabidopsis thaliana
  CDS (1)..(3660)
atgggttctgtaatgagcttgggctgttccaagaggaaagcaacgagtcaggatgttgattccgaatctcgtaaaagacgaaagatatgctcaacaaacgatgctgagaattgcagattcattcaggatgagtcatcttggaaacatccatggagtttatgtgtcaacgtggcagccgcagcttttacaaaattcagattccaacaagacaacaaatatactaaatcttctgctttatctcttccatctcctccaacttcagtgtctcgaatctggaaacaccacgtcttcccgagcttccacggggcagatgttcgaaaaaccattcttagtcacatcctcgaatcgttcagaagaaagggaattgacccatttattgataataatatagagaggagtaagtcgatcggtcatgagctcaaagaagctatcaaaggatcaaagatcgcgatcgtcttgctctcaaagaactatgcttcttcatcttggtgccttgatgaattagcagaaatcatgaagtgtagggaattgttgggtcagatagtcatgactattttctatgaagtggatccaactgacataaagaaacagaccggtgaatttggaaaagccttcacaaaaacatgtaaaggtaaaacaaaagagtatgttgagagatggagaaaagctttggaggatgtggccacaatcgccggagaacattctcgcaactggaggaatgaagcagacatgattgagaaaatagccactgatgtttcaaacatgttaaatagtttcacaccatcaagagatttcgacgggttagtagggatgagagctcatatggatatgctggaacaattgttgcgcctagatttggatgaagtaaggatgatcgggatttggggaccgcctgggattggtaagacaactatcgccagatttctgtttaatcaagtctccgacagattccaacttagtgccatcattgtgaatatcagaggaatctatccaagaccttgtttcgatgagtacagtgcacaattgcaactacaaaaccaaatgttgtcccagatgatcaatcataaagatatcatgatttctcatttaggagtggctcaagaacggttgagagacaagaaagtgtttcttgttctcgatgaagtggatcaattaggacaactagatgccttggcgaaagaaactcgatggtttggtcctggaagtcggattattatcacaacagaagatctaggagttttgaaggctcatgggataaatcatgtttacaaagtgaaatatccatcaaatgacgaggcttttcaaatcttctgtatgaatgcctttggtcagaaacaaccacatgaaggtttcgatgagattgcatgggaagttatggctttagctggtgaactccctttgggattgaaggttctaggctctgctttgcgggggaagtccaagccagagtgggaaagaacactaccaaggttaaaaactagcctcgacggaaatatcgggagcattatacagttcagttacgatggcttatgtgacgaagataaatatctccttctttatatagcctgcctttttaactacgaatcaacaaccaaagtggaagaggttcttgcaaacaagttcttggatgtgaaacaaggtcttcacgtattagctcagaaatctctcatatccattgatgagaattccttatatggagacacaataaatatgcatactttgctcagacaattcggaagagaaacttctcgtaagcaattcgtttatcatggctttacgaaacgtcagcttttggttggtgaaagggatatatgtgaagtacttagtgacgatacaatagatagtaggcgttttatagggataactttcgatttatttgggactcaggattatttgaatataagtgagaaagctcttgaaagaatgaatgattttgaattcgttagaatcaatgctctcattccaactgagagactgcagttagcactacaagatttgatttgtcattctccaaagattagatcactgaagtggtatagttaccagaatatatgtttgccttctacttttaatccggagtttctcgtcgaactacatatgagtttcagcaagcttcggaagctatgggaaggaactaaacaacttagaaatctcaagtggatggatttgagtaattctgaagacttgaaagagcttcccaatctttcaactgcaactaatctcgaagaattgaagcttagagattgctcaagtttagtggagctcccctcctctattgaaaaactcaccagtctccagagattatatctccaaaggtgctcaagtcttgtggagcttccctcttttgggaatgcaactaaacttgaggaactatatcttgaaaattgttcgagtcttgagaagctcccaccatctatcaatgccaataatcttcagcaattgtctctaataaattgttcacgtgttgtggagctccccgctatcgagaatgcgactaatctccagaaactagatcttggaaattgctcaagtctaatagagctccctctttctattggaactgccacaaatctgaaggaattgaatattagcggatgctcaagtctcgtgaaactcccatcctcaattggagatatcactaatctcaaagagtttgatctatctaactgctcaaatctggtggagcttccaatcaacatcaacttgaaatttctcgatacacttaatctcgcaggttgctcgcagttgaaaagttttcctgagatctccacaaagatcttcacagattgctatcagagaatgtctcgtttacgtgatcttagaatcaacaactgcaataatctggtatcactcccccaacttccagactcccttgcttacttatatgcagataattgtaagtccctcgagagactggattgttgctttaacaatccagagattagtctcaatttccccaaatgcttcaaactgaatcaagaggccagagatctcatcatgcacacaacttgtataaatgcgacgttacccgggacacaagtgcctgcctgcttcaatcacagagctacttctggggattcattgaaaatcaagttgaaggagtcgtctcttcctacaaccttgagatttaaggcttgtatcatgcttgttaaggttaatgaagaaatgagttctgatctgaaatcgatgatttttgatccgatgcgtgtagacattgtcatcagggacgaacagaatgatctcaaagttcagtgtacaccaagctatcattttataaattattttatcatttcaacagagcatatatacacatttgaacttgaagtagaggaggtgacttccacggagcttgtctttgagttcatactagacaaggaaagcaattggaaacgaaattggaagataggagaatgcgggatactccaaagagaaacgagatcacttcgccggagctcttcgccggatctctcgccggaatcttctcgtgtttctagctacgaccactgtttgagaggtaagaatcatgggtttgatttctccttgagtcattcgatggattcgattattggttttattttgtgtgaatgggaattagctgtgaaatatgggttttgtatggattttatgagttttgtatttgtcgtgtatttagaaagatga

SEQ ID NO: 102226 - protein, 1219 aa, Arabidopsis thaliana
MGSVMSLGCSKRKATSQDVDSESRKRRKICSTNDAENCRFIQDESSWKHPWSLCVNVAAAAFTKFRFQQDNKYTKSSALSLPSPPTSVSRIWKHHVFPSFHGADVRKTILSHILESFRRKGIDPFIDNNIERSKSIGHELKEAIKGSKIAIVLLSKNYASSSWCLDELAEIMKCRELLGQIVMTIFYEVDPTDIKKQTGEFGKAFTKTCKGKTKEYVERWRKALEDVATIAGEHSRNWRNEADMIEKIATDVSNMLNSFTPSRDFDGLVGMRAHMDMLEQLLRLDLDEVRMIGIWGPPGIGKTTIARFLFNQVSDRFQLSAIIVNIRGIYPRPCFDEYSAQLQLQNQMLSQMINHKDIMISHLGVAQERLRDKKVFLVLDEVDQLGQLDALAKETRWFGPGSRIIITTEDLGVLKAHGINHVYKVKYPSNDEAFQIFCMNAFGQKQPHEGFDEIAWEVMALAGELPLGLKVLGSALRGKSKPEWERTLPRLKTSLDGNIGSIIQFSYDGLCDEDKYLLLYIACLFNYESTTKVEEVLANKFLDVKQGLHVLAQKSLISIDENSLYGDTINMHTLLRQFGRETSRKQFVYHGFTKRQLLVGERDICEVLSDDTIDSRRFIGITFDLFGTQDYLNISEKALERMNDFEFVRINALIPTERLQLALQDLICHSPKIRSLKWYSYQNICLPSTFNPEFLVELHMSFSKLRKLWEGTKQLRNLKWMDLSNSEDLKELPNLSTATNLEELKLRDCSSLVELPSSIEKLTSLQRLYLQRCSSLVELPSFGNATKLEELYLENCSSLEKLPPSINANNLQQLSLINCSRVVELPAIENATNLQKLDLGNCSSLIELPLSIGTATNLKELNISGCSSLVKLPSSIGDITNLKEFDLSNCSNLVELPININLKFLDTLNLAGCSQLKSFPEISTKIFTDCYQRMSRLRDLRINNCNNLVSLPQLPDSLAYLYADNCKSLERLDCCFNNPEISLNFPKCFKLNQEARDLIMHTTCINATLPGTQVPACFNHRATSGDSLKIKLKESSLPTTLRFKACIMLVKVNEEMSSDLKSMIFDPMRVDIVIRDEQNDLKVQCTPSYHFINYFIISTEHIYTFELEVEEVTSTELVFEFILDKESNWKRNWKIGECGILQRETRSLRRSSSPDLSPESSRVSSYDHCLRGKNHGFDFSLSHSMDSIIGFILCEWELAVKYGFCMDFMSFVFVVYLER

SEQ ID NO: 102227 - DNA, 3291 bp, Arabidopsis thaliana
  CDS (1)..(3291)
atggcttcttcttcttcttcttcttcacgtcgcacctggagatacaatgtcttcacgagtttccatggaccagacgtccgcaaaacatttctcagtcatttacgcaaacaatttaactacaatggaattacaatgttcgatgatcaaaggatcgagagaagccaaatcatcgccccagctctcacggaagcgattagagaatcaaggatcgctatcgtattgctctcgaagaactatgcttcttccagttggtgtttggatgagttgttggagattttagattgcaaagaacaattagggcagattgtgatgactgtcttctacggagtacatccttctgatgtaaggaaacaaactggagatttcgggattgctttcaatgaaacatgtgctcgtaaaacagaggagcagaggcaaaaatggagccaagcgttgacctatgtgggcaacatcgctggagaacatttccaaaactgggacaatgaagcgaagatgatagagaagattgcaagtgatgtttcagataaactcaataccacaccgtctagggattttgatggcatgattggacttgaagctcatttgagaaaaatagagtctttgcttgatttagattatgatggagctaagattgttggaatctctggtcctgcaggcattggtaagagtaccattgccagagctttacatagtgtactatctaaacggtttcagcataattgttttatggacaaccttcatgaaagctataagattggtcttgttgagtatggtttgaggttgcggttacaagagcaacttctttcaaagattttgaacctagatggcattaggatagcccatttaggtgtgatacgagagaggctacacgaccagaaggttcttatcattcttgatgatgtggagagtctagatcaacttgatgctttggctaatatcgagtggtttggtcctggaagtagggtcatagtgaccactgaaaacaaagagattttacagcaacatggtatcagtgatatataccacgtgggttttccatcaagtaaagaagctttaatgatcttttgtctatccgcttttagacaactctctccacctgatcggtttatgaatcttgctgctgaagttgcaaagctttgtggttatcttccattggctctgcatgttttagggtcatcattgcggggaaagaactattctgactggatagaagaactaccaagattgcaaacttgtcttgatggaagaattgagagtgtattgaaagtgggctatgaaagtttacatgagaaagaccaagctctatttctctacattgcagtcttcttcaattatcaacatgctgattatgtgacatccatgctggcaaaaactaacttgaatgttagacttgggttaaaaatattagccaatagacatcttatacatataggtcatggcgctaaaggtatagtggtaatgcaccgtttgctaaaagtaatggctagacaagtcatttccaaacaagagccttggaaacgccagattcttgtagatacccaagagatttcttatgttttggaaaatgcagaaggtaatggatcaatcgcaggtatatcatttgacgtaggagagatcaacaaattaacaataagcgctaaggcgtttgaaagaatgcacaatcttttgttgctaaaagtttacgatccgtggtttactggaaaaggacaagtgcacattccagaggagatggattttcttcctcgcctaagcttacttcgttgggatgcatacacgagaaagacccttcctcgtagattctgcccagaaaatctcgtcgaactcaacatgccggatagccagctcgagaagctatgggaaggaactcagctgcttgcaaatctcaaaacgatgaagctctctaggtcatctcgtttgaaggaactcccaaatctttcaaatgctaaaaatctggagcgtctggatttgcatgaatgcgttgctttgttagagcttccatcctcaatttctaatcttcataaactatacttcttagagacgaatcattgcagacgtctacaagtcattccaactctcaccaacttggtatctctcgaagatatcaagatgatgggatgcttacgactgaaaagttttccagatattcctgccaacatcattaggctctctgtaatggagactacgattgcagaatttcccgcgtcacttaggcatttctcgcatattgagtctttcgatataagtggcagtgtaaatctcaagaccttttcaacacttctccccacgagtgtaacagagctacacatagacaacagtggtattgagagtattacagattgcatcaaaggtcttcataatctacgtgtccttgctctatcaaactgtaaaaaactcacgtcattgccgaagcttcctagttcactcaaatggctacgggcaagccattgtgaatcactggagagagtaagtgaacctttaaacactccaaatgcagaccttgatttcagcaactgtttcaaattggatcgacaagcgcgacaagcgatttttcaacaacggtttgttgatgggcgagctctcttaccaggaagaaaagtacctgcactgttcgatcatcgagccagaggaaattcattaacaattcctaattctgcttcctataaggtttgcgttgtgatttctacagagtttgatcataaagacagagattctaccatagtttcaagactactgtgtcgttgcatagtcatcagcaactcagtaaactccactgacaaggagtttgtactaacggatgtctataaatatcgaatggaacatctatttatatttcatatggtgaacccggtgtcctttttctacccctctagcagagagatagtgctcgaattcagcagcatacacaaacatttcgacattgttgaatgtggtgtccagatcttgacggatgaaacagagcgaaacaacaatgtgggttctgcagatgaagatgatctctggtatatacatgaattcagcgaatcgttacgcaaagaagaaaaagataaagatagcgtcgctaaatctgaatcctgcggagcgtcagaaaaagaagatgaggaagcaaccaaagacaaagatgaggatatcgccgaacacagtgattccgaatccatatccgagaaccgtccgaggaagaggacgatgataagtgctactactaatctgaagaaatggtttctctgtctttttcttttcttctttttctcttttgcttttgttaaattctccatctactttgatcttttctaa

SEQ ID NO: 102228 - protein, 1096 aa, Arabidopsis thaliana
MASSSSSSSRRTWRYNVFTSFHGPDVRKTFLSHLRKQFNYNGITMFDDQRIERSQIIAPALTEAIRESRIAIVLLSKNYASSSWCLDELLEILDCKEQLGQIVMTVFYGVHPSDVRKQTGDFGIAFNETCARKTEEQRQKWSQALTYVGNIAGEHFQNWDNEAKMIEKIASDVSDKLNTTPSRDFDGMIGLEAHLRKIESLLDLDYDGAKIVGISGPAGIGKSTIARALHSVLSKRFQHNCFMDNLHESYKIGLVEYGLRLRLQEQLLSKILNLDGIRIAHLGVIRERLHDQKVLIILDDVESLDQLDALANIEWFGPGSRVIVTTENKEILQQHGISDIYHVGFPSSKEALMIFCLSAFRQLSPPDRFMNLAAEVAKLCGYLPLALHVLGSSLRGKNYSDWIEELPRLQTCLDGRIESVLKVGYESLHEKDQALFLYIAVFFNYQHADYVTSMLAKTNLNVRLGLKILANRHLIHIGHGAKGIVVMHRLLKVMARQVISKQEPWKRQILVDTQEISYVLENAEGNGSIAGISFDVGEINKLTISAKAFERMHNLLLLKVYDPWFTGKGQVHIPEEMDFLPRLSLLRWDAYTRKTLPRRFCPENLVELNMPDSQLEKLWEGTQLLANLKTMKLSRSSRLKELPNLSNAKNLERLDLHECVALLELPSSISNLHKLYFLETNHCRRLQVIPTLTNLVSLEDIKMMGCLRLKSFPDIPANIIRLSVMETTIAEFPASLRHFSHIESFDISGSVNLKTFSTLLPTSVTELHIDNSGIESITDCIKGLHNLRVLALSNCKKLTSLPKLPSSLKWLRASHCESLERVSEPLNTPNADLDFSNCFKLDRQARQAIFQQRFVDGRALLPGRKVPALFDHRARGNSLTIPNSASYKVCVVISTEFDHKDRDSTIVSRLLCRCIVISNSVNSTDKEFVLTDVYKYRMEHLFIFHMVNPVSFFYPSSREIVLEFSSIHKHFDIVECGVQILTDETERNNNVGSADEDDLWYIHEFSESLRKEEKDKDSVAKSESCGASEKEDEEATKDKDEDIAEHSDSESISENRPRKRTMISATTNLKKWFLCLFLFFFFSFAFVKFSIYFDLF

SEQ ID NO: 102229 - DNA, 3096 bp, Arabidopsis thaliana
  CDS (1)..(3096)
atgtctctcatggattctccttcctctatttcctcttgcaactacagattcaatgtcttctcgagcttccacgggccgaatgttcgtaaaacacttcttagtcacatgcgcaaacagtttaatttcaacgggatcactatgttcgatgatcaagggattgagagaagtgaagagatcgtaccttcactcaaaaaggctataaaagaatcgaggatctcgatcgtgattctttccaagaaatatgctttgtcaagatggtgtttggatgaattggtggagatattaaagtgcaaggaagttatgggacacatagtgatgaccatcttctacggagtggagccatctgatgtacggaagcagaccggggaattcgggttccattttaatgaaacgtgtgcacataggacggacgaggacaagcagaattggagcaaagctttgaaggatgtgggcaacattgctggagaagacttcttaagatgggataatgaagccaaaatgatagagaagattgctagagatgtttcagataaactgaatgctacaccttctagagattttaatggcatggtgggacttgaagctcatttgacagaaatggagtctttgctagatttagattatgatggagttaagatggttggaatctctggtcctgcagggattggtaagacaacaattgccagagctttacaaagtcgactctctaataagtttcaactcacttgttttgtggacaacctcaaggaaagctttcttaatagtttagatgagttgcgtttacaagaacagtttcttgcaaaggttttgaaccatgatggaattaggatatgccattcaggtgtgatagaagaaaggttgtgcaagcagagagtactcatcattcttgatgatgtaaaccacataatgcaattagaggcgttggcaaatgaaactacatggtttggttctggaagtaggattgtagttactacagaaaacaaagagattttgcagcaacatggtatcaacgatctgtaccacgtgggttttccatctgatgaacaagctttcgagattttatgtcgatatgcttttagaaaaaccactctttctcatggttttgaaaagcttgctagaagagtaacgaagctttgtggtaaccttccattgggtcttcgtgtattgggttcatctttacgtgggaagaatgaggaagagtgggaagaagtaatacgcaggctagaaactatacttgatcatcaagatatcgaggaagtactcagagtcggttatgggagtttacatgagaacgagcaatctctatttcttcatattgcagtcttcttcaactatacagatggtgatcttgtgaaagccatgttcactgacaacaacttggatatcaaacacgggttgaaaatcttagcagacaaatctctcataaacatatctaacaacagagaaatagtgatccacaagttattgcaacaatttggtagacaagccgttcataaagaagaaccttggaaacacaagattttaatacatgctccagagatttgtgatgtccttgaatatgccacaggtactaaagctatgtccggcatatcatttgatatatctggtgtcgatgaagttgttataagcggtaaatcttttaaaagaatacctaatcttcgattcctcaaagtctttaaaagtagagatgatggcaatgatagagtgcacatacctgaggagacagagtttccgcgtcgtctaaggttactacattgggaggcatacccatgcaagagtcttcctcctacatttcaacctcaatatcttgtcgagctctatatgccaagtagccagcttgaaaagctatgggaaggaacacagcgccttacacatctcaagaagatgaatttgtttgcgtctcgacatttgaaggaacttccggatctttcaaatgctacaaatctggagagaatggatctgagttattgcgaaagtttggtagagatcccatcctctttttcgcatcttcataaactagagtggttggagatgaataactgcataaacctacaagtcattccagctcacatgaacttagcatcccttgaaaccgtcaatatgagaggatgctcaagattgagaaatattccagttatgtcaacaaacatcactcaactgtatgtatcacggacagcagttgaaggaatgcctccatcaattaggttttgctctcgtctcgaacgtctcagtataagcagcagtggaaagctcaagggaataacacatctccccatcagtttaaaacagctagacctcattgattctgatattgaaacgattccagagtgcatcaaatctcttcatctgctatatatccttaatctatctggctgcaggagactagcatcattgccagaactccctagctcacttagatttcttatggcagacgattgtgaatcattggagaccgtattttgccctttgaatacgccaaaagcagagctcaatttcaccaactgcttcaaattaggccagcaagcacaaagagcaattgtacaacgatcattacttcttggaacaacgctcttaccgggaagagaattaccagcggaattcgatcaccaaggcaaaggaaatacattgaccattcgtccaggcacaggctttgtggtttgcattgtgatttcccccaacttggcatcgcaaatcacagagtacaggcttcctcaactattgtgtcgtcgtcgcataggtcaaggcgacttagaccccattgaaaaggtgttcaacgtacgaactctactcaactttcaaacggaacatctatttgtgtttatcattcaccctcacttgccatttatcgatccctctgaagtgagcagagagatagtgttcgaattcagtagcaaattcaaccactttgatgttattgattgtggagccaagttcttgaccgacgggagcatcaaagggagttatgattctggattggaacaagtgtttgaagacaacaccaaacacggtgaccatgcagattgttggaattggctattccactgttttgatctaccccattttgtgaaaaacgtcagaagctttgtctcagtatga

SEQ ID NO: 102230 - protein, 1031 aa, Arabidopsis thaliana
MSLMDSPSSISSCNYRFNVFSSFHGPNVRKTLLSHMRKQFNFNGITMFDDQGIERSEEIVPSLKKAIKESRISIVILSKKYALSRWCLDELVEILKCKEVMGHIVMTIFYGVEPSDVRKQTGEFGFHFNETCAHRTDEDKQNWSKALKDVGNIAGEDFLRWDNEAKMIEKIARDVSDKLNATPSRDFNGMVGLEAHLTEMESLLDLDYDGVKMVGISGPAGIGKTTIARALQSRLSNKFQLTCFVDNLKESFLNSLDELRLQEQFLAKVLNHDGIRICHSGVIEERLCKQRVLIILDDVNHIMQLEALANETTWFGSGSRIVVTTENKEILQQHGINDLYHVGFPSDEQAFEILCRYAFRKTTLSHGFEKLARRVTKLCGNLPLGLRVLGSSLRGKNEEEWEEVIRRLETILDHQDIEEVLRVGYGSLHENEQSLFLHIAVFFNYTDGDLVKAMFTDNNLDIKHGLKILADKSLINISNNREIVIHKLLQQFGRQAVHKEEPWKHKILIHAPEICDVLEYATGTKAMSGISFDISGVDEVVISGKSFKRIPNLRFLKVFKSRDDGNDRVHIPEETEFPRRLRLLHWEAYPCKSLPPTFQPQYLVELYMPSSQLEKLWEGTQRLTHLKKMNLFASRHLKELPDLSNATNLERMDLSYCESLVEIPSSFSHLHKLEWLEMNNCINLQVIPAHMNLASLETVNMRGCSRLRNIPVMSTNITQLYVSRTAVEGMPPSIRFCSRLERLSISSSGKLKGITHLPISLKQLDLIDSDIETIPECIKSLHLLYILNLSGCRRLASLPELPSSLRFLMADDCESLETVFCPLNTPKAELNFTNCFKLGQQAQRAIVQRSLLLGTTLLPGRELPAEFDHQGKGNTLTIRPGTGFVVCIVISPNLASQITEYRLPQLLCRRRIGQGDLDPIEKVFNVRTLLNFQTEHLFVFIIHPHLPFIDPSEVSREIVFEFSSKFNHFDVIDCGAKFLTDGSIKGSYDSGLEQVFEDNTKHGDHADCWNWLFHCFDLPHFVKNVRSFVSV

SEQ ID NO: 102231 - DNA, 3330 bp, Arabidopsis thaliana
  CDS (1)..(3330)
atggcttcttcttcatcgtctcgcacctggaattaccgagtctttgcgagcttccacggaccagacgtccgtaaaagctttctgagtcattttcgcaaacagttcatctgcaatgggattacaatgttcgatgatcaaaagatcgtgagaagtcaaaccatcgctccttcactcacgcaagggattagagaatcgaagatctcgatcgtcattctctccaagaactatgcttcttctacttggtgtttgaatgagctcctggagattttgaagtgcagggaagatattgggcaaattgtgatgactgtattctacggagtagatccatctgatgtccgcaaacaaaccggtgaatttggaacagttttcaataaaacttgtgctcgtagaacagagaaagagaggcgaaattggagccaagctttgaatgttgtgggaaacatagccggagaacacttccttaactgggacaatgaagcggagatgatcgagaaaattgcaagagatgtatcggaaaaactgaatatgacaccgtctagtgattttgatggcatggttgggattgaagctcatttgaaggagatggaggttttgctagactttgattatgatggagttaagattgttggaatctttggtcctgcaggtattggtaagacaactattgcgagagctttgcatagtctactactctttaagaagtttcagcttacttgttttgttgataaccttagaggaagctatcccattggtattgatgagtatggtttgaagttgcgtttacaagaacaccttctttcaaagattttgaaccaagatggtatgaggataagccatttaggtgcggtaaaagagaggttatgcgacatgaaagtgcttatcattcttgatgatgtgaatgatgtgaagcaattagaggctttggctaatgacactacttggtttggtcctggaagtagggttattgtgacaacagaaaacaaagagattttgcagcggcatggtatcgataatatgtaccatgtgggctttccttctgacgaaaaagctatggagatcttatgtggatatgcttttaaacaaagctctccacgtcctggttttaactatcttgcacaaaaggtaacatggctttgtggtaaccttcctttgggtctacgtgtggttggttcatctttacgtgggaagaaggaggacgaatggaaatctgtgatacgaaggctagacactattattgatagagatatcgaagacgtactaagagttggctacgaaagtttacatgagaatgagcaatctctgtttctccacattgcagtcttcttcaactgcaaagatgttgatcttgtgaaagccatgcttgctgacgataacttggatatcgcacacgggttgaaaatcttggtaaacaaatctctcatatatatatctaccactggggaaataagaatgcacaagttgctacaacaagtgggcagacaagccattaacagacaagagccttggaaacgcttgatcttaactaatgctcaagagatttgttatgtccttgaaaatgataaaggtactggagttgtgtctggcatatcatttgatacatcaggaattagcgaagtgattttaagcaatagagctcttagaagaatgtctaatctccgattcctaagtgtttacaagacaagacatgatgggaataatataatgcatatacctgaggacatgaagtttccacctcgcctaaggttactacattgggaagcatatccgagcaagagtcttcctcttggattttgcctggaaaatcttgtcgaactcaatatgaaagatagccagctcgaaaagctctgggaaggaactcagctgttgacaaatcttaagaagatggatttgtcaagatcagttcatttgaaggaactcccagatctttcaaatgctacaaacctggagagactggaactatgtgattgcagggctttggtagagcttccaaagtctattgggaatcttcataaactagagaacttagtgatggctaactgcataagtctagaagtcataccaactcacatcaacttggcatctcttgagcatatcaccatgactggatgctcacgactgaaaacatttccagatttttctacaaacattgagagactccttctaatcggcacatcggtagaagaagtgcctgcatcaatcaggcattggtcttctctttcggatttttgtataaaaaacaatgaagatcttaagagcttaacatattttccagagaaggtagagctgctagatctaagctatactgatattgagaagattccagattgcatcaaaggttttcatgggctaaagtctcttgatgtagccggctgcagaaaactcacatcattgcctgagctccctatgtcactcggactcttagtggctttagattgtgaatcactggagataataacataccctttaaacactccaagtgcgcgactcaatttcaccaactgcttcaaacttggtgaagaatcaaggagactaatcatccaacgatgcgcgactcagtttcttgacgggtatgcatgcttaccgggaagagtaatgcctgatgagttcaaccaaagaactagcggtaataattccttgaacattcgtctttcttctgcatccttcaagtttaaagcatgcgtcgtgatttcacctaaccagcaacaacactcatgggaacacactgatatacggtgtatcgtaggcagttacaataaagttatttgcgtagaacacccaaatgaatcgaccagaattcaaaccgaacatttgtgtatatttcatggtagcgtgtctgaagttagcagcaacgaggcattgtttgaattctgcatcgatgcctcgaatcaatttgataacttcaagattctcgaatgtggtgtacgaatcttgactaatgaaccggagagaagcagcaagaagaccgtctctagggggctcaggtcccatgccaaaattttgaaagcttgcttacataaaaggaaacagaaaaaaatgattggttatttactaaaagaggaatttggtttgccaagggataacaggattattgaagtcgatgaggacaacaacaatgatcatacagtgagcttggactcggcatcagacaatgttgaaggaaaggagaaacctatagattgttggagttggctctgcatctgctttgatctatccaatattgtgaggaacatgggaaagcttgtgttgggtaaggaaacgacagaatccatagatggaggagttcttcacgaatacagcactaggaaagatgatgacgtgaccatgggctaa

SEQ ID NO: 102232 - protein, 1109 aa, Arabidopsis thaliana
MASSSSSRTWNYRVFASFHGPDVRKSFLSHFRKQFICNGITMFDDQKIVRSQTIAPSLTQGIRESKISIVILSKNYASSTWCLNELLEILKCREDIGQIVMTVFYGVDPSDVRKQTGEFGTVFNKTCARRTEKERRNWSQALNVVGNIAGEHFLNWDNEAEMIEKIARDVSEKLNMTPSSDFDGMVGIEAHLKEMEVLLDFDYDGVKIVGIFGPAGIGKTTIARALHSLLLFKKFQLTCFVDNLRGSYPIGIDEYGLKLRLQEHLLSKILNQDGMRISHLGAVKERLCDMKVLIILDDVNDVKQLEALANDTTWFGPGSRVIVTTENKEILQRHGIDNMYHVGFPSDEKAMEILCGYAFKQSSPRPGFNYLAQKVTWLCGNLPLGLRVVGSSLRGKKEDEWKSVIRRLDTIIDRDIEDVLRVGYESLHENEQSLFLHIAVFFNCKDVDLVKAMLADDNLDIAHGLKILVNKSLIYISTTGEIRMHKLLQQVGRQAINRQEPWKRLILTNAQEICYVLENDKGTGVVSGISFDTSGISEVILSNRALRRMSNLRFLSVYKTRHDGNNIMHIPEDMKFPPRLRLLHWEAYPSKSLPLGFCLENLVELNMKDSQLEKLWEGTQLLTNLKKMDLSRSVHLKELPDLSNATNLERLELCDCRALVELPKSIGNLHKLENLVMANCISLEVIPTHINLASLEHITMTGCSRLKTFPDFSTNIERLLLIGTSVEEVPASIRHWSSLSDFCIKNNEDLKSLTYFPEKVELLDLSYTDIEKIPDCIKGFHGLKSLDVAGCRKLTSLPELPMSLGLLVALDCESLEIITYPLNTPSARLNFTNCFKLGEESRRLIIQRCATQFLDGYACLPGRVMPDEFNQRTSGNNSLNIRLSSASFKFKACVVISPNQQQHSWEHTDIRCIVGSYNKVICVEHPNESTRIQTEHLCIFHGSVSEVSSNEALFEFCIDASNQFDNFKILECGVRILTNEPERSSKKTVSRGLRSHAKILKACLHKRKQKKMIGYLLKEEFGLPRDNRIIEVDEDNNNDHTVSLDSASDNVEGKEKPIDCWSWLCICFDLSNIVRNMGKLVLGKETTESIDGGVLHEYSTRKDDDVTMG

SEQ ID NO: 102233 - DNA, 3588 bp, Arabidopsis thaliana
  CDS (1)..(3588)
atgaaagaaagtcccactttgagaagatattccatggaggcctcacggcaacctcaagtgttcatcaacttccggggaagtgaactacggtatacctttgtctactatctcaggacggccttggtaaaaaacgggatcaacgtttttacagacaacatggagccgaaaggccgtaaccagaaaattttattcaagagaatcgaagagtcgaagatcgcactggcgattttctcctcaaggtatacggagtcaagttggtgtctggaagagctggtaaagatgaaagaatgcatggatgcggagaaactcgtgatcattcccatcttctacatcgtgactccatacaccattaaaaagcagatgggagactttggtgacaagtttagagtgctggtggattatgttgatgatgtgacggagaaaaaatggactgatgctttgaagtctgttcccttaattttaggcatcacttacgacgggcagagcgaagaacaacttttaatcaatcaaatcgttggggaggttcagagagtaataaagataatttcacaaggagaaggagatgaaaaaaataaaatggtgtgcacaaatacctctacaggttcaagctttatcccacaaaatagaaacatggtagatcctgaaaatcaaattgagctcgttggactcagccaacgcctcaaggaactaaaagaaaagttggaccttagccgcaaggaaactcgcattgttggggttttagggatgcccggaatcggcaagaccacactggtgaagagattgtatgatgagtggaaacacaatttccagcgtcacttgcatatggtgaatatccgtcagaagtcgaaggaatacgggacgcattccctagagagaatgattctgaaagagttgcttagcgacacttacaatgatataactgaagagatgacgtacgcttctgtaaaggatgagctgctgaagaagaaagttcttcttgttctcgatgacgtgagtagcaagaaacaaatacaaggtcttctcgggaatcttaactggattaggaaaggaagcaggattgttattactacgcgtgacaagatatccataagccagttcgagtatacttatgttgtcccaagattgaatatcacagatggcttaaagcaattcagcttttatgcctttgaagatcacaactgtccatacccggggaatctcatggatctttccacaaagttcgtagattatgccagaggcaatcccttagctctcaagatattgggtcgggagcttctttcgatagacaaggatcagtggccaaagagactcgatactctggcacaacttcccatcccgtatatacaggatctattgagagcaagttatgatgatctgagcaatcaacagaaagaagtttttcttgtcgtagcctggttctttggatcaggggatgaatattacattaggagtttagtggatacagaagatcctgattctgccgatgatgctgctagcgaagtaagagatttcgcaggcaacttactaattagcatctcaagtggtcgattggagatgcatgatttaatggctacgttcgccaaaaaactttgttcatccttatctaatgaaaataactatggataccaaatgatttggaatcatgaaagctttaatgctgcggctaaaaataaaaggatgagatatgtcaatcaaccaaggaaaaaagtcacagaatcggaaatggacaatgtcatgggtatattgctggacgtgtctgaaatggataataacatgaccttagattctaaattcttcagcgagatgtgcaatctacggtacctcaaagtctacaattcacaatgctctcgagattgtgatgttggttgcaaactgaccttcccagatggacttaaatgctcaatggaaaatgtccgatatctctattggctacaattcccattgaagaagctttcaaaagcatttaaccctaagaatcttatcgagctcaacctcccttacagcaaaattacacgactttggaaggaaagtaaggaaatatccaaactaaaatgggtcgatctcagccactcgagtgagctatgcgatatatcagggttaataggagctcataatattagaagattgaatcttgaaggctgcatagaattgaaaacattaccacaagagatgcaagaaatggaaagtctgatttatctaaacctgggaggatgcacgcgtcttgtgtctcttccagagtttaagttgaaatccctaaagactctcatcttaagtcactgcaagaactttgaacaatttccggttatttcagaatgtttagaagctctttacttgcaaggcacggcaataaagtgtattcctacctccattgagaaccttcagaaactaatcctattggatctaaaagactgcgaagtattggtaagtcttcctgattgtcttggaaatctaagatctcttcaagagctaatactctctggctgctcaaagttaaagttttttccagagttgaaggagaccatgaaatcaataaagattttgctgcttgatggaacagccattaagcagatgccaatattattgcagtgtattcagtcacaaggccactctgttgcaaataagacgcttccaaacagtttaagtgattactacctaccttcctcattgttgtctttatgcttaagtggaaatgatatcgagagcttgcatgctaacatcagccagctttatcatctgaaatggcttgacttgaagaattgcaagaagcttaaatctgtgtcggtgcttccaccaaacctcaagtgcttagatgcacatggttgtgactcactggaagaagttggaagccctctagcggttctcatggtgacaggaaaaatccattgcacatacattttcacaaactgcaacaaattggatcaagttgcagaaagtaacatcatatctttcacttggaggaaaagccagatgatgtcagatgctctgaatcgctacaatgggggatttgttttggaatctttggtcagcacttgctttcctggatgtgaagtacctgcatcattcgatcaccaagcctatggagcattgttacagacgaaattacctcggcactggtgtgatagtaggcttactgggatagctttatgcgctgttatattgtttccggactaccaacatcaaagcaatcgtttcttggtgaaatgcacttgtgagttcggaactgaagatgggccatgtatcagctttagttccattgttggagacattaacaaacgtcacgtggaaaagcatgggaatggatgtattccttctaaggcttcactcagatttcaagtcacagatggtgcgagtgaggtaggaaattgccatgtcctgaaatgtggctttactttagtgtatacaccaaacgatagtgatgatatctctccggcgagagtagttgatatcactacacgggataaggaggatggcctagaaaatgcaacttctaacaaactttcaagaaacgattatgaattctcgcatcagtcaaactgtggagtgacttcgagaagggatgaatgtttcctttctgaagagcttccataa

SEQ ID NO: 102234 - protein, 1195 aa, Arabidopsis thaliana
MKESPTLRRYSMEASRQPQVFINFRGSELRYTFVYYLRTALVKNGINVFTDNMEPKGRNQKILFKRIEESKIALAIFSSRYTESSWCLEELVKMKECMDAEKLVIIPIFYIVTPYTIKKQMGDFGDKFRVLVDYVDDVTEKKWTDALKSVPLILGITYDGQSEEQLLINQIVGEVQRVIKIISQGEGDEKNKMVCTNTSTGSSFIPQNRNMVDPENQIELVGLSQRLKELKEKLDLSRKETRIVGVLGMPGIGKTTLVKRLYDEWKHNFQRHLHMVNIRQKSKEYGTHSLERMILKELLSDTYNDITEEMTYASVKDELLKKKVLLVLDDVSSKKQIQGLLGNLNWIRKGSRIVITTRDKISISQFEYTYVVPRLNITDGLKQFSFYAFEDHNCPYPGNLMDLSTKFVDYARGNPLALKILGRELLSIDKDQWPKRLDTLAQLPIPYIQDLLRASYDDLSNQQKEVFLVVAWFFGSGDEYYIRSLVDTEDPDSADDAASEVRDFAGNLLISISSGRLEMHDLMATFAKKLCSSLSNENNYGYQMIWNHESFNAAAKNKRMRYVNQPRKKVTESEMDNVMGILLDVSEMDNNMTLDSKFFSEMCNLRYLKVYNSQCSRDCDVGCKLTFPDGLKCSMENVRYLYWLQFPLKKLSKAFNPKNLIELNLPYSKITRLWKESKEISKLKWVDLSHSSELCDISGLIGAHNIRRLNLEGCIELKTLPQEMQEMESLIYLNLGGCTRLVSLPEFKLKSLKTLILSHCKNFEQFPVISECLEALYLQGTAIKCIPTSIENLQKLILLDLKDCEVLVSLPDCLGNLRSLQELILSGCSKLKFFPELKETMKSIKILLLDGTAIKQMPILLQCIQSQGHSVANKTLPNSLSDYYLPSSLLSLCLSGNDIESLHANISQLYHLKWLDLKNCKKLKSVSVLPPNLKCLDAHGCDSLEEVGSPLAVLMVTGKIHCTYIFTNCNKLDQVAESNIISFTWRKSQMMSDALNRYNGGFVLESLVSTCFPGCEVPASFDHQAYGALLQTKLPRHWCDSRLTGIALCAVILFPDYQHQSNRFLVKCTCEFGTEDGPCISFSSIVGDINKRHVEKHGNGCIPSKASLRFQVTDGASEVGNCHVLKCGFTLVYTPNDSDDISPARVVDITTRDKEDGLENATSNKLSRNDYEFSHQSNCGVTSRRDECFLSEELP

SEQ ID NO: 102235 - DNA, 3585 bp, Arabidopsis thaliana
  CDS (1)..(3585)
atgggttctgtaatgagcttgggctgttccaagaggaaagcaacaaatcaggatgttgattccgaatctcgtaaaagacgaaagatatgctcaacaaacgatgctgagaattgcagattcattcaggatgagtcatcttggaaacatccatggagtttatgtgccaacagagtcatcagtgtggcagccgtagctttaacaaatttcagattccaacaagataaccaagaaagtaattcttcttctttatctcttccctcccctgcaacttctgtgtctcgaaactggaaacacgatgtcttcccgagcttccacggagcagatgtccgaagaacctttcttagtcacatcatggaatcgttcagaagaaagggaattgacacattcattgataataatatagagaggagtaagtcgatcggtcctgagctcaaagaagctatcaaaggatcaaagatcgcaatcgttttgctctcaagaaaatatgcttcttcgtcttggtgtcttgatgagttggccgagatcatgaaatgcaggcaaatggtgggtcagattgtcatgaccattttctatgaagttgatccaactgacataaagaaacagaccggtgaatttggaaaagccttcacaaaaacatgtagaggtaaaccaaaagagcaagttgagagatggagaaaagctttggaggatgtggcaacaatcgccggatatcattctcacagctggaggaatgaagcagacatgattgagaaaatatccactgatgtttcaaacatgttaaatagtttcacaccatcaagagatttcgacgggttagtagggatgagagctcatatggatatgctggaacaattgttgcgcctagatttggatgaagtaaggatgatcgggatttggggaccgcctgggattggtaagacaactatcgccagatttctgtttaatcaagtctccgacagattccaacttagtgcaatcatggtcaatatcaaaggatgctatccaagaccttgtttcgatgagtacagtgcacaattgcaactacaaaaccaaatgttgtcccagatgatcaatcataaagatatcatgatttctcatttaggagtggctcaagaacggttgagagacaagaaagtgtttcttgttctcgatgaagtggatcaattaggacaactagatgccttggcgaaagaaactcgatggtttggtcctggaagtcggattattatcacaacagaagatctaggagttttgaaggctcatgggatcaatcatgtttacaaggtcgaatatccatcaaatgacgaggcttttcaaatcttctgtatgaatgcctttggtcagaaacaaccacatgaaggtttcgatgagattgcttgggaagttacctgccttgctggtgaacttcctttgggattgaaggttctaggctctgctttgcgggggaagtccaagcgagagtgggaaagaacactaccaaggttaaaaactagcctcgacggaaaaatcgggagcattatacagttcagttacgatgtcttatgtgacgaagataaatatctatttctttatatagcctgtctttttaacggcgaatcaacaaccaaagtgaaagagcttcttggaaagttcttggatgtgaaacaaggtcttcacttattagctcagaaatctctcatatcctttgatggagaaagaatacatatgcatactctgctcgaacaattcggaagagaaacttctcgtaagcaattcgttcatcatggctttacgaaacgtcagcttttggttggtgcaaggggtatatgtgaagtgctcgacgatgatacaacagatagtagacgttttatagggatacatttggagttgtctaataccgaggaagaattgaatataagtgagaaagtacttgaaagagtgcatgattttcatttcgttagaatcgatgctagttttcaacctgagagactgcagttagcactacaagatctgatttatcattctccaaagattagatcactgaactggtatggttacgagagtttatgtttgccttcaacttttaatccggagtttctggtcgaacttgatatgcgttccagcaatcttcggaagctatgggaaggaactaaacaacttagaaatctcaagtggatggatttgagttattctagttatctgaaagagcttcccaatctttcaactgcaactaatctcgaagaattaaagcttagaaattgctcaagtttagtggagctcccctcctctattgaaaaactcacgagtctccaaatattagatcttgaaaattgttcgagtcttgagaagctccccgctatcgagaatgcgactaagctccgtgaattgaagctccaaaattgctcaagtctaatagagctccctctttctattggaactgccacaaatctgaagcaattgaatattagcggatgctcaagtctcgtgaaactcccatcctcaattggagatatcactgatctcgaagtgtttgatctatctaactgctcaagtctggtgacgcttccttcctctataggaaaccttcaaaacttgtgcaagttaattatgagaggatgctcaaagctagaggctcttccaatcaacatcaacttgaaatctctcgatacacttaatctcacagattgctctcagttgaaaagttttcctgagatctccacacacatttcagagctcaggttaaaaggaactgcaataaaagaagttcccttgtcgatcatgtcgtggtctcctcttgctgactttcagatttcatactttgaaagcctcatggaattcccgcatgcttttgacatcatcacgaagctgcatttgagcaaagatatacaagaagttcctccatgggtcaagagaatgtctcgtttacgtgatcttagtctcaacaactgcaataatctggtatcactcccccaactttcagattcccttgattacatatatgcagataattgtaagtccctcgagagactggattgttgctttaacaatccagagatccgtctctatttccccaaatgcttcaaactgaatcaagaagccagagatctcatcatgcacacttgtatagatgcgatgtttccaggtacacaagtgcctgcctgcttcattcatcgagctacttctggggattccttgaaaatcaagttgaaggagtcgcctcttcctacaaccttgagatttaaggcttgtatcatgcttgttaaggttaatgaagaactgatgagttatgatcagacaccgatgatcgttgacattgtcatcagggacgaacataatgatctcaaagaaaagatatatccaagcatatatccaagcatatatccacttttaacagagcatatatacacatttgaacttgacgtagaggaggtgacttccacggagcttgtctttgagttcccacaactcaacaaaagaaattggaagataggagaatgcgggatactccaaagagaaacgagatcacttcgccggagctcttcgccggatctctcgccggaatcttctcgtgtttctagctacgaccactgtttgagaggtgattga

SEQ ID NO: 102236 - protein, 1194 aa, Arabidopsis thaliana
MGSVMSLGCSKRKATNQDVDSESRKRRKICSTNDAENCRFIQDESSWKHPWSLCANRVISVAAVALTNFRFQQDNQESNSSSLSLPSPATSVSRNWKHDVFPSFHGADVRRTFLSHIMESFRRKGIDTFIDNNIERSKSIGPELKEAIKGSKIAIVLLSRKYASSSWCLDELAEIMKCRQMVGQIVMTIFYEVDPTDIKKQTGEFGKAFTKTCRGKPKEQVERWRKALEDVATIAGYHSHSWRNEADMIEKISTDVSNMLNSFTPSRDFDGLVGMRAHMDMLEQLLRLDLDEVRMIGIWGPPGIGKTTIARFLFNQVSDRFQLSAIMVNIKGCYPRPCFDEYSAQLQLQNQMLSQMINHKDIMISHLGVAQERLRDKKVFLVLDEVDQLGQLDALAKETRWFGPGSRIIITTEDLGVLKAHGINHVYKVEYPSNDEAFQIFCMNAFGQKQPHEGFDEIAWEVTCLAGELPLGLKVLGSALRGKSKREWERTLPRLKTSLDGKIGSIIQFSYDVLCDEDKYLFLYIACLFNGESTTKVKELLGKFLDVKQGLHLLAQKSLISFDGERIHMHTLLEQFGRETSRKQFVHHGFTKRQLLVGARGICEVLDDDTTDSRRFIGIHLELSNTEEELNISEKVLERVHDFHFVRIDASFQPERLQLALQDLIYHSPKIRSLNWYGYESLCLPSTFNPEFLVELDMRSSNLRKLWEGTKQLRNLKWMDLSYSSYLKELPNLSTATNLEELKLRNCSSLVELPSSIEKLTSLQILDLENCSSLEKLPAIENATKLRELKLQNCSSLIELPLSIGTATNLKQLNISGCSSLVKLPSSIGDITDLEVFDLSNCSSLVTLPSSIGNLQNLCKLIMRGCSKLEALPININLKSLDTLNLTDCSQLKSFPEISTHISELRLKGTAIKEVPLSIMSWSPLADFQISYFESLMEFPHAFDIITKLHLSKDIQEVPPWVKRMSRLRDLSLNNCNNLVSLPQLSDSLDYIYADNCKSLERLDCCFNNPEIRLYFPKCFKLNQEARDLIMHTCIDAMFPGTQVPACFIHRATSGDSLKIKLKESPLPTTLRFKACIMLVKVNEELMSYDQTPMIVDIVIRDEHNDLKEKIYPSIYPSIYPLLTEHIYTFELDVEEVTSTELVFEFPQLNKRNWKIGECGILQRETRSLRRSSSPDLSPESSRVSSYDHCLRGD

SEQ ID NO: 102237 - DNA, 3681 bp, Arabidopsis thaliana
  CDS (1)..(3681)
atggaggaggcctcttcctcttccgaggtaaaagcacttcctttgccgccgcagcatcaagtgtttgtaaatttcagaggagaagagttgcggaacagctttgttagccatctcagaagtgcattggttaggcatggggtcaacatcttcatagacacgaatgaggaaaaaggtaaacctttacatgtgtttttccagaggattgaagagtcgaggatcgctttggccattttttccgttaggtacaccgaatcgaaatggtgcttgaacgagctagtgaagatgaaggaatgcatggacaagggaaagctcctcatcattcccattttctacaaggttaaagcatacgaagttcggtatcagaagggacggtttggttgtgttttcaagaatttgcgcaatgttgatgttcacaagaaaaaccagtggtctgaagctttgagctctgttgcagaccggatcggcttctcctttgatggaaagagcgacgagcacaacttcatcaatggtattgttgaagaggttaaagaagcgctgagcaagattttgttggacaaaaccaaagatgctttcgtctatcattcgaaaaacaattcaatgtccgtaggaagagaaaagcacgagatttatggactcaaacaacggttagaagaattaaaggagaagctagatcttgattgtgaggagactcggattttgggagttgttgggatgcccggtattggtaaaaccactcttgcaagggagatttatgaaactttgcggtgcaagttcttaaggcatggattaatccaagatattcgtagaacatcgaaggagcacgggttggattgcttgcctgcattactcttggaagagttactcggtgtgacaattccagacatagaatctactcgatgtgcatatgaatcttacaagatggaactacatacacataaagttcttgttgttctcgacgatgtgagtgacaaggaacagatagatgttcttctggggagatgcaactggattaggcagggaagcaggattgtcattgcaacaagcgacaaatcactaatacaagatgtggctgactatacttatgttgtcccacagttgaaccacaaagacggcttaggtcactttgggcgttatgcctttgatcgtcattccaacatacacaacaatgaagtcatcatgaagctatcgaaagagtttgtgcattatggtagaggtcatccactcgttctaaagttgttgggggcagatcttaatgggaaagacgaggaccattggaaaacaaaattggctacactagcagaaaattccagccatagtattcgagatgtgttacaagtaagttatgatgaactgagtcaagtgcataaagatatatttctcgacatagcttgttttagatcggaagatgagagttacattgctagtctactggattcatctgaagctgcaagtgaaataaaagctctcatgaataaattcatgattaatgtttccgaggaccgagtagagatgcatgatttgctatatactttcgctagggaactttgccgaagagcatatgctcaagatggaagggagccacataggttgtggcaccaccaagacataactgatgtgctaaagaacatagaggaaggcgcagaagtcagagggattttcctaaacatgaatgaaatgaagagggagatgagcttagacagttgcactttcaaatcgatgtgtggtctccgatacctcaagatctatagctcacattgtcctcagcaatgtaagcctaacaataagataaacctccctgatgggctaaacttcccactgaaagaggttcgctatctccactggctagagttcccattgaaggaaattccaccagatttcaacccgcaaaatcttgtcgaccttaagcttccccacagcaagattgaacgaatctggagtgatgataagcataaggatacaccaaaattaaagtgggtcaatctcagtcattcaagtaacttgtgggacatttcggggttatcaaaggctcaacgtcttgttttcctaaatctaaaagggtgtacaagtctcaagtctcttccggagataaatttagtctctttagaaattctcatcctcagcaactgctcaaaccttaaggaattccgggtgatctcacaaaatctagaaactctatacttggatggcacttcaattaaagaacttcctttgaacttcaatatactccagagacttgttatattgaatatgaaaggatgcgcgaagctgaaggagtttccggattgtctcgatgacttgaaagctcttaaagaactgatactctcagattgttggaagctccaaaattttccggcaatctgtgaaagaatcaaggttttagagatattaagattggatactacaaccataacagagattccgatgatatcgtcgttacaatgtttatgcttaagcaagaatgatcacatcagctcccttccagataacatcagccaactttctcaactaaaatggttggacttgaagtattgtaagagtcttacatctattccaaagcttccaccaaatcttcaacacttagatgcacacggctgttgctcacttaagacagtctcgaatccactggcatgtcttactacggctcaacagatttattctacattcatcctcacgaactgcaacaaactcgaaaggagtgctaaagaagaaatatcttcctttgctcaaaggaaatgtcagctacttttagatgcacaaaagcgctgcaatgtcagttccttgatctccttcagtatatgttgctatatatcaaaaatattcgtgtctatatgcattttcttgtctatatctatgcagaattctgattcggagcctttgttcagtatatgctttcctggaagtgaactaccttcatggttctgtcatgaagctgttggacctgtattagagctcagaatgcctccacattggcatgaaaataggcttgccggtgtagctctatgtgctgttgtcacatttccaaaatctcaagaacaaatcaactgtttttcagtgaaatgcacattcaaactagaagtaaaagaagggtcgtggatcgaattttcattcccagttggaagatggagtaatcagggcaatatagttgcgaatattgcatcagagcatgtctttattgggtatatcagctgttcaaagatctttaaacgtcttgaaaaccagtattttagcagctctaatcctacaagatccacgcaatctagtaaatgtagtcctactaaggcctctcttaattttatggtcatagatggtacgagtgagctaccgagaatcgaagtgctcaagtgtggcttaaggtttttcaaaggtgttgggagcagtggaaattatttaaagaagttggaagtgaaagaagctgaacaaaatctaagtgctgaaaaagtgtcagaagattggacgtatggatcaagtagcagatgcaaccatgctgtcaaaacatgtccagaacagaggcaagtgacagtcaccgcagaggttgaagcttctcctgaaaaagctgacaatgcagaatttcaaatcaagatcaccccacgtgaagctcaaccacaaccacaaccacgcccatgttcaaaaactttgaaatgggcatgttttacttgttgtgacttccaaaaacatctatga

SEQ ID NO: 102238 - protein, 1226 aa, Arabidopsis thaliana
MEEASSSSEVKALPLPPQHQVFVNFRGEELRNSFVSHLRSALVRHGVNIFIDTNEEKGKPLHVFFQRIEESRIALAIFSVRYTESKWCLNELVKMKECMDKGKLLIIPIFYKVKAYEVRYQKGRFGCVFKNLRNVDVHKKNQWSEALSSVADRIGFSFDGKSDEHNFINGIVEEVKEALSKILLDKTKDAFVYHSKNNSMSVGREKHEIYGLKQRLEELKEKLDLDCEETRILGVVGMPGIGKTTLAREIYETLRCKFLRHGLIQDIRRTSKEHGLDCLPALLLEELLGVTIPDIESTRCAYESYKMELHTHKVLVVLDDVSDKEQIDVLLGRCNWIRQGSRIVIATSDKSLIQDVADYTYVVPQLNHKDGLGHFGRYAFDRHSNIHNNEVIMKLSKEFVHYGRGHPLVLKLLGADLNGKDEDHWKTKLATLAENSSHSIRDVLQVSYDELSQVHKDIFLDIACFRSEDESYIASLLDSSEAASEIKALMNKFMINVSEDRVEMHDLLYTFARELCRRAYAQDGREPHRLWHHQDITDVLKNIEEGAEVRGIFLNMNEMKREMSLDSCTFKSMCGLRYLKIYSSHCPQQCKPNNKINLPDGLNFPLKEVRYLHWLEFPLKEIPPDFNPQNLVDLKLPHSKIERIWSDDKHKDTPKLKWVNLSHSSNLWDISGLSKAQRLVFLNLKGCTSLKSLPEINLVSLEILILSNCSNLKEFRVISQNLETLYLDGTSIKELPLNFNILQRLVILNMKGCAKLKEFPDCLDDLKALKELILSDCWKLQNFPAICERIKVLEILRLDTTTITEIPMISSLQCLCLSKNDHISSLPDNISQLSQLKWLDLKYCKSLTSIPKLPPNLQHLDAHGCCSLKTVSNPLACLTTAQQIYSTFILTNCNKLERSAKEEISSFAQRKCQLLLDAQKRCNVSSLISFSICCYISKIFVSICIFLSISMQNSDSEPLFSICFPGSELPSWFCHEAVGPVLELRMPPHWHENRLAGVALCAVVTFPKSQEQINCFSVKCTFKLEVKEGSWIEFSFPVGRWSNQGNIVANIASEHVFIGYISCSKIFKRLENQYFSSSNPTRSTQSSKCSPTKASLNFMVIDGTSELPRIEVLKCGLRFFKGVGSSGNYLKKLEVKEAEQNLSAEKVSEDWTYGSSSRCNHAVKTCPEQRQVTVTAEVEASPEKADNAEFQIKITPREAQPQPQPRPCSKTLKWACFTCCDFQKHL

SEQ ID NO: 102239 - DNA, 3705 bp, Arabidopsis thaliana
  CDS (1)..(3705)
atggcttcttcttcttctcataactgggtttacgacgttttcacaagcttcagcggggaagatatccgtgtaactttcctcacccactttctcaaggagcttgatcgaaaaatgattattgctttcaaagacaatgagattgagagagggaactcgatcggtaccgagcttatacaggcgataaaggattcgaggatcgcggtggttgtgttctccaaaaaatactcttcttcgagttggtgtttgaatgagttggtagagattgtgaattgcaaggaaattgtgataccagttttctatgatttagatccttctgatgttaggaaacaagagggagaatttggagagtcttttaaagagacttgcaagaacagaacagattatgagatacaacgttggggccaagcgttgaccaatgtagcaaatattgctggatatcacactaggaaaccgaataacgaagcaaaattgattgaagaaatcactaatgatgttttggataaactaatgaagttaacaccatcgaaagattttgatgaattttttggcatcgaagatcatatcaaagagctgagtttattattgtgcttggaatctgaggaagtgagaatggttgggatatggggtcctacggggattggtaagacaaccattgcaagagctttatttaatcgaatctaccgtcacttccaaggtagggtttttatagacagagcttttatatctaagagtatggctatttatagtagagcaaactcggacgactataacttgaagttgcatttgcaagaaaagttgttgtctaaacttttagacaaaaaaaacttggagataaatcacctagatgctgtgaaagagaggctaaggcaaatgaaagttcttatctttattgatgatttggatgatcaagtggtgctagaagccttagcctgtcaaactcagtggtttgggcatggaagtagaatcattgtgattacaaaagataagcatctcttaagggcttatgggattgatcatatatatgaggttcttctcccgtcgaaagaccttgctattaagatgttttgtcgatctgcttttaggaaagactctccacccaatggttttatagaacttgcttatgatgttgtaaaacgtgcaggtagtcttcctttgggtcttaacattttaggttcgtatttacggggtaggagtaaggaggattggatagatatgatgccggggcttcgtaataaactagacgggaaaattcagaaaacacttagagtcagctacgacgggttggctagcgaagacgatcaagcgatatttcgtcatattgcatgtatttttaattttgaggcatgcagtgacatcaagaaactgcttgaagatagtggcttgaatgtcactaatgggcttataaaccttgtcgataagtccctcatacgtatagaaccaaagcagaaaactgtggagatgcattgtttgttacaagaaacggctagagaaattattcgtgcacagtcttttgatgatcctggaaaacgagaattccttgtggatgggaaggatattgctgatgtcctagataattgcagtggtacaagaaaagtcttaggtatatcattggatatggatgagattgaagagttgcatctacaagtagacgccttcaaaaagatgcttaatctccgttttctaaaactttacacaaatacaaatatatcagaaaaagaagacaaattgctcttacctaaagaattcaactatttacccaatacactcagattactaagttggcaaaggtttccaatgagatgtatgccttctgatttttttcctaaatatcttgttaaacttctaatgccggggagcaagctcgagaagctgtgggacggagtaatgccgcttcaatgcctcaagaatatgaatttgtttggatctgaaaaccttaaagaattcccaaatctctcgctagcaacaaacctagagacattgtctcttggcttttgcttgagtttggttgaggttccttccactattgggaatctcaataaacttacgtatttgaacatgtcaggatgccataatttggagaaatttccggctgatgtcaacctcaaatctctctctgacctcgttctcaatggatgctcacgtttgaagatttttcccgctatatcaagcaacatctcagagctatgcctaaacagtttagcagttgaggaattcccatccaacttgcatctagagaatcttgtttatcttttaatttggggaatgacgagtgtcaagttgtgggatggcgtgaaggtgcttacatcccttaaaactatgcatttgcgagattctaaaaacctgaaagaaatcccagatctttcaatggcatcgaatcttctgatactaaatcttgaacaatgcataagtattgtggagcttccttcctctattagaaatctccataacttgatagagttggacatgtcaggatgcacaaacctggagacttttccaactggcatcaaccttcaatctctaaaacgcataaatctagctagatgctcacggttaaagatttttccggatatctcaaccaacatctcagagcttgatctaagccaaacagcgattgaagaagttcctttgtggatcgagaacttctctaagctcaaatacttaataatgggaaaatgtaacatgttggaatatgtattcctaaacatttccaaactgaaacatctcaagagcgttgacttttcagactgtgggatattgtctaaagcagacatgtacatgctacaagtacccaatgaagcttcctcttcacttccaattaattgtgtccaaaaagctgagcttatattcatcaactgctacaagctgaatcaaaaagctctcattcgccaacaattttttctgaagaaaatgattttgccaggtgaagaagtgcctttttatttcactcaccaaacaataggaagctctattggtatccctctacttcacatattactttctcaacaatacttcagatttaaggcttgtgttgtggttgatcccaagtttgtgttcccagctcgtcgttatcacgtaaacatccaggtttcttgtcgattcaaaggcatatatgggaactactttgattatgctgatcagccacattgcttctcaccatctcagacggacaattatgtgtatgtatttgattgttgtttccctcttaacaaagacaatgctcctctagctgaactcgactatgatcatgtggatatagaatttcatcttgatgataactacaatcaccacaaaataaaaggatgcggtatacgactctctgaggatgatgaaagcagtgacgatgatgatgacctaagcagtgaaactgattatagtgatgagtgtgaagatagcgatgatagtgatcttggaaatgaaattgattacagtgaagactatgaagaccgcgatactagtgatcttggaaatgaaactgattacagtgaagagtatgaagaccatgatagtagtgatcttggcaatgagtatgactataatgaagagtgtgaagaaaatgatgataatgatcttgtacttgagactgatcacaatgaagagtgtcaagacaacgatgtggagaagaagagaagtagtaagcgaatgcgggtaaatttttatatagttcacaattcttttccaagatcaaacgtaaactttttcatatag

SEQ ID NO: 102240 - protein, 1234 aa, Arabidopsis thaliana
MASSSSHNWVYDVFTSFSGEDIRVTFLTHFLKELDRKMIIAFKDNEIERGNSIGTELIQAIKDSRIAVVVFSKKYSSSSWCLNELVEIVNCKEIVIPVFYDLDPSDVRKQEGEFGESFKETCKNRTDYEIQRWGQALTNVANIAGYHTRKPNNEAKLIEEITNDVLDKLMKLTPSKDFDEFFGIEDHIKELSLLLCLESEEVRMVGIWGPTGIGKTTIARALFNRIYRHFQGRVFIDRAFISKSMAIYSRANSDDYNLKLHLQEKLLSKLLDKKNLEINHLDAVKERLRQMKVLIFIDDLDDQVVLEALACQTQWFGHGSRIIVITKDKHLLRAYGIDHIYEVLLPSKDLAIKMFCRSAFRKDSPPNGFIELAYDVVKRAGSLPLGLNILGSYLRGRSKEDWIDMMPGLRNKLDGKIQKTLRVSYDGLASEDDQAIFRHIACIFNFEACSDIKKLLEDSGLNVTNGLINLVDKSLIRIEPKQKTVEMHCLLQETAREIIRAQSFDDPGKREFLVDGKDIADVLDNCSGTRKVLGISLDMDEIEELHLQVDAFKKMLNLRFLKLYTNTNISEKEDKLLLPKEFNYLPNTLRLLSWQRFPMRCMPSDFFPKYLVKLLMPGSKLEKLWDGVMPLQCLKNMNLFGSENLKEFPNLSLATNLETLSLGFCLSLVEVPSTIGNLNKLTYLNMSGCHNLEKFPADVNLKSLSDLVLNGCSRLKIFPAISSNISELCLNSLAVEEFPSNLHLENLVYLLIWGMTSVKLWDGVKVLTSLKTMHLRDSKNLKEIPDLSMASNLLILNLEQCISIVELPSSIRNLHNLIELDMSGCTNLETFPTGINLQSLKRINLARCSRLKIFPDISTNISELDLSQTAIEEVPLWIENFSKLKYLIMGKCNMLEYVFLNISKLKHLKSVDFSDCGILSKADMYMLQVPNEASSSLPINCVQKAELIFINCYKLNQKALIRQQFFLKKMILPGEEVPFYFTHQTIGSSIGIPLLHILLSQQYFRFKACVVVDPKFVFPARRYHVNIQVSCRFKGIYGNYFDYADQPHCFSPSQTDNYVYVFDCCFPLNKDNAPLAELDYDHVDIEFHLDDNYNHHKIKGCGIRLSEDDESSDDDDDLSSETDYSDECEDSDDSDLGNEIDYSEDYEDRDTSDLGNETDYSEEYEDHDSSDLGNEYDYNEECEENDDNDLVLETDHNEECQDNDVEKKRSSKRMRVNFYIVHNSFPRSNVNFFI

SEQ ID NO: 102241 - DNA, 3660 bp, Arabidopsis thaliana
  CDS (1)..(3660)
atggaatcatcttctccatcttcagcagagttcgatgtgtttctcagtttcagaggctttgacacacgcaacaacttcaccggtcatctccaaaaagcacttcgtctaagaggaatcgactcattcatcgacgacagactccgtcgaggagacaatctcactgcgcttttcgatagaatcgagaaatccaagattgcaatcatcgtcttctccacgaactatgcaaattctgcgtggtgtcttcgagagttagtgaagatcctcgaatgtaggaacagcaaccaacagctagtggtaccaatcttctacaaagttgacaaatcggacgtcgagaaacagaggaatagttttgcggtgccgttcaagttaccagaattgacttttcccggagttacgccggaagaaatttcatcgtggaaggctgctcttgcctcagcatccaacatcctaggttatgtagtcaaggaaattagcacgtctgaggccaaacttgttgatgaaatagccgttgacacattcaagaagttgaatgatttggctccaagcgggaacgaaggtctcgtggggatagaatcgcgtctgaagaatcttgaaaagttgttatcatgggaggatttggataccgttcatatcataggcattgttggaatggttgggattgggaaaacgactcttgctgattgtttgtatggacgtatgcgtggtcagttcgacggtagctgcttccttactaatatccgcgaaaattcaggtagaagcgggttagaatctttgctgcagaaactcttttccactgtacttaatgatagagatttggagattggagctcctggaaatgcacatgagagatttgagcggcggcttaagagcaagaggctacttattgtgcttgatgatgtgaatgatgaaaagcaaatcagatatcttatggggcattgcaaatggtatcaaggaggaagtagaattatcattactactagagatagtaaactgattgagacgatcaaaggccgaaaatacgtgctcccgaaattgaatgatagagaagccttgaagctctttagcttgaatgcttttagtaactctttccctttgaaagagttcgaaggtttgacaaatatggttcttgattacgctaaaggccaccctttggctcttaaggtgttaggatctgatctttgtgagagggatgatctgtactgggaagctaaactggatagactgaaaagtagatcacatggagatatctacgaagttctagaaacaagctatgaggagcttaccactgaacagaagaatgtttttctggatattgcatgtttcttcagatcagagaatgtggattacgtgacaagccttctcaacagtcatggtgtggacgtctctggcgtggtaaaggatctcgttgacaaatgtctgatcactctttctgataatcgcatcgagatgcatgacatgttgcaaacgatggccaaggagattagtttaaaagtagaaacaataggtataagagactgtaggtggctatcacgacatggtaaccagtgccaatggcatatcagattatgggacagtgaagatatttgtgacctgctaaccgaaggcctgggaactgataagataagaggcatttttctcgacacatcaaaactaagagcaatgcgtctaagtgccaaagccttccaagggatgtacaatctcaaatacttgaaaatttatgattctcattgttcccgtggatgcgaagcagagtttaaactacacttgcggaggggacttagtttccttcctaacgagcttacatatctacactggcatggttatccactacagagtatccctctagactttgaccctaagaatcttgtagaccttaaattgccacatagtcaattagaagaaatttgggatgatgaaaaggatgttggaatgctcaaatgggtcgaccttagtcattctataaatttacgtcagtgtttgggtttggctaatgctcataatcttgagaggttgaatctagaaggatgtacaagtttgaaaaaattgccgtcaacgataaattgtttggagaagcttatatacctcaatctcagggattgcacaagccttaggagtcttccaaaaggaatcaaaactcaatccttgcaaactcttattctcagtggctgctccagcttaaagaaattcccactgatctcggaaaatgttgaagttctacttttagatggcactgttataaagagccttcccgaatccattcaaacctttagaagacttgctttgctgaatctgaagaactgcaaaaagctgaagcatctttcttctgatctttataagctgaaatgtcttcaagagctaatactctcaggttgctcacaactagaggtttttccagaaattaaggaagacatggaatctttggagattttacttatggatgatacatccatcacagagatgccaaagatgatgcatttgagcaatatcaagacattttcgttatgtggtacaagcagtcacgtttctgttagtatgttcttcatgccacctacattgggctgctctcggttaacagatctttacctctcaagatgcagtctctacaaactcccagataatatcggtggcctatcctctttgcagtctttatgcttaagcggaaacaacatcgagaatcttccagaaagcttcaaccaacttaacaatctgaaatggtttgatcttaagttttgcaaaatgctcaagtctctaccagtccttccacaaaacctgcagtatctggatgcacacgaatgcgagtcacttgaaactttggcaaatccattgacgcctttgacagtaggagagagaatccattctatgttcatctttagcaactgttacaaactgaaccaagacgcacaagcgagtctcgtgggtcatgctcgaatcaaaagtcagttaatggctaatgcttctgcaaaacgttattatcggggatttgttccggagcctctggttggtatctgttacccggccactgaaataccgagttggttctgccaccaaagactaggacgttcactagaaatcccattgcctccgcactggtgtgatattaactttgttggacttgcgttatctgtagttgtctcattcaaggactatgaagacagtgcgaaacgtttctcggtaaagtgttgtggcaacttcgagaacaaagacagttccttcacgagatttgatttcactctcgcaggctggaacgaaccatgtggatcccttagccatgaatcaagaaagctcacttctgaccacgttttcatgggatacaacagttgttttctcgtcaaaaatgtccatggagagagtaacagctgttgctacacaaaggcttcgttcgaattctatgtgacagatgatgaaacaaggaagaagatagaaacttgtgaagtgataaaatgtgggatgagtttaatgtatgttcctgaagatgatgattgtatgttgctaaagaagacaaatatagttcagctgagtttgaagagcggaccaagttgttcctacgatcttgatgatgttatggatgacgttagacccaagagaggactttgccagtttgttggtggtgaagaaccaggttgtaagagaaggaaggaggagaagatcacagtgagatag

SEQ ID NO: 102242 - protein, 1219 aa, Arabidopsis thaliana
MESSSPSSAEFDVFLSFRGFDTRNNFTGHLQKALRLRGIDSFIDDRLRRGDNLTALFDRIEKSKIAIIVFSTNYANSAWCLRELVKILECRNSNQQLVVPIFYKVDKSDVEKQRNSFAVPFKLPELTFPGVTPEEISSWKAALASASNILGYVVKEISTSEAKLVDEIAVDTFKKLNDLAPSGNEGLVGIESRLKNLEKLLSWEDLDTVHIIGIVGMVGIGKTTLADCLYGRMRGQFDGSCFLTNIRENSGRSGLESLLQKLFSTVLNDRDLEIGAPGNAHERFERRLKSKRLLIVLDDVNDEKQIRYLMGHCKWYQGGSRIIITTRDSKLIETIKGRKYVLPKLNDREALKLFSLNAFSNSFPLKEFEGLTNMVLDYAKGHPLALKVLGSDLCERDDLYWEAKLDRLKSRSHGDIYEVLETSYEELTTEQKNVFLDIACFFRSENVDYVTSLLNSHGVDVSGVVKDLVDKCLITLSDNRIEMHDMLQTMAKEISLKVETIGIRDCRWLSRHGNQCQWHIRLWDSEDICDLLTEGLGTDKIRGIFLDTSKLRAMRLSAKAFQGMYNLKYLKIYDSHCSRGCEAEFKLHLRRGLSFLPNELTYLHWHGYPLQSIPLDFDPKNLVDLKLPHSQLEEIWDDEKDVGMLKWVDLSHSINLRQCLGLANAHNLERLNLEGCTSLKKLPSTINCLEKLIYLNLRDCTSLRSLPKGIKTQSLQTLILSGCSSLKKFPLISENVEVLLLDGTVIKSLPESIQTFRRLALLNLKNCKKLKHLSSDLYKLKCLQELILSGCSQLEVFPEIKEDMESLEILLMDDTSITEMPKMMHLSNIKTFSLCGTSSHVSVSMFFMPPTLGCSRLTDLYLSRCSLYKLPDNIGGLSSLQSLCLSGNNIENLPESFNQLNNLKWFDLKFCKMLKSLPVLPQNLQYLDAHECESLETLANPLTPLTVGERIHSMFIFSNCYKLNQDAQASLVGHARIKSQLMANASAKRYYRGFVPEPLVGICYPATEIPSWFCHQRLGRSLEIPLPPHWCDINFVGLALSVVVSFKDYEDSAKRFSVKCCGNFENKDSSFTRFDFTLAGWNEPCGSLSHESRKLTSDHVFMGYNSCFLVKNVHGESNSCCYTKASFEFYVTDDETRKKIETCEVIKCGMSLMYVPEDDDCMLLKKTNIVQLSLKSGPSCSYDLDDVMDDVRPKRGLCQFVGGEEPGCKRRKEEKITVR

SEQ ID NO: 102243 - DNA, 3150 bp, Arabidopsis thaliana
  CDS (1)..(3150)
atggcttttgcttcttcttcctcttctatagttctctccaaatgcgaattcgacgtgttcgtgagtttcagaggcgcggatacgcgtcatgacttcacttctcacctcgttaagtacctgcgtgggaaaggtatcgatgttttctccgatgccaaactccggggaggtgagtacatctcgcttctctttgacaggatcgagcaatcgaagatgtcaatcgttgtcttctcagaggattacgccaactcctggtggtgcttggaggaagtcgggaagattatgcagcgcaggaaagaattcaatcatggagttttaccgatcttctacaaagtcagtaaatctgatgtttcgaatcagacagggagttttgaagccgtattccagagccccacaaagatttttaatggagatgaacaaaaaattgaggaattgaaggttgctctgaagacagcttccaatatccgtggctttgtatatcctgagaacagctcggagcctgattttttagatgaaatcgtgaagaatactttcaggatgctgaatgaattgtctccatgtgtaatccctgatgatctaccaggaattgaatcacgttccaaggaactggagaagctattgatgttcgataatgatgaatgtgtccgtgtcgttggagttcttgggatgactggtatcggcaagacaacggttgctgatatcgtatataaacagaacttccagaggtttgatggatacgagttccttgaagacattgaagataactctaagcggtatggattaccttatttgtaccaaaaactcctccataaattattggatggagaaaatgttgatgtcagagcgcagggaagaccggaaaactttctaaggaacaagaaattgtttattgtgctggacaatgtgaccgaagagaaacaaatagaatatcttatcggaaagaagaatgtgtacaggcaaggaagtaggattgttataataacaagagacaagaaactgctgcagaaaaacgctgatgctacatatgtggttcccagattaaatgacagggaagctatggagttattctgccttcaggtatttggcaaccactatcccacggaagaatttgtggatctatcaaacgattttgtttgttatgctaaagggcttccgttagctttgaagttgttaggtaagggtctattaacccatgatataaactactggaagaagaaattggagtttttacaggtaaatccagacaaggagcttcagaaagagctgaaatcgagttataaagcacttgatgatgatcagaagagcgtatttctggacatagcatgttttttcaggtcagagaaagcagattttgtttcaagcattctgaaatcagacgacattgatgctaaagatgtgatgagagaacttgaggagaagtgccttgtaaccatttcttacgataggattgagatgcatgatctattgcatgcaatggggaaggaaattggaaaagaaaaatccatcagaaaggcaggcgaacgtcgtaggttgtggaaccacaaagatattcgtgatatcctggagcataacacgggcactgaatgtgttagaggcatcttcttgaacatgtctgaagtcagaagaatcaagctttttcctgctgctttcacgatgttgtcaaaactcaaattcctgaaattccacagttctcattgttctcagtggtgtgataatgaccatatatttcagtgctccaaagtccctgatcactttccagatgagcttgtttaccttcactggcaggggtatccctatgattgcctgccatcagatttcgatccaaaggaacttgtcgatcttagtctgcgttatagccacatcaaacaactgtgggaagatgagaagaatacagaaagtttaagatgggtcgatctcggtcagtcaaaagacttgctaaatttatcaggtttatccagggccaaaaatcttgaaagattggatcttgaaggctgtacgagtttggatctcttgggctcagtaaaacagatgaacgaacttatttacctgaacctcagagactgcacaagccttgagagtcttccaaagggattcaaaataaaatctcttaagactctgatcctcagtggttgcttaaaacttaaggactttcatattatatcagaaagtattgaatcccttcatttggaaggcacagcaatcgaacgagttgttgaacacatcgagagtcttcacagccttattttgctgaatctcaagaattgtgagaaattgaagtatcttcccaacgatctttacaagctgaaatctctccaagaactggttctctctggttgttcagcgctggagagtcttccgcccatcaaagagaagatggaatgcttagagattttgcttatggatggaacgtctatcaaacaaacacctgaaatgagttgtttgagtaacctcaaaatttgttcgttctgtcgacctgttatcgacgattccacagggttgtacttagatgctcatgggtgtggttctctggaaaatgtttcaaaaccactaacgattcctctcgtaaccgagaggatgcatactactttcatttttacggattgcttcaagctgaaccaagcggagaaggaagatattgtagctcaggcccaactcaagagtcagttactggcaaggacatctcgtcatcataatcataagggactacttctggatcctctggttgccgtttgctttccaggacatgacataccctcatggttctcccatcaaaaaatgggatctttgatagaaaccgacctgcttccacactggtgtaacatcttcaaatggagcgaagagactaatgaaggtaatagatgtcatcccactagtgcctcattcgaattctaccttactgatgaaaccgaaagaaaactagaatgctgcgagattttaaggtgtgggatgaattttttatatgctcgagatgagaacgaccgtaaattccagggaatacgggttacagacactgttgagcgtacatctagtgaggctcttgtaaccattcgaggtcagtcccactcacggattgaagagagaagatatggcagaataagagatgaaatcatggatatgactggatcctccatgataggaggtcccgagtcttaa

SEQ ID NO: 102244 - protein, 1049 aa, Arabidopsis thaliana
MAFASSSSSIVLSKCEFDVFVSFRGADTRHDFTSHLVKYLRGKGIDVFSDAKLRGGEYISLLFDRIEQSKMSIVVFSEDYANSWWCLEEVGKIMQRRKEFNHGVLPIFYKVSKSDVSNQTGSFEAVFQSPTKIFNGDEQKIEELKVALKTASNIRGFVYPENSSEPDFLDEIVKNTFRMLNELSPCVIPDDLPGIESRSKELEKLLMFDNDECVRVVGVLGMTGIGKTTVADIVYKQNFQRFDGYEFLEDIEDNSKRYGLPYLYQKLLHKLLDGENVDVRAQGRPENFLRNKKLFIVLDNVTEEKQIEYLIGKKNVYRQGSRIVIITRDKKLLQKNADATYVVPRLNDREAMELFCLQVFGNHYPTEEFVDLSNDFVCYAKGLPLALKLLGKGLLTHDINYWKKKLEFLQVNPDKELQKELKSSYKALDDDQKSVFLDIACFFRSEKADFVSSILKSDDIDAKDVMRELEEKCLVTISYDRIEMHDLLHAMGKEIGKEKSIRKAGERRRLWNHKDIRDILEHNTGTECVRGIFLNMSEVRRIKLFPAAFTMLSKLKFLKFHSSHCSQWCDNDHIFQCSKVPDHFPDELVYLHWQGYPYDCLPSDFDPKELVDLSLRYSHIKQLWEDEKNTESLRWVDLGQSKDLLNLSGLSRAKNLERLDLEGCTSLDLLGSVKQMNELIYLNLRDCTSLESLPKGFKIKSLKTLILSGCLKLKDFHIISESIESLHLEGTAIERVVEHIESLHSLILLNLKNCEKLKYLPNDLYKLKSLQELVLSGCSALESLPPIKEKMECLEILLMDGTSIKQTPEMSCLSNLKICSFCRPVIDDSTGLYLDAHGCGSLENVSKPLTIPLVTERMHTTFIFTDCFKLNQAEKEDIVAQAQLKSQLLARTSRHHNHKGLLLDPLVAVCFPGHDIPSWFSHQKMGSLIETDLLPHWCNIFKWSEETNEGNRCHPTSASFEFYLTDETERKLECCEILRCGMNFLYARDENDRKFQGIRVTDTVERTSSEALVTIRGQSHSRIEERRYGRIRDEIMDMTGSSMIGGPES

SEQ ID NO: 102245 - DNA, 3504 bp, Arabidopsis thaliana
  CDS (1)..(3504)
atggctacctcatcctcggtggtcagcagtgtacctcagcagcaccaagtgttcctcaatttccgtggggacgaacttcgtaataatttcgtcagccatctggataaggccttaagagggaaacagatcaatgtcttcatagatgaggctgtggaaaaaggtgaaaatctagataaccttttcaaggagatcgaaaaatctagaatcgcgctggctatcatttcccaaaagtacacagagtcaaaatggtgcttgaacgagctggttaaaatgaaagaactcgagggcaaactcgtgacgattcccatcttctacaatgtggaacctgctacggttaggtatcagaaggaagcgtttggtgctgcgctcacaaaaacgcaggaaaatgatagtgatggccagatgaagaaatggaaagaggctttgacgtatgttagtctcctggtgggcttcccgtttaacagtaaaagcaaggagaaggagaccacgctcatcgataaaatcgtcgacgccgttttgcaaaagctgagtaaaatatcgtcggaagaaagcacaagtggatcagtggatcaaggtcggggagaagaagtagaagaagcaaaggctgataagatttccgggctcaaccagcgcctaaaggaactggaagaaaaggtagccattacgggtgacaagagagacgagactcgtattgtcgaagttgttgggatgcctggcattggtaaatccactctcttgaaggccttctatgagacatggaaaaccaggttcttgagcagcgccttactccaaaatataagcgaacttgtaaaagcaatgggattgggacgcttgactgggatgctcttgaaggagttgctcccagatgaaaacatagacgaggagacatacgaaccatacaaggagaaactacttaaaaacacagttttcattgttctagatggcataagtgacgagacacatatacaaaaacttcttaaggatcatcgaaaatgggctaagaaaggaagcaagattgtgattgcaagacgcgcagtgactcgtgatctgcttcatgaggattcaatggtccgttatacttattttgtaccgctgttgagccatcgagatgggttaaatcacttttgtcactatgcgttccgtcattttgcggcccaccaaaacaacaaggaagctttcatgaaggagtcaaaagagtttgtgcgttacgcgagaggccacccactaattctcaagctattgggtgaagagcttcgtgagaaaagcctctcttactgggaagagaaactaaaatcactcccaaaaagtctcagccaaaatattcgagaccgtgtcttgcaggtaacttatgatgaactgagtcaagtgcaaaaggatgcgtttcttgacatagcttgtttcagatcccatgatttggtttatgtaaagagcttactggattcatctggtcccgccttttctaaagcgacagttacaatagacgctctcaaagacatgttcatgatttacatttctgatagtcgagtggagatgcatgatcttttgtatacgtttgccatggaacttggtccagaagccagggatgacgatggaagagggagacaccggatatggcatcatcacaaccaagataataaaggcaggctcaataggctgctaaaaagaccaggaggcagcaccagtgtgagaagttttttcctcgatatgtatgtcatgaagacggacgtgaccttaggcactgattacctcaagaacatgcgaaatctccggtacctcaagttttacagttctcattgtcctcaggaatgtacgcctaaggaaaacatacacatccctggagaacttgagcttccacttgaagaggtccgatgtttgcattggctaaatttccccaaagatgaacttccacaagatttcatccccaagaatctcgtagatcttaagctcccttacagtaagattagacagatttggagagaagagaaggatgcaccaaaactaaggtgggtcgatctcaatcactcaagtaagttggaaaacttgtcagggctatcacaggctctaaatcttgaaagattgaaccttgaaggttgcacagcactgaaaacgttgcttctgggtccggaaaatatggcaagtcttgttttcctgaatttgaaagggtgcacgggtcttgagtctcttcccaagattaatttgagatctctgaagactctcatcctcagcaactgttcaaacttggaggagttttgggtgatttcagaaactttatatacgctatatttggatggcactgcaataaaaacacttcctcaagacatggtaaagctaacaagcctcgtcaaattatacatgaaagactgcgagatgctcgttaagcttcccgaagaatttgacaagctgaaagttctgcaagaactagtatgctctggttgtaaaagactcagtagtctcccagatgtgatgaagaacatgcaatgcttgcagattttactgcttgatggaacagcaataacaaagattcctcatatatcctcacttgagcgtctatgcttaagcagaaacgagaagatcagttgtctttcgaatgatattcgtctgctttctcaactgaaatggctggacttgaagtactgtacgaaacttgtgtctattccagagcttccaacaaatcttcagtgcttagatgcaaacggatgtgaatcattaacaacagttgcgaatccactggctactcatttgccaacggagcagattcattccacattcattttcacaaactgcgacaaattagaccgtactgcaaaggagggttttgttccagaggctttgttcagcacttgcttccctgggtgtgaagtaccttcatggttttgtcatgaagcagttggatccgtcttaaagctcaacctgctcccacattggaacgaaaataggtttgtcggaatagctttatgtgctgttgtgggatccttaccaaattgccaagaacaaaccaactcttgttcagtgacatgcacgtttaacatagcaagtaaagattccaagaaaggggatccttacaaaatctcctttgatcgactggttgggcgttggaacaaacatggcaacaaactagacaagaaaggcaacaaactaaagaagacggaatcagatcatgtctttatctgctataccagatgctcaaacagcataaaatgtcttcaagaccagcactcaggtacatgtactccaaccgaagctttccttgaatttggtgtgacagataaggaatctcgactcgaggtgctcaagtgtgggttaagattggtatatgcatctgatgaaccccagaagacaaactcagatatggatctttcattatcatcatctgattcaactccgacaaggaacggcagttccaacactactacatctagtggaagtgtatctaccaataccattagagaagaagattccaatatcttacatgaagcacaatctcaaaatgggagaggactttga

SEQ ID NO: 102246 - protein, 1167 aa, Arabidopsis thaliana
MATSSSVVSSVPQQHQVFLNFRGDELRNNFVSHLDKALRGKQINVFIDEAVEKGENLDNLFKEIEKSRIALAIISQKYTESKWCLNELVKMKELEGKLVTIPIFYNVEPATVRYQKEAFGAALTKTQENDSDGQMKKWKEALTYVSLLVGFPFNSKSKEKETTLIDKIVDAVLQKLSKISSEESTSGSVDQGRGEEVEEAKADKISGLNQRLKELEEKVAITGDKRDETRIVEVVGMPGIGKSTLLKAFYETWKTRFLSSALLQNISELVKAMGLGRLTGMLLKELLPDENIDEETYEPYKEKLLKNTVFIVLDGISDETHIQKLLKDHRKWAKKGSKIVIARRAVTRDLLHEDSMVRYTYFVPLLSHRDGLNHFCHYAFRHFAAHQNNKEAFMKESKEFVRYARGHPLILKLLGEELREKSLSYWEEKLKSLPKSLSQNIRDRVLQVTYDELSQVQKDAFLDIACFRSHDLVYVKSLLDSSGPAFSKATVTIDALKDMFMIYISDSRVEMHDLLYTFAMELGPEARDDDGRGRHRIWHHHNQDNKGRLNRLLKRPGGSTSVRSFFLDMYVMKTDVTLGTDYLKNMRNLRYLKFYSSHCPQECTPKENIHIPGELELPLEEVRCLHWLNFPKDELPQDFIPKNLVDLKLPYSKIRQIWREEKDAPKLRWVDLNHSSKLENLSGLSQALNLERLNLEGCTALKTLLLGPENMASLVFLNLKGCTGLESLPKINLRSLKTLILSNCSNLEEFWVISETLYTLYLDGTAIKTLPQDMVKLTSLVKLYMKDCEMLVKLPEEFDKLKVLQELVCSGCKRLSSLPDVMKNMQCLQILLLDGTAITKIPHISSLERLCLSRNEKISCLSNDIRLLSQLKWLDLKYCTKLVSIPELPTNLQCLDANGCESLTTVANPLATHLPTEQIHSTFIFTNCDKLDRTAKEGFVPEALFSTCFPGCEVPSWFCHEAVGSVLKLNLLPHWNENRFVGIALCAVVGSLPNCQEQTNSCSVTCTFNIASKDSKKGDPYKISFDRLVGRWNKHGNKLDKKGNKLKKTESDHVFICYTRCSNSIKCLQDQHSGTCTPTEAFLEFGVTDKESRLEVLKCGLRLVYASDEPQKTNSDMDLSLSSSDSTPTRNGSSNTTTSSGSVSTNTIREEDSNILHEAQSQNGRGL

SEQ ID NO: 102247 - DNA, 3540 bp, Arabidopsis thaliana
  CDS (1)..(3540)
atggtggattattcttcttcttcttcttcatccgttcaattatctccgccgcagcatcaagtcttcctcaatttccgagggaaacaactgcggaacggtttcgtcagccatctggagaaagccttgaggagggatggaatcaacgtctttatcgacagaaacgaaaccaaaggtagagatctcagtaaccttttctcgagaatccaggagtcgaggatcgcgctcgccattttctctagcatgtatacggagtcgtattggtgcttggacgagcttgtgaagattaaggattgtgttgacttaggcacacttgtcgttattcccatcttctacatggtggacacagacgatgtcaaaaacctaaagggcgcttttggttacacgttctggaaattggctaagacttgtaatggtgaaaagctcgataagtggaaacaagctttaaaggatgttcctaaaaagcttggctttacgttgagcgaaatgagcgatgaaggcgaatccatcaatcaaattgtaggggaagtcataaaggtgctatcatctgatgttatgcctgatctagaaagggaaatccccattgatgatccttttccaacaggagaacaagtacctgaagctgctcctgactcgcctcctcctctgtttggcattgaaacacgacttaagcaattggaagagaagttggattttgagtgcaaggatactcttaccattggtgttgttgggatgcctggtattggtaagaccactctgactagtatgctttatgaaaagtggcaacacgatttcctacgctgtgtttttcttcatgatgtccgtaagatgtggaaagactgcatgatggatcggagcattttcattgaagagttgttgaaggatgataacgtgaaccaagaagtcgctgacttttcacctgaatccttgaaggcactcctactgagtaagaaatctcttgttgttcttgataatgtgagcgacaagaaacagatagaggttcttctcggggaatcagactggattaagagaggtagtagaatctttatcacaactagcgacaggtcggtgatcgaggggatggttgatgatacatatgaggtcctgagattgactggtagagacagctttgagtactttagctattttgcctttagtggtaagctttgtcctccagtgagaactttcatgaatctgtctagattgtttgcggattatgctaaaggcaacccattagctctcaagatattgggtaaggagctaaatggaaaagacaagactcactgggaagagaaacttagcaagctgatgcaaagtcccaataagacaatacaagatgtcttgcgggtaagctatgatgaactaggtttgtctcacaaagatgtctttcttgatgtcgcatgtttctttagatcaggggatgagtattacgtgaggtgtttagtggaatcttgtgacactgaagccattgatactgtgagtgaaataaaggatcttgccagcaaattcttgataaacatttctggcggacgagtggagatgcatgatttactgtatacatttggtaaggaacttggttcacaagggtcgcgtaggctgtggaaccataaagccgttgtaggtgcgctgaagaatagagtgggagccgtgagaggtatttttcttgacatgtctgaactgaagaagaaacttcctttggacagaagtaccttcatcaagatgcgcaatcttagatacctcaaattctatagttctcgttgtgatcgagaatgtgaagctgatagcaaactaaactttccggagggacttgagtttccgttggatgagatacgttacctctattggctaaaattcccgttgatgaaacttccaaaagacttcaaccccaagaatcttaccgactttaacctgccttacagcgagattgaagagctctgggagggggctaaggatacacagaagttaaagtgggttgatcttagccactcaagaaagttatgcaatctgtcagggttgctaaatgctgagagtctccaaagactaaatcttgaagggtgcacgagtttggaggagttgcctcgtgagatgaaacgcatgaaaagccttattttcctcaacatgagaggatgcacgagtctccgggttcttccgcgtatgaatctgatctctttgaaaactctcatcctcaccaattgctcaagcattcagaaattccaggtgatttcagataacctagaaactctacacttagatggaactgcaattggcaaacttcctaccgacatggtgaagctccagaaactgattgtattgaacttgaaagactgcaaaatgttaggtgcagttccagaattcctagggaagctgaaagctctgcaagaactggtgctatctggttgttcaaagctcaagactttttcagttcctattgaaaccatgaaatgcttgcagatattattgcttgacgggacagcacttaaagaaatgccaaagttattgcggttcaatagctctagagtggaagatctacccgaattaagacgtggtattaatggcctatcctcattgcgacgtctatgcttaagcaggaacaatatgatcagcaatctgcaaatcgacatcaatcaactctatcatctgaaatggttagacctgaaatactgcaagaatctcacatcaattccattgcttccaccaaatctagagatcttagatgcacatggctgcgaaaaactgaaaacagttgcgtcgcccatggcccttcttaagcttatggagcaggttcagtctaaattcattttcaccaactgcaacaatctggaacaagttgcaaagaatagcatcacatcgtatgctcaaaggaaaagccagctagatgcacgtagatgctacaaagaggggggtgtttcagaagctttgttcatcgcttgctttccaggaagtgatgtaccttcatggttcaactatcaaacatttggatccgcattaaggctgaagttgccgccacattggtgtgacaacaggctttcaacaatagctctatgtgctgttgtcacattccctgacactcaagatgaaatcaaccgtttctcaatagagtgcacttgtgagttcaaaaatgaacttgggacatgtatacgtttcagttgcactcttggtggaagttggatcgagtctcgcaagattgattcagatcatgtgtttatcggttacactagtagctcacacataacaaaacatctagaagggtcgttgaagttgaaagaacatgataaatgtgttcctacggaggcttcaatcgaatttgaagtgatagatggagcaggtgaaattgtgaattgtggtttaagtttggtgtacgaggaaccaaaccatgtcgttgttgaaaggaactgtaaaggagcttcatcaagaagagatatgtccgttggagagagcatattgagcattgctgctgggtatttgtccaatgttttgaggtttctgtggctaggtgttgtattctttatggtttatggattttctaaaatttttgttaaataa

SEQ ID NO: 102248 - protein, 1179 aa, Arabidopsis thaliana
MVDYSSSSSSSVQLSPPQHQVFLNFRGKQLRNGFVSHLEKALRRDGINVFIDRNETKGRDLSNLFSRIQESRIALAIFSSMYTESYWCLDELVKIKDCVDLGTLVVIPIFYMVDTDDVKNLKGAFGYTFWKLAKTCNGEKLDKWKQALKDVPKKLGFTLSEMSDEGESINQIVGEVIKVLSSDVMPDLEREIPIDDPFPTGEQVPEAAPDSPPPLFGIETRLKQLEEKLDFECKDTLTIGVVGMPGIGKTTLTSMLYEKWQHDFLRCVFLHDVRKMWKDCMMDRSIFIEELLKDDNVNQEVADFSPESLKALLLSKKSLVVLDNVSDKKQIEVLLGESDWIKRGSRIFITTSDRSVIEGMVDDTYEVLRLTGRDSFEYFSYFAFSGKLCPPVRTFMNLSRLFADYAKGNPLALKILGKELNGKDKTHWEEKLSKLMQSPNKTIQDVLRVSYDELGLSHKDVFLDVACFFRSGDEYYVRCLVESCDTEAIDTVSEIKDLASKFLINISGGRVEMHDLLYTFGKELGSQGSRRLWNHKAVVGALKNRVGAVRGIFLDMSELKKKLPLDRSTFIKMRNLRYLKFYSSRCDRECEADSKLNFPEGLEFPLDEIRYLYWLKFPLMKLPKDFNPKNLTDFNLPYSEIEELWEGAKDTQKLKWVDLSHSRKLCNLSGLLNAESLQRLNLEGCTSLEELPREMKRMKSLIFLNMRGCTSLRVLPRMNLISLKTLILTNCSSIQKFQVISDNLETLHLDGTAIGKLPTDMVKLQKLIVLNLKDCKMLGAVPEFLGKLKALQELVLSGCSKLKTFSVPIETMKCLQILLLDGTALKEMPKLLRFNSSRVEDLPELRRGINGLSSLRRLCLSRNNMISNLQIDINQLYHLKWLDLKYCKNLTSIPLLPPNLEILDAHGCEKLKTVASPMALLKLMEQVQSKFIFTNCNNLEQVAKNSITSYAQRKSQLDARRCYKEGGVSEALFIACFPGSDVPSWFNYQTFGSALRLKLPPHWCDNRLSTIALCAVVTFPDTQDEINRFSIECTCEFKNELGTCIRFSCTLGGSWIESRKIDSDHVFIGYTSSSHITKHLEGSLKLKEHDKCVPTEASIEFEVIDGAGEIVNCGLSLVYEEPNHVVVERNCKGASSRRDMSVGESILSIAAGYLSNVLRFLWLGVVFFMVYGFSKIFVK

SEQ ID NO: 102249 - DNA, 3594 bp, Arabidopsis thaliana
  CDS (1)..(3594)
atgacaagctcctcctcctgggtgaaaacggacggtgagacaccccaagatcaagtgttcattaatttccgtggagtcgaactgcgcaagaacttcgtcagtcatctggagaagggcttaaaaaggaaagggatcaatgccttcatagacacagatgaagagatgggccaagagttgagtgttctgctcgaaagaatagaaggttcgaggatcgcgctagccattttctctccaaggtacacggagtcaaaatggtgtttgaaggagcttgcgaagatgaaagaaagaacggaacaaaaggagctcgtggtgattccaatcttctacaaggtacagcccgtcactgttaaagaattgaagggagacttcggggataagttcagggagctggtgaagtctactgacaagaagacgaagaaagaatggaaggaagctttacaatatgttccatttttaaccggcatcgtgttggatgagaaaagcgatgaggacgaagtcatcaatataattatccgaaaggttaaagaaatactaaatagacgttcagagggtcctccttctaaatgttctgcactaccgccccaaagacaccagaaacgtcatgaaaccttttggggaatcgagctccgaattaagcaactagaagaaaagttacgttttgggtcggacgaaacaactcgtaccatcggtgttgttgggatgcccggtataggtaaaaccactctcgctacgatgctatatgagaagtggaatgatagattcctgagacacgtgttaatccgtgatatccatgaagcttcagaggaagacgggttaaattacttggccacgaaattcttgcaaggtttattgaaagttgagaatgccaacatcgagtccgtacaagctgctcatgaagcttacaaagatcagttactcgagaccaaagtccttgttattcttgacaatgtcagtaacaaggaccaagttgatgctcttcttggcgaacgcaactggattaagaaaggaagcaagattctcattactacaagcgacaagtcattgatgatacaaagtttggtcaatgatacttacgaagtccctccattaagcgacaaagatgccataaaacattttatacgttacgcatttgatggtaacgaaggagctgctcccggccccgggcaaggaaatttccccaagttgtcgaaagatttcgtgcattatactaaaggaaatccactagctctccagatgttgggtaaggagcttttggggaaagatgagagtcactggggcttaaaactaaatgcattggatcaacaccataacagtccacctggacaaagcatttgcaagatgcttcaaagggtctgggaagggagttataaagcactgagtcaaaaagaaaaagatgcacttcttgacatagcttgcttcaggtcgcaagatgagaattacgtagcgagtttattggattcagatggccctagtaatatattggaagatctcgtgaacaagttcatgattaatatttatgctggcaaagtagatatgcatgatacattgtatatgctctccaaggaacttggtcgagaagctactgctacagatagaaaggggcggcataggttgtggcaccatcacaccataattgctgtgctggacaaaaacaagggaggttctaatatcaggtctattttccttgacttgtctgatattacaagaaaatggtgcttctatcgccatgcttttgccatgatgagggatctaagatatctcaaaatctacagcactcattgtcctcaagaatgtgaaagtgacattaaattaaacttccccgaaggactcctgctaccgttgaatgaggtgcgatatctccactggctgaaattcccgttaaaagaagttccacaagatttcaacccgggtaatttggttgaccttaagcttccttatagcgagattgaacgagtttgggaagataacaaggatgcaccaaaattaaaatgggtaaacttaaatcactcaaagaagttgaacactttggcagggttaggaaaagctcaaaatcttcaagagctaaatcttgaaggttgcacggcattgaaagagatgcatgtggatatggaaaatatgaagtttcttgttttcttgaacctgagaggatgcacaagtctcaagtctcttccagagattcagttgatctctttgaaaactctcatcctcagtggctgctcaaaatttaaaacctttcaggttatttcagataagctggaagcactatacttggatggaactgcaataaaggaacttccttgtgacattgggagactccaaagacttgttatgttgaacatgaaaggctgcaagaagctgaaaaggctccctgacagtcttggtcagctgaaagctcttgaagaacttatcctctctggttgttcaaagctcaatgagtttccagaaacttggggaaacatgagccgcttagagatcttgcttctggatgagacagctataaaagatatgccgaagatactctccgtgcgtcgtttatgcttaaacaagaatgaaaagatcagccgccttccagatctcctcaataaattttctcaacttcaatggcttcatttgaagtattgtaagaatcttacacatgttccacagcttccaccaaatcttcagtatttaaacgttcatggttgtagctcactgaagacagttgcaaaaccgctggtatgttctataccgatgaagcatgtcaattcctcgttcattttcactaactgcaatgaattggaacaagctgcaaaggaggaaattgtagtatatgctgaaaggaagtgtcatttgcttgctagtgcgcttaaacgatgcgatgagagttgtgttcctgagattttgttctgcactagctttcctggatgtgaaatgccttcatggtttagtcacgatgcaattggatctatggtggagtttgaattacctcctcactggaatcacaataggctttctgggatagccctatgtgttgttgtctcattcaagaactgtaaaagtcatgccaacttgatagtcaagttctcttgtgagcaaaataacggagagggctcttccagcagcattacttggaaggttggaagtttgattgaacaagacaaccaagaagaaacagttgaatcagatcatgtctttattggctacaccaactgcttagacttcataaaacttgttaaaggccaaggtggtcctaaatgtgctccgaccaaagcatcccttgagtttagtgtgagaactggtactggtggggaagctacgcttgaagttttgaaatccggtttcagttttgtgtttgaacctgaagagaacagagttccatccccaaggaatgatgatgtaaaaggtaaagtaaaaatcaacaaaactccaagtgctaatggttgtttcaaggatcaagcaaaaggtaatgaatctccaaagggccagtggcagacttacattgaaaactctagcactaacatcccaagtgaagctcattcttcccaaaaaactgggtttaatgggttcaacgggatgtactctgtatgcgtgctttatgaaatgtatagccattga

SEQ ID NO: 102250 - protein, 1197 aa, Arabidopsis thaliana
MTSSSSWVKTDGETPQDQVFINFRGVELRKNFVSHLEKGLKRKGINAFIDTDEEMGQELSVLLERIEGSRIALAIFSPRYTESKWCLKELAKMKERTEQKELVVIPIFYKVQPVTVKELKGDFGDKFRELVKSTDKKTKKEWKEALQYVPFLTGIVLDEKSDEDEVINIIIRKVKEILNRRSEGPPSKCSALPPQRHQKRHETFWGIELRIKQLEEKLRFGSDETTRTIGVVGMPGIGKTTLATMLYEKWNDRFLRHVLIRDIHEASEEDGLNYLATKFLQGLLKVENANIESVQAAHEAYKDQLLETKVLVILDNVSNKDQVDALLGERNWIKKGSKILITTSDKSLMIQSLVNDTYEVPPLSDKDAIKHFIRYAFDGNEGAAPGPGQGNFPKLSKDFVHYTKGNPLALQMLGKELLGKDESHWGLKLNALDQHHNSPPGQSICKMLQRVWEGSYKALSQKEKDALLDIACFRSQDENYVASLLDSDGPSNILEDLVNKFMINIYAGKVDMHDTLYMLSKELGREATATDRKGRHRLWHHHTIIAVLDKNKGGSNIRSIFLDLSDITRKWCFYRHAFAMMRDLRYLKIYSTHCPQECESDIKLNFPEGLLLPLNEVRYLHWLKFPLKEVPQDFNPGNLVDLKLPYSEIERVWEDNKDAPKLKWVNLNHSKKLNTLAGLGKAQNLQELNLEGCTALKEMHVDMENMKFLVFLNLRGCTSLKSLPEIQLISLKTLILSGCSKFKTFQVISDKLEALYLDGTAIKELPCDIGRLQRLVMLNMKGCKKLKRLPDSLGQLKALEELILSGCSKLNEFPETWGNMSRLEILLLDETAIKDMPKILSVRRLCLNKNEKISRLPDLLNKFSQLQWLHLKYCKNLTHVPQLPPNLQYLNVHGCSSLKTVAKPLVCSIPMKHVNSSFIFTNCNELEQAAKEEIVVYAERKCHLLASALKRCDESCVPEILFCTSFPGCEMPSWFSHDAIGSMVEFELPPHWNHNRLSGIALCVVVSFKNCKSHANLIVKFSCEQNNGEGSSSSITWKVGSLIEQDNQEETVESDHVFIGYTNCLDFIKLVKGQGGPKCAPTKASLEFSVRTGTGGEATLEVLKSGFSFVFEPEENRVPSPRNDDVKGKVKINKTPSANGCFKDQAKGNESPKGQWQTYIENSSTNIPSEAHSSQKTGFNGFNGMYSVCVLYEMYSH

SEQ ID NO: 102251 - DNA, 3633 bp, Arabidopsis thaliana
  CDS (1)..(3633)
atggctattgcagaggtgattggtttcttcacacttgtttgtgtaatttggtattgggtttacaaaaagcacaagaatttgcagctgaagatatgcagatcatcaatcgagtcttcttcttcttcgtcgtccctttcatctcctccatctctttcgtctcctatatctcgaacctggacacaccaagtctttccgagcttccgcggggaagacgtacggaaagggtttcttagtcatatccagaaggagttcaaaagcaaaggaatcgttccctttattgatgacgaaatgaagagaggcgaatcgatcggtccggggctgtttcaggccattagagaatcaaagatagcaattgtcttgctctcaaagaactacgcttcgtctagctggtgcctcaacgaattggtggagattatgaattgcagggaagagattggtcaaacggtgatgactgttttctatcaagtggatccatctgatgtgagaaaacagaccggagatttcggtaaagcctttaagaaaacctgtgttggcaaaacacaagaggtgaagcagagatggagtcgagctttgatggacgtcgcaaacatactcggacaagattctcgcaaatgggataaagaagcggacatgattgtgaaagttgcaaaagatgtatcagacgtcttgagctatacgccgtcgagggattttgatgactatgttggaatccgtcctcatatcacaagaatcaattccttgttatgcctagagtctagtgatgtgaggatgatagggatattgggtcctcctgggattggcaagaccaccattgcacgagttttatatgatcaaatctctgaaaagttccagttttctgcctttatagagaacatcagactaagctactggaaaggctggcacgatgagggtaatttggattttccagttgagatcatgactggagaccggcaaaggaagttgaatttacaaagacggcttttgtctgagttattcaaccagaaggatatccaggttcgtcatttaggtgcagttcaggagaggctcagggaccacaaagttcttgtcattcttgatggcgtcgatcaattagagcagctaactgcattggcgaaagaaactcagtggttcggctatggaagtaggattatcatcacaacacaagatcaaaggcttttgagagcgcatgagatcaaccatgtttacaaggtggacctccctgctacagatgaagctctccagatcttctgtctgtatgcttttggtcaaaagttcccatatgatggttttaagaaacttgctcgggagtttactgcacttgcaggtgaacttcctctaggtctaagagttttgggatcttatttgcgaggaatgtccttggaggagtggaaaaacgcactaccacggttaaggactagccttgacggtgaaattgagaaaactctaagatttgcctacaatgtcttgagcgataaagataaatctctttttctccatatagcatgtttgttcaacggctgtcaagttaatcatgtgaaacagtggcttgctaacagcagtttggacgttaaccatggctttgaagtcttgagcaataagtctctcatatctacagatatgggactcgtacggatgcattctttgcttcaacaactaggtgttgacattgtccgtaaacaatctattggagagcctgaaaaacgtcagtttttagttgacgttaatgagatttctgatgttatcaccgacaatacaggcactgggactattctaggcataatgcttcatgtctctaagatcgaggatgtattagttatagaagaaacggtgtttgataggatgactaatctccagtttttaatattggacgagtgtttgagggataagttgaacttaccactaggcctgaattgtctaccccgtaaaatcaggttattgcgttgggactattgtccgttgagcatttggccctctaagttctctgcaaagtttctcgttgagcttatcatgcgggcgaacaaatttgaaaaactgtgggaaggaattcagccacttaaaaatctcaaaaggatggagctgggtgacgccaggaacctgaaagagattccagatctctcaaatgccactaacctcgagtcattgcttctctctttttgcactagtctgttggaaattccttcctctattagaggcaccactaatctcaaggaattggatctcggtggttgcgcaagtctggtgaagctctcttcctgtatttgtaatgccactagtctcgaagaattgaatcttagtgcttgctcaaatttggtggagctcccctgtgctcttcctggcgacagcaatatgagatctctgtctaaacttcttttgaacggaagctcacggttgaaaacttttccagagatctccacaaacatccaagaactcaatctgagtggtacagcgatagaagaagtgccttcatcgatcaggttgtggtctcgtctcgataaattagatatgtcgcggtgcaaaaacctgaagatgtttccacctgttcctgatggaatttcagtgctaaacttgagtgagacagaaatagaagacattcctccgtgggtcgagaatctctctcagcttcgacacttcgttatgatcagatgcaagaagctggacaacatctcattatcaagaatttccaagatggaaggtgttcattgtctgcaaattactcgtggtgatgaggatgtctctggtgattcgatagtaaacatcaggtggtactctaacttcccaaaccaatggactttacagtcggatatgttacaaatttgtctgccagagttggtttatacttccccagtgtccctacacttcatcagtaatgaattcaagactattccagattgcatcaaaaatctttctcaactacatcagctttcgttctatagatgccataagcttgtatcgctgccgcaactttcagactgcctctcatctctagatgcagaaaattgtgtgtcacttgagacaatagatggctcctttcacaatccagatatccgtctgaattttttaaactgcaacaacttgaatcaagaagcaagagaactcatccagaaatcggtttgcaaacatgctctgttaccttctggagaagttcctgcatacttcattcatcgagctattggagattccgtaacaattcatttgaaagagaggcatcttcctctatatttgatatttaaggcttctctagtgctgttcaatgacgatgaaatcaattacgattacgatgatgacgatgatgatgactatgacgaggaggtcatagtctatggtgattatgatagttaccctcatagcgatgattataccaaacaggagaccatgaggttatcttgtcgtgtcgaaggcaaacagaatggcctcactattcagtatggatctagtgtgcaccttctaccaactccgcataggtatacagagcatgtgtatatatttgaagcttctttctccctaggcgagtgcaacagtcctgaagcagaaagcgagcttgtctttgacttcaaggttcacgattacttttgggcgataaaagagtgtggtcttcgactcttggagctccctcatgctcatggagacgattga

SEQ ID NO: 102252 - protein, 1210 aa, Arabidopsis thaliana
MAIAEVIGFFTLVCVIWYWVYKKHKNLQLKICRSSIESSSSSSSLSSPPSLSSPISRTWTHQVFPSFRGEDVRKGFLSHIQKEFKSKGIVPFIDDEMKRGESIGPGLFQAIRESKIAIVLLSKNYASSSWCLNELVEIMNCREEIGQTVMTVFYQVDPSDVRKQTGDFGKAFKKTCVGKTQEVKQRWSRALMDVANILGQDSRKWDKEADMIVKVAKDVSDVLSYTPSRDFDDYVGIRPHITRINSLLCLESSDVRMIGILGPPGIGKTTIARVLYDQISEKFQFSAFIENIRLSYWKGWHDEGNLDFPVEIMTGDRQRKLNLQRRLLSELFNQKDIQVRHLGAVQERLRDHKVLVILDGVDQLEQLTALAKETQWFGYGSRIIITTQDQRLLRAHEINHVYKVDLPATDEALQIFCLYAFGQKFPYDGFKKLAREFTALAGELPLGLRVLGSYLRGMSLEEWKNALPRLRTSLDGEIEKTLRFAYNVLSDKDKSLFLHIACLFNGCQVNHVKQWLANSSLDVNHGFEVLSNKSLISTDMGLVRMHSLLQQLGVDIVRKQSIGEPEKRQFLVDVNEISDVITDNTGTGTILGIMLHVSKIEDVLVIEETVFDRMTNLQFLILDECLRDKLNLPLGLNCLPRKIRLLRWDYCPLSIWPSKFSAKFLVELIMRANKFEKLWEGIQPLKNLKRMELGDARNLKEIPDLSNATNLESLLLSFCTSLLEIPSSIRGTTNLKELDLGGCASLVKLSSCICNATSLEELNLSACSNLVELPCALPGDSNMRSLSKLLLNGSSRLKTFPEISTNIQELNLSGTAIEEVPSSIRLWSRLDKLDMSRCKNLKMFPPVPDGISVLNLSETEIEDIPPWVENLSQLRHFVMIRCKKLDNISLSRISKMEGVHCLQITRGDEDVSGDSIVNIRWYSNFPNQWTLQSDMLQICLPELVYTSPVSLHFISNEFKTIPDCIKNLSQLHQLSFYRCHKLVSLPQLSDCLSSLDAENCVSLETIDGSFHNPDIRLNFLNCNNLNQEARELIQKSVCKHALLPSGEVPAYFIHRAIGDSVTIHLKERHLPLYLIFKASLVLFNDDEINYDYDDDDDDDYDEEVIVYGDYDSYPHSDDYTKQETMRLSCRVEGKQNGLTIQYGSSVHLLPTPHRYTEHVYIFEASFSLGECNSPEAESELVFDFKVHDYFWAIKECGLRLLELPHAHGDD

SEQ ID NO: 102253 - DNA, 3315 bp, Arabidopsis thaliana
  CDS (1)..(3315)
atggctttttcatcaccgtctgacttcaagagataccatgtcttttcgagtttccatggaccagatgtccgtagtggatttctcagtcatttacacaatcacttcgaaagcaaagggatcactccgttcaaggatcaagagatcgagagaggccatacgatcggacctgagctcatacaagcgattagagaatctagagtctcgattgtggtgctttcagagaagtacgcttcttcgtgctggtgcttagatgagttggtggaaatcttgaagtgcaaagaagcttcggggcaagttgtgatgactattttttacaaagttgatccgtccgatgtacggaaacagcggggagacttcggaagtactttcaagaaaacatgtgaagggaaaacctggatagtgaagcagagatggatcaaagctttggaatatatagcaaccgtagctggagaacactctctaagctgggctaatgaagcagagttgatccaaaagattgctacagatgtttcaaacaaacttaatcttacaccgtcgagggattttgaggggatggtgggacttgaagctcatttgacaaaactggactcttttttatgccttgagagtgatgatgtaaagatgattggcatttggggtcctgctggaattggtaagactaccattgctagagctttatttaaccaactctctaccggttttcggcttagttgttttatggggaccattgatgttaatgactatgattcgaagttgtgtttgcaaaacaagcttctgtccaaaattttgaaccaaaaggatatgaagatacatcatttaggcgcaattgaagaatggctacataaccaaagagttcttatagttcttgatgatgtggatgatctagagcaactagaggtattggctaaagaaagttcttggttcggtcatggaagtcggatcattgtttccttaaatgatagaaagattttgaaggcacatgggatcaacgatatctacgatgtggattttccatccgaagaagaagctcttgagatcttatgtctatctgctttcaaacaaaattctccacaagatggttttgaagaggttgcaaaaagagtagtagagctttgcggtaagcttccattgggccttcgtgttgtgggttcttctttttatggggagagcgaggatgagtggagaattcaattatatggaattgaaactaatcttgataggaaaattgagaatgtcttgagagtgggatatgacaaattgtcggagcgacatcaatctttgtttcttcatattgcatgctttttcaaccataaaagtgttgattatgtgacaaccatgctcgctgacagtactttggatgtcgaaaatgggttaaagaccttagccgctaaatctcttgtgtctactaatggatggataacgatgcactgtctactacaacaattgggtagacaagttgttgttcaacagggtgacccggggaaacgtcagtttttagtagaggccaaagagattcgcgatgtcttggcaaatgaaacaggtactgaatccgtcataggtatatcgtttgacatttcgaagatcgagacgttatctataagcaagcgagcctttaatagaatgcgtaatctcaaattcttaaatttctataatggaagtgttagcttgttagaggacatggaatatctacctcgtctaaggttactttattggggttcatacccgagaaaaagtcttcctctgacatttaagccagaatgtctcgtcgaactctatatgggattcagcaagttggagaagctatggggaggaatccagcccctcacaaatctaaagaaaataaatttgggatattcctctaatttgaaagaaatcccaaatctttcgaaagccactaacctcaagacgttgacgcttaccggttgtgagagtttggtggagattccatcctctatttggaatctacagaaactggaaatgctgtatgcgtcaggatgcattaagctacaagttattcccaccaacatcaacttagcatctcttgaggaagtcaacatgagtaattgctcacgtctgagaagttttccagatatatctagtaacattaagcgtctctatgtagcaggcacaatgattaaagaatttcctgcatccattgttggacactggtgtcgtcttgattttcttcagataggcagcagaagcctcaagagattaacacatgtcccagagagtgtaacacatctagacctacgcaacagtgatataaagatgatcccagattgcgtcataggtcttccgcatctagtatctcttctcgtcgaaaactgcacaaaactggtgtcaattcagggtcattccccttcgctggtgaccctatttgcagaccactgtatatcactcaagagcgtatgctgctctttccacggaccaatctcgaaattgatgttctacaactgtctgaaactggataaggaatcaaaaagaggaatcatacaacaatcgggtaacaagtctatatgcttgccaggtaaagaaatccctgcagagttcactcaccaaactatagggaacttgataaccatctccctggctccaggttgtgaggaggcttattctacgttctcaagatttaaggcttgcctcctgctttcgccaatcaagaatttcgcatttaataagataaattgttttctaagaagcaaaggtgtcgaaattagtcgcactacagagtctatatatccttttgtgtctggtggatctctatcagaacatctgtttatcttttgtggcgacttatttcctgaagaaaacagaagccttatggacgtgactccgaacgagattctgtttgatttcagctccagtgatgtcgagattgtggaatgtggtgtaaagatctttttaagtagtggcattgaagtgggctactgtgaaactggaggcaacagaaaccaccacatagatggagaagcagaagcgtttaaggtaactcaagttgaaaacagtaaacatacaggccactggagttggcttaggaagcttcgtctggggaagaagaagatgaagaataataagacagagcttagttcgagaccagtctcaggatttagtgatcttactcggggaatctttataaggtatcaggagcctgaagctgttgagctcactaaagatgaaagaatcacagatctttcgagtttactatgtattggttcccttgtggtctgtttttttctttctgtttttttcgggcaaccccttgtggtctctgttttgttgcttttttcttgcttctttcttcagatgcaatga

SEQ ID NO: 102254 - protein, 1104 aa, Arabidopsis thaliana
MAFSSPSDFKRYHVFSSFHGPDVRSGFLSHLHNHFESKGITPFKDQEIERGHTIGPELIQAIRESRVSIVVLSEKYASSCWCLDELVEILKCKEASGQVVMTIFYKVDPSDVRKQRGDFGSTFKKTCEGKTWIVKQRWIKALEYIATVAGEHSLSWANEAELIQKIATDVSNKLNLTPSRDFEGMVGLEAHLTKLDSFLCLESDDVKMIGIWGPAGIGKTTIARALFNQLSTGFRLSCFMGTIDVNDYDSKLCLQNKLLSKILNQKDMKIHHLGAIEEWLHNQRVLIVLDDVDDLEQLEVLAKESSWFGHGSRIIVSLNDRKILKAHGINDIYDVDFPSEEEALEILCLSAFKQNSPQDGFEEVAKRVVELCGKLPLGLRVVGSSFYGESEDEWRIQLYGIETNLDRKIENVLRVGYDKLSERHQSLFLHIACFFNHKSVDYVTTMLADSTLDVENGLKTLAAKSLVSTNGWITMHCLLQQLGRQVVVQQGDPGKRQFLVEAKEIRDVLANETGTESVIGISFDISKIETLSISKRAFNRMRNLKFLNFYNGSVSLLEDMEYLPRLRLLYWGSYPRKSLPLTFKPECLVELYMGFSKLEKLWGGIQPLTNLKKINLGYSSNLKEIPNLSKATNLKTLTLTGCESLVEIPSSIWNLQKLEMLYASGCIKLQVIPTNINLASLEEVNMSNCSRLRSFPDISSNIKRLYVAGTMIKEFPASIVGHWCRLDFLQIGSRSLKRLTHVPESVTHLDLRNSDIKMIPDCVIGLPHLVSLLVENCTKLVSIQGHSPSLVTLFADHCISLKSVCCSFHGPISKLMFYNCLKLDKESKRGIIQQSGNKSICLPGKEIPAEFTHQTIGNLITISLAPGCEEAYSTFSRFKACLLLSPIKNFAFNKINCFLRSKGVEISRTTESIYPFVSGGSLSEHLFIFCGDLFPEENRSLMDVTPNEILFDFSSSDVEIVECGVKIFLSSGIEVGYCETGGNRNHHIDGEAEAFKVTQVENSKHTGHWSWLRKLRLGKKKMKNNKTELSSRPVSGFSDLTRGIFIRYQEPEAVELTKDERITDLSSLLCIGSLVVCFFLSVFFGQPLVVSVLLLFSCFFLQMQ

SEQ ID NO: 102255 - DNA, 3117 bp, Arabidopsis thaliana
  CDS (1)..(3117)
atggcttcttcttcgacccacgttaggaaatatcatgtcttcccgagcttccacggctcagacgttcgtagaaaatttctcagtcatttacgttttcactttgcaatcaagggaatcgtggcatttaaagaccaagagattgaacgaggccagaggatcggacctgaactggtgcaagcaatacgagaatctagagtgtcgctggtggtgctatctaagaattacccttcttcaagctggtgtttagatgaattggtagaaatcttaaaatgcaaagaagatcaggagcagattgtgatgcctatattttacgaaatcgacccgtctgatgtacggaaacagagcggtgatttcggaaaggcgtttgggaaaacttgtgtaggtaaaactaaggaggtgaagcagagatggaccaacgctttgactgaggcggcaaacataggaggagaacattctctaaactggactgatgaagctgagatgattgaaaagattgtcgcagatgtttcaaacaaactgaatgtcataccatcaagggattttgaagagatggtgggacttgacgctcacttgaggaaattggactctttgttatgtctcaattctgatgaagtgaagatgattggaatttggggtcctgcaggaattggtaagactaccattgctagagctttatacaaccaactctctacgaattttcaatttaaatgctttatgggaaacctcaaaggaagttataagagcattggtgttgataactatgattggaagttgaatttacaaaaccaacttctgtccaagattttgaaccaaaatgatgtgaagacagatcatttagggggaataaaagactggctagaggataaaaaagttcttatagttattgatgatgtggatgatctagagcaactattggcattggctaaagaaccttcttggtttggttccggaagtcgaatcatcgttaccacaaaagataaaactattatgaagacacttttggtcaacgacaacaacttttaccatgtcggttatccaaccaataaggtagctcttgagatcctctgtctgtctgcttttcagaaaagttttccacgggatggttttgaagagcttgcaagaaaagtagcttatctttgtggtaatcttccattatgcctttctgttgtgggttcatctttgcgtggccagagcaagcatagatggaaactacaatcggataggctagaaactagtcttgatagaaagattgaggacgtattaaaatcggcatatgaaaaattgtccaagaaagagcaagttctctttcttcacattgcatgcttcttcaacaatacatacattagtgttgtgaaaacgttacttgctgatagtaacctggacgtcagaaatgggttgaagaccctagccgataaatgtcttgtacatatatccagggttgaccggatatttatgcatcctttgcttcaacaattaggtagatacatagttcttgaacagtccgatgagcccgagaaacgtcagtttctagtagaggccgaagagattcgtgatgtgttggcaaatgaaaccggtactggatctgtattaggaatatcatttgacatgtctaaggtcagtgagttctctataagtgggcgagcctttgaagcaatgcgtaatcttcgattcttaagaatttatcggagaagttctagtaaaaaggttacattacggatagtagaagacatgaagtatctacctcggctaaggttactacattgggaacattacccaagaaaaagtcttcctcggagattccagccagaacgtctcgtggtactccatatgccacacagcaatctagagaagctctggggaggaatccagtcccttacaaatctcaagaatatagatttgagcttttcgcgtaagttgaaagaaattcctaatctttcaaatgctactaatcttgagacattgacacttattaagtgctcaagtttggtggagcttccctcttccatttcgaatctacaaaaactgaaagcgttgatgatgtttgggtgtaaaatgttaaaagttgttccaaccaacatcaacttagtatctcttgagaaagtcagcatgactctgtgctcacagttgagcagttttccagatatttcgaggaacatcaaatctcttgatgtaggaaaaacaaagatagaagaagttcctccatcagttgttaaatattggtctcgtcttgatcaacttagcttagaatgccgaagcctcaagagattaacatatgtcccgccaagcataactatgctaagcctaagctttagtgatatagagacgattccagattgcgtcatacgtctcactcggttacgaactcttaccatcaaatgctgcagaaaacttgtttcgttgccaggtcttcctccttccctagagttcctatgtgcaaaccattgtcgatcacttgagagagtacattctttccataacccagtcaagttacttatattccacaattgtttaaaactggatgaaaaagcaagaagagcaatcaaacaacaaagggttgaagggtatatatggttacctggcaaaaaagtccctgcggagttcactcacaaagctacaggaaactccataaccatccctctggctccagttgcggggactttctcggtgtcctcaagattcaaggcttgccttctcttttcgccaatcgaagacttcccaactaatgatataacatgtcgtctaagaatcaaaggaggtgtccaaattaacaaattctatcaccgggtagtgattctagagtcgtctaaaattcgaacagaacatctgtttatattttatggtgacttgttttcagaaaaaataggcgtagatgtgagtacaagcgagattctgtttaaattcagctgcagggataagcacaagatcattgagtgtggtgtacagatctttaaggaggaagctgagagtagcagcagcagcagcgaagaggaatactttgatgctgaaagtagcagcaacgaagaggaatattttgattttgagagtagcagcagcagcgaagaggactactttgatgctgagagtagtagccgcgaatgctggagatggagactatga

SEQ ID NO: 102256 - protein, 1038 aa, Arabidopsis thaliana
MASSSTHVRKYHVFPSFHGSDVRRKFLSHLRFHFAIKGIVAFKDQEIERGQRIGPELVQAIRESRVSLVVLSKNYPSSSWCLDELVEILKCKEDQEQIVMPIFYEIDPSDVRKQSGDFGKAFGKTCVGKTKEVKQRWTNALTEAANIGGEHSLNWTDEAEMIEKIVADVSNKLNVIPSRDFEEMVGLDAHLRKLDSLLCLNSDEVKMIGIWGPAGIGKTTIARALYNQLSTNFQFKCFMGNLKGSYKSIGVDNYDWKLNLQNQLLSKILNQNDVKTDHLGGIKDWLEDKKVLIVIDDVDDLEQLLALAKEPSWFGSGSRIIVTTKDKTIMKTLLVNDNNFYHVGYPTNKVALEILCLSAFQKSFPRDGFEELARKVAYLCGNLPLCLSVVGSSLRGQSKHRWKLQSDRLETSLDRKIEDVLKSAYEKLSKKEQVLFLHIACFFNNTYISVVKTLLADSNLDVRNGLKTLADKCLVHISRVDRIFMHPLLQQLGRYIVLEQSDEPEKRQFLVEAEEIRDVLANETGTGSVLGISFDMSKVSEFSISGRAFEAMRNLRFLRIYRRSSSKKVTLRIVEDMKYLPRLRLLHWEHYPRKSLPRRFQPERLVVLHMPHSNLEKLWGGIQSLTNLKNIDLSFSRKLKEIPNLSNATNLETLTLIKCSSLVELPSSISNLQKLKALMMFGCKMLKVVPTNINLVSLEKVSMTLCSQLSSFPDISRNIKSLDVGKTKIEEVPPSVVKYWSRLDQLSLECRSLKRLTYVPPSITMLSLSFSDIETIPDCVIRLTRLRTLTIKCCRKLVSLPGLPPSLEFLCANHCRSLERVHSFHNPVKLLIFHNCLKLDEKARRAIKQQRVEGYIWLPGKKVPAEFTHKATGNSITIPLAPVAGTFSVSSRFKACLLFSPIEDFPTNDITCRLRIKGGVQINKFYHRVVILESSKIRTEHLFIFYGDLFSEKIGVDVSTSEILFKFSCRDKHKIIECGVQIFKEEAESSSSSSEEEYFDAESSSNEEEYFDFESSSSSEEDYFDAESSSRECWRWRL

SEQ ID NO: 102257 - DNA, 3513 bp, Arabidopsis thaliana
  CDS (1)..(3513)
atggcagcatcttccgaaatactcccggagtcgtggcaagtgttcatcaatttccgaggagcagatttgcgcaacggtttcatcagccatctggcgggagctttgacctcagctggaatcacatactacatcgacacggaagaagtcccgagcgaagatctcactgtccttttcaagaggatagaggaatcggaaatcgcactgtccatcttctcgagcaattatgctgagtcaaaatggtgtttggacgagctcgtgaagatcatggaacaagtaaagaaaggaaagctcagaatcatgcccgtcttcttcaacgtgaagccagaggaggtgagagagcagaacggagagttcggacttaagctttacggagaaggtaaaagcaaacgacccaacatacctaattgggagaacgctttgcggtctgtcccaagcaagataggcttgaatttggcgaattttagaaacgagaaggaactccttgacaagatcattgactccatcaaaaaagtacttgcccgaattacacgagcaagcagagtagcagaatctctaaacgggatctcaaaagactcagaggcaaagaatgtagacacattttcgccaaactccagtgattttccatctacttccattgacgacgacctcagtatcaactcgcctcagtaccaagccacaattccccccgcaagcagggaaggtgaacgtctcaacacgatctctactgtaagttcaactggtagtattgaacatcctccacccaactacggaatagaaccacgccttaaggagatggaagaaaagttagattttgatagcctcgaaactaaaactgttggaattgttgggatgcctgggattggtaaaaccactcttgcagaaacgttgtatagaaagtgggaacacaagtttgagaggagtatgtttttcccagatgccagtaagatggcgaatgaacacggaatgtgttggctgcagaagagattattggaagagctgttgaaggatactaatctcaacataggatatacaacgaatgaacatgagttttgtaaggatgttcttctcctaaagaaagtttttcttgtcatagataatgttagtagcgaggaacagatcgaaactctttttggtaaatggaattggattaaaaatggaagcaagattgttattacgtcaagtgatgagtcaatgctcaagggtttcgttaaagatacttatgtagtcccaagtttgaacagcagagacagtctactgtggtttactaatcatgcatttggtttggatgatgcccagggaaacttggtaaagttgtccaaacactttctgaattatgccaaaggcaacccactagccctcggagcttttggtgtagaactttgtgggaaagacaaggctgattgggaaaagagaataaaaacattgacactaatttccaataagatgatccaagatgtcttgagaagaaggtatgatgaactcacagagaggcagaaagatatttttcttgacgtcgcatgtttcttcaaatcagagaatgaaagttatgtacgacacgtggtgaattcatgtgattctgagtctactaagagttgggatgaaataacagatctcaaaggaaagtttcttgtcaatatttctggtggtcgagttgagatgcatgatatactatgcacattcgccaaggaacttgcttcacaagcattgactgaagatacaagggttcatctcaggctgtggaactatcaagatatcatgtggtttctcaacaatgaattggaaatggaaaatgtcagaggtattttcttagacatgtctaaagttccggaggaaatgacatttgatggtaacatctttagcaatatgtgcaatcttcgatatctcaaaatatacagttctgtttgccataaggaaggcgaaggtatcttcaaatttgacacagttagggaaattcagttaccattagacaaggtacgctatctccactggatgaaatatccatgggagaaacttccatcagacttcaacccggagaatctcgttgatcttgaactgccttatagctccattaagaaagtttgggagggtgttaaggataccccgatactaaagtgggccaatctaagctattcaagtaagttgactaaccttttagggttgtcaaatgctaaaaatcttgaaagattgaatcttgaaggttgcacaagtttgcttaaactgccccaagagatggagaacatgaaaagtcttgtcttcctgaacatgagacgttgcactagtctcacatgtcttcaaagtattaaagtgagctctctgaaaattctcatactcagtgactgctcaaaacttgaggaatttgaggtgatttcggaaaatctggaagaattatatttagatggaactgcaataaagggacttcctccagcggccggggatctgacgagacttgtcgtcttaaatatggaaggctgtacagaactggagagtcttcccaaacgtcttggaaaacagaaagctcttcaagaactggtactctctggatgttcaaagctcgagagcgttccaacggacgtaaaagacatgaaacatctacggctcttattgcttgacggcacaagaatcagaaagatcccgaagataaagtcgctaaagtgtttgtgcttaagtagaaatattgcaatggtcaatctacaagataatctcaaagatttctctaatctgaaatgtcttgtcatgaagaactgcgagaatctcagatatcttccttcgcttccaaaatgtcttgagtacctaaacgtatatggttgtgaaagactagaatcagttgagaatccactggttgctgataggttaacgttattccttgatagatctgaggaattacgttccactttcttgttcactaattgccacaatctgtttcaagatgcaaaggactcaatctcaacctacgcgaaatggaaatgccaccgacttgcagttgaatgctacgaacaggacatagtttctggagcttttttcaacacttgctatcctggatatatagtcccttcgtggttcgatcaccaagcagttggatcagtcttagagccaaggctggaaccacattggtataacactatgctttctgggatagctctatgtgcagttgtatcattccatgagaaccaagatccgatcatcggcagtttctcagtaaaatgcacattgcaatttgaaaacgaagatgggtctcttcgctttgattgtgatatcggatgtttgaacgaaccaggaatgattgaggcagaccatgtttttatcggctatgtcacttgctcacgtttgaaagatcaccactctatacctattcatcaccctacaactgtaaaaatgcagttccacttgactgatgcttgtaaaagtaaagtggtggattgtgggttccgtttgatgtacacccagagccgtggctgtttgttagaggaagaagtcaacgccaacttcactaaattatacttgggtttattgtaa

SEQ ID NO: 102258 - protein, 1170 aa, Arabidopsis thaliana
MAASSEILPESWQVFINFRGADLRNGFISHLAGALTSAGITYYIDTEEVPSEDLTVLFKRIEESEIALSIFSSNYAESKWCLDELVKIMEQVKKGKLRIMPVFFNVKPEEVREQNGEFGLKLYGEGKSKRPNIPNWENALRSVPSKIGLNLANFRNEKELLDKIIDSIKKVLARITRASRVAESLNGISKDSEAKNVDTFSPNSSDFPSTSIDDDLSINSPQYQATIPPASREGERLNTISTVSSTGSIEHPPPNYGIEPRLKEMEEKLDFDSLETKTVGIVGMPGIGKTTLAETLYRKWEHKFERSMFFPDASKMANEHGMCWLQKRLLEELLKDTNLNIGYTTNEHEFCKDVLLLKKVFLVIDNVSSEEQIETLFGKWNWIKNGSKIVITSSDESMLKGFVKDTYVVPSLNSRDSLLWFTNHAFGLDDAQGNLVKLSKHFLNYAKGNPLALGAFGVELCGKDKADWEKRIKTLTLISNKMIQDVLRRRYDELTERQKDIFLDVACFFKSENESYVRHVVNSCDSESTKSWDEITDLKGKFLVNISGGRVEMHDILCTFAKELASQALTEDTRVHLRLWNYQDIMWFLNNELEMENVRGIFLDMSKVPEEMTFDGNIFSNMCNLRYLKIYSSVCHKEGEGIFKFDTVREIQLPLDKVRYLHWMKYPWEKLPSDFNPENLVDLELPYSSIKKVWEGVKDTPILKWANLSYSSKLTNLLGLSNAKNLERLNLEGCTSLLKLPQEMENMKSLVFLNMRRCTSLTCLQSIKVSSLKILILSDCSKLEEFEVISENLEELYLDGTAIKGLPPAAGDLTRLVVLNMEGCTELESLPKRLGKQKALQELVLSGCSKLESVPTDVKDMKHLRLLLLDGTRIRKIPKIKSLKCLCLSRNIAMVNLQDNLKDFSNLKCLVMKNCENLRYLPSLPKCLEYLNVYGCERLESVENPLVADRLTLFLDRSEELRSTFLFTNCHNLFQDAKDSISTYAKWKCHRLAVECYEQDIVSGAFFNTCYPGYIVPSWFDHQAVGSVLEPRLEPHWYNTMLSGIALCAVVSFHENQDPIIGSFSVKCTLQFENEDGSLRFDCDIGCLNEPGMIEADHVFIGYVTCSRLKDHHSIPIHHPTTVKMQFHLTDACKSKVVDCGFRLMYTQSRGCLLEEEVNANFTKLYLGLL

SEQ ID NO: 102259 - DNA, 3786 bp, Arabidopsis thaliana
  CDS (1)..(3786)
atggcgacttcctcctcaaacgtagtggttcaccagcagcagccgccgccgcaacataaagtgttcataaatttccgaggagctgagctgcgacacaagttcatcagtcatctactgaaagccttggagagggaaagaatcaacgtgttcatagacactcgagaaacaatgggcacaggtctggaaaacctattccagagaatacaagagtcgaagattgcgattgtggtcatttcaagcaggtacactgagtcacaatggtgcttaaatgagctggtaaagatcaaagagtgtgtggaggcagggaccttggtggtatttccagtgttctacaaggtggacgttaaaatcgtgaggttcctaacaggatcgtttggtgaaaaattagaaacattagtgttgcgtcatagtgaaagatatgagccatggaagcaggctctagagtttgtgacctcgaagacaggcaagagggtggaggaaaatagcgacgagggtgcggaggttgaacaaatcgtggagcatgtaaaggaaatcctaagaacaatttcaggggagattccacgaggaagagaaagtgaatcgccgagaggagaaggagaaggagaagcagagcctaagactactccttcagatgattctctactccatgggattgaaacaagggtagagcaactaaaagagaagctagagttgaaatctgaaaatgtcactcgctttatcggcgttgttgggatgcctggaataggtaaaacgactcttgccaagagactattcagtgaatgtggaaaacatttcctgcataagatgtttctagatgacgtgagccagaagccagagccttttttagacgagacgctgcacacggacctattgctcgggttatggaagagcaaaaacaatgggagagatggaaatagagccaagttatcgattgactacataaagactcaactacaaggaaaaaaagtttttgttgttcttgacaatgtgggtgacaagagtcagatagataagattcttggtgggtgtgactggataaaagcaggaagcagaattgtgatcacaacgagcagcaaatcggtgattcaaggactcaacagcacttatctcgtcccggggctgagtagctgtgatgccctaaaccatttcaactatcacgcgttttctgctagtgacggtttctaccagccaagtttcacggatcttgcaaaacagtttgtggattactctatgggacatccatcagttctcaagctgcttgctcgtgagcttcgtagtaaagacgagagttactggaaagaaaagcttagtgctcttgctaatagcccaagcaacacgattcaagatgttttgagaataccttatgacgagcttaaggagcagcacaagatcgtgttcctcgacattgcctatttcttcaggtttgagaatgagagttacgtgaggagattgcttggttcttcggctcacgcagatgcgagtgaaataactgatctagccgataagtttttgatcgacattagtggcgatcgtgtcgagatgaatgatctgttgtatactttcgcgataggtctgaattcgcaagcatcctctgaaaatacaacaagtgagcgtaggctctcaaagcactctgagattgttgatgttctcatgaacaaagcggaagcaaccaaggtcagaggagtttaccttgacatgttcgaggtaaaggaaatgggcttagacagtgacacgttcaacaaaatggatgatctcagatacttgaagttctacaattctcattgtcatagagaatgtgaagctgaagacagcaaactaaacttccccgagggactcgagttcctgccgcaagagcttcgatatcttaactggcttaaatatccggagaagaaccttcctataaattttgacccaaagaatcttatcgacctcaagctgccttatagtcagattgagcagatttgggaggaggagaaggatacatccaacttacagtggctggatctgaatcattcaagtaagctgcactcattatcgggtttatcgcgggctcaaaagcttcaaagtataaaccttgaaggctgcacgggactgaagacgcttcctcaagtgctgcagaacatggaaagtctcatgttcctgaatctgagaggatgtacgagcctcgagtctcttccagatataacattggttggtctaagaactttaatcctcagcaactgctcaaggtttaaggaattcaagctgattgcaaagaatcttgaagaattgtacttagatggcactgccattaaggaacttccttcaacaatcggagacctccaaaagcttatctcgctgaaactgaaagactgcaagaatctgttgagtctccctgactctataggaaacctaaaagctattcaagaaataatactctctggttgttcaagccttgagagtttcccagaagttaaccaaaacttgaaacacttaaagactttactactagacggaacagccataaagaagattcctgacattttgcatcacctatctcctgatcaaggcctgacatcttcccaatcaaactgccatttgtgtgaatggccgcgtggaatctacggattatcgtcagtgcgacgtttatctctgagcagtaatgagttcagaatcttgccgaggagtattggttatctctaccatctaaactggcttgacttgaagcactgcaagaatcttgtctctgttccaatgcttccaccaaatcttcaatggttagacgcacacggctgcatttcattggaaacgatttccatcctttcagatcctcttctggcggaaacagagcatttgcactccacatttatcttcactaactgtaccaaactttataaagttgaggagaatagcatcgaatcctaccctcggaagaaaatccagttgatgtcaaacgcactagctcgctatgaaaagggattagctctcgatgttctgatcggaatctgctttcccggatggcaagtgcccgggtggttcaatcatcgaacggttggattagagttgaagcaaaacctgccgcgacattggaacgcaggcgggcttgccggtatagctctttgtgctgtggtctcattcaaggactacatatcaaagaataacaggctcttagttacatgtagcggtgagttcaaaaaagaagacaagactttgttccagtttagttgcattcttggtggttggactgaacatggaagctatgaagcccgcgagatcaagtctgatcatgtctttatcggctacaccagctggttgaatttcatgaaaagtgacgacagtataggatgtgttgcaaccgaggcttcactaagattccaagttacggacgggacaagagaggttacaaactgcactgtcgtcaagtgcggctttagtctcatctattcacacactaatgttgatcatagcttgtgtacagacaattattctgatgtaactacaactaccagtgggggtacaagctccggttcaataacggacgttggagaaagttgttaccaaaatggaagtgaagaaatcatagaggaagcaatgcttttcgcagcttcaagagaagttgaagaagaagaagacacagagagcttagtgacattaagctcactaatgggagaaagtccaaagagaagtgagaagaaggtactgatgagtgtccgtaatggttccactagagaggtagcgatagagagggacgttaacaacgcacattgcctttcgtttttaaatgtgtttagattttggcgggattga

SEQ ID NO: 102260 - protein, 1261 aa, Arabidopsis thaliana
MATSSSNVVVHQQQPPPQHKVFINFRGAELRHKFISHLLKALERERINVFIDTRETMGTGLENLFQRIQESKIAIVVISSRYTESQWCLNELVKIKECVEAGTLVVFPVFYKVDVKIVRFLTGSFGEKLETLVLRHSERYEPWKQALEFVTSKTGKRVEENSDEGAEVEQIVEHVKEILRTISGEIPRGRESESPRGEGEGEAEPKTTPSDDSLLHGIETRVEQLKEKLELKSENVTRFIGVVGMPGIGKTTLAKRLFSECGKHFLHKMFLDDVSQKPEPFLDETLHTDLLLGLWKSKNNGRDGNRAKLSIDYIKTQLQGKKVFVVLDNVGDKSQIDKILGGCDWIKAGSRIVITTSSKSVIQGLNSTYLVPGLSSCDALNHFNYHAFSASDGFYQPSFTDLAKQFVDYSMGHPSVLKLLARELRSKDESYWKEKLSALANSPSNTIQDVLRIPYDELKEQHKIVFLDIAYFFRFENESYVRRLLGSSAHADASEITDLADKFLIDISGDRVEMNDLLYTFAIGLNSQASSENTTSERRLSKHSEIVDVLMNKAEATKVRGVYLDMFEVKEMGLDSDTFNKMDDLRYLKFYNSHCHRECEAEDSKLNFPEGLEFLPQELRYLNWLKYPEKNLPINFDPKNLIDLKLPYSQIEQIWEEEKDTSNLQWLDLNHSSKLHSLSGLSRAQKLQSINLEGCTGLKTLPQVLQNMESLMFLNLRGCTSLESLPDITLVGLRTLILSNCSRFKEFKLIAKNLEELYLDGTAIKELPSTIGDLQKLISLKLKDCKNLLSLPDSIGNLKAIQEIILSGCSSLESFPEVNQNLKHLKTLLLDGTAIKKIPDILHHLSPDQGLTSSQSNCHLCEWPRGIYGLSSVRRLSLSSNEFRILPRSIGYLYHLNWLDLKHCKNLVSVPMLPPNLQWLDAHGCISLETISILSDPLLAETEHLHSTFIFTNCTKLYKVEENSIESYPRKKIQLMSNALARYEKGLALDVLIGICFPGWQVPGWFNHRTVGLELKQNLPRHWNAGGLAGIALCAVVSFKDYISKNNRLLVTCSGEFKKEDKTLFQFSCILGGWTEHGSYEAREIKSDHVFIGYTSWLNFMKSDDSIGCVATEASLRFQVTDGTREVTNCTVVKCGFSLIYSHTNVDHSLCTDNYSDVTTTTSGGTSSGSITDVGESCYQNGSEEIIEEAMLFAASREVEEEEDTESLVTLSSLMGESPKRSEKKVLMSVRNGSTREVAIERDVNNAHCLSFLNVFRFWRD

SEQ ID NO: 102261 - DNA, 3696 bp, Arabidopsis thaliana
  CDS (1)..(3696)
atggtgacatcttccgacgtcaaagtagaaccacaagtgtttatcaatttccgaggagatgagctacgcaagaccttcatctcccatctccataaaagattgcaacgcgatgggatcaatgcttttatagactctgatgaagctgttggcgaagaactcaaaaaccttttcaaaaggattgagaattcggagatcgcactggcggttttatcgagtaggtacacggagtcacattggtgtttgcaggagctagttaagatgatggaatgtagtatgaaaggtgaaggatgcaataaaaaattattggtcattccaattttttacaagctgaagatagacacggtgaaagagcttgatggagatttcggtcgtaatctgtgggatctctggaggaagccgggttgcggtcgtgatcgagacagccggattgttaagtggaacgaggctttgaagtactttctcagcagaaatgccttggtattttcagaaactggaaaggaagaggaattcgtgtctacgatcgccacacatgttaaaaatgccctaagcaaaattacgccgcaaagaggagaaaacccgaaaccacagaaaggagcaggaaaccctaagccccaaaaaattcttagcagagcagcaaacattactgaaccagaggatcaacgccttaagcaactagcagtaaagttgaatgtggagtgcaatgacaacgaaactcgtattgttgaagtcgtagggatgcccggaatcggcaaaacctatctcgccaagaaactcttcgccaagcttaagaagaagatcaaccattgtgtgttcatcgagttcaagcgtgagatgtcagcggagcaaggatcagagtggctacagaagagacttgtggaaggtttgctggatattcaagattgcaccgatacaaatgcacttgaggtttggaaggatagcttaatcgacaagaaagtcgtgattgttttcgatgatgtgagtgacaaaaaacagatatccgaaccacttaagggtatctgcgactggattaagaaggggagcatgatcgtcatcacgacacgggacaagtcattgactgagggattagtcactgatctttatgaagtccctgggttgaatgagagagacggcttagagctctttagggctcaagtctgttgtaatattgaaggaaatttcatggagctatctagaaagtttgtggattttgcacgaggcaaccccttagctctcgaggaattcggtaaggagcttcgcgggaaagacgaggctcactgggaaacaagacttgggacactggcacagcattccaatccaacgatcagagagaagctaagaagctcttatgatgaactaaacgagcagcagaaggatgcgtttcttgatatagcttatttctttaggtcacaagatgagagctacgttagaagtttacttgattcttatgaccctgaatccgcggaatctggtcaagaatttagagacctcgcagacaaattcttgattggcgtgtgtgatggtcgagttgagatgcatgatctattatttacaatggccaaggagattgttgaagctactgcagagaaatcaagattgttgctgtcgagttgtgcagagttgaaaaataaagagttgtctcttgatcaacagggaagagacaaggttagaggaattgttttagacatgtctgaaatggaggaaaagcccttaaagagagcagtttttgtcggtatgagcagtctacggtacctgaaagtctacagttctctttgtcctactcactctaaaactgagtgcaagttacacttacctgatggacttgaatttccaaaagataatattgtccgatgtcttcactgggtgaaatttccagggacagaacttccaccagacttttaccccaataatctcatcgatcttaggttaccttacagcaatattaccactctatggagctgtactaaggttgcacctaatctgaagtgggttgatctcagccactcgagtaacttgaattccttgatgggtttatcagaagcaccaaatcttttgagattaaatcttgaaggctgcacaagtttaaaggagttacctgatgagatgaaagatatgacgaatcttgttttcctgaacttaagaggatgcacaagcctcttgtctctaccaaagatcactacgaattccttgaagactctcattcttagcggctgctcaagctttcagacatttgaggtgatttcagaacatctagagtctctatacttaaacggcacagagataaatggacttcctccagccattggtaatctccatagacttatctttttaaatttgaaagattgcaaaaatctagcgactcttcctgattgtcttggggagcttaaatctcttcaagaactcaaactctctcgctgctcaaagctcaaaattttccccgatgttacggcgaaaatggaaagtttgctggttttactgctcgatgggacatcaatagcagagttgccatgcagcatttttcacttatcttctctgcgacgtctatgcttaagcaggaatgataatatccgcacccttcgatttgacatgggtcacatgttccatctgaagtggcttgagttaaagtattgtaagaatctcacatctcttcccatacttccaccaaatcttcagtgcttaaatgcacatggctgtacttcactaagaacagtcgccagcccgcaaacccttcctacaccaacagagcagattcattccacctttattttcactaactgtcacgaactagaacaagtctcaaagaatgctatcatttcttacgttcagaaaaaaagcaaattgatgtcagctgatcgatatagtccggattttgtttacaaatccttgattggtacttgctttccgggatgtgagatacctgcatggtttaatcaccaagcactgggatcagtcttaatcctggaacttcctcaagcttggaattcaagtaggataatcgggatagctctatgtgttgtagtctcgtttaaggagtatagagaccaaaacagcagtctccaagtgcagtgcacgtgtgagtttacgaatgtatccttgagccaggaaagcttcatggttggtggctggtctgaacaaggcgatgagacacatacggttgagtcagaccatattttcattggctacaccactttgcttaatataaagaaccgtcaacagtttccattagctactgaaatttcccttcgatttcaagtgacaaatggtacaagcgaggtcgaaaaatgcaaggtgataaagtgtggcttctctttggtgtatgagcctaatgaagctgatagcacatcttggaaggaaactccaaggatggaggataatagacaagaccggagaatctcttttaaaactggagaaggtgatgactgccccattgcaactccaacaacagcggattctaagaagggcaatagtttgttcagttactttctggggagagatacatctattacaaaaaaaggttttaagattccgaagcagattgacgtgggtatgaggaagtacagccaaatgaagtttcagaacgaacaagttgaagtagagcattttcccggaaatgagcaaaaggctaacattttgaaaaatgcacttggaagaatcaaatttaaggagacgagagatgtcgttggagttcaagatgtgtga

SEQ ID NO: 102262 - protein, 1231 aa, Arabidopsis thaliana
MVTSSDVKVEPQVFINFRGDELRKTFISHLHKRLQRDGINAFIDSDEAVGEELKNLFKRIENSEIALAVLSSRYTESHWCLQELVKMMECSMKGEGCNKKLLVIPIFYKLKIDTVKELDGDFGRNLWDLWRKPGCGRDRDSRIVKWNEALKYFLSRNALVFSETGKEEEFVSTIATHVKNALSKITPQRGENPKPQKGAGNPKPQKILSRAANITEPEDQRLKQLAVKLNVECNDNETRIVEVVGMPGIGKTYLAKKLFAKLKKKINHCVFIEFKREMSAEQGSEWLQKRLVEGLLDIQDCTDTNALEVWKDSLIDKKVVIVFDDVSDKKQISEPLKGICDWIKKGSMIVITTRDKSLTEGLVTDLYEVPGLNERDGLELFRAQVCCNIEGNFMELSRKFVDFARGNPLALEEFGKELRGKDEAHWETRLGTLAQHSNPTIREKLRSSYDELNEQQKDAFLDIAYFFRSQDESYVRSLLDSYDPESAESGQEFRDLADKFLIGVCDGRVEMHDLLFTMAKEIVEATAEKSRLLLSSCAELKNKELSLDQQGRDKVRGIVLDMSEMEEKPLKRAVFVGMSSLRYLKVYSSLCPTHSKTECKLHLPDGLEFPKDNIVRCLHWVKFPGTELPPDFYPNNLIDLRLPYSNITTLWSCTKVAPNLKWVDLSHSSNLNSLMGLSEAPNLLRLNLEGCTSLKELPDEMKDMTNLVFLNLRGCTSLLSLPKITTNSLKTLILSGCSSFQTFEVISEHLESLYLNGTEINGLPPAIGNLHRLIFLNLKDCKNLATLPDCLGELKSLQELKLSRCSKLKIFPDVTAKMESLLVLLLDGTSIAELPCSIFHLSSLRRLCLSRNDNIRTLRFDMGHMFHLKWLELKYCKNLTSLPILPPNLQCLNAHGCTSLRTVASPQTLPTPTEQIHSTFIFTNCHELEQVSKNAIISYVQKKSKLMSADRYSPDFVYKSLIGTCFPGCEIPAWFNHQALGSVLILELPQAWNSSRIIGIALCVVVSFKEYRDQNSSLQVQCTCEFTNVSLSQESFMVGGWSEQGDETHTVESDHIFIGYTTLLNIKNRQQFPLATEISLRFQVTNGTSEVEKCKVIKCGFSLVYEPNEADSTSWKETPRMEDNRQDRRISFKTGEGDDCPIATPTTADSKKGNSLFSYFLGRDTSITKKGFKIPKQIDVGMRKYSQMKFQNEQVEVEHFPGNEQKANILKNALGRIKFKETRDVVGVQDV

SEQ ID NO: 102263 - DNA, 3654 bp, Arabidopsis thaliana
  CDS (1)..(3654)
atggagacatcatctatttccactgtggaagacaagccaccgcagcatcaggtgttcatcaatttccgtggggcagatttgcgccggagattcgtcagccatctcgtaacggccttgaaattgaacaacatcaacgtctttatcgacgactatgaagacagaggtcaacctctagatgtactgctgaagaggatagaggagtccaaaatcgttttggctatcttctccggcaactacaccgagtcagtctggtgcgtgagagagctggagaagatcaaagattgtacggatgaaggaacactcgttgcgattccaatcttctacaagctggagccatccaccgttagagatttgaaaggaaagttcggtgatagatttaggagtatggctaagggtgatgagaggaaaaagaaatggaaggaagcttttaacttgattcctaacattatgggcatcatcattgacaagaaaagtgtggagagtgagaaagtcaatgaaattgtgaaggcggtgaagacagcgttgaccggaataccaccggagggaagtcacaacgccgtcgtgggtgctttaggtaatagcaacgctggaacttcctcaggagacaaaaagcatgagacttttggaaacgaacaacggttaaaagatttggaagagaagttggatcgtgataaatacaagggaactcgtatcattggagttgttgggatgcccggaattggtaaaaccacactcctgaaagagctatataagacgtggcagggcaagttttcgaggcatgcgctaatcgatcaaatccgtgtaaagtccaagcacttggagttggatcgcttgcctcaaatgctcttaggcgagttgtccaagttaaaccatcctcacgtagacaatctcaaagatccatacagtcaactgcatgaacgcaaagtgcttgttgtacttgatgatgttagtaaaagggaacaaatagatgctcttcgtgagatactagactggattaaggagggtaaggagggaagcagggttgtcattgcaacaagcgacatgtccttaacaaatggtttggttgatgatacttacatggttcaaaatttgaaccacagagatagcttacaactatttcactatcatgcctttattgatgatcaagccaatcctcaaaagaaagatttcatgaagctgtcagaagggtttgtacattacgccagaggccatccactagccctcaaagtattgggtggagagcttaataagaaaagtatggatcattggaattcgaaaatgaagaaacttgcacagagccccagccctaatattgtcagtgtcttccaagtgagttatgatgaattgactacagcgcagaaagatgcatttctcgacatagcctgtttcagatcacaggacaaggattatgtagaaagtctactggcttcatctgaccttggttcggctgaagcaatgagtgcagtcaaatctctcacggataagttcctgattaatacttgtgatggccgagtggagatgcatgatctattatataaattttcaagggaagttgatctgaaggcatctaatcaggatggtagcagacaacggaggctgtggctccatcaacacataatcaagggaggcataatcaatgtattgcaaaataaaatgaaagctgccaatgttagaggtattttcctagacttgtctgaagtggaagacgaaacgagcttagaccgcgaccacttcataaatatgggaaatctccggtatctcaagttctacaattcccattgtccacaggaatgtaaaaccaacaataaaatcaacatccctgataaacttaagctaccattgaaagaagttcgatgcctccactggctgaaattcccattggagacacttccaaacgatttcaacccaattaatcttgtcgaccttaagctgccctacagtgaaatggaacaactttgggagggtgacaaggacacaccatgcttaaggtgggtcgatctcaatcactcaagtaagttgtgcagcttgtcagggttatcaaaagctgaaaagcttcaaaggttgaaccttgaaggttgcacaacactgaaagcgtttccacatgatatgaaaaaaatgaaaatgcttgctttcttgaatctgaaggggtgtacaagtctcgaatctcttccagagatgaatttgatttctctgaaaacacttactctcagcggctgctcaacttttaaggaatttccgttgatttcagataatatagaaactctatacttagatggcacagcaataagtcagcttcctatgaacatggagaagcttcagagacttgttgtattgaatatgaaagactgcaaaatgctagaggaaattccaggccgtgttggtgagctgaaagctcttcaagaactgatactctctgattgtttaaatctcaagattttcccagaaatcgacattagctttttaaacattttacttttggatgggacagccattgaagtgatgccacaattaccctcagtgcagtatttgtgcttaagcagaaatgctaagatcagctgccttcctgttggaatcagtcagctttctcaacttaaatggctggacctgaagtattgtacgagtcttacatcagttccagagtttccaccaaatcttcagtgcttagatgcacacggctgtagttcgctgaagacagtttcaaagcctttggcccgtatcatgccaactgaacagaatcattccacattcattttcaccaactgtgagaacctggaacaagctgcaaaggaggaaatcacatcgtatgctcaaaggaaatgccagctgttatcatatgctcggaaacgctacaatgggggtcttgtttcagaatctttgttcagcacttgctttcctggatgtgaagtgccttcttggttttgtcatgaaacagttggatctgagttagaagtaaaactcctcccacattggcatgacaagaagcttgccgggattgctctatgtgctgtagtctcatgtcttgacccccaagatcaagtcagccgcttgtcagtgacctgcacctttaaagtaaaagatgaagacaagtcttgggtcgcatatacttgtccagtaggaagttggaccagacatggaggcgggaaagataagattgagctagaccatgtcttcattggatacaccagttgcccacatactataaaatgtcatgaagaaggtaactcagatgaatgcaatcctaccgaagcctctcttaaatttactgtgacaggaggtacaagtgagaatggaaaatacaaggtgttgaagtgtggtttaagtttggtgtatgctaaggataaagacaaaaatagtgctcttgaaacaaagtacgatatgcttattggaaagagctttcaagaaacttcagaaggggttgatggaagggtaaagaaaacgaaaggaaagtacgttatgcctgttgaaaagaactttcaagaaactacagaaggggttgatggaagagtaaataaaaagaaaaaaacaagaatggataatggacggccaaagaagaagcagagatcaggaagagatgataatcaaactaggatgcaagtggaactccaagaaggaaatataaattcagtgatcatgcacacggttaagaatttctga

SEQ ID NO: 102264 - protein, 1217 aa, Arabidopsis thaliana
METSSISTVEDKPPQHQVFINFRGADLRRRFVSHLVTALKLNNINVFIDDYEDRGQPLDVLLKRIEESKIVLAIFSGNYTESVWCVRELEKIKDCTDEGTLVAIPIFYKLEPSTVRDLKGKFGDRFRSMAKGDERKKKWKEAFNLIPNIMGIIIDKKSVESEKVNEIVKAVKTALTGIPPEGSHNAVVGALGNSNAGTSSGDKKHETFGNEQRLKDLEEKLDRDKYKGTRIIGVVGMPGIGKTTLLKELYKTWQGKFSRHALIDQIRVKSKHLELDRLPQMLLGELSKLNHPHVDNLKDPYSQLHERKVLVVLDDVSKREQIDALREILDWIKEGKEGSRVVIATSDMSLTNGLVDDTYMVQNLNHRDSLQLFHYHAFIDDQANPQKKDFMKLSEGFVHYARGHPLALKVLGGELNKKSMDHWNSKMKKLAQSPSPNIVSVFQVSYDELTTAQKDAFLDIACFRSQDKDYVESLLASSDLGSAEAMSAVKSLTDKFLINTCDGRVEMHDLLYKFSREVDLKASNQDGSRQRRLWLHQHIIKGGIINVLQNKMKAANVRGIFLDLSEVEDETSLDRDHFINMGNLRYLKFYNSHCPQECKTNNKINIPDKLKLPLKEVRCLHWLKFPLETLPNDFNPINLVDLKLPYSEMEQLWEGDKDTPCLRWVDLNHSSKLCSLSGLSKAEKLQRLNLEGCTTLKAFPHDMKKMKMLAFLNLKGCTSLESLPEMNLISLKTLTLSGCSTFKEFPLISDNIETLYLDGTAISQLPMNMEKLQRLVVLNMKDCKMLEEIPGRVGELKALQELILSDCLNLKIFPEIDISFLNILLLDGTAIEVMPQLPSVQYLCLSRNAKISCLPVGISQLSQLKWLDLKYCTSLTSVPEFPPNLQCLDAHGCSSLKTVSKPLARIMPTEQNHSTFIFTNCENLEQAAKEEITSYAQRKCQLLSYARKRYNGGLVSESLFSTCFPGCEVPSWFCHETVGSELEVKLLPHWHDKKLAGIALCAVVSCLDPQDQVSRLSVTCTFKVKDEDKSWVAYTCPVGSWTRHGGGKDKIELDHVFIGYTSCPHTIKCHEEGNSDECNPTEASLKFTVTGGTSENGKYKVLKCGLSLVYAKDKDKNSALETKYDMLIGKSFQETSEGVDGRVKKTKGKYVMPVEKNFQETTEGVDGRVNKKKKTRMDNGRPKKKQRSGRDDNQTRMQVELQEGNINSVIMHTVKNF

SEQ ID NO: 102265 - DNA, 3438 bp, Arabidopsis thaliana
  CDS (1)..(3438)
atggcttcttcatcttcttctcgaaactggttatatgatgttttcttgagcttcagagggggagacgtccgcgtaacattccgtagccactttctcaaagagcttgatcggaaactgatcactgcattcagagacaatgagatcgagagaagccactctctctggcccgatcttgaacaagccatcaaggattccagaatcgcagtggtcattttctccaaaaactacgcttcatcgagctggtgtcttaacgagttgctggagattgtgaattgcaatgataaaattgtcataccagttttctacggagtggatccttcccaagtgaggcatcaaatcggtgactttggaaagatctttgaaaagacttgcaagagacaaacagagcaagtgaaaaaccaatggaagaaagcgttgactgatgtagctaatatgcttggatttgattctgcgacatgggatgacgaagcaaaaatgattgaagaaatagccaatgatgttttggctaaactgcttttaactacacccaaggactttgaaaattttgttggcatcgaagatcatattgcaaatatgagtgtattgttgaaattggaagctgaggaagtgagaatggttggtatatggggttcctcggggattggtaagactaccattgcaagagctctgtttaaccaactttctcggcatttcccagttagcaaattcatagacagagcttttgtatataagagtagagaaatttttagtagagccaatccggacgaccacaacatgaagttacatttacaagagaaactcctctctgaaattctgaggatgccagacataaagatcgaccacctaggtgtactaggagagaggctacaacaccaaaaagttcttattatcgttgatgatttggatgaccaagtgatcttagattcattggtgggtcaaactcaatggtttggaagtgggagcagaatcattgcggttacaaataataagcatttcttaagggctcatgagattgatcatatttatgaagttagtctcccaactcagcaacacgctcttgcaatgttatgtcaatctgcttttaggaaaaaatctccaccagaaggttttgagatgcttgtagttcaagttgcaagacatgtggatagtcttcctttgggtcttaatgttttgggttcatatttgaggggccgggataaggagtactggatggaaatgctgccaaggcttgagaatggtctacacgataaaattgagaaaatactaagaatcagctatgatggtttaggtagcgaagaggataaagcgatatttcgtcatatcgcatgtcttttcaatcatatggaagtcacaaccatcacgtcgttgctcacagacttgggtattaatattgggctaaaaaacctagtggataagtccatcattcatgtcagacggggttgtgtggagatgcaccgtatgctacaagaaatgggcagaaaaattgttcgcacacagtccattgacaagcctgggaaacgagaatttctggtggatccaaatgatatttctgatgtactcagtgaaggcattggtactcaaaaggttttaggtatatctttaaatacaggtgaaattgatgagttgtatgtacatgagagtgctttcaaagggatgagtaatctccgtttcttagaaattgattcgaagaactttggaaaagcaggtagattgtacttacccgaaagtttggactatttaccccctagactcaaactattgtgttggcccaattttcctatgagatgtatgccttctaattttcgtcctgaaaaccttgtgacgctcaaaatgccgaatagcaagctacataagctgtgggaaggagttgcgtcgcttacatgcctaaaggaaatggatatggttggatcatcaaacctgaaagaaattccagatctttccatgcctactaatcttgagatacttaaacttggtttttgtaagagtttggtggagcttccttcctctataagaaatctcaataaactattgaaattggacatggaattctgccatagtctggaaattctcccaaccggcttcaacctcaaatctctcgaccacctcaacttccgatattgctcggagttgaggacttttcccgaattctcaaccaacatctccgttctcatgctttttggaacaaacattgaagaattccctaacctcgagaatcttgttgagcttagcttatcaaaagaagagagtgatgggaaacaatgggatggagtgaagccgcttacgcccttcttggagatgttgtctcccactttgaagagcttgaagctcgagaatattccaagtttggtggagcttccttcctcatttcagaatctcaatcaactgaaggagttgagcatcacatactgcagaaatctggagactcttcccacaggaatcaacctcaaatctctcaattacctttgtttcaaaggatgctcacagttgaggagctttcctgaaatctcaactaacatctcagttctcaatctagaagaaacagggattgaagaggttccttggcagatcgagaacttctttaacctcactaagctaactatgaggagttgcagcaagctaaaatgtttatccctaaacattcctaaaatgaaaactctgtgggacgttgacttttcagattgtgcggcgttgactgtagttaacttaagtggctatccaagtgacacactttccgaggaggaggatgatagtttggacccctttctcgatttcaggggctgcttcagcttggatccagaaactgtccttcaccaagagtcagttattttcaactccatggcatttccaggtgaacaagtgccatcatatttcacgtaccgtactactggaacctccaccattctccccaatatccctctacttccaacacaactctctcaaccattcttcagatttagggtttgtgcggtggcaaccgctttcaatatagtatccatccaggtaaatagtcggttcacaggcagatttgggaacagctttgatttctttggtgagggacatgaactcatggaaatacggaagggtgatatgttgatatttgactgtcgtatccctttcaacgaagataatgctcttctagctcgaggggactacgatcacgtggatatgaatattcatataagtggagattcagaatctacgttcgaattaaaaggatggggtatacgcctcttagaggactgttcatcagtggagaaccgacttgttaatccaacacatgcgtatacacctgttcaaggacttgttaatgagattgaacacaatgaagactctggagataacaatgtagagactaagagaagcgcgaagcgaatgcgggtaagcattaagaatgaacaaaacataatattggttatcaggatcaacagaacattttaa

SEQ ID NO: 102266 - protein, 1145 aa, Arabidopsis thaliana
MASSSSSRNWLYDVFLSFRGGDVRVTFRSHFLKELDRKLITAFRDNEIERSHSLWPDLEQAIKDSRIAVVIFSKNYASSSWCLNELLEIVNCNDKIVIPVFYGVDPSQVRHQIGDFGKIFEKTCKRQTEQVKNQWKKALTDVANMLGFDSATWDDEAKMIEEIANDVLAKLLLTTPKDFENFVGIEDHIANMSVLLKLEAEEVRMVGIWGSSGIGKTTIARALFNQLSRHFPVSKFIDRAFVYKSREIFSRANPDDHNMKLHLQEKLLSEILRMPDIKIDHLGVLGERLQHQKVLIIVDDLDDQVILDSLVGQTQWFGSGSRIIAVTNNKHFLRAHEIDHIYEVSLPTQQHALAMLCQSAFRKKSPPEGFEMLVVQVARHVDSLPLGLNVLGSYLRGRDKEYWMEMLPRLENGLHDKIEKILRISYDGLGSEEDKAIFRHIACLFNHMEVTTITSLLTDLGINIGLKNLVDKSIIHVRRGCVEMHRMLQEMGRKIVRTQSIDKPGKREFLVDPNDISDVLSEGIGTQKVLGISLNTGEIDELYVHESAFKGMSNLRFLEIDSKNFGKAGRLYLPESLDYLPPRLKLLCWPNFPMRCMPSNFRPENLVTLKMPNSKLHKLWEGVASLTCLKEMDMVGSSNLKEIPDLSMPTNLEILKLGFCKSLVELPSSIRNLNKLLKLDMEFCHSLEILPTGFNLKSLDHLNFRYCSELRTFPEFSTNISVLMLFGTNIEEFPNLENLVELSLSKEESDGKQWDGVKPLTPFLEMLSPTLKSLKLENIPSLVELPSSFQNLNQLKELSITYCRNLETLPTGINLKSLNYLCFKGCSQLRSFPEISTNISVLNLEETGIEEVPWQIENFFNLTKLTMRSCSKLKCLSLNIPKMKTLWDVDFSDCAALTVVNLSGYPSDTLSEEEDDSLDPFLDFRGCFSLDPETVLHQESVIFNSMAFPGEQVPSYFTYRTTGTSTILPNIPLLPTQLSQPFFRFRVCAVATAFNIVSIQVNSRFTGRFGNSFDFFGEGHELMEIRKGDMLIFDCRIPFNEDNALLARGDYDHVDMNIHISGDSESTFELKGWGIRLLEDCSSVENRLVNPTHAYTPVQGLVNEIEHNEDSGDNNVETKRSAKRMRVSIKNEQNIILVIRINRTF

SEQ ID NO: 102267 - DNA, 3372 bp, Arabidopsis thaliana
  CDS (1)..(3372)
atggcttcttcgtcctcctcttctcgcaattggtcatatgatgttttcccaagcttcagtggagaagatgtccgcaaaacattcctcagccactttctcagggagctggaacggaaatcgatcattactttcaaagacaatgagatggagagaagccagtcaatagccccagagcttgtagaggcgattaaagattcaaggattgcagtgattgtgttctctaaaaactacgcctcttcaagctggtgtctaaatgagctgttagagattatgcgatgcaacaaatatttgggccagcaagtgataccagtcttctactatttggatccttctcatcttcggaaacagtcgggagagtttggagaggcatttaaaaagacttgccagaaccaaactgaggaagtgaaaaatcagtggaagcaagcgttgactgatgtttcaaacatcctcggatatcattctaagaactgcaatagcgaagctacaatgattgaagaaatctccagtcatattttaggtaaactgagtttaactccatcaaatgattttgaggaatttgttggcatcaaagatcatatcgagaaggtgaggttgttgttgcatttggaatctgacgaagtgaggatggttgggatatggggtacctcgggaatcggtaagactaccattgcaagagctttatttagtaatctctctagtcagtttcaaagtagtgtttacatagacagggctttcatatctaagagtatggaaggttacggtcgagccaatccagatgactataacatgaagttgcgtttgcgagaaaatttcctgtttgaaattttgggcaaaaagaacatgaagatcggtgcaatggaagaaaggctgaagcatcaaaaagttcttatcattattgatgatttggatgatcaagatgtgctagatgccttagtgggtagaactcaatggtttggaagtgggagtagaataattgtggttacaaaaaacaaacatttcttaagggcccatgggattgatcatgtttacgaggcctgtctcccatctgaagaacttgctcttgagatgttttgtcgatatgctttcaggaagaattctccacctgatggttttatggagctttcttctgaagttgcattgcgcgctggtaatcttcctttgggtcttaaagttttgggttcgtatctacggggtagggacatagaggactggatggatatgatgccgaggcttcaaaatgatttagatgggaaaattgagaagacactaagagtcagctacgatggattaaacaacaaaaaggatgaagcaatatttcgtcacattgcatgtcttttcaatggtgagaaagtaaatgacatcaagttgcttctagcagagagtgacttggatgttaatattgggttaaaaaaccttgttgataagtctctcatatttgtaagagaggatactattgagatgcaccgtttgctacaagatatgggtaaggagattgtccgtgcacagtcaaatgagcctggagaacgggaattccttgtggattcgaagcatatctacgatgtacttgaagataacactggtactaaaaaagtcttaggtatcgcactggatattaacgagactgatggactgtatatacatgagagtgccttcaaagggatgcgtaatctcctgtttctaaatttttacactaaacagaagaaagatgtaacatggcacttatcagaaggtttcgatcatttaccccctaagctcagattactgagttgggaaaaatacccgttgagatgtatgccttctaactttcgtccagaaaaccttgttaagcttcaaatgtgtgagagcaaactcgaaaagttgtgggatggagttcattcacttacagggctcaggaatatggatttgcggggatcagaaaacctgaaagaaattccagatctttctttggccactaacctcaagaaacttgatgttagcaattgcacaagtttagtggagctttcttccacaattcagaatcttaatcaattagaggaattgcagatggaacgttgcgaaaatttggagaatcttcccattggaatcaacctcgaatctctttattgcctcaatctcaatggatgctcaaagttgaggagttttccagatatctcaacaactatctcagagctctatctaagcgaaacagccatagaagaatttcccactgagttgcatttagagaatctatattatcttggcttgtatgacatgaagagtgagaaattgtggaaaagagtgcagccgcttacaccgctcatgaccatgctgtctccctctttgacgaagctatttctctcagatatcccaagtttggtggagcttccttcttcatttcagaatctccataatcttgagcatttgaacattgcacgatgcacaaatctggagactcttcccactggagtcaacctagaattacttgaacaacttgatttttctggatgctcacggttgaggagttttcctgatatctcaaccaacatcttttcactagttctagacggaacagggattgaagaggttccttggtggattgaggatttctataggctctctttcctgagtatgattggatgcaacaatttacaaggtgtgtccctaaacatttctaaactggaaaaactcgagacggtagacttttcagactgtgaggcactgtctcatgctaattgggataccattccaagtgcagtggcgatggcaacagaaaatattcactctaagttaccagtctgtatcaaattcagcaactgcttcaacttggatcataaagctgtccttctgcaacaatcaattttcaagcaactaatcttgtcaggtggagaaatgttttcatatttcactcaccgaactactggaacgtctctgaccaatatccctcttcttcacatctctccttgtcaaccattcttcagatttagagcttgcgccttggttgatactgaatctatggacataggtagtgtatttttccaggtccaggtatcttgtcggttcacagacagactcgggaactatttggattccccttatcaacacgaggtcttcgcagtacttgagaagggtagtcatatggttatatctgactgctgtttcccttttaacgaagacaatgctcctctagctgaacttatctatgatcacgtggatatacagtttcactttactcaagaaaacgatgagctcaaactaataggatgtggtctaagactctctgaagccgataatgatctaggcaatgagattgatggcagtgaagagtgggaagactgcaacgatagcggtcttggcagtgaatctgataatttagaggcagaagaagacacgtga

SEQ ID NO: 102268 - protein, 1123 aa, Arabidopsis thaliana
MASSSSSSRNWSYDVFPSFSGEDVRKTFLSHFLRELERKSIITFKDNEMERSQSIAPELVEAIKDSRIAVIVFSKNYASSSWCLNELLEIMRCNKYLGQQVIPVFYYLDPSHLRKQSGEFGEAFKKTCQNQTEEVKNQWKQALTDVSNILGYHSKNCNSEATMIEEISSHILGKLSLTPSNDFEEFVGIKDHIEKVRLLLHLESDEVRMVGIWGTSGIGKTTIARALFSNLSSQFQSSVYIDRAFISKSMEGYGRANPDDYNMKLRLRENFLFEILGKKNMKIGAMEERLKHQKVLIIIDDLDDQDVLDALVGRTQWFGSGSRIIVVTKNKHFLRAHGIDHVYEACLPSEELALEMFCRYAFRKNSPPDGFMELSSEVALRAGNLPLGLKVLGSYLRGRDIEDWMDMMPRLQNDLDGKIEKTLRVSYDGLNNKKDEAIFRHIACLFNGEKVNDIKLLLAESDLDVNIGLKNLVDKSLIFVREDTIEMHRLLQDMGKEIVRAQSNEPGEREFLVDSKHIYDVLEDNTGTKKVLGIALDINETDGLYIHESAFKGMRNLLFLNFYTKQKKDVTWHLSEGFDHLPPKLRLLSWEKYPLRCMPSNFRPENLVKLQMCESKLEKLWDGVHSLTGLRNMDLRGSENLKEIPDLSLATNLKKLDVSNCTSLVELSSTIQNLNQLEELQMERCENLENLPIGINLESLYCLNLNGCSKLRSFPDISTTISELYLSETAIEEFPTELHLENLYYLGLYDMKSEKLWKRVQPLTPLMTMLSPSLTKLFLSDIPSLVELPSSFQNLHNLEHLNIARCTNLETLPTGVNLELLEQLDFSGCSRLRSFPDISTNIFSLVLDGTGIEEVPWWIEDFYRLSFLSMIGCNNLQGVSLNISKLEKLETVDFSDCEALSHANWDTIPSAVAMATENIHSKLPVCIKFSNCFNLDHKAVLLQQSIFKQLILSGGEMFSYFTHRTTGTSLTNIPLLHISPCQPFFRFRACALVDTESMDIGSVFFQVQVSCRFTDRLGNYLDSPYQHEVFAVLEKGSHMVISDCCFPFNEDNAPLAELIYDHVDIQFHFTQENDELKLIGCGLRLSEADNDLGNEIDGSEEWEDCNDSGLGSESDNLEAEEDT

SEQ ID NO: 102269 - DNA, 3384 bp, Arabidopsis thaliana
  CDS (1)..(3384)
atggcttcttcttcctcctcctcttctcgcaattggtcatatcacgttttcccgagtttcagcggagaagatgtccgcaacacattccttagccactttctaaaagaactggataggaaactgatcatttctttcaaagacaatgagatcgagagaagccagtcacttgatcccgaacttaaacatgggattagaaattccagaattgcggtggttgtgttctccaaaacctatgcctcttcaagctggtgccttaacgagctactggagattgtgaaatgcaagaaagagtttggccaacttgtgatacccattttctacaatttggatccatcccatgtgaggaaacagaccggagactttgggaagatctttgaaaagacatgccgaaataaaacagtggatgagaaaatccgatggaaggaagctttgaccgatgtagctaatatccttggatatcatattgttacctgggataacgaagcaagcatgatcgaagaaatcgccaatgatattttgggtaaaatgaatatatctccatcaaatgattttgaggacttggtcggtattgaagatcatatcacaaagatgagttcattgctgcacttggaatctgaggaagtgaggatggtcgggatatggggtccctcgggaattggcaaaacgaccattgcaagagctctatttagtcgactctcttgtcagtttcaaagtagtgttttcattgacaaggttttcatatctaagagtatggaagtttacagtggagctaatcttgttgactataacatgaagttgcacttgcaaagagcctttctagctgaaatttttgacaaaaaggacataaagatacatgtaggtgcaatggaaaagatggtaaagcaccggaaagctctcatcgttattgatgatttagatgatcaagatgtgctagatgctttagcggatcaaactcaatggtttggaagtgggagtagaatcattgtggttacagaaaataagcattttttaagggccaatcggattgatcacatttacaaggtctgtctcccatctaatgcgctggctcttgagatgttttgtcgttctgcttttaagaagaattctcctcctgatgactttttggagctttcttctgaagttgcattgcgtgctggtaatcttcctttgggcctgaacgtattgggttcaaatttacggggcataaacaaaggttactggatagatatgctaccgaggcttcaaggtttggatggaaaaatagggaaaacactaagagtcagctatgatgggttgaataacagaaaagatgaagcaatatttcgtcacattgcatgtattttcaatggtgagaaagtcagtgacatcaaactattactagcaaatagtaacttggatgttaatatcgggctaaaaaaccttgttgatagatcccttatctgtgaaagattcaatactctggagatgcactctttgctacaagaattgggtaaggagattgtccgtactcagtccaatcagcctggagaacgggagttccttgtggatttgaaggatatttgcgatgtacttgaacataacactggtactaagaaggttttaggtataacattggatatagatgagactgacgaactgcatatacatgagagctccttcaaaggaatgcacaatctcctttttctaaaaatttatactaagaaattggaccagaaaaaaaaagttagatggcacttaccggaacgcttcgactatttgccctctagacttagattattgaggtttgacagatacccatcgaaatgtcttccttctaactttcatcctgaaaacctggttaagcttcaaatgcagcagagcaaacttgagaagctgtgggacggagttcattcacttgcagggctcaggaatatggatttacggggatctagaaacctgaaagaaatcccagatctttcaatggccactaatctagaaacacttaaactcagcagttgctcgagtttggtggaacttccttcgtctattcagtacctgaataagctgaatgatttggacatgtcatactgcgatcatttggagactattccctctggagttaacctcaaatctctcgatcgtctcaatctcagtggatgctcacggttgaaaagttttcttgacataccaaccaacatctcatggcttgatataggccaaacagcggacattccctctaatttgcgtctacagaatctcgatgagcttatattgtgcgaaagagtgcagctgcgtacacctctcatgaccatgctttctcccactttgacgaggttgactttttcgaacaacccaagttttgtggaagtcccttcttcaattcagaatctctatcaacttgagcatttggaaattatgaactgcagaaatctggtgactcttcccactggaataaacctcgactctctcatttcacttgatctctctcattgttctcagttgaagacttttcctgatatctcaaccaacatctcagatctcaatctaagctacacagcgattgaagaggttcctttgtcgatcgagaaattatctctcctctgttacctagatatgaatggatgcagcaatttactatgtgtatccccaaacatttctaaactgaaacatctcgagagagctgacttttcagactgtgtggaattgactgaagctagctggaatggtagttcaagtgagatggtcaaacttcttccagctgataatttctcaacggtcaagctcaacttcatcaactgcttcaagttagatctaacagctcttattcaaaaccaaacatttttcatgcaactgatactaacaggtgaagaagtgccttcatatttcactcaccgtaccagtggggactctatctccctacctcacatctctgtatgccaatcattcttcagttttaggggttgcaccgtgattgatgtcgattctttttccacaatctctgtttcatttgacattgaagtatgttgtcggttcatagacagattcgggaaccactttgattctactgattttccaggatacttcataacaacaaagttgggtggtcatctggttgtctttgactgttattttccctttaacgaagaatttactacttttctggatggtcaattcaactacgatcacgtggatatacagtttcgtctcacgaatgacaactctcagctcaaactaaaaggatgcggtattctactttccgaagatgtcccatccctggataaccgaccttgtagtccaaatattcttccaggggtttgtgaagatagcgctttagagagaaggagtttccggactaaaatgcggatgatgaggatgagactactgaagaaactactgaatcgctag

SEQ ID NO: 102270 - protein, 1127 aa, Arabidopsis thaliana
MASSSSSSSRNWSYHVFPSFSGEDVRNTFLSHFLKELDRKLIISFKDNEIERSQSLDPELKHGIRNSRIAVVVFSKTYASSSWCLNELLEIVKCKKEFGQLVIPIFYNLDPSHVRKQTGDFGKIFEKTCRNKTVDEKIRWKEALTDVANILGYHIVTWDNEASMIEEIANDILGKMNISPSNDFEDLVGIEDHITKMSSLLHLESEEVRMVGIWGPSGIGKTTIARALFSRLSCQFQSSVFIDKVFISKSMEVYSGANLVDYNMKLHLQRAFLAEIFDKKDIKIHVGAMEKMVKHRKALIVIDDLDDQDVLDALADQTQWFGSGSRIIVVTENKHFLRANRIDHIYKVCLPSNALALEMFCRSAFKKNSPPDDFLELSSEVALRAGNLPLGLNVLGSNLRGINKGYWIDMLPRLQGLDGKIGKTLRVSYDGLNNRKDEAIFRHIACIFNGEKVSDIKLLLANSNLDVNIGLKNLVDRSLICERFNTLEMHSLLQELGKEIVRTQSNQPGEREFLVDLKDICDVLEHNTGTKKVLGITLDIDETDELHIHESSFKGMHNLLFLKIYTKKLDQKKKVRWHLPERFDYLPSRLRLLRFDRYPSKCLPSNFHPENLVKLQMQQSKLEKLWDGVHSLAGLRNMDLRGSRNLKEIPDLSMATNLETLKLSSCSSLVELPSSIQYLNKLNDLDMSYCDHLETIPSGVNLKSLDRLNLSGCSRLKSFLDIPTNISWLDIGQTADIPSNLRLQNLDELILCERVQLRTPLMTMLSPTLTRLTFSNNPSFVEVPSSIQNLYQLEHLEIMNCRNLVTLPTGINLDSLISLDLSHCSQLKTFPDISTNISDLNLSYTAIEEVPLSIEKLSLLCYLDMNGCSNLLCVSPNISKLKHLERADFSDCVELTEASWNGSSSEMVKLLPADNFSTVKLNFINCFKLDLTALIQNQTFFMQLILTGEEVPSYFTHRTSGDSISLPHISVCQSFFSFRGCTVIDVDSFSTISVSFDIEVCCRFIDRFGNHFDSTDFPGYFITTKLGGHLVVFDCYFPFNEEFTTFLDGQFNYDHVDIQFRLTNDNSQLKLKGCGILLSEDVPSLDNRPCSPNILPGVCEDSALERRSFRTKMRMMRMRLLKKLLNR

SEQ ID NO: 102271 - DNA, 3507 bp, Arabidopsis thaliana
  CDS (1)..(3507)
atggcttcttcatcttcttctcgcaattgggtttatgatgttttcttgagcttcagtgggaaagacgtccgcgtaacattccgtagccactttctcaaagagcttgatcggaaactgatctctgctttcagagacaatgagatcgagagaagccactctctttggcccgatcttgaacaagcgatcaaggactccagaatcgcagtggtcgttttctccaaaaactacgcttcgtcgagctggtgtcttaacgagttgctggagattgtgaactgcaatgataaaattatcataccggttttctacggtgtggatccttcccaagtgaggtatcaaatcggtgaatttggaagtatctttgaaaagacttgcaagagacaaacagaggaagtgaaaaatcaatggaagaaagcgttgactgatgtagctaatatgcttggatttgattctgccaaatgggatgacgaagcaaaaatgattgaagaaatagccaatgatgttttggctaaactgcttttaacttcatccacggattctgctgagaactctattggcattgaagatcatattgcaaatatgagtgtattgttgaaattggaagctgaggaagtgagaatggttggtatatggggttcctcggggattggtaagactaccattgcaagagctctgtttaaccaactttctcggcatttcccagttagcaaattcatagacagagcttttgtatataagagtagagaaacttacaagggcgccaatccggacgacccgaacatgaagttgcacttgcaaggatgtttcctatcggaaattttggggaaaaaagacataaagattgatcatttaggtgcactgggagagaggctaaagcaccagaaaactctcatcatcattgatgatttggatgatctagtggtactagattcattggtgggtaaaactaattggtttggatgtgggagcaggatcatagtgattaccaataataagcaattcttaagggcccatggaattgatcatatttacgaagttagtctcccttctaaagagcgcgctcaagagatgttttgtcagtctgctttcggggaaaactctccacctgaaggttttgaggagctcgtagttgaaattgcatggcttgctggtagtcttcctttgggtcttactgtttttggttcagctctacgagggagaaaaaaggagtactgggtgaagatgttgccaaggcttcaaaatgatctagatggcaatattgaggagacattgaaagtcagctatgatgcgataggcaacgtaaaagatcaagcgttattccgtcttatcgcatgtcttttcaatcacgtcaaagtcagagacattgaattgttgctcgcagatagtggcttagatgtaaatattgcactggaaaacctagttgataagtcccttattcatgtcagaaatgatcatgtggagatgcaccgtttgctacaagaaacgggtagaaatattgtacgctcacagtccactgacaacccaggagaacgagaatttctggtggattcaaacgatagtcgtactgtactcagtgaaggcattggtactcgaaaggtgctaggaatatcattggatacaagtaaggttagtgagttttgtgtacatgagaatgccttcaaagggatgggtaatctccttttcttggatatttcctcgaagacttttatagaagaagaagtcaaagtgcatttaccggaaaaaataaactattattccgttcaacccaaacaattgatttgggatagatttccactgaaatgtatgccttatacttttcttcgaaacctcgtcaagctcgaaatgcatgacagcaagctagagaagctgtgggaaggagctatgtcatttacatgtctaaaggaattggatatgtgggcatctaaatacctgaaagaaatcccagatctttcaaaggccactaacattgagaaacttgactttggacattgctggagtttggtggagcttccttcctctatacgaaatctcaataaactgttggaattgaatatggaatactgcggtgaattggagactcttcctacgggtttcaacctcaaatccctggactacctcaatttcaatgaatgctggaagttgaggacttttcctgaattcgcaaccaacatctcaaatctcattctggcagaaacatctattgaagaatacccttccaatttgtatttcaagaatgtccgtgagctaagcatggggaaagcggatagtgatgagaataaatgccaaggagtgaagcccttcatgccgatgctgtctcccactttgaccctcttggagctctggaatatcccaaatttagtagagctttcgtcctcatttcagaatctcaataaccttgagaggttggacatttgttactgcagaaatctggagtctctacccaccggaatcaacctcgaatctctcgtttcccttaatctctttggatgctcacggttgaagcgctttcctgatatctcaaccaacatcaaatatctcgatctagaccaaactgggattgaagaggttccttggcagatcgagaacttctttaacctcactaagctaactatgaaaggttgccgcgagctaaaatgtgtatccctaaacatttttaaactcaaacatcttggggaagttagcttttccaattgcggggcattgaccagagttgatttgagttgctatccaagtggggtggagatgatgaaggcagacaatgctgacatagtttctgaggagaccacctcttctcttcctgatagttgcgtcctcaatgtcaatttcatggattgcgtcaatctggatcgagaacctgtccttcaccaacagtcgattattttcaactccatgatattgccaggtgaagaagtgccatcatatttcacttaccgaacatctgactctcaaccatttggaacgtcttcctctctgcccatccctctacttcccacacaactctctcaaccattcttcagatttagggtttgtgcagtggtaagtgcttccaatggagtatatatcggggtatatagtcggttcaaaggcagaattgggaacaaatttgattcctttggtgaggtacataatttcatggaaattgagaagggtattcatctgtgtatatttgactgtcgtatccgtctatacaaagataatgttcctctatctcaactgaactatgatcatgtggatataaatattcatataactagtggagattggagatctacggtcgttttaaaagaatggggtatacgactcttagagaccggttcatcagcagagaaccgacttggtaatccaaacagtactcttccacatgtttctcaagccgaagaaggcaatatggggtattatacacatgttcaaggacttgttaatgagattgaaaatagtgaagactctggagataacaatgtagagactgagagaagcaagaagcgcatgcggctacaccacttcatatga

SEQ ID NO: 102272 - protein, 1168 aa, Arabidopsis thaliana
MASSSSSRNWVYDVFLSFSGKDVRVTFRSHFLKELDRKLISAFRDNEIERSHSLWPDLEQAIKDSRIAVVVFSKNYASSSWCLNELLEIVNCNDKIIIPVFYGVDPSQVRYQIGEFGSIFEKTCKRQTEEVKNQWKKALTDVANMLGFDSAKWDDEAKMIEEIANDVLAKLLLTSSTDSAENSIGIEDHIANMSVLLKLEAEEVRMVGIWGSSGIGKTTIARALFNQLSRHFPVSKFIDRAFVYKSRETYKGANPDDPNMKLHLQGCFLSEILGKKDIKIDHLGALGERLKHQKTLIIIDDLDDLVVLDSLVGKTNWFGCGSRIIVITNNKQFLRAHGIDHIYEVSLPSKERAQEMFCQSAFGENSPPEGFEELVVEIAWLAGSLPLGLTVFGSALRGRKKEYWVKMLPRLQNDLDGNIEETLKVSYDAIGNVKDQALFRLIACLFNHVKVRDIELLLADSGLDVNIALENLVDKSLIHVRNDHVEMHRLLQETGRNIVRSQSTDNPGEREFLVDSNDSRTVLSEGIGTRKVLGISLDTSKVSEFCVHENAFKGMGNLLFLDISSKTFIEEEVKVHLPEKINYYSVQPKQLIWDRFPLKCMPYTFLRNLVKLEMHDSKLEKLWEGAMSFTCLKELDMWASKYLKEIPDLSKATNIEKLDFGHCWSLVELPSSIRNLNKLLELNMEYCGELETLPTGFNLKSLDYLNFNECWKLRTFPEFATNISNLILAETSIEEYPSNLYFKNVRELSMGKADSDENKCQGVKPFMPMLSPTLTLLELWNIPNLVELSSSFQNLNNLERLDICYCRNLESLPTGINLESLVSLNLFGCSRLKRFPDISTNIKYLDLDQTGIEEVPWQIENFFNLTKLTMKGCRELKCVSLNIFKLKHLGEVSFSNCGALTRVDLSCYPSGVEMMKADNADIVSEETTSSLPDSCVLNVNFMDCVNLDREPVLHQQSIIFNSMILPGEEVPSYFTYRTSDSQPFGTSSSLPIPLLPTQLSQPFFRFRVCAVVSASNGVYIGVYSRFKGRIGNKFDSFGEVHNFMEIEKGIHLCIFDCRIRLYKDNVPLSQLNYDHVDINIHITSGDWRSTVVLKEWGIRLLETGSSAENRLGNPNSTLPHVSQAEEGNMGYYTHVQGLVNEIENSEDSGDNNVETERSKKRMRLHHFI

SEQ ID NO: 102273 - DNA, 3573 bp, Arabidopsis thaliana
  CDS (1)..(3573)
atggcttcttcgtctttgtcttcacctcctccctgtaactatgatgtcttcctaagcttccgtggggaagatacacgtagaaccattgtcagccatttgtacgcagcacttggtgcaaagggaatcattactttcaaagacgatcaagatcttgaggtaggtgatcatatttctagccacctccgcagagccatagaaggttcaaagttcgctgttgtggttctctctgaaagatacacaacgtcaaggtggtgcttgatggaactgcaattaataatggaattgtacaaccttggtaaactcaaagtccttcccttgttctatgaagttgatccctctgacgtgagacaccagcgaggaagttttggtttagaaaggtaccagggtccagaattcgcggatattgtgcaaaggtggagagtagctctgtgcatggtagccaatctctcaggcatggtttccagatattgtgcggacgaggctatgatgcttgaagaaattgttgaagtcatctcaagccggttagcttctatgcaagcaacttcttttgaagatttagttggtatggaagctcacatggaaaacataagacctctcttgaagaaagactttgatgccgaggtttgtatggttggaatatggggaatggggggcatcggaaaaactaccattgctaagtatctatatgaacagcttgcaagccaatttccagctcattctttcattgaagatgtcggccaaatctgtaagaaagttgatctaaaatgtatacaacaacaacttctctgcgatattctaagtacaaaacgagtggccttgatgagcatccaaaacggtgcaaaccttattcggtcaaggcttggaaccctcaaggttctctttgtgcttgatggtgttgataaagtggagcagttacatgccttggcaaaggaggctagctggtttggtccagggagccgaatcattataaccacacgtgacagaagattgctagattcctgcagagtgaccaacaagtacgaggttaaatgcttgcaaaatgaggactcgttaaagattgttaaaaatattgcttttgcaggcggagttcctacacttgatggatatgaacgttttgcgattcgagcatctcagctcgctcaaggtcttcctttagccctggtagctttcggttcatttctccgtggagcgacctctatagacgagtgggaagatgcaatagacacgcttgaaacagctcctcaccagaatatcatggatattttaagaagtagctataccaatctggacctacgagacaagaccattttcattagggtcgcatgtcttttcaatggagaaccagtctcccgtgtttctacccttctctctgaaactaaaagaaggataaaaggtttagctgaaaagtctctcatccatatatcaaaagatggatatattgacatacattccttgataaaacaaatggctagagaaattgttgttgaagaatcattgtacatacctcgacaacaaagaattttgtgggatcctcataacagttatggcgtactggaaagcaaaacagggacagagagaatccaaggcatgacactacatatgtgtgaattgccccgagcagcatccatagatgggagtgcttttgagcagatggaaaatctcatatttctcaaattcttcaaacacttaaatgatagagagtccaagctgaatatcaattcaaagaatcgtatggtacttccacgcagccttaggctattgcattgggacgcatatccattaacaaccttgcttcccacatttcctctgagtcgtcttgttgaacttcatctgcgttacagcaatctggagaacctgtgggatggaaaaatgtcgctcttggagttaaggatgctagatgtcactggatctaagaatctgaccaaacttccagatctttcaagggcaacaaagcttgaggagctgattgctaaaggttgcacgaggttggagcaaatcccggaaacaattggtagcttaccttcactgaagaaacttgatgtatcccactgtgatcgcctcatcaatcttcagatgattataggagaattgcctgcccttcaaaaacgtagcccagggctttttcggcaagcttcattgagtttcccagatgctgtagttacactgaactctcttacgagtctagccatccatggcaaattaaatttttggttgtcacatctccgaggaaaggcagaccacctctgctttagttccgagcaatggacccctaacaaatttctgaagcaagtacaaaagacgcctaagctcatgtctgagttttacggatttaaatcactcgacatcatgcagttcatctaccgtaaagacagtgcctctttccagtgttatagcttttcagatttcctctggttaaccgagttaaatctcataaacctaaacatagaaagcatcccagatgacattggccttttgcaggtcctacaaaaactggacctcagcggaaatgatttcacatgcctacccacagatatggaaaatctttctagtatgaaatctctcaggctttgcaactgcctcaaacttcaaacactaccaaaactacctcaactggagacactcaaactttctaactgtatacttctccaaagtccactaggacattcagctgccagaaaagatgagcgtggataccgcttagctgagctttggcttgacaactgcaatgatgtttttgaattgtcatatacgtttagtcattgcaccaatttaacatacttagacctcagcggaaatgatatggtgacgatgcctgtaactatcagattccttaggctgttgaatactctctgcctcaatgactgcaagaaactcaagtcaatggtacagcttccaccaaaccttacatctctctatgcacgtggctgcacttccctggaaattattcaccttcccttggatcattccataaaacacgttgatcttagctactgccccaaattgaatgaagttgcgaatctgatggatcgatttctgagatgtggacgaaaggaagaggtgcctcagcgttttgcttgcttatctggaagtagagtgcccatctacttcgactatcaagcaagggaatattccagagaaatcagcatacccccaatatggcatgcctctgagtttgtgggttttgatgcctgtatcataattgcttgtcagagtccttatcacataaagctctcgtcatcttcttatagctgtaaacaggaagataaccagtcctaccgaattgacctcaagcccgatttcgttctcccaccggagagtactcgtagcagcaatgacaaagaggcattctcagcacatcacatgttcatcttccacgttccaagtaacgtagacttcaacgagtttagccttgagccaaaacttgtaatttcagaggagtttcagtctacaccgggcagaataatatcatacggagttcgagtagtactcaaaactgaagaggatgatcgaaactacgacataaactgcggaaacctatccaaaaaaaggaaaacagatatgttgacaatttga

SEQ ID NO: 102274 - protein, 1190 aa, Arabidopsis thaliana
MASSSLSSPPPCNYDVFLSFRGEDTRRTIVSHLYAALGAKGIITFKDDQDLEVGDHISSHLRRAIEGSKFAVVVLSERYTTSRWCLMELQLIMELYNLGKLKVLPLFYEVDPSDVRHQRGSFGLERYQGPEFADIVQRWRVALCMVANLSGMVSRYCADEAMMLEEIVEVISSRLASMQATSFEDLVGMEAHMENIRPLLKKDFDAEVCMVGIWGMGGIGKTTIAKYLYEQLASQFPAHSFIEDVGQICKKVDLKCIQQQLLCDILSTKRVALMSIQNGANLIRSRLGTLKVLFVLDGVDKVEQLHALAKEASWFGPGSRIIITTRDRRLLDSCRVTNKYEVKCLQNEDSLKIVKNIAFAGGVPTLDGYERFAIRASQLAQGLPLALVAFGSFLRGATSIDEWEDAIDTLETAPHQNIMDILRSSYTNLDLRDKTIFIRVACLFNGEPVSRVSTLLSETKRRIKGLAEKSLIHISKDGYIDIHSLIKQMAREIVVEESLYIPRQQRILWDPHNSYGVLESKTGTERIQGMTLHMCELPRAASIDGSAFEQMENLIFLKFFKHLNDRESKLNINSKNRMVLPRSLRLLHWDAYPLTTLLPTFPLSRLVELHLRYSNLENLWDGKMSLLELRMLDVTGSKNLTKLPDLSRATKLEELIAKGCTRLEQIPETIGSLPSLKKLDVSHCDRLINLQMIIGELPALQKRSPGLFRQASLSFPDAVVTLNSLTSLAIHGKLNFWLSHLRGKADHLCFSSEQWTPNKFLKQVQKTPKLMSEFYGFKSLDIMQFIYRKDSASFQCYSFSDFLWLTELNLINLNIESIPDDIGLLQVLQKLDLSGNDFTCLPTDMENLSSMKSLRLCNCLKLQTLPKLPQLETLKLSNCILLQSPLGHSAARKDERGYRLAELWLDNCNDVFELSYTFSHCTNLTYLDLSGNDMVTMPVTIRFLRLLNTLCLNDCKKLKSMVQLPPNLTSLYARGCTSLEIIHLPLDHSIKHVDLSYCPKLNEVANLMDRFLRCGRKEEVPQRFACLSGSRVPIYFDYQAREYSREISIPPIWHASEFVGFDACIIIACQSPYHIKLSSSSYSCKQEDNQSYRIDLKPDFVLPPESTRSSNDKEAFSAHHMFIFHVPSNVDFNEFSLEPKLVISEEFQSTPGRIISYGVRVVLKTEEDDRNYDINCGNLSKKRKTDMLTI

SEQ ID NO: 102275 - DNA, 3645 bp, Arabidopsis thaliana
  CDS (1)..(3645)
atgggttctgcaatgagcttgagctgttccaagaggaaagcaacgagtcaggatgttgattccgaatcttgtaaaagacgaaagacatgctcaacaaacgatgctgagaattgcatattcattccggatgagtcatcttggagtttatgtgccaacagagtcatcactgtggcagccgtagctttaacaaatttcagattccaacaagataaccaagaaagtaattcttcttctttatctcttccctcccttgcaacttctgtgtctcgaaactggaaacacgatgtcttcccgagcttccacggagcagatgtccgaagaacctttcttagtcacatcatggaatcgttcagaagaaagggaattgacacattcattgataataatatagagaggagtaagtcgatcggtcctgagctcaaagaagctatcaaaggatcaaagatcgcaatcgttttgctctcaagaaaatatgcttcttcgtcttggtgtcttgatgagttggccgagatcatgaaatgcaggcaaatggtgggtcagattgtcatgaccattttctatgaagtggagccaactgacataaagaaacagaccggtgaatttggaaaagccttcacaaaaacatgtagaggtaaaccaaaagagcaagttgagagatggagaaaagctttggaggatgtggcaacaatcgccggatatcattctcacagctggaggaatgaagcagacatgattgagaaaatagccactgatgtttcaaacatgttaaatagtttcacaccatcaagagatttcgacgggttagtagggatgagagctcatatggatatgctggaacaattgttgcgcttagatttggatgaagtaaggataatcgggatttggggaccgcctgggattggtaagacaactatcgccagatttctgcttaaccaagtctccgacagattccaacttagtgcaatcatggtcaatatcaaaggatgctatccaagaccttgtttcgatgagtacagtgcacaattgcaactacaaaaccaaatgttgtcccagatgatcaatcataaagatatcatgatttctcatttaggagtggctcaagaacggttgagagacaagaaagtgtttcttgttctcgatgaagtggatcaattaggacaactagatgccttggcgaaagaaactcgatggtttggtcctggaagtcggattattatcacaacagaagatctaggagttttgaaggctcatgggatcaatcatgtttacaaagtcgaatatccatcaaatgacgaggcttttcaaatcttctgtatgaatgcctttggtcagaaacaaccacacgaaggtttcgatgagattgcttgggaagttaaggctttagctggtaaactccctttgggattgaaggttctaggctctgctttgcgggggaagtccaagccagagtgggaaagaacactaccaaggttaagaactagcctcgacggaaaaatcgggggcattatacagttcagttacgatgccttatgtgacgaagataaatatctatttctttatatagcctgcctttttaacggcgaatcaacaaccaaagtgaaagagcttcttggaaagttcttggatgtgagacaaggccttcacgtattagctcagaaatctctcatatcctttgatgaagaaatctcttggaaacaaattgttcaagttcttcttttaaacaagttctcgcatgtgaggcatacgaagagaaacaagtcgcaaataatacggatgcatactctgctagaacaattcggaagagaaacttcccgtaagcaattcgttcatcaccgctatacgaaacatcagcttttggttggtgaaagggatatatgtgaagtgctcgacgatgatacaacagataatagacgttttatagggataaatttggatttatataagaatgaggaagaattgaatataagtgagaaagcacttgaaagaatccatgattttcaattcgttaaaatcaattacgtatttactcatcaacctgagagagtgcagttagcactagaagatctgatttatcactctccacgaattagatcattgaaatggtttccttaccagaatatatgtttgccttctacttttaatccggagtttctcgtcgaactagatatgcgttgcagcaagcttcggaagctatgggaaggaactaaacaacttagaaatctcaagtggatggatttgagtgattctagagatttgaaagagcttccctcctctattgaaaaactcaccagtctccaaatattagatctccgggattgctcaagtcttgtgaagctcccaccatctatcaatgccaataatctccagggattgtctctaacaaattgttcacgtgttgtgaagctccccgctattgagaatgtgactaatctccatcaattgaagctccaaaattgctcaagtctaatagagctccctctttctattggaactgccaacaatctttggaaattggatatcagaggatgttcaagtctcgtgaaacttccatcctctattggagatatgactaatctcaaagagtttgatctatctaactgctcaaatctggtggagcttccttcttctattggaaaccttcaaaaattgtttatgttgagaatgagaggatgctcaaagctagaaactcttccaacaaacatcaacttgatatctctccgtatacttgatctcacagattgctcgcagttgaaaagttttcccgagatctccacacacatttcagagctcaggttaaaaggaactgcaataaaagaagttcctttgtcgatcacgtcgtggtctcgtcttgctgtatatgaaatgtcatactttgaaagccttaaggaattcccgcatgctcttgacatcatcaccgacctacttttggtaagtgaagatatacaagaagttcctccatgggtcaagagaatgtctcgtttacgtgctcttagactcaacaactgcaatagtctggtatcactcccacaacttccagattcccttgattacatatatgcagataattgtaagtccctcgagagactggattgttgctttaacaatccagagatccgtctctatttccccaaatgcttcaaactgaatcaagaagccagagatctcatcatgcacacatcaactcgtaaatatgcgatgttaccaagtatacaagtgcctgcctgcttcaatcaccgagctacttctggggattacttgaaaatcaagttgaaggagtcgtctcttcctacaaccttgagatttaaggcttgtatcatgcttgttaaggttaatgaagaaatgagagatgatgagatgtggccgagtgtactcattgccatcagggtcaaacagaatgatctcaaagttctatgtacagcaagcatatatccagttttaacagagcatatatacacatttgaacttgaagtagaggaggtgacttccacggagcttgtctttgagttcacaccattccacaaaagcaattggaagataggagaatgcgggatactccaaagagaaacgagatcattttgccggagctcttcgccggatcttccgccagaatcttctcgtgtgtttctagctaggaccactgtttga

SEQ ID NO: 102276 - protein, 1214 aa, Arabidopsis thaliana
MGSAMSLSCSKRKATSQDVDSESCKRRKTCSTNDAENCIFIPDESSWSLCANRVITVAAVALTNFRFQQDNQESNSSSLSLPSLATSVSRNWKHDVFPSFHGADVRRTFLSHIMESFRRKGIDTFIDNNIERSKSIGPELKEAIKGSKIAIVLLSRKYASSSWCLDELAEIMKCRQMVGQIVMTIFYEVEPTDIKKQTGEFGKAFTKTCRGKPKEQVERWRKALEDVATIAGYHSHSWRNEADMIEKIATDVSNMLNSFTPSRDFDGLVGMRAHMDMLEQLLRLDLDEVRIIGIWGPPGIGKTTIARFLLNQVSDRFQLSAIMVNIKGCYPRPCFDEYSAQLQLQNQMLSQMINHKDIMISHLGVAQERLRDKKVFLVLDEVDQLGQLDALAKETRWFGPGSRIIITTEDLGVLKAHGINHVYKVEYPSNDEAFQIFCMNAFGQKQPHEGFDEIAWEVKALAGKLPLGLKVLGSALRGKSKPEWERTLPRLRTSLDGKIGGIIQFSYDALCDEDKYLFLYIACLFNGESTTKVKELLGKFLDVRQGLHVLAQKSLISFDEEISWKQIVQVLLLNKFSHVRHTKRNKSQIIRMHTLLEQFGRETSRKQFVHHRYTKHQLLVGERDICEVLDDDTTDNRRFIGINLDLYKNEEELNISEKALERIHDFQFVKINYVFTHQPERVQLALEDLIYHSPRIRSLKWFPYQNICLPSTFNPEFLVELDMRCSKLRKLWEGTKQLRNLKWMDLSDSRDLKELPSSIEKLTSLQILDLRDCSSLVKLPPSINANNLQGLSLTNCSRVVKLPAIENVTNLHQLKLQNCSSLIELPLSIGTANNLWKLDIRGCSSLVKLPSSIGDMTNLKEFDLSNCSNLVELPSSIGNLQKLFMLRMRGCSKLETLPTNINLISLRILDLTDCSQLKSFPEISTHISELRLKGTAIKEVPLSITSWSRLAVYEMSYFESLKEFPHALDIITDLLLVSEDIQEVPPWVKRMSRLRALRLNNCNSLVSLPQLPDSLDYIYADNCKSLERLDCCFNNPEIRLYFPKCFKLNQEARDLIMHTSTRKYAMLPSIQVPACFNHRATSGDYLKIKLKESSLPTTLRFKACIMLVKVNEEMRDDEMWPSVLIAIRVKQNDLKVLCTASIYPVLTEHIYTFELEVEEVTSTELVFEFTPFHKSNWKIGECGILQRETRSFCRSSSPDLPPESSRVFLARTTV

SEQ ID NO: 102277 - DNA, 3723 bp, Arabidopsis thaliana
  CDS (1)..(3723)
atgggttctgcaatgagcttgagctgttccaagaggaaagcaacgagtcaggatgttgattccgaatcttgtaaaagacgaaagacatgctcaacaaacgatgctgagaattgcatattcattccggatgagtcatcttggagtttatgtgccaacagagtcatcactgtggcagccgtagctttaacaaatttcagattccaacaagataaccaagaaagtaattcttcttctttatctcttccctcccttgcaacttctgtgtctcgaaactggaaacacgatgtcttcccgagcttccacggagcagatgtccgaagaacctttcttagtcacatcatggaatcgttcagaagaaagggaattgacacattcattgataataatatagagaggagtaagtcgatcggtcctgagctcaaagaagctatcaaaggatcaaagatcgcaatcgttttgctctcaagaaaatatgcttcttcgtcttggtgtcttgatgagttggccgagatcatgaaatgcaggcaaatggtgggtcagattgtcatgaccattttctatgaagtggagccaactgacataaagaaacagaccggtgaatttggaaaagccttcacaaaaacatgtagaggtaaaccaaaagagcaagttgagagatggagaaaagctttggaggatgtggcaacaatcgccggatatcattctcacagctggaggaatgaagcagacatgattgagaaaatagccactgatgtttcaaacatgttaaatagtttcacaccatcaagagatttcgacgggttagtagggatgagagctcatatggatatgctggaacaattgttgcgcttagatttggatgaagtaaggataatcgggatttggggaccgcctgggattggtaagacaactatcgccagatttctgcttaaccaagtctccgacagattccaacttagtgcaatcatggtcaatatcaaaggatgctatccaagaccttgtttcgatgagtacagtgcacaattgcaactacaaaaccaaatgttgtcccagatgatcaatcataaagatatcatgatttctcatttaggagtggctcaagaacggttgagagacaagaaagtgtttcttgttctcgatgaagtggatcaattaggacaactagatgccttggcgaaagaaactcgatggtttggtcctggaagtcggattattatcacaacagaagatctaggagttttgaaggctcatgggatcaatcatgtttacaaagtcgaatatccatcaaatgacgaggcttttcaaatcttctgtatgaatgcctttggtcagaaacaaccacacgaaggtttcgatgagattgcttgggaagttaaggctttagctggtaaactccctttgggattgaaggttctaggctctgctttgcgggggaagtccaagccagagtgggaaagaacactaccaaggttaagaactagcctcgacggaaaaatcgggggcattatacagttcagttacgatgccttatgtgacgaagataaatatctatttctttatatagcctgcctttttaacggcgaatcaacaaccaaagtgaaagagcttcttggaaagttcttggatgtgagacaaggccttcacgtattagctcagaaatctctcatatcctttgatgaagaaatctcttggaaacaaattgttcaagttcttcttttaaacaagttctcgcatgtgaggcatacgaagagaaacaagtcgcaaataatacggatgcatactctgctagaacaattcggaagagaaacttcccgtaagcaattcgttcatcaccgctatacgaaacatcagcttttggttggtgaaagggatatatgtgaagtgctcgacgatgatacaacagataatagacgttttatagggataaatttggatttatataagaatgaggaagaattgaatataagtgagaaagcacttgaaagaatccatgattttcaattcgttaaaatcaattacgtatttactcatcaacctgagagagtgcagttagcactagaagatctgatttatcactctccacgaattagatcattgaaatggtttccttaccagaatatatgtttgccttctacttttaatccggagtttctcgtcgaactagatatgcgttgcagcaagcttcggaagctatgggaaggaactaaacaacttagaaatctcaagtggatggatttgagtgattctagagatttgaaagagcttccctcctctattgaaaaactcaccagtctccaaatattagatctccgggattgctcaagtcttgtgaagctcccaccatctatcaatgccaataatctccagggattgtctctaacaaattgttcacgtgttgtgaagctccccgctattgagaatgtgactaatctccatcaattgaagctccaaaattgctcaagtctaatagagctccctctttctattggaactgccaacaatctttggaaattggatatcagaggatgttcaagtctcgtgaaacttccatcctctattggagatatgactaatctcaaagagtttgatctatctaactgctcaaatctggtggagcttccttcttctattggaaaccttcaaaaattgtttatgttgagaatgagaggatgctcaaagctagaaactcttccaacaaacatcaacttgatatctctccgtatacttgatctcacagattgctcgcagttgaaaagttttcccgagatctccacacacatttcagagctcaggttaaaaggaactgcaataaaagaagttcctttgtcgatcacgtcgtggtctcgtcttgctgtatatgaaatgtcatactttgaaagccttaaggaattcccgcatgctcttgacatcatcaccgacctacttttggtaagtgaagatatacaagaagttcctccatgggtcaagagaatgtctcgtttacgtgctcttagactcaacaactgcaatagtctggtatcactcccacaacttccagattcccttgattacatatatgcagataattgtaagtccctcgagagactggattgttgctttaacaatccagagatccgtctctatttccccaaatgcttcaaactgaatcaagaagccagagatctcatcatgcacacatcaactcgtaaatatgcgatgttaccaagtatacaagtgcctgcctgcttcaatcaccgagctacttctggggattacttgaaaatcaagttgaaggagtcgtctcttcctacaaccttgagatttaaggcttgtatcatgcttgttaaggttaatgaagaaatgagagatgatgagatgtggccgagtgtactcattgccatcagggtcaaacagaatgatctcaaagttctatgtacagcaagcatatatccagttttaacagagcatatatacacatttgaacttgaagtagaggaggtgacttccacggagcttgtctttgagttcacaccattccacaaaagcaattggaagataggagaatgcgggatactccaaagagaaacgagatcattttgccggagctcttcgccggatcttccgccagaatcttctcgtgcgttctctctctctctctctcactctccctttctatctctctgtctcatggattggttaatgattcgatttctcctaatgggtttcaggtgtgtttctagctag

SEQ ID NO: 102278 - protein, 1240 aa, Arabidopsis thaliana
MGSAMSLSCSKRKATSQDVDSESCKRRKTCSTNDAENCIFIPDESSWSLCANRVITVAAVALTNFRFQQDNQESNSSSLSLPSLATSVSRNWKHDVFPSFHGADVRRTFLSHIMESFRRKGIDTFIDNNIERSKSIGPELKEAIKGSKIAIVLLSRKYASSSWCLDELAEIMKCRQMVGQIVMTIFYEVEPTDIKKQTGEFGKAFTKTCRGKPKEQVERWRKALEDVATIAGYHSHSWRNEADMIEKIATDVSNMLNSFTPSRDFDGLVGMRAHMDMLEQLLRLDLDEVRIIGIWGPPGIGKTTIARFLLNQVSDRFQLSAIMVNIKGCYPRPCFDEYSAQLQLQNQMLSQMINHKDIMISHLGVAQERLRDKKVFLVLDEVDQLGQLDALAKETRWFGPGSRIIITTEDLGVLKAHGINHVYKVEYPSNDEAFQIFCMNAFGQKQPHEGFDEIAWEVKALAGKLPLGLKVLGSALRGKSKPEWERTLPRLRTSLDGKIGGIIQFSYDALCDEDKYLFLYIACLFNGESTTKVKELLGKFLDVRQGLHVLAQKSLISFDEEISWKQIVQVLLLNKFSHVRHTKRNKSQIIRMHTLLEQFGRETSRKQFVHHRYTKHQLLVGERDICEVLDDDTTDNRRFIGINLDLYKNEEELNISEKALERIHDFQFVKINYVFTHQPERVQLALEDLIYHSPRIRSLKWFPYQNICLPSTFNPEFLVELDMRCSKLRKLWEGTKQLRNLKWMDLSDSRDLKELPSSIEKLTSLQILDLRDCSSLVKLPPSINANNLQGLSLTNCSRVVKLPAIENVTNLHQLKLQNCSSLIELPLSIGTANNLWKLDIRGCSSLVKLPSSIGDMTNLKEFDLSNCSNLVELPSSIGNLQKLFMLRMRGCSKLETLPTNINLISLRILDLTDCSQLKSFPEISTHISELRLKGTAIKEVPLSITSWSRLAVYEMSYFESLKEFPHALDIITDLLLVSEDIQEVPPWVKRMSRLRALRLNNCNSLVSLPQLPDSLDYIYADNCKSLERLDCCFNNPEIRLYFPKCFKLNQEARDLIMHTSTRKYAMLPSIQVPACFNHRATSGDYLKIKLKESSLPTTLRFKACIMLVKVNEEMRDDEMWPSVLIAIRVKQNDLKVLCTASIYPVLTEHIYTFELEVEEVTSTELVFEFTPFHKSNWKIGECGILQRETRSFCRSSSPDLPPESSRAFSLSLSHSPFLSLCLMDWLMIRFLLMGFRCVSS

SEQ ID NO: 102279 - DNA, 3690 bp, Arabidopsis thaliana
  CDS (1)..(3690)
atggcttcttcttcttctcgcagctggacatacgatgttttcccgagtttcagtggggaagatgtccgtaaatcattcctcagccaccttctcaagaagcttcatcgcaaatcaatcaatacattcatagacaacaacatcgagagaagccacgcgatcgcccctgaccttttatccgcgataaataactcgatgatctcaatcgtggtattctctaagaagtatgcttcttccacctggtgcttgaatgaattggtggagatccacaagtgttataaggagttgactcaaattgtcattccgattttctacgaagttgatccttctgatgttagaaagcaaaccagagagtttggcgagttctttaaagtgacctgcgtggggaaaacagaagatgtgaagcaacaatggatagaagctcttgaagaggtagcaagtatagccggacatgattctaagaattggcctaacgaagcaaacatgattgaacatatcgccaaagatgtgttaaataaacttattgcaacatcatcatcgaattgttttggagatcttgtcgggatcgaagctcatttaaaggcagtgaagtcaatcttgtgcttggaatctgaggaagcaagaatggtagggattttggggccttcaggcattggtaagactaccatagctagaattttatacagtaagctctctagccaattcgactatcacgtttttggttcttttaagagaaccaaccaggacaactatggcatgaagttgagttgggaagagcagtttctgtcagaaattctagatcaaaaggacctaaagataagccaattaggtgtggtgaaacagaggctaaagcataagaaagtacttatcgttcttgatgatgtggataatctagagctattaaagactttagtgggacaaaccgggtggtttggacctggaagcagaattatcgtgaccactcaagataggatccttctcaagtctcacaagattgatcatatttatgaggtggggtacccatcgagaaaattggctcttcggattttatgtcgatctgctttcgacagaaactccccacctgatggtttcatgcagcttgcaaatgaagttacagagcttgttggtaatcttcctttggctctcaatatcatgggttcgtctttgaaagggagggacaaggaagagtggatagagatgatgcctagtctccgaaatagtttggtggatggagaaattctgaaaacattaagagtcagctatgatcgattacatgggaattatcaagaaatattcctttatattgcgtgtttactaaattgctgtggagtcgaatacattataagcatgcttggagataatgctatcattgggttgaaaatactggctgagaagtccctcatacatatatcaccactggacaaaactgtagagatgcacagtttgctacaaaagttgggtagaaagattgttcgtgatgaatcctttggaaatcctggaaaacgccggttcttgttggatgctgaggatatttgtgatgtatttaccgataataccggcacagaaactgtactaggtatatctcttaacacattggaaatcaacgggacattgtctgtagatgataaatcattccaaggtatgcataatctccaatttcttaaagttttcgagaattggcggcgggggagtggtgaaggcatattgtctttacctcaaggcctcaattctttgccccgaaaactcagactactacactggtataaattcccgttgaggtgtatgccttctaacttcaaggccgagtatctggttaacctagaaatggcgtatagccagcttgagaggttgtgggaaggaactcagcaacttggaagtctcaagaagatggatctgtccaagtccgaaaatttgaaagaaattccagatctttcttacgccgtaaatctagaggaaatggatctttgcagttgtaaatctttggtaacacttccttcctcagttcgaaatcttgataaacttagggtgttaagaatgagtagctgctcaaatgtcgaagttcttccaactgatctcaacttggaatctctcgatctccttaatcttgaagattgctcacagttgagaagttttcctcagatttcaaggaacatttcaattcttaatctaagtggaactgcaatagacgaagaaagttctttatggatagagaatatgtctaggctcactcatctccgctgggacttttgtccactgaaaagtctgccttctaactttcgtcaagaacatctcgtttctttacatatgacacatagcaagcttgagaagttatgggaaggagcccagccttttggaaatctcgtgaatattgatctttcgctatctgaaaagctgaaagaatttccaaatctttcaaaggtcaccaatctcgatacgttggatctttatggttgcaaaagtttggtgacagttccctcctcaattcagagtctcagtaagctgacggaattgaacatgagaagatgcacaggtctcgaggctcttcctacggatgtgaacttggaatctcttcatactctagatctcagtgggtgctcaaagttgacaacttttcctaagatttcaagaaacattgaacgtctccttctggacgacactgcgattgaagaagttccttcgtggattgatgatttctttgagctcactacactcagtatgaaaggttgcaagaggttaagaaacatctctacaagcatttgtgaattgaaatgtattgaggtggcaaacttctctgactgtgaaagactcacagaatttgatgatgcaagtatggtaagaagaatcttacgcaccattgatgatctgatagcactgtacgaggaggcttcatttcttcatgcaatatttgtactgtgcagaaaactcgtatcaatatgtgcaatggtttttaaatatccccaagctctctcttacttcttcaacagtccagaggctgatctcattttcgctaactgctccagtttggatcgagatgcggagacactcatcctagaatcaaatcacgggtgcgcggtcttaccaggtggaaaagtgcctaactgtttcatgaatcaagcttgtggaagttccgtatctattcctttacatgagagctattattctgaagaatttcttggctttaaggcttgcattgtgcttgaaactccgcctgacctgaattttaaacaatcgtggatttgggtacgctgctatttcagagacaaatgtgtcgagcatagtgtccagttttcctgggactcgaataagatggatcacctgcttatgatcaactttcggctccctacaaaagaaataattggatgtccatctcaattggacaccgatgacttgatgttttttttttaccaccatatgtattatgcttgtaattcctacgtaaatccttctccatgctcagtccaaaggataaaaggatgtggtataaaattttgggatgtctctcccagagttctatctcaaagtgagcttgatacttacttctcctggccagttaaaggtgaaggtgaagctgaaggtgaaagtgaaggtgaaagcgaagacgaacaagaagaagacgaagatgaagatgcatatttggagattgaggatgactcgagcttgtcgtcgtttgtaggtggaggagaatattggtga

SEQ ID NO: 102280 - protein, 1229 aa, Arabidopsis thaliana
MASSSSRSWTYDVFPSFSGEDVRKSFLSHLLKKLHRKSINTFIDNNIERSHAIAPDLLSAINNSMISIVVFSKKYASSTWCLNELVEIHKCYKELTQIVIPIFYEVDPSDVRKQTREFGEFFKVTCVGKTEDVKQQWIEALEEVASIAGHDSKNWPNEANMIEHIAKDVLNKLIATSSSNCFGDLVGIEAHLKAVKSILCLESEEARMVGILGPSGIGKTTIARILYSKLSSQFDYHVFGSFKRTNQDNYGMKLSWEEQFLSEILDQKDLKISQLGVVKQRLKHKKVLIVLDDVDNLELLKTLVGQTGWFGPGSRIIVTTQDRILLKSHKIDHIYEVGYPSRKLALRILCRSAFDRNSPPDGFMQLANEVTELVGNLPLALNIMGSSLKGRDKEEWIEMMPSLRNSLVDGEILKTLRVSYDRLHGNYQEIFLYIACLLNCCGVEYIISMLGDNAIIGLKILAEKSLIHISPLDKTVEMHSLLQKLGRKIVRDESFGNPGKRRFLLDAEDICDVFTDNTGTETVLGISLNTLEINGTLSVDDKSFQGMHNLQFLKVFENWRRGSGEGILSLPQGLNSLPRKLRLLHWYKFPLRCMPSNFKAEYLVNLEMAYSQLERLWEGTQQLGSLKKMDLSKSENLKEIPDLSYAVNLEEMDLCSCKSLVTLPSSVRNLDKLRVLRMSSCSNVEVLPTDLNLESLDLLNLEDCSQLRSFPQISRNISILNLSGTAIDEESSLWIENMSRLTHLRWDFCPLKSLPSNFRQEHLVSLHMTHSKLEKLWEGAQPFGNLVNIDLSLSEKLKEFPNLSKVTNLDTLDLYGCKSLVTVPSSIQSLSKLTELNMRRCTGLEALPTDVNLESLHTLDLSGCSKLTTFPKISRNIERLLLDDTAIEEVPSWIDDFFELTTLSMKGCKRLRNISTSICELKCIEVANFSDCERLTEFDDASMVRRILRTIDDLIALYEEASFLHAIFVLCRKLVSICAMVFKYPQALSYFFNSPEADLIFANCSSLDRDAETLILESNHGCAVLPGGKVPNCFMNQACGSSVSIPLHESYYSEEFLGFKACIVLETPPDLNFKQSWIWVRCYFRDKCVEHSVQFSWDSNKMDHLLMINFRLPTKEIIGCPSQLDTDDLMFFFYHHMYYACNSYVNPSPCSVQRIKGCGIKFWDVSPRVLSQSELDTYFSWPVKGEGEAEGESEGESEDEQEEDEDEDAYLEIEDDSSLSSFVGGGEYW

SEQ ID NO: 102281 - DNA, 3681 bp, Medicago truncatula
  CDS (1)..(3681)
atggattcaaactccaaattttcagagattttgctctcatggaggtccttgctcctgcaaccatttcgggctctgttaggtcgtttgtcattttccaattcgggccaaggaggtacagctttttccggttcttccattgattccagtggagtgcatagctataaatacgacgtgtttatcagtttcagaggtccagacacccgcaacacttttgttgatcatctttatgctcatctaacaagaaaaggtatttttgcgttcaaggatgataaaaggctcgagaaaggagaatgcctttcgctgcaacttcgacaagcaattgcaaattcacggatatctatcgttgtcttctcagaaagatatgctgagtcaacatggtgtttggaagaaatggctactattgttgaatgtcgtagcaatttcttacaaactgttttccctgttttttatgatatcaatccatctcatgtacgaaaacagaacggtgtgtaccagaatgcctttgtttcacacatgaaaaaattgaaacatgatctgaataaggttgagagatggacgaaagctatggtctatttaactgaaatagttggttgggatgttaggaacaagccagagtttcgagagattcaagatattgttcagcaggtaataaaaacattgggtcataaattctcagggtttgctgatgaccttatcgggatacaacctcgagtagaagaattagaaagtcttctgaaattaaactcagacaatgatgactttcgttttataggtatttgggggatggctggaatcggaaagacaactcttgcttccgtcttgtatgatagagtctcctatcagtttgatgcaatctgttttattgagaatgtaagcaaaatttataaagatggtggtgccactgctgtacagaaacaaatccttcggcaagccacaagtgaaaaaaacctagagacatacagcccttctgaaatatctggaattgtacgtaaaagactttgcaacaaaaagtttcttgtagttcttgacaatgctgatctattagaacaaatggaagaattggctataaatcctgaattgcttggtaaaggaagtagaatgatcattacaaccagggatatgcatattctaagagtgtttggagctcagttatcagtatctcacgatacatgtgtgtcgtacgatgtgtatgaggttccactattgaatagcaatgatgcccgtaaacttttctatagaaaagctttcaaaagtgaggatcccactagcggatgtgtaaagctcactcctgaggtactaaaatatgctcaaggtcttccattggcagttcgagtagtggggtctttcttgtgcactcgagatgctaaccaatggagagatgccttgtatagattgaggaataatccagacaacaaagttatggacgtgcttcaggtaagtttgcagggattacatttagatgaccaagaaatatttctgcatattgcctgtttctttaaaggaatgaaagaagattatgtgaagcgaattctcgatgcttgtgggttgcatcctcacattggcattcaaagtttgattgagaggtcactcgtaactattagaaatcaggaaattcatatgcatgaaatgttgcaagaattgggaaagaaaatagttcgacaacaatttcctggcgaacctggattgtggagtagattgtggctttttgaggatttctaccctgtcatgatgacagagatgggaacaaacaatgttaaagccattattctaaataaaaaagagcatatctctgaatatcctccgctgagggccgaaggattgtcaataatgaggggacttaaaattcttatattatatcatcaaaaaatttcaggaagtctcaatttcatttctaacagcttgcagtatcttctttggtatggttacccttttgcttctttgccattaaattttgagccatttggtcttgttgaattgaatatgccttgtagcagcatccaacgactatgggacggtcacaaggatctcccttgtttgaaaagggtggatctcagcaactccaaatatcttctggagactcccaattttgatggaagccgaagacttgaacgtctagattttacaggatgcataaacctatcgtatgtccatccgtccattggacttctggaaaaacttgctttcttgagtttggaaggctgcagcagtttggtcaggctagttcttgatggtgatgatgcatctaacttacattctctcaaagttctacacctctctggctgcctaaaacttgaaaccatgccagattttactggggtctcaaatcttgagtatcttgatgttgatcaatgttcgagtttatcaacgattggtcaatctattgcggttcttacacagcttaagttcttgagtttaagagactgcacaaatcttgttagtattcccaaaagcattaattgtatgacatctcttgtaactctagatttatgtggctgcttaagactagagaatctacccttgggaaatgtatcagtgtctgctgaaaatatggactacttttcagtctctggagaaattgttgaccactcttactatctggagtctttgatttttttggacctaagcttttgcaatttaagtacagttcctgatgctattggagatttatggcatttagaaaggctaaatcttgaaggaaacagctttgtttccctaccaccttcaatggagaggctttccagtctagcatatttaaacttggcacattgcagctggcttcaatctttgcctaagctccaattgtgtgctacttcttcatatggtggaaggtattttaaagtgttatctggatctcataatcataggtcaggattatatattttcaactgtcccctcttggagatcgcagaaggaggtcaaagcttggcactttcatggctagagagattagttgagaatcctcatcatttccggtgtggttttgacattgttgttcctggggagaaaattccagaatggtttaatcatcaatttacgggaaattcaataataaagatatcagactttacaaatgagtttgacaactggctcggctttgccttttgtgtggcatttgtggaaaactgtggttcaactacgtctggtttttcacttcgttcattttcctctcagcttacatatcctctttatctttcttttgaaagtgaacatatggaagaaactttcgatataccgcttcggtttgacctgaacatagttgatggctcaaattcagagcatctctggctaatctatatctctagaccccactgccattttgtaacaacaggagcacatatcacatttaaagcttgcccttatctggagataaaaagatggggattatgcaaggtactcgagcatgatatctctatctcatccgagttggggatagatgatgttcgacatcaacgctatcttcacttggatcatgtacatgaaagtagcagcagcagcagtcctgacctccagcttccttataactggtatgaaactgaggtagagataaaacctaaaatcaaacttcgttataactggcatgttacggaggaacaggaaaatgagaatagggaagtgaatgtgaaacaaaatcatctctcagatatgggactcaacacatacatagatgatgatttgcattaa

SEQ ID NO: 102282 - protein, 1226 aa, Medicago truncatula
MDSNSKFSEILLSWRSLLLQPFRALLGRLSFSNSGQGGTAFSGSSIDSSGVHSYKYDVFISFRGPDTRNTFVDHLYAHLTRKGIFAFKDDKRLEKGECLSLQLRQAIANSRISIVVFSERYAESTWCLEEMATIVECRSNFLQTVFPVFYDINPSHVRKQNGVYQNAFVSHMKKLKHDLNKVERWTKAMVYLTEIVGWDVRNKPEFREIQDIVQQVIKTLGHKFSGFADDLIGIQPRVEELESLLKLNSDNDDFRFIGIWGMAGIGKTTLASVLYDRVSYQFDAICFIENVSKIYKDGGATAVQKQILRQATSEKNLETYSPSEISGIVRKRLCNKKFLVVLDNADLLEQMEELAINPELLGKGSRMIITTRDMHILRVFGAQLSVSHDTCVSYDVYEVPLLNSNDARKLFYRKAFKSEDPTSGCVKLTPEVLKYAQGLPLAVRVVGSFLCTRDANQWRDALYRLRNNPDNKVMDVLQVSLQGLHLDDQEIFLHIACFFKGMKEDYVKRILDACGLHPHIGIQSLIERSLVTIRNQEIHMHEMLQELGKKIVRQQFPGEPGLWSRLWLFEDFYPVMMTEMGTNNVKAIILNKKEHISEYPPLRAEGLSIMRGLKILILYHQKISGSLNFISNSLQYLLWYGYPFASLPLNFEPFGLVELNMPCSSIQRLWDGHKDLPCLKRVDLSNSKYLLETPNFDGSRRLERLDFTGCINLSYVHPSIGLLEKLAFLSLEGCSSLVRLVLDGDDASNLHSLKVLHLSGCLKLETMPDFTGVSNLEYLDVDQCSSLSTIGQSIAVLTQLKFLSLRDCTNLVSIPKSINCMTSLVTLDLCGCLRLENLPLGNVSVSAENMDYFSVSGEIVDHSYYLESLIFLDLSFCNLSTVPDAIGDLWHLERLNLEGNSFVSLPPSMERLSSLAYLNLAHCSWLQSLPKLQLCATSSYGGRYFKVLSGSHNHRSGLYIFNCPLLEIAEGGQSLALSWLERLVENPHHFRCGFDIVVPGEKIPEWFNHQFTGNSIIKISDFTNEFDNWLGFAFCVAFVENCGSTTSGFSLRSFSSQLTYPLYLSFESEHMEETFDIPLRFDLNIVDGSNSEHLWLIYISRPHCHFVTTGAHITFKACPYLEIKRWGLCKVLEHDISISSELGIDDVRHQRYLHLDHVHESSSSSSPDLQLPYNWYETEVEIKPKIKLRYNWHVTEEQENENREVNVKQNHLSDMGLNTYIDDDLH

SEQ ID NO: 102283 - DNA, 3264 bp, Medicago truncatula
  CDS (1)..(3264)
atggcttgcactaataaaagtatcattcaaagtagcaatatggtgagtgatcagagcagaaaatcatcatatgacgtgtttatcagcttcagaggagcagacacacgattcaacttcactgatcatcttttttccgccctccaaataagaggcattgttgcatttagagatgacactaagcttaagaaaggtgaatctatagcacctgaactccttcgtgctatcgaagcctctcggactttcattgttgtcttctcaaacaactatgcttcctcaacttggtgcttgcgggaattgcaatacatccttcattgcgtacaactttctggaaaacgtgttctccctgttttctatgatgttgatccttccgaggtgcgaaagcaaagtgggagttataaaaaagcatttgcccaacatgaggaaagattcaaacaagacactgaggtcctgcaaggatggaggacagctctcacgcaagtcgccaatctttcaggttgggatatacgtgataagccccagtcagcagagattaaaaagattgttgaagagatagtaaatatattgaattgcaaattttcaagccttccaaatgatttagttgggacgcattctctcatagaaagattggaaaagcttttacttttggatgtggttgatgatgttaggattgttggaatttctgggatgggtggagtagggaagacaactcttgctaggattttatatagaagaatctcttctcggtttgatgcatgttgctttattgatgatctaagcaaaatttgcaaacatgctggtccagttgctgcacaaaagcaaattctaagccaaactttaggcgaagaacaccttcagatatgcaatctaagtgacggagctaatttgatacaaaataggcttggtcatctgagggccttcataattcttgataatgttgatcaaggagaacaattggagaaattggctttgaaccgtaagctgttaggtgttgggagtagaatcattataatttcgagagatactcatatcttgaataggtatggagtggatgtagttttcaaagttccactcttgaatcaaactaattctcttcaattattttgccaacaagctttcaaacgtgataatattttgagtaattatgacgagttggtatatgagatactaaattatgctaatggcttaccactagcgattaaagcattgggctcatttttgtttggtcgagatatttatgaatggagaagtgcattgactagattgagagacaatccaaacaaagatatcttcgatgtattgcgattgagttttgatgggctagagaacatggaaaaagaaatatttctcgatattgcatgttttttcaatggacgtaaggaagcacttgttaaaaatgtactgaattgttgtggatttcatgctgatattggattaagagttctcattgacaaatcacttataagcatatcagaaaaaagtaagattgaaatgcatggtttgttagaagagctgggcaaaaaaattgttcaagaaaattcaagcaaagattcaagaaagtggacaaggttgtggctccatgaatatttcaacaatgttatgtcagagaataaggaaaagaatgttgaagccatagttttgaggcgtggacggcaaagagaaacaaaaatagttatagccgaagcattgtcaaagatgagtcatcttagaatgcttatacttgatggaatggacttctcaggaagcttggattgtatttctaatgaattaagatatgttgagtggcgggaatatcctttcatgtatttgccatcaagttttcaaccctaccaacttgttgagttgatcttggaagatagcagcatcaaacaactatgggaaggcacgaagtacttgccaaatttgagaactcttgaattgaggaactccaaaagtctaataaaagtgccagatttcggagagatccctaatcttgagcggctaaatctcaaaggatgtgtaaaacttgagcagatagatccatctattagtgttctaagaaaacttgtttacttgaatttggaagattgcaaaaatctagtaaccataccgaatgacttgtttggtctcacctctcttgagtatctaaatctttctggatgttacaaggcatttaacacttcattgcatttgaagaattatattgattcaagtgaaagtgcgtcacattcccaatcaaaattttccatatttgactggatcactttgcctctccaatctatgtttccaaaagaaaacctggacatgggtttagcaatacctagttgtttgttgccttcattgccaagcttatcctgtttgcgtaaacttgatattagttattgcagtttaagccaaatccctgatgctattggttgcctactttggttagaaagattaaatttagggggaaacaattttgtgacattgcctagtttcagagaactttcaaaacttgcatatttgaatttagagaactgtatgcagttgaaatattttcctgagcttccttcagcttcctccatcgaacacgagcacagtcatatgttttcagatactagttattggaggagagcaggattgtgtattttcaactgtcctgaattgggtgagatggaaaagtgcagtgacttggcattttcatggatgatacaatttttgcaggcaaaccaattagaatcctcctctgtcttcttccgcgaaatcaatattgttatacctggaacagaaatgccaaggtggttcaacaatcagaacatggaaagttcaataagtatagacatatctcctatcatgcatcatgacagtgatgtcattgcttttgcgtgttgtgtagtattttctgcagcgccttatccatctacgaatatgaaaaccaattaccgaaagcctgtaatacatttgtgttttagtagcggtgacttggaggtatttctaggcattccagcacatacaaatttaaatatgctgaaatcaaatcacatttggctagcttatttcactcgagaatcattcattgatcttatgagtgatatagacagtacacttggtgatattagaatggaagttttgattgtggatggtgaaggtttggatgtagaggtgaagaattgtggttatcgttgggtatataaacatgatctacaacatctcaactttacaatgatgcattgcaaaagttcattagctcagaactgcgacattttgggaatcgaagatgaggcacaaccagaagtgaaaccacggtaa

SEQ ID NO: 102284 - protein, 1087 aa, Medicago truncatula
MACTNKSIIQSSNMVSDQSRKSSYDVFISFRGADTRFNFTDHLFSALQIRGIVAFRDDTKLKKGESIAPELLRAIEASRTFIVVFSNNYASSTWCLRELQYILHCVQLSGKRVLPVFYDVDPSEVRKQSGSYKKAFAQHEERFKQDTEVLQGWRTALTQVANLSGWDIRDKPQSAEIKKIVEEIVNILNCKFSSLPNDLVGTHSLIERLEKLLLLDVVDDVRIVGISGMGGVGKTTLARILYRRISSRFDACCFIDDLSKICKHAGPVAAQKQILSQTLGEEHLQICNLSDGANLIQNRLGHLRAFIILDNVDQGEQLEKLALNRKLLGVGSRIIIISRDTHILNRYGVDVVFKVPLLNQTNSLQLFCQQAFKRDNILSNYDELVYEILNYANGLPLAIKALGSFLFGRDIYEWRSALTRLRDNPNKDIFDVLRLSFDGLENMEKEIFLDIACFFNGRKEALVKNVLNCCGFHADIGLRVLIDKSLISISEKSKIEMHGLLEELGKKIVQENSSKDSRKWTRLWLHEYFNNVMSENKEKNVEAIVLRRGRQRETKIVIAEALSKMSHLRMLILDGMDFSGSLDCISNELRYVEWREYPFMYLPSSFQPYQLVELILEDSSIKQLWEGTKYLPNLRTLELRNSKSLIKVPDFGEIPNLERLNLKGCVKLEQIDPSISVLRKLVYLNLEDCKNLVTIPNDLFGLTSLEYLNLSGCYKAFNTSLHLKNYIDSSESASHSQSKFSIFDWITLPLQSMFPKENLDMGLAIPSCLLPSLPSLSCLRKLDISYCSLSQIPDAIGCLLWLERLNLGGNNFVTLPSFRELSKLAYLNLENCMQLKYFPELPSASSIEHEHSHMFSDTSYWRRAGLCIFNCPELGEMEKCSDLAFSWMIQFLQANQLESSSVFFREINIVIPGTEMPRWFNNQNMESSISIDISPIMHHDSDVIAFACCVVFSAAPYPSTNMKTNYRKPVIHLCFSSGDLEVFLGIPAHTNLNMLKSNHIWLAYFTRESFIDLMSDIDSTLGDIRMEVLIVDGEGLDVEVKNCGYRWVYKHDLQHLNFTMMHCKSSLAQNCDILGIEDEAQPEVKPR

SEQ ID NO: 102285 - DNA, 3267 bp, Medicago truncatula
  CDS (1)..(3267)
atgagtatggtgcatggttttgtattgcggcggtatgtaacagcagcagttggttcaattacgaagtttagaagatcttcatgttggaatgaaacactatattcaaagaaaggaatttcgactgttaattcccaacatttcacaaaagcgttacgtttggggccttgtataagttctcaattttcttcagtttcaataaatgcaacaactcaatatgatgtttttgttagctttcgcggcgaagacatccgcgcgaattttcttagtcatttgattgaggattttgatcgaaagaaaataaaagcctttgtagatgataaacttaagaggggagatgaaataccacaatcacttgtcagagcaattgaaggatcgttaatttccttgatcatattttcacacgactatgcttcttcatgttggtgtttagaagaacttgttacaacacttcaatgcagagagaaatatggacagatcgttatacctattttttatcaggtagatcctacagatgtaagatatcaaaacaagagttatgataatgcatttgttgaactccaaagagggtatagctccaccaaggtgcaaatttggagacatgctttgaacaaatctgctaatttatctggaattaagtcatcagattttcggaatgatgtccaacttcttaaagaaatcatcaaatgtgtgtcgataaatttgaacaacaagcaactagttagctcaaaaggactcattggaattggaaaacaaactgcacatctaaagtcattattaagccaagagtcagaagatgttcgtgttgttgggatttggggtatgggtggtattggcaagacaacccttgcagaagaagtgtttcaccaactacaatctgagtatgaaggatgttgttttctagaaaacataagggaagaatcggcaaaacatggaatggttttcttaaaagaaaagcttatttctgcactgttagatgaagttgttaaagttgacattgcaaatagattgcctcattatgttaaaactaggattcgtcgcatgaaagttcttattgttctagatgatgtgaatgattttgatcaacttgaaatcttatttggagatcatgatttgtttggatttggtagtagaatcattataacaacaagagataagcaaatgctttctaaagatgttgatgatatattggaggtaggtgcattggactatgacaaatcacttgagcttttcaatttgaatgctttcaaaggtaaggaacttgaaattgagtacaatgagctatcaaagagggtggtgaattatgccaaaggcattccattagttcttaaagttttggcgcatcttgtccgcggaaaagataagctagtatgggaaagtcaactagacaagcttagaaaaatgccaagtaaaaaagttcaagatgtaatgagattgagttatgatgatctagatcgcgaagagcaaaagatttttttagatattgcatgttttttcaatgggtcgaatttgaaagtggactacctaaaactattgtggaaagattctgaaagtgataattcagtagccagtgggttagaaaggttgaaagataaagatcttgtttctgtttctaaacataatgttatatctatgcatggaattatacaagacatgggtagggagattgttcgccaagaatcaagtggagaccctggaagccgtagtcgattatgggatgatgacatttatgaagtattaaaaaatgacaaggggactgaagaaattagaagcatatggatgccattgccaacacttaggaatctgaagttaagcccttcaacattttctaagatgagaaatctacaatttctgtatgtccctaatgtatatgatcaagatggttttgatcttcttcctcatggacttcattctatgccacctgaactaagatacctctgttggatgcattaccctttgaaatcattgccagatgaattttcagcggagaaactcgttatattggacttgtcatatagtcgagttgaaaaactctggcatggagtgcagaacctgctgaatttgaaagaagttaagctcttttactcaaggttcctgaagcagttgccggacttttcgaaagccctgaatctggaagtattggatatccatttttgtggtcagttgactagtgtgcatccatctattttctctctagaaaatcttgagaaattggatctcagtcattgcactgcccttaccgagctaacaagtgatacacattcaagctccctaagatatcttagccttaagttttgcaaaaatataagaaagttctctgtgacatcagagaatatgatagagttggatttacaatacacacaaatcaatgcattgcctgcatcatttggacgtcaaaccaagcttgaaatcctacatttaggaaactgttccattgaaagatttccttcatgttttaagaatttgataagactgcaatatctagacataagatattgccttaagctgcaaactctaccagagcttcctcaatctcttgaagttctacacgcgcgaggatgcacatcactagagagtgtgttgttcccttcaattcctgaacaattcaaggagaacaggtatagggttgtattcgcgaattgcttgaaattggatgaacattctcttgcaaatattgcgtttaatgcgcaaataaacaatatgaaatttgcatgccaacatgtatcagctttggaacatgattttcataataagttcaatgattataaggatcacaatgattcttatcaagcaatttacgtgtatccaggaaacagcgttccagagtggtttgagtatatgacaacaacggattatgtagtcattgatctatcttcttctacatcaagttcccctttgctcggcttcattttctgttttgtacttggtgggaaccggttaattgttgccccgttaaaatttaacatcactatctgtgatcttgaggaccaaggtaaggaggaggagcattttgaactctgcatatctagaccatctgcaagtattgtatccgatcatgtttttatgctctatgacaaacaatgttcttgctacctaaatagcaaagccaaagatatgacaaggtttgaaatcaaggtaacaacacgtttatcatccatgcatcctataatttattcaggcatgtgtatggagctaaaagggtttggtgttaacgtaatagatgcctcagcatatcacagtttcattcagacgatgggattgcctgattga

SEQ ID NO: 102286 - protein, 1088 aa, Medicago truncatula
MSMVHGFVLRRYVTAAVGSITKFRRSSCWNETLYSKKGISTVNSQHFTKALRLGPCISSQFSSVSINATTQYDVFVSFRGEDIRANFLSHLIEDFDRKKIKAFVDDKLKRGDEIPQSLVRAIEGSLISLIIFSHDYASSCWCLEELVTTLQCREKYGQIVIPIFYQVDPTDVRYQNKSYDNAFVELQRGYSSTKVQIWRHALNKSANLSGIKSSDFRNDVQLLKEIIKCVSINLNNKQLVSSKGLIGIGKQTAHLKSLLSQESEDVRVVGIWGMGGIGKTTLAEEVFHQLQSEYEGCCFLENIREESAKHGMVFLKEKLISALLDEVVKVDIANRLPHYVKTRIRRMKVLIVLDDVNDFDQLEILFGDHDLFGFGSRIIITTRDKQMLSKDVDDILEVGALDYDKSLELFNLNAFKGKELEIEYNELSKRVVNYAKGIPLVLKVLAHLVRGKDKLVWESQLDKLRKMPSKKVQDVMRLSYDDLDREEQKIFLDIACFFNGSNLKVDYLKLLWKDSESDNSVASGLERLKDKDLVSVSKHNVISMHGIIQDMGREIVRQESSGDPGSRSRLWDDDIYEVLKNDKGTEEIRSIWMPLPTLRNLKLSPSTFSKMRNLQFLYVPNVYDQDGFDLLPHGLHSMPPELRYLCWMHYPLKSLPDEFSAEKLVILDLSYSRVEKLWHGVQNLLNLKEVKLFYSRFLKQLPDFSKALNLEVLDIHFCGQLTSVHPSIFSLENLEKLDLSHCTALTELTSDTHSSSLRYLSLKFCKNIRKFSVTSENMIELDLQYTQINALPASFGRQTKLEILHLGNCSIERFPSCFKNLIRLQYLDIRYCLKLQTLPELPQSLEVLHARGCTSLESVLFPSIPEQFKENRYRVVFANCLKLDEHSLANIAFNAQINNMKFACQHVSALEHDFHNKFNDYKDHNDSYQAIYVYPGNSVPEWFEYMTTTDYVVIDLSSSTSSSPLLGFIFCFVLGGNRLIVAPLKFNITICDLEDQGKEEEHFELCISRPSASIVSDHVFMLYDKQCSCYLNSKAKDMTRFEIKVTTRLSSMHPIIYSGMCMELKGFGVNVIDASAYHSFIQTMGLPD

SEQ ID NO: 102287 - DNA, 3828 bp, Medicago truncatula
  CDS (1)..(3828)
atggctagcaatagcaactcatcttcagctcttgtgacttcttcaaaaagatattattatgatgtgtttgtcaccttccgaggtgaagacactcgcaacaatttcattgattttctttttgatgccctggaaacaaaaggcattcttgtatttcgggataacagaaatcttcaaaaaggtgaatccataggacctgaacttcttcaatcaatcgaaggatctcaggtttatgttgcggttttctcaagaaactatgctttctcaacatggtgtttgcaagaaatagagaagatttgggaatgtgtccaaggatccgaaaaacttgttcttcctgttttttatgatgttgatccttctgaggttcgaaagcaaagtggaatttatgataaagcttttgtcaaacatgaacaaagattccaacaaaactctcagatggtgtcaagatggagagaagctctaaaacaagtggggagtatctctggttgggatctatgtgataagccacaagttggtgagattaaaaagattgttcaaaggataatgaatatattggagtgcaattcttcatgtgtttcgaaagatttagtagggattgattctcctatagaagcattacaaaatcatttgcttttggactcagttgatggtgttcatgctataggaatttgtggaatgggaggaatagggaagacaacccttgccatgactttatatgaccaaatatctcatcgatttagtgcaaattgttttattgatgatgtaagcaaaatatatagattatgtgatggtcctttggatgcacaaaagcaaattctatttcaaactctcgacataaaacaccatcaaatatgcaatcgttacattgcaactgatttgatacgacgtaggctaagtcgtgaaaagaccctagtgattcttgataatgtggatcaaggtgaacaatcggaaaaaatagctgtgcatcgtgagtggttaggtgcaggtagtagaataattatcatttctagagatgagcatatattgaaagagtatggagtggacgtagtttacaaagttccacttttgaatcggaccgattctcacaagttattttgtcaaaaagctttcaaacatgagaaaattattatgagtagttaccaaaatttggattttgagatactgagttatgctaatggtcttccactagcaattaaagtattgggctcatttttgtttggtcgtaatgtgactgaatggaagagtgcattggctagattgagagaaaggccagataacgatgtcatggatgtgctacagttaagttttgatggtctaaatcatatggaaaaagaaatatttcttgatattgcttgttttttcaaccgcgaatcagagaaatatgtaaaaaacgttctaaatcattgtggatttcatgctgatattggattaagagttctcattgataaatcacttataagcattaatagtgattcagtgattgaaatgcattctttattggttgagctaggcagaaaaattgtgcgagaaaattcaagcaaagagcaaagaaagtggagcagggtgtggtcccaaaaacaactctacaatgttacgatggagaaaatggaaaggcatgttgaagccatagttttgaatgatgatgatgttgaagaggtggacgttgaacagttgtcaaaaatgagtaatcttagattactcatcatcaagtggggtccgaatatcccaagtagcccatcgagtctttcaaacacattaagatatgttgagtggaattattatcctttcaagtatttgccatcaagttttcaccccagtgatcttgtagagttgatcttgatgtatagcgacatcaaacaactatggaagaacaagaagtatcttcccaatttgagaagattggatctaagacactccagaaatctagaaaagatagtagattttggagagttcccgaatcttgagtggttaaatttggaattatgtgcgaaccttgttgagttagatccatctattggacttctaagaaagcttgtttacttgaatttggaaggttgcgtaaatctagtaagcatacccaacaacatatccggtcttagctctcttgaagatctaaatatatgtggttgttccaaagcgtttagcagttcaagcatcatgttgcctactcccatgagaaacacatatttgttgccatccgtgcatagcttaaattgtttgcgtaaagttgacattagcttttgtcatctaaatcaagttcccgattcaattgaatgtttacactcactagaaaaattaaatttagggggaaacgattttgtgacactacctagcttgaggaagctttccaaacttgtatatttaaatttggagcattgcaagttcttgaaatcttttcctcaacttccttctcttaccactattgggcgggatcatcgtgagaacaagcataagtttgggtggatcacaggattgatcgttttcaactgtccaaaactgggtgatagggagtgttgcagtagcatgacattttcatggatgacacaatttattaaggcaaaccgacaaacctaccctgcctattttgatacgattcaaattgttactacaggaagtgaaataccgagttggatcaacaatcagagcatgggtgattcaatactaatagacaaattgcctattatgcatgacaataacaataatatcattggctttctatgttgtgcagtatttacaatggaacctcatccagagtgcttttcatgggccaatatgaaactgagtttcaatcatcctatcaaaatgagtgttccagtcattctcaatggaggtcttgttacgaccaaatcaagtcacctatggataatctacttcccacgagagtcctcggatgaatttggaaatatctgttttgacatttttaaggggcaagctttgggtatggaggtgaagagttgcgggtatcgttgggtatgtaaacaagacctacaagaattcaacttaccaatgataaatcacgaaaattccttggctccgaagtgtaagattttggcaattgaagatgggacacaactacaaccacaacaagaatcattcatgtcacaagtcataactagtacaccgagaagaaacaacagatggatcacaaaaaattcaacaagtgataacaagttaaccgcaaaaacaatctctgttgtcaaccgcaagcagagaaataaatctcgaacctccatatcagccacagaaagagaagtatccgtggaggcagcagattcacctgttgcagatgaagtttctactgaatctcaacagaaaaaaatctcaaacctccatatcatttgtcgattcattggtcggttcctcaacaacttttgccaacaaggtagcacggatacgaacatcagatacgacatggacactgtaaattcagatgctgaaagtttgacagatattgcaacaagcaatgtcgaaaatgactcactggttggtcggttcctcgacaactgttgcaaacaaggtagcacggatacggacatccgatacgacacggacactgtaaattcagatgccaaaagtttggtttctgaagaagacttagatgctgtaaattcaattattgaatacctcaagtgcaccagatgctcaagaaggagaagggagttttatttaactttgaatcttctatggataaatgtaactgaagaaaagaataaagttccctctcctgaaagtcctccaactgaagaagtgccagaacaaacaccagtagcagtacaagttgaaggtgaagaagttgcaattgcattaaaaaacaaacaacagcgtatctaa

SEQ ID NO: 102288 - protein, 1275 aa, Medicago truncatula
MASNSNSSSALVTSSKRYYYDVFVTFRGEDTRNNFIDFLFDALETKGILVFRDNRNLQKGESIGPELLQSIEGSQVYVAVFSRNYAFSTWCLQEIEKIWECVQGSEKLVLPVFYDVDPSEVRKQSGIYDKAFVKHEQRFQQNSQMVSRWREALKQVGSISGWDLCDKPQVGEIKKIVQRIMNILECNSSCVSKDLVGIDSPIEALQNHLLLDSVDGVHAIGICGMGGIGKTTLAMTLYDQISHRFSANCFIDDVSKIYRLCDGPLDAQKQILFQTLDIKHHQICNRYIATDLIRRRLSREKTLVILDNVDQGEQSEKIAVHREWLGAGSRIIIISRDEHILKEYGVDVVYKVPLLNRTDSHKLFCQKAFKHEKIIMSSYQNLDFEILSYANGLPLAIKVLGSFLFGRNVTEWKSALARLRERPDNDVMDVLQLSFDGLNHMEKEIFLDIACFFNRESEKYVKNVLNHCGFHADIGLRVLIDKSLISINSDSVIEMHSLLVELGRKIVRENSSKEQRKWSRVWSQKQLYNVTMEKMERHVEAIVLNDDDVEEVDVEQLSKMSNLRLLIIKWGPNIPSSPSSLSNTLRYVEWNYYPFKYLPSSFHPSDLVELILMYSDIKQLWKNKKYLPNLRRLDLRHSRNLEKIVDFGEFPNLEWLNLELCANLVELDPSIGLLRKLVYLNLEGCVNLVSIPNNISGLSSLEDLNICGCSKAFSSSSIMLPTPMRNTYLLPSVHSLNCLRKVDISFCHLNQVPDSIECLHSLEKLNLGGNDFVTLPSLRKLSKLVYLNLEHCKFLKSFPQLPSLTTIGRDHRENKHKFGWITGLIVFNCPKLGDRECCSSMTFSWMTQFIKANRQTYPAYFDTIQIVTTGSEIPSWINNQSMGDSILIDKLPIMHDNNNNIIGFLCCAVFTMEPHPECFSWANMKLSFNHPIKMSVPVILNGGLVTTKSSHLWIIYFPRESSDEFGNICFDIFKGQALGMEVKSCGYRWVCKQDLQEFNLPMINHENSLAPKCKILAIEDGTQLQPQQESFMSQVITSTPRRNNRWITKNSTSDNKLTAKTISVVNRKQRNKSRTSISATEREVSVEAADSPVADEVSTESQQKKISNLHIICRFIGRFLNNFCQQGSTDTNIRYDMDTVNSDAESLTDIATSNVENDSLVGRFLDNCCKQGSTDTDIRYDTDTVNSDAKSLVSEEDLDAVNSIIEYLKCTRCSRRRREFYLTLNLLWINVTEEKNKVPSPESPPTEEVPEQTPVAVQVEGEEVAIALKNKQQRI

SEQ ID NO: 102289 - DNA, 3285 bp, Medicago truncatula
  CDS (1)..(3285)
atggctagcagcaacaattcttctttagctcttgtgacttcttcaagaaacaactattatgatgtgtttgtcaccttcagaggtgaagacactcgcaacaactttactgattttctttttgatgcccttgaaacaaaaggcatttttgcatttcgggatgacactaatcttcaaaagggtgaatctatagaacctgagctccttcgagcaatcgaaggatctcgggtttttgttgcagtcttctcaaggaactatgcttcctcaacatggtgcctgcaagaattagagaagatatgtaaatgcgttcagagatccagaaaacatattcttcctgttttttatgatgttgatccttctgtggttcgaaagcaaagtgggatttattgtgaagcctttgtcaaacatgaacaaagattccaacaagactttgagatggtgtcaagatggagggaagctctaaaacatgtggggagtatctctggttgggatctacgtgataagccacaagctggagtgattaaaaagattgttcaaaagataatgagtatattggagtgcaaatcttcatatatttcaaaagatttagttgggattgattctcctatagaagcattaaaaaatcatttgcttttggactcggttgattgtgtttgtgctataggaatttctggaatgggaggaatagggaagacaacccttgctatggctttatatgaccaaatatctcatcgatttagtgcatcctgctatattgatgatgtaaccaaaatttatagtttacatgatggtccactcaatgcacaaaagcaaatcctatttcaaactctaggcatagaacaccatctaataagcaatcgttacaacgcaactgatttgatacgacgtaggctacgtcgtgaaaaggtccttctgattcttgataatgtcaatgaagttgaacaattggaaaaaattgcagtgcatcgcgaatggttaggtgcaggtagtagaatcgttgtcatttctagagatgagcatatattgaaggagtatggagtggatgtattttacaaagttccactcttgaatatggccgaatctcacaagttattttgtcgaaaagctttcaaacttgagaacattatattgggtaattatcaaaatttggcagatgagatattgagttatgctaatggtctacccctagcaattacaatattgggctcatttttgtttggtcgtaatgtgactgaatggaagagtgcattggctagattgagagaaagtccaaataaagatgtcatgaatgtgctgcatttaagttttgatgggctagaggagacggaacaagaaatatttcttgatattgcttgtttcttcaactcttggcccatggaagaggttaaaaacattctaaattgttgtggattccatgctgatattggattaagagttctcaatgataaatcacttataaacactaattattcacatattgaaatacattctttgttggaagagctaggcagaaaaattgtgcaagaaaattcaagcaaagagcaaagaaagtggagcagggtctggtccaaaaagcaactctacaatgttatggtggagaatatgcaaaaacatgtcgaagccatagttttgaatgaagagatagatatgaacgctgaacacgtgtcaaaaatgaataatcttagattcctcatcttcaagtacggtgggtgcatctcaggaagtccatggagtttttcaaacaaattaaaatatgttgattggcatgaatatccttttaagtatttgccatcaaattttcaccccaatgaacttgtagaattgatcttaaagagcagcaaaattgaacaactatggacaaacaagaagtatctgcccaatttgaaacatttggatctaagacactccttagaactagtaaagatactagattttggggagttcccgaatcttgagaagctaaatttggaaggatgtataaaccttgtggagttggatccatctattggacttctaagaaagcttgtttacttgaatttatatgaatgcaaaaatctagtaagcatacccaataacatattcagtcttagctctcttgaagatctaaatatgtatggatgttccaaagtgtttaaaaatccaatgcatttgaagaagaagcatgatataagtgaaagtgcatcacattccagatcaatgtcctctgtgttcaaatggatcatgttacctcaccacttacggttttcggctcccacaagacacacatatttgttgccatccttgcatagcttagtttgtttgcgagacgttgacattagcttttgccatctaagccaagttcctgatgcaattgaatgtttatactcgctagaaagattaaacttagagggaaacaattttgtgactctacctagcctgaggaagctttccaaacttgtatatttaaatttgcagcattgcatgttgttggaatctttgcctcaacttccttctcctaccaatattattcgtgagaacaacaaatatttctggatctggcctacaggattgttcattttcaactgtccaaaattgggtgagagggaacgttgcagtagcatgacattttcatggttgacacaattcattgaggcaaactcacaatcctaccctacgtcctttgattggattcaaattgttactccaggaaatgaaataccaatttggatcaacaataagagcgtgggtgattcaatacaaatagaccgatctcctattatgcatgacaataacaattatatcattggctttctatgttgtgcggtattttccatggcacctgattgttggatgtttccatttgctcaagagtggaccgataagaaattgattaggatgagctgtaggagtgctaccgtaattctcaatggaggtcttgttatgaccaaatcaagtcacctatggataatctacttcccccgagagtcctatagtgaatttgaaaaaatccattttaatatttttgagggtgaagattttagtttggaggtgaagagttgcgggtatcggtgggtatgtaaagaagacctgcaagaattcaacttaacaatgatgaatcaagaaaatttcttggctgggaagtgcaagaatttggcaattgaagatgagacacaaccagaaccggaacaagaacaagaatcattcatctcaagagtcataaacttcacagagaagaaacaacagatggatcacaagaaggtgatgaagagtctcaacctgcaaaatacaatctgcaatgaagagcattga

SEQ ID NO: 102290 - protein, 1094 aa, Medicago truncatula
MASSNNSSLALVTSSRNNYYDVFVTFRGEDTRNNFTDFLFDALETKGIFAFRDDTNLQKGESIEPELLRAIEGSRVFVAVFSRNYASSTWCLQELEKICKCVQRSRKHILPVFYDVDPSVVRKQSGIYCEAFVKHEQRFQQDFEMVSRWREALKHVGSISGWDLRDKPQAGVIKKIVQKIMSILECKSSYISKDLVGIDSPIEALKNHLLLDSVDCVCAIGISGMGGIGKTTLAMALYDQISHRFSASCYIDDVTKIYSLHDGPLNAQKQILFQTLGIEHHLISNRYNATDLIRRRLRREKVLLILDNVNEVEQLEKIAVHREWLGAGSRIVVISRDEHILKEYGVDVFYKVPLLNMAESHKLFCRKAFKLENIILGNYQNLADEILSYANGLPLAITILGSFLFGRNVTEWKSALARLRESPNKDVMNVLHLSFDGLEETEQEIFLDIACFFNSWPMEEVKNILNCCGFHADIGLRVLNDKSLINTNYSHIEIHSLLEELGRKIVQENSSKEQRKWSRVWSKKQLYNVMVENMQKHVEAIVLNEEIDMNAEHVSKMNNLRFLIFKYGGCISGSPWSFSNKLKYVDWHEYPFKYLPSNFHPNELVELILKSSKIEQLWTNKKYLPNLKHLDLRHSLELVKILDFGEFPNLEKLNLEGCINLVELDPSIGLLRKLVYLNLYECKNLVSIPNNIFSLSSLEDLNMYGCSKVFKNPMHLKKKHDISESASHSRSMSSVFKWIMLPHHLRFSAPTRHTYLLPSLHSLVCLRDVDISFCHLSQVPDAIECLYSLERLNLEGNNFVTLPSLRKLSKLVYLNLQHCMLLESLPQLPSPTNIIRENNKYFWIWPTGLFIFNCPKLGERERCSSMTFSWLTQFIEANSQSYPTSFDWIQIVTPGNEIPIWINNKSVGDSIQIDRSPIMHDNNNYIIGFLCCAVFSMAPDCWMFPFAQEWTDKKLIRMSCRSATVILNGGLVMTKSSHLWIIYFPRESYSEFEKIHFNIFEGEDFSLEVKSCGYRWVCKEDLQEFNLTMMNQENFLAGKCKNLAIEDETQPEPEQEQESFISRVINFTEKKQQMDHKKVMKSLNLQNTICNEEH

SEQ ID NO: 102291 - DNA, 3621 bp, Vitis vinifera
  CDS (1)..(3621)
  misc_feature (1062)..(1062): w is a or t
  misc_feature (1483)..(1483): r is g or a
  misc_feature (1486)..(1486): y is t or c
  misc_feature (1659)..(1659): m is a or c
  misc_feature (1702)..(1702): m is a or c
  misc_feature (1752)..(1752): m is a or c
  misc_feature (1980)..(1980): w is a or t
  misc_feature (2145)..(2145): m is a or c
  misc_feature (2170)..(2170): r is g or a
  misc_feature (3039)..(3039): y is t or c
  misc_feature (3303)..(3303): w is a or t
  misc_feature (3392)..(3392): w is a or t
  misc_feature (3433)..(3433): s is g or c
  misc_feature (3472)..(3472): w is a or t
  misc_feature (3609)..(3609): r is g or a
atggcatggtctccaaccaatctctcggcatcttcttcttcgtcttcttcctcccatcaatggaagtatgatgtctttcttagtttcagaggtgaagacacccgcaaaagctttaccgaccatcttcaccgggagctccgtcgaaaatggatcaagactttcagagatgaccaactcaggagaggcgaacagatatctccagcacttctcaaggcaatcgaagagtcaaggttttccatcatcattttctcaaaaaactatgcttcttcaagttggtgtttggatgaactcacaaagattcttgactgcgtcgaagtgatgggacatacagctataccggttttttataacgtggatccctctcatgtaagaaaacaaaccgagagttttgcagaagcatttgccaaacatgaccatatttacggggacaagtcggagaaagtgctcaagtggagaaaagctttaactgtggcatccggactgtctgggtatgattcacgagatagacatgaaactgaggttatcgatgaggtcgttaccatgatttttaataaattgattgatgcatcctcaagcaacatggagggtcttgttgggatgggttctcgcttacaggacatggctcaattattagatattgggtcagttgatgttcgaatggtaggaatttggggcatggctggcattggtaagagtactattgcttatcaagtgtataacaaaatctatgctcaatttgatgaaggttattgctttcttccaaatgttagagaagaatctcagaggcatggtctagcttatttacaagaagaactcctttcacaaatttcaggtggaaatctaaataaaggaaatttcaacaggggaatcaattttataaaagaaaggcttcactctaggaaggtccttattgttcttgatgatgtggatatgtatgagcagttggaggttttagcaggaaatcatgactggtttggtgcaggaagtcgaattatcataacaaccaaagataaaactttgctaaatatgcatggagtggatgcaatttacaatgttgagggwttaaaatacaatgaagctcttaagctcttttgttggtgtgcctttaaacatgaccttccgacagcagattacatgcagctatgcaagaactttgtaaaatatattgaaggccttccattagccattaaagtgttgggttcttttgtaaaaaataaaaccatagatgaatggaagagtgcattggacaaactcaaaagaattccacacaaagatgttcagaaggtgctaagaataagttttgatgggttagacgataatcagaaggatatatttttagatattgcatgcttctttaaagggcaagacaaagattttgttgcaaaaatactagaaagttgtgatttctttccagctaatgacataagggttcttgaagaaaattctcttattcttgtctcaaataataagttatgtatgcatratytattacaagaaatgggctgggaaattgttcggcaagaaaatgttaaataccctggcaaacgtagcaggttgtggtttcatgatgaagtaaatcatgtgctaacaacaaatacggggactgaagcagttgaaggcctagtcctcgatttgtctgcttcgaaagagctacacttmagtgctggtgcctttacagagatgaacagattaagagtgctcmgattctataatgtgaaaatgaatggaagcttggaatatttatctgaaaamgagttatttgatactacttatcatccttggagatggagagcccatgagatacaaagagctgatgagatgcaaactgattgtaaattgcatttatctggagatttaaaatttctatccaacaacttaagatctctctattggcatgaataccctttgaagtcccttccatcaaattttcatccaaagaagcttgttgagctaaatatgtgctctagtcggcttgaacawctatggaaaggagacaagtcatttgagaagttgaagttcatcaaacttagccactctcaatatctaaccagaaccccagacttctctggagccccaaaccttgagaggctaattctcgaaggttgtaaaagtatggtcaaggttcacccatccattggagctctmcagaagcttattttcctgaatttaraaggctgcaagaacctcaagagttttgcaagcagcatccatatgaattctcttcaaattcttactctctctggctgctcaaaactcaagaagtttccagagatgctggaaaatatgaagagtttgagacagcttttgcttgatgagactgccctacgagaactaccttcatcgattggacgcctaaatgggcttgttttgttgaatttgacgaattgtaaaaaacttgtgagtcttccacaaagcctttgcaagctgacgtctcttcagattcttactctggctggttgctcagaactgaagaagttgccagatgagttgggtagcctacgatgtttagtaaatctgaatgcagatggaagtggtatacaagaggttccaccctctattactcttttgacaaaccttcaggtattatcattggcaggatgtaagaaaaggaatgtggttttctctttatggtcatcaccaacagtatgtttgcaactgcgttctttgttgaatttatcctccgtgaaaactttgtccttaagtgactgcaacctatcggaaggagcactgcccagtgatcttagctccctatcgtcgttggaaagtttagatctgagcaaaaacaatttcattaccatacctgccagcctcaatagactttctcagctcttgtacctctccctgtcgcactgcaagagtcttcaatcagtgccagagcttccatcaaccattcaaaaagtatatgccgatcattgcccttccctggaaaccttttcattaagtgcatgtgcatccagaaagttgaaccaattgaacttcacattttctgattgcttccgactagtggagaatgagcacagcgacactgtgggagctatyctacaggggattcagcttgcttcatcaataccgaaatttgtggatgcaaataagggttcccctgttccatataatgacttccatgttattgttcctggaagtagcattccagagtggttcatccatcagaatatggggtcttcagtaactgtagagctgcctccacattggtacaatgccaagttgatgggattggctgtttgtgctgttttccacgcagaccccattgattggggttatttacaatattctctgtatcgtggwgagcacaaatatgattcatacatgcttcaaacgtggagtccaatgaaaggtgaccacgtgtggtttgggtatcaatcacttgttggacwggaggatgaccgcatgtggttcggggagcggagcggcactstgaagattttgttttctggacattgcataaagtcgtgtwtagtatgtgtgcagcctgaagtagtggtgaaaaagtgtggggttcgtctagcatatgagcaaggggataaagatggagagtgcagctttccttatggcaccatgatacacacggtctcttgctctggtgaaagtttratgaagcaatag

SEQ ID NO: 102292 - protein, 1206 aa, Vitis vinifera
  misc_feature (553)..(553): The Xaa at location 553 stands for Leu, or Phe.
  misc_feature (584)..(584): The Xaa at location 584 stands for Asn, or Lys.
  misc_feature (660)..(660): The Xaa at location 660 stands for Gln, or His.
  misc_feature (724)..(724): The Xaa at location 724 stands for Glu, or Lys.
  misc_feature (1131)..(1131): The Xaa at location 1131 stands for Gln, or Leu.
  misc_feature (1145)..(1145): The Xaa at location 1145 stands for Leu, or Val.
  misc_feature (1158)..(1158): The Xaa at location 1158 stands for Ile, or Leu.
MAWSPTNLSASSSSSSSSHQWKYDVFLSFRGEDTRKSFTDHLHRELRRKWIKTFRDDQLRRGEQISPALLKAIEESRFSIIIFSKNYASSSWCLDELTKILDCVEVMGHTAIPVFYNVDPSHVRKQTESFAEAFAKHDHIYGDKSEKVLKWRKALTVASGLSGYDSRDRHETEVIDEVVTMIFNKLIDASSSNMEGLVGMGSRLQDMAQLLDIGSVDVRMVGIWGMAGIGKSTIAYQVYNKIYAQFDEGYCFLPNVREESQRHGLAYLQEELLSQISGGNLNKGNFNRGINFIKERLHSRKVLIVLDDVDMYEQLEVLAGNHDWFGAGSRIIITTKDKTLLNMHGVDAIYNVEGLKYNEALKLFCWCAFKHDLPTADYMQLCKNFVKYIEGLPLAIKVLGSFVKNKTIDEWKSALDKLKRIPHKDVQKVLRISFDGLDDNQKDIFLDIACFFKGQDKDFVAKILESCDFFPANDIRVLEENSLILVSNNKLCMHBLLQEMGWEIVRQENVKYPGKRSRLWFHDEVNHVLTTNTGTEAVEGLVLDLSASKELHXSAGAFTEMNRLRVLRFYNVKMNGSLEYLSEXELFDTTYHPWRWRAHEIQRADEMQTDCKLHLSGDLKFLSNNLRSLYWHEYPLKSLPSNFHPKKLVELNMCSSRLEXLWKGDKSFEKLKFIKLSHSQYLTRTPDFSGAPNLERLILEGCKSMVKVHPSIGALQKLIFLNLXGCKNLKSFASSIHMNSLQILTLSGCSKLKKFPEMLENMKSLRQLLLDETALRELPSSIGRLNGLVLLNLTNCKKLVSLPQSLCKLTSLQILTLAGCSELKKLPDELGSLRCLVNLNADGSGIQEVPPSITLLTNLQVLSLAGCKKRNVVFSLWSSPTVCLQLRSLLNLSSVKTLSLSDCNLSEGALPSDLSSLSSLESLDLSKNNFITIPASLNRLSQLLYLSLSHCKSLQSVPELPSTIQKVYADHCPSLETFSLSACASRKLNQLNFTFSDCFRLVENEHSDTVGAILQGIQLASSIPKFVDANKGSPVPYNDFHVIVPGSSIPEWFIHQNMGSSVTVELPPHWYNAKLMGLAVCAVFHADPIDWGYLQYSLYRGEHKYDSYMLQTWSPMKGDHVWFGYQSLVGXEDDRMWFGERSGTXKILFSGHCIKSCXVCVQPEVVVKKCGVRLAYEQGDKDGECSFPYGTMIHTVSCSGESLMKQ

SEQ ID NO: 102293 - DNA, 3726 bp, Vitis vinifera
  CDS (1)..(3726)
  misc_feature (74)..(74): k is g or t
  misc_feature (1602)..(1602): w is a or t
  misc_feature (1609)..(1609): r is g or a
  misc_feature (1671)..(1671): y is t or c
  misc_feature (1674)..(1674): k is g or t
  misc_feature (1689)..(1689): r is g or a
  misc_feature (1858)..(1858): y is t or c
  misc_feature (1860)..(1860): m is a or c
  misc_feature (1888)..(1888): y is t or c
  misc_feature (1905)..(1905): r is g or a
  misc_feature (1948)..(1948): y is t or c
  misc_feature (1954)..(1954): m is a or c
  misc_feature (2140)..(2140): r is g or a
  misc_feature (2154)..(2154): s is g or c
  misc_feature (2159)..(2159): r is g or a
  misc_feature (2322)..(2322): r is g or a
  misc_feature (2578)..(2578): y is t or c
  misc_feature (3194)..(3194): r is g or a
  misc_feature (3477)..(3477): y is t or c
atggctctcttcttcttcttcttcttcttcttcttcttccttttcttcactggcttcttcttcttcttcactgkattcttcttcttcaacttcttcttcttcttcttcttcttctccttcactggcttcttcttcttcttcactggattcttcttcttcaatttcttcaatggattcttcttcatcttctccttcactggcttcttcttaatttcttcttcttctgattggaagtatgctgtgtttctcagctttagaggagaggatactcgcaataattttactggccatctctataaagctttggaccaaaaaggaattgaaacctttatggatgataagaagcttagaacaggtgaagagatatctcccacacttgttacagcaatccaaagatcaaggtgctctatcattgttctgtcagaaaattatgcatcttccaagtggtgtctagaggaacttgtgatgatactagagtgcaaaagaaccaaaaatctgaaggttgtgcctatcttctacaatgtggatccatcacatgttcggaaccagaccggaagttttggggaagccctggctaaacataaagagaatttgaagatcaaggtagagaaggtgcagaagtggagggaggctctaactcaagttgccaatttatctggcttgcattccgtgaagaacaagcctgaggctcaacttattgaggaaatcattgcagatatttccaaagatttatattctgtacctttgaaagatgccccaaacctagtggcagtggattcttgtataagggaactggaatcgttattatgtcttccgtcaatggatgttcgtatggtaggaatttggggtatgggtggcatcggtaagaccacccttgctagagctatttatgaacaaatttctggccaatttgaaggttgttgctttcttcccaatgtagaacatttggcaagtaaaggtgatgactatttaagaaaagaacttctttcaaaggtactaagggataaaaacatagatgtgacaatcacttcggtgaaggcaagatttcactcaaaaaaggtccttattgttatcgataatgtgaaccaccggtcaatattaaaaactttagtaggagaacttgattggtttgggccacaaagtagaatcattataacaaccagggataaacatgttctaaccatgcatggagtggatgttatttatgaagtccagaaattacaagacgataaagccattgagctctttaatcatcatgcctttataaaccaccctcctacagaagatgttatggagctctctcagcgtgtaatagcttatgctcaaggtcttccattggctcttgaagttttaggaagttctttatgcaagaaaagcaaagatgaatgggaatgtgcactgaataaactagaaaaaatccctgacatggaaattcgcaaagtgcttcaaacaagttttgatgagttagatgatgaccagaagaatatatttttggatattgccattttttttaatgaggtggaagaagattttacaacagaaatgctcaatagttttggtttttctgcaatcagtggaataagaaccctcattgataagtcwctaatargaaatttggatgatgagttacatatgcatgatctactaatagaaatgggtaaagaaattgtycgkcgaacttctcctaargagcctggtaaacgtactagattatgggagcaacaagatatctgtcatggaactgatgaagtggaagtcatagactttaacttgtctggcttaaaggaaatatgttttaccactgaagcctttggcaatatgagcaaacttagattgctcgcgatccatgaatctagcytmtccgacgactctgaatgtagctccagaytgatgcaatgtcaagtrcacatttctgatgacttcaaatttcattatgatgagttgaggytcctamtgtgggaagaatatcctctgaaatcattgccatctgattttaagtcccagaatcttgtgttcctctccatgactaaaagccaccttactcggctctgggaaggaaacagggtttttaaaaacttaaaatatattgatcttagtgactctaaatacctggcagaaactccggatttctcaagggtcrccaatcttaaaatsttgarttttgaagaactcccctcctcaattgcttatgccaccaagcttgttgtgctggatttacaaaattgcgaaaagctcctgagtcttccaagcagcatttgtaaattggcacatcttgagaccctttctctttctggctgctcaagacttggaaaacctcaagtraactcagacaacttggatgctttgccaaggatcttggatcgactttctcatctacgggagcttcagttgcaagattgcaggagccttcgagcattgccaccacttccatcaagtatggaacttataaatgcaagtgataattgcacatcacttgagtacatctcccctcaatcagttttcctatgttttggaggctctatatttggtaattgcttccaactgaccaagtatcaaagtaagatggggcctcatttayggagaatggcaacccattttgaccaagatagatggaagtccgcttatgatcaacaatacccaaacgttcaggtgccattcagtactgtttttcctggaagtacaatacctgattggttcatgcattatagtaaggggcatgaagtcgatatagatgtagatccagattggtacgatagtagtttcctgggttttgcactttctgctgttatagcacccaaggatgggtccattacaaggggttggtccacctactgtaacttggatttacatgatcttaattccgaatccgaatccgaatccgaatccgaatccgaatccagttgggtatgttcctttactgatgctcgtacttgccaacttgaagatacgacaattaattcagatcatctgtggctggcctatgtaccatcgtttttgggcttcaatgataagaaatggagtcgcattaagttttcatttagtacaagcaggaagtcctgcattgtgaagcattggggagtttgtccattgtacattgaaggtagcagtgatgacaactataaccgtgatggcgattattccagtgggagatgctgcttgaatgagggccttggagtgcagactagtagtgacarcaacattgatgatgaggggaatgcttgtggaagtgtccttgatgatctacgtgaatggggattagaagatatcataatcaggagaagccctgaagatgaccaacccagtggacaggtctatgaagatgcgaatggcacacatgcctggaaccaagaaaggcttcggatgcagccaaaccctctcatagcacagactagttatggccagtacactcatgaaaggaatcctgctaaaagtgtccttgattatcgctatgaatccacatttgaagatggcatagtyaggatgagaagccttcttgaggagtaccccggagtaattggtttctctcctactgactcacactcctgggaccaagaaaggcttgggaggcagccaaaccctcccatatccaacagtgagactgggttttggatttgtatcactatttttagcttcttctttcttgctcacattttccattccgcttcatttcggatctcgccacttctcggcgtgttactcttgctttttatctttagtcggctatag

SEQ ID NO: 102294 - protein, 1241 aa, Vitis vinifera
  misc_feature (25)..(25): The Xaa at location 25 stands for Gly, or Val.
  misc_feature (537)..(537): The Xaa at location 537 stands for Arg, or Gly.
  misc_feature (620)..(620): The Xaa at location 620 stands for Leu, or Phe.
  misc_feature (650)..(650): The Xaa at location 650 stands for Leu, or Phe.
  misc_feature (652)..(652): The Xaa at location 652 stands for Leu, or Met.
  misc_feature (714)..(714): The Xaa at location 714 stands for Ala, or Thr.
  misc_feature (718)..(718): The Xaa at location 718 stands for Ile, or Met.
  misc_feature (720)..(720): The Xaa at location 720 stands for Asn, or Ser.
  misc_feature (860)..(860): The Xaa at location 860 stands for Arg, or Trp.
  misc_feature (1065)..(1065): The Xaa at location 1065 stands for Asn, or Ser.
MALFFFFFFFFFFLFFTGFFFFFTXFFFFNFFFFFFFFSFTGFFFFFTGFFFFNFFNGFFFIFSFTGFFLISSSSDWKYAVFLSFRGEDTRNNFTGHLYKALDQKGIETFMDDKKLRTGEEISPTLVTAIQRSRCSIIVLSENYASSKWCLEELVMILECKRTKNLKVVPIFYNVDPSHVRNQTGSFGEALAKHKENLKIKVEKVQKWREALTQVANLSGLHSVKNKPEAQLIEEIIADISKDLYSVPLKDAPNLVAVDSCIRELESLLCLPSMDVRMVGIWGMGGIGKTTLARAIYEQISGQFEGCCFLPNVEHLASKGDDYLRKELLSKVLRDKNIDVTITSVKARFHSKKVLIVIDNVNHRSILKTLVGELDWFGPQSRIIITTRDKHVLTMHGVDVIYEVQKLQDDKAIELFNHHAFINHPPTEDVMELSQRVIAYAQGLPLALEVLGSSLCKKSKDEWECALNKLEKIPDMEIRKVLQTSFDELDDDQKNIFLDIAIFFNEVEEDFTTEMLNSFGFSAISGIRTLIDKSLIXNLDDELHMHDLLIEMGKEIVRRTSPKEPGKRTRLWEQQDICHGTDEVEVIDFNLSGLKEICFTTEAFGNMSKLRLLAIHESSXSDDSECSSRLMQCQVHISDDFKFHYDELRXLXWEEYPLKSLPSDFKSQNLVFLSMTKSHLTRLWEGNRVFKNLKYIDLSDSKYLAETPDFSRVXNLKXLXFEELPSSIAYATKLVVLDLQNCEKLLSLPSSICKLAHLETLSLSGCSRLGKPQVNSDNLDALPRILDRLSHLRELQLQDCRSLRALPPLPSSMELINASDNCTSLEYISPQSVFLCFGGSIFGNCFQLTKYQSKMGPHLXRMATHFDQDRWKSAYDQQYPNVQVPFSTVFPGSTIPDWFMHYSKGHEVDIDVDPDWYDSSFLGFALSAVIAPKDGSITRGWSTYCNLDLHDLNSESESESESESESSWVCSFTDARTCQLEDTTINSDHLWLAYVPSFLGFNDKKWSRIKFSFSTSRKSCIVKHWGVCPLYIEGSSDDNYNRDGDYSSGRCCLNEGLGVQTSSDXNIDDEGNACGSVLDDLREWGLEDIIIRRSPEDDQPSGQVYEDANGTHAWNQERLRMQPNPLIAQTSYGQYTHERNPAKSVLDYRYESTFEDGIVRMRSLLEEYPGVIGFSPTDSHSWDQERLGRQPNPPISNSETGFWICITIFSFFFLAHIFHSASFRISPLLGVLLLLFIFSRL

SEQ ID NO: 102295 - DNA, 3534 bp, Vitis vinifera
  CDS (1)..(3534)
atggcttcttcttcaaccagcagtctcacactaccttcatcctcttccactcatcgatggaagtatgatgccttccttagtttcagaggtgaagatacccgcaaaaactttactacccatctccacgcggccctttgtcagaagggaatcaacaccttcaaagataacctactcctgagaggcgaaaaaatatctgcaggactcctacaagcaattgaagaatcgaggttttccatcatcattttttccgaaaactatgcttcttcaagttggtgtttggatgaacttacaaagattcttgagtgtgtcgaagaggggggacatacagctctaccggttttctataacgtggatccctcccatgtaagaaaacaaaaagggtgttttgcggacgcatttgcagagcatgaacaagtatacagggagaagatggagaaagtggtcaagtggagaaaagctttaactgaagtagctacaatttctggatgggattcacgagacagagatgaatccgaggttattgaggaaattgttaccaggattttgaatgagccgattgatgcattctcaagcaacgtggatgctctagttggaatggactctcgtatggaggacctgctttcactgttatgtattgggtctaatgatgttcggtttgttggaatttggggcatggctggcataggtaagactaccattgctgaagctatttatgaccgaatctacactaaatttgatggttgctgctttcttaaagatgttagagaagactcacaaagacatggtctaacttatttacaagaaacactcctttcacgagttttagggggaatcaacaatctcaatagaggaatcaattttataaaagcaagactccactctaagaaggtcctaattgttcttgacaatgtggtgcaccggcaagagttggaggctttagtaggaagtcatgattggtttggtccaggaagtcgaatcatcataactactagagaaaagcgtttgctaattgagcaagaaatggatgcaatatatgaagttgagaaattagagtatgatgaagctcttaagctcttttgtcaatatgcctttagatataagcatcctactgaagattttatgcaattgtgccaccatgcagtagattatactggaagtcttcccttagcccttaaagtcttgggttcttgtctatatagaaaaagcatacatgaatggaagagtgaattggacaaattcaatcaattcccaaataaggaagttctaaatgtgctcaaaacaagttttgatggattagatgataatgaaaagaatatgtttcttgatattgcattcttctataaaggggaggacaaagattttgttatagaagtactagataatttcttcccagtgagtgaaataggaaatcttgtcgataaatcactcataactatttcagataataagttgtacatgcatgatttactacaagaaatgggttgggaaattgttcgacaagaatctattaaagaccctggcaaacgcagcagattgcgggttcatgaggacatccatgatgtattaacaacaaataaggggactgaagcagttgaaggcatggtctttgacttgtctgcatcaaaagagctaaacctcagtgttgatgcctttgcaaagatgaacaaattaagattgctcagattctataattgtcaattttatggaagctctgaatacttatccgagaaagagttaattgctagtactcatgatgctcggagatggatgggctatgataactctccatacaatgatagtaaattgcatctatctagagattttaaatttccatccaacaacttaagatctctccattggcacggataccctttgaagtcccttccatcaaattttcatccagagaagcttgttgagctaaacatgtgctatagtctgcttaaacaactatgggaaggaaagaaggcattcgagaagttgaagttcatcaaactcagccactctcaacatctaaccaaaactccagatttctctgcggccccaaaacttaggagaataattctgaatggttgtacaagtttggtcaagcttcacccatccattggggctctcaaggagcttattttcctgaatttagaaggctgctcaaaacttgagaagttcccagaggtcgtccaaggaaacctggaagatctatcaggcatctccttagaagggactgctataagagaactgccttcatcaattggaagtctaaataggctagttttgttgaatctgaggaattgtgaaaaactcgcaagtcttccgcaaagcatttgtgaactgatatctcttcagactctaactctctctggttgctcaaaactaaagaaattgccagatgacctggggagactgcaatgtttagtagagctcaatgtagatggaactggtataaaagaggtaacctcctctattaatcttttgacaaaccttgaagcattatccttagcaggatgcaaaggagggggatctaagtcaaggaatctgatctctttccgctcatcaccagcagcaccattgcaactgccttttctttcaggtttatactccttgaaaagtttgaatttaagtgactgcaacctattggaaggagcactacccagtgatctaagctccttatcttcattggaaaatttatatctggacaagaacagtttcattaccttgcctgctagcctcagtcgactttctcggctcagaagtctcacattagaacactgcaagagtcttcgatcattgccagagcttccatcaagtattgaatatttaaatgcccatagttgcacatccctggaaacgctttcatgttcatcaagtacatacacatcgaagttgggggatctcagatttaattttactaattgctttagactaggagagaatcaaggcagtgacattgtggaaaccatacttgagggaactcagcttgcgtcatcaatggcaaaacttctggagccagatgagagggggctattacaacatggatatcaagctcttgttcctggaagtagaattccaaagtggttcacccatcagagtgtagggtctaaggtaattgtagagctgcctccacattggtataataccaagtggatgggattggctgcttgtgttgttttcaacttcaagggtgctgtcgatgggtaccgtggtacattccctttagcttgttttctcaatggtcgttatgctacgctatccgaccacaattccttgtggacttcatcgattattgagtcagatcacacgtggtttgcgtatatatctcgtgctgaactagaggcccggtaccctccttggaccggagagctcagtgactatatgctggcttcatttctattccttgtcccagaaggcgcggtcacttcacacggcgaggtgaaaaagtgtggggttcgtctagtatacgaggaagatgggaaatatgatggatgcagctttcctttcagtaccatgtggccgggagatggagatggaggcgtcttctga

SEQ ID NO: 102296 - protein, 1177 aa, Vitis vinifera
MASSSTSSLTLPSSSSTHRWKYDAFLSFRGEDTRKNFTTHLHAALCQKGINTFKDNLLLRGEKISAGLLQAIEESRFSIIIFSENYASSSWCLDELTKILECVEEGGHTALPVFYNVDPSHVRKQKGCFADAFAEHEQVYREKMEKVVKWRKALTEVATISGWDSRDRDESEVIEEIVTRILNEPIDAFSSNVDALVGMDSRMEDLLSLLCIGSNDVRFVGIWGMAGIGKTTIAEAIYDRIYTKFDGCCFLKDVREDSQRHGLTYLQETLLSRVLGGINNLNRGINFIKARLHSKKVLIVLDNVVHRQELEALVGSHDWFGPGSRIIITTREKRLLIEQEMDAIYEVEKLEYDEALKLFCQYAFRYKHPTEDFMQLCHHAVDYTGSLPLALKVLGSCLYRKSIHEWKSELDKFNQFPNKEVLNVLKTSFDGLDDNEKNMFLDIAFFYKGEDKDFVIEVLDNFFPVSEIGNLVDKSLITISDNKLYMHDLLQEMGWEIVRQESIKDPGKRSRLRVHEDIHDVLTTNKGTEAVEGMVFDLSASKELNLSVDAFAKMNKLRLLRFYNCQFYGSSEYLSEKELIASTHDARRWMGYDNSPYNDSKLHLSRDFKFPSNNLRSLHWHGYPLKSLPSNFHPEKLVELNMCYSLLKQLWEGKKAFEKLKFIKLSHSQHLTKTPDFSAAPKLRRIILNGCTSLVKLHPSIGALKELIFLNLEGCSKLEKFPEVVQGNLEDLSGISLEGTAIRELPSSIGSLNRLVLLNLRNCEKLASLPQSICELISLQTLTLSGCSKLKKLPDDLGRLQCLVELNVDGTGIKEVTSSINLLTNLEALSLAGCKGGGSKSRNLISFRSSPAAPLQLPFLSGLYSLKSLNLSDCNLLEGALPSDLSSLSSLENLYLDKNSFITLPASLSRLSRLRSLTLEHCKSLRSLPELPSSIEYLNAHSCTSLETLSCSSSTYTSKLGDLRFNFTNCFRLGENQGSDIVETILEGTQLASSMAKLLEPDERGLLQHGYQALVPGSRIPKWFTHQSVGSKVIVELPPHWYNTKWMGLAACVVFNFKGAVDGYRGTFPLACFLNGRYATLSDHNSLWTSSIIESDHTWFAYISRAELEARYPPWTGELSDYMLASFLFLVPEGAVTSHGEVKKCGVRLVYEEDGKYDGCSFPFSTMWPGDGDGGVF

SEQ ID NO: 102297 - DNA, 4245 bp, Vitis vinifera
  CDS (1)..(4245)
  misc_feature (326)..(326): y is t or c
  misc_feature (607)..(607): s is g or c
  misc_feature (800)..(800): y is t or c
  misc_feature (918)..(918): y is t or c
  misc_feature (961)..(961): r is g or a
  misc_feature (992)..(992): r is g or a
  misc_feature (997)..(997): w is a or t
  misc_feature (1037)..(1037): r is g or a
  misc_feature (1206)..(1206): y is t or c
  misc_feature (1243)..(1243): y is t or c
  misc_feature (1437)..(1437): k is g or t
  misc_feature (1453)..(1453): y is t or c
  misc_feature (1584)..(1584): r is g or a
  misc_feature (1607)..(1607): y is t or c
  misc_feature (1909)..(1909): r is g or a
  misc_feature (2088)..(2088): y is t or c
  misc_feature (2119)..(2119): y is t or c
  misc_feature (2272)..(2272): r is g or a
atggcttcttcttcaaccagtctctcagtagcatcttcctcttccacccatccacgaaagtatgaggtcttcctcagtttcagaggagaagacacccgcaaaagctttactgatcatcttcacgaggcgcttcatcgatgtggaatcaacactttcatagatgaccaactcaggagaggcgaacaaatatcttcagcactcctacaggcaattgaagaatcaaggttttccatcatcattttctccgaacactatgcttcttcaagttggtgtttggatgaacttacaaagattcttgagtgtgtcaaagtggggggacatacagyttttccggttttctataatgtggatccctctcatgtaagaaaacaaacagggagttatggagtagcatttacaaagcatgaaaaagtttacagggacaacatggagaaagtgctcaagtggagagaagctctaactgtggcatccggactttctggatgggattcacgagatagacatgaatccaaggttattaaggaaattgtttcaaagatctggaatgaactgaacgatgcatcctcatgtaacatggaggctctagttggaatggattctcatatasagaacatggtttcattattatgtattgggtcagatgatgttcggatggtaggaatttggggcatggctggcataggtaagactacaattgctgaggctgtttatcagaaaatttgcactcaattcgaagttttttgggaaggcaatctaaatacaagaattttcaatagaggaatcaatgctataaaaaaaayactccactccatgagagtccttattgttcttgacgatgtggatcgcccacaacaattggaggttttagctggaaatcataactggtttggtccaggaagtcgaattatcatcacaacyagagaaaagcatttgctagatgagaaagtggaaatatatgaarttaaggaattaaacaaagatgaagctcgtargctcwtttatcagcatgcctttaaatataaacctcctgcaggagrttttgtacaactatgtgaccgtgccctaaattatacaaagggcattcccttagcccttaaaatcttgggtcgttttttatacaatagaagcaaaaaggaatgggagagtgaattggaaaaacttagaagaattccaaacaaagagattcaagatgtgctgagaataagytttgatggattagatgataatcaaaaggatatatttytcgacatcgcatgcttctttaaagggcaagacaaagattacgtcataaaactactgaaaagttgtgatttctttccagaaattggaatacgtaatcttatagataagtctcttgtaactatttcatataataagttgtgcatgcatgatttgatacaagaaatgggatgggaaattgttcggcaagaatctatkaaagaccccggcaaaygcagcaggttgtgggttaatgatgatgtcattgatatgctaacaacaaatacagggactgaagcagttgaaggcatggtccttaacttgtctactttgaaagagctacacttcagtgttaatgtcttcacraagatgaacaaattaagagtgcycagattctatgatgcacaaatatggggaagttcttggatatggagacgcaatgatcgctataaaagtccatacactgaatgtaaattccatctttctggggattttaaatttctatccaaccacttaagatctctctactgggatggataccctttgaagtcccttccatcaaattttcatcctgagaagcttctcgagttaaaaatgtgctttagtcagcttgaacaactatgggaaggaaacaagtcatttcagaagttaaagttcatcgaacttagccactctcaacatctaatcaaarcaccagacttctctggagctccaaagctcaggagaataattcttgaaggttgtacaagtttagtcaaggttcatccatccattggagctctcaagaagcttattttcctgaatttagaaggctgcaagaacctcaagagtttcttgagcagcatccatctggagtctcttcaaattctyactctctctggctgctcaaaactgaagaaayttccagaggtccagggagccatggataatttatcagagctttctttaaaagggactgctataaaaggattgccattgtccattgaatatctgaatggacttgctttatttaatctggaagagtgcaaaagccttgagtcattaccgggctgcrtttttaagttgaagtccctgaaaactcttattctttcaaactgcttaagactgaagaagcttccagagatacaggaaaatatggagagtttgaaagagctttttctagatgacactggtctaagagagctaccttcatcaattgagcatctaaatgggcttgttttgttgaagctgaaaaattgtaaaagacttgcaagtcttccagaaagcatttgtaagctgacgtctcttcagactcttactctctctggttgttcagaactgaagaaattgccagatgatatggggagcctacaatgtttattaaagctcaaagcaaatggaagtggtatacaagaggtaccctcctctattactcttttgacaaggcttcaagtattatcattagcaggatgtaaaggggggggatctaagtcaaggaatctggctttatctttgcgcgcatcaccaactgatggattgcgactgtcttctttgacggttctacactccttgaaaaagttgaatttaagtgaccgcaacctactggaaggagcactacccagtgatcttagctccttatcttggttggaatgtttagatctgagtagaaacaatttcatcaccgtgcctactagcctgagtcgacttcctcacctcagaaggctcatagtggaacactgcaagaatcttcaatcattgccagagcttccgtcaagtattaaagaattattggccaatgattgcacatccctggaaactttttcatatccatcaagtgcatatccattgaggaagttcggagatttcaacttcgaattttctaattgcttccgactagtggggaatgagcagagtgacactgtggaagctatcctacaggaaattcggcttgttgcatcgatacagaaatccatggctccaagtgagcattctgccaggtatggtgaaagtcggtatgacgctgttgttcctgggagtaggattccagagtggttcacccatcagagcgagggggattcaataactgtagagctgcctccaggttgttataataccaattcgattggattggctgcttgtgctgttttccacccaaaattcagcatgggtaagatcggccgttctgcatattttagtgtgaatgaatctggcggcttctctctcgacaacacgacttccatgcatttttcaaaagctgaccacatctggtttgggtatcgattaatttctggagtggatttacgcgatcacttgaaggttgcatttgctacatccaaagttccgggcgaagtggtgaaaaagtgtggggttcgtctagtatatgagcaagatgagatggggaatgcatctttcctttcggcaccatgtggccgggagaaggagatgaatcaaattcagagtcaggagaccgacaccgccgcttccttttccaaacttccccctgtggttatacatgatgaaagttgttcgtatatcgcatttccgtctcgaaggttttttaacggaaacatttgtaagctgactgctcttcagactcttactctctctggttgcacagaactgaagaaattgccagatgaaatggagagcctacaatgtttagtaaagctcaaagcaaatggaagtggtagacaagaggcatccacctctattactcttctgacaaagcttcaacctcaaaagactcacactggaacagtgcaaaagtcttcacttattgccagagcttccatcaagtattcaagatttatgggccacacatccctggaaaccttttcatatccatcaagtgcatatgcattgaaggagtcaagattcatcttctattgctataattgcttccgactagttgggaatgagcagagtgacagtgtggaagctatcctactgggaattcggcttgttgcatcagtaccgaaatccatggctccaagtgaggattctgcctttccctgggtgtacatgttattatttgtttgcgtatgctaa

SEQ ID NO: 102298 - protein, 1414 aa, Vitis vinifera
  misc_feature (109)..(109): The Xaa at location 109 stands for Ala, or Val.
  misc_feature (267)..(267): The Xaa at location 267 stands for Ile, or Thr.
  misc_feature (321)..(321): The Xaa at location 321 stands for Ile, or Val.
  misc_feature (331)..(331): The Xaa at location 331 stands for Arg, or Lys.
  misc_feature (333)..(333): The Xaa at location 333 stands for Ile, or Phe.
  misc_feature (346)..(346): The Xaa at location 346 stands for Asp, or Gly.
  misc_feature (415)..(415): The Xaa at location 415 stands for Leu, or Phe.
  misc_feature (479)..(479): The Xaa at location 479 stands for Ile, or Met.
  misc_feature (485)..(485): The Xaa at location 485 stands for Arg, or Cys.
  misc_feature (536)..(536): The Xaa at location 536 stands for Leu, or Pro.
  misc_feature (637)..(637): The Xaa at location 637 stands for Ala, or Thr.
  misc_feature (707)..(707): The Xaa at location 707 stands for Leu, or Phe.
  misc_feature (758)..(758): The Xaa at location 758 stands for Ile, or Val.
MASSSTSLSVASSSSTHPRKYEVFLSFRGEDTRKSFTDHLHEALHRCGINTFIDDQLRRGEQISSALLQAIEESRFSIIIFSEHYASSSWCLDELTKILECVKVGGHTXFPVFYNVDPSHVRKQTGSYGVAFTKHEKVYRDNMEKVLKWREALTVASGLSGWDSRDRHESKVIKEIVSKIWNELNDASSCNMEALVGMDSHIZNMVSLLCIGSDDVRMVGIWGMAGIGKTTIAEAVYQKICTQFEVFWEGNLNTRIFNRGINAIKKXLHSMRVLIVLDDVDRPQQLEVLAGNHNWFGPGSRIIITTREKHLLDEKVEIYEXKELNKDEARXLXYQHAFKYKPPAGXFVQLCDRALNYTKGIPLALKILGRFLYNRSKKEWESELEKLRRIPNKEIQDVLRISFDGLDDNQKDIFXDIACFFKGQDKDYVIKLLKSCDFFPEIGIRNLIDKSLVTISYNKLCMHDLIQEMGWEIVRQESXKDPGKXSRLWVNDDVIDMLTTNTGTEAVEGMVLNLSTLKELHFSVNVFTKMNKLRVXRFYDAQIWGSSWIWRRNDRYKSPYTECKFHLSGDFKFLSNHLRSLYWDGYPLKSLPSNFHPEKLLELKMCFSQLEQLWEGNKSFQKLKFIELSHSQHLIKXPDFSGAPKLRRIILEGCTSLVKVHPSIGALKKLIFLNLEGCKNLKSFLSSIHLESLQILTLSGCSKLKKXPEVQGAMDNLSELSLKGTAIKGLPLSIEYLNGLALFNLEECKSLESLPGCXFKLKSLKTLILSNCLRLKKLPEIQENMESLKELFLDDTGLRELPSSIEHLNGLVLLKLKNCKRLASLPESICKLTSLQTLTLSGCSELKKLPDDMGSLQCLLKLKANGSGIQEVPSSITLLTRLQVLSLAGCKGGGSKSRNLALSLRASPTDGLRLSSLTVLHSLKKLNLSDRNLLEGALPSDLSSLSWLECLDLSRNNFITVPTSLSRLPHLRRLIVEHCKNLQSLPELPSSIKELLANDCTSLETFSYPSSAYPLRKFGDFNFEFSNCFRLVGNEQSDTVEAILQEIRLVASIQKSMAPSEHSARYGESRYDAVVPGSRIPEWFTHQSEGDSITVELPPGCYNTNSIGLAACAVFHPKFSMGKIGRSAYFSVNESGGFSLDNTTSMHFSKADHIWFGYRLISGVDLRDHLKVAFATSKVPGEVVKKCGVRLVYEQDEMGNASFLSAPCGREKEMNQIQSQETDTAASFSKLPPVVIHDESCSYIAFPSRRFFNGNICKLTALQTLTLSGCTELKKLPDEMESLQCLVKLKANGSGRQEASTSITLLTKLQPQKTHTGTVQKSSLIARASIKYSRFMGHTSLETFSYPSSAYALKESRFIFYCYNCFRLVGNEQSDSVEAILLGIRLVASVPKSMAPSEDSAFPWVYMLLFVCVC

SEQ ID NO: 102299 - DNA, 3408 bp, Vitis vinifera
  CDS (1)..(3408)
  misc_feature (16)..(16): r is g or a
  misc_feature (292)..(292): r is g or a
  misc_feature (410)..(410): m is a or c
  misc_feature (520)..(520): k is g or t
  misc_feature (560)..(560): y is t or c
  misc_feature (603)..(603): r is g or a
  misc_feature (836)..(836): k is g or t
  misc_feature (867)..(867): r is g or a
  misc_feature (919)..(919): y is t or c
  misc_feature (963)..(963): r is g or a
  misc_feature (978)..(978): y is t or c
  misc_feature (986)..(986): y is t or c
  misc_feature (1028)..(1028): r is g or a
  misc_feature (1062)..(1062): w is a or t
  misc_feature (1237)..(1237): y is t or c
  misc_feature (1239)..(1239): w is a or t
  misc_feature (1378)..(1378): w is a or t
  misc_feature (1428)..(1428): r is g or a
  misc_feature (1439)..(1439): r is g or a
  misc_feature (1487)..(1487): r is g or a
  misc_feature (1838)..(1838): w is a or t
  misc_feature (2153)..(2153): y is t or c
  misc_feature (2397)..(2397): r is g or a
  misc_feature (2639)..(2639): s is g or c
  misc_feature (2686)..(2686): y is t or c
  misc_feature (2700)..(2700): r is g or a
  misc_feature (2702)..(2702): y is t or c
  misc_feature (2704)..(2704): s is g or c
  misc_feature (2709)..(2709): r is g or a
  misc_feature (2728)..(2728): r is g or a
  misc_feature (2756)..(2756): y is t or c
  misc_feature (2759)..(2759): y is t or c
  misc_feature (3025)..(3025): w is a or t
  misc_feature (3157)..(3157): r is g or a
  misc_feature (3362)..(3362): y is t or c
atggcttctgctgctrcttcttcttcttcttcttctcaaacgcgctatgatgtgttcctcagcttcagaggagaagacacccgcaataacttcactgcccatctctatcacgccttgtgccagaaaggaatcaacactttcatcgatgatgacaagcttgagagaggccaagtcatatctcctgcccttgttgcagctatcgaaaactccatgttttcaatagttgttttgtcgaaaaattatgcattctctagatggtgtttacaggaattggtgaagatagtagagtgcrtgaaaagcaggagacagagggttgtcccaattttctacaatgtggatccctcggatgtgagaagacagaggggcatatttggagaagcattggctaaacatgaagagaactcggagamcatggagagggtgcagagttggaaggatgctctcactcaagttgcaaatttatccggttgggattcaagaaataagaatgagcctctactaatcaaggaaatcgttacakatattttgaataaattgttaagtacatctattagtgataytgaaaatctggttggaatagatgctcgcatgcaagaaatagaratgcgattatgtttggggtctgatgattttctgatggtaggaatttggggcatgggcggaatagggaaaacaacccttgctagagctatttatagaaaaatcacttgtcaatttgaagcatgttgtttttttgaaaatgttggggaggatttggcaaaggagggtttaataggattgcaacaaaagtttcttgctcaactattggaggaaccaaatctaaatatgaaggcackcacatctataaagggaaggctccactcaaaraaggattggtttggtcgaggaagtagaattattataaccactagggataagygtttgttaatttcacatggagtactcaattattatgaggctcaragatttaattatgaygaagcttytgagttccttacaccctattcattaaaacataaaattccttrtgatgatttcatggaggtttcaaaagaagtaatwggttatgctcaaggcctcccattggctctagaagttttaggttcctttttatttagcatgaccaaagaagaatggagaaatcaattagacaaactgaaaagtactcctaatatgaaaattcaagaagtacttaaagtaagttatgatgggctagatgataaggagaagaatataytwctagacattgcatgtttctttaaaggagaggataaagattatgtaatggaaatactagatggttgcggctttttctcacttagtggaatacgagctctcattgataagtcactcgtaactatttcttggagtaatgagwtaatgatgcatgacttaatacaagaaatgggtagggaaattgttcgtcarcaatcccttgragagcctggtaaacgtagcagattatggtttcatgaagatatcaatgrcgtattgaaaaaaaatacggcaactgaaaaaattgaaggcatattcctcaacttgtctcatttagaagagatgttatactttaccactcaagcccttgcaaggatgaatagacttagattgctcaaagtctataactctaaaaatatttcaagaaacttcaaagatacctccaatatggagaattgcaaagtgaacttttccaaggactttaaattttgttaccatgatttgaggtgcctatatttttatggatactctttgaaatcattgcccaatgacttcaatccaaagaatcttattgagctcagcatgccttatagtcgcattaaacaactttggaaaggaatcawggttcttgcaaatttgaaattcatggatctcagtcactctaagtacttaatagaaactccaaattttcggggagtcaccaacctcaaacggttagttttggaaggatgtgtgtctttacgtaaggtgcactcatcacttggagatttgaagaatctcattttcttgaatttgaaaaactgccaaatgctaaagagccttccaagtagcacttgtgatttgaagtctcttgaaacgtttattctttctggttgctccaaatttaaagaatttcctgagaactttgggagcttagaaatgttgaaggaactttatgyagatgaaattgctataggagtacttccctcctctttttctttcttaagaaaccttcaaatattatcctttaagggatgtaaaggaccatcatctaccctatggttgttgccaagaagaagttcaaattccattggttccatattgcaacctttgtcaggtttacgctctttaataagactaaacctaagtaactgcaatttatcggatgaaccaaaccttagcagtcttggcttcttatcatcrttggaagagttatatttaggtgggaacgactttgttactttgccttcaaccatcagtcaactttctaacctaacgttgttggggttggaaaattgtaaaagactgcaagtacttccagagcttccatcaagcatatattatatatgtgcagaaaattgcacatcattaaaagatgtctcatatcaagtacttaagtcactacttccaactggccaacaccaaaagcgcaagttcatggttcscgttgtgaaaccggatacagccttagcggttttggaagcatctaatyctgggattagaatrcyasatagrgcaagttatcagaggatcratcccgttgtgaaactgggtatagccayagyggctttaaaagcatttattcctgggagtagaataccagattggataaggtatcagagctcagggagtgaagtaaaagcagagctacctccaaattggtttaattccaacttcctgggttttgcttttagttttgtcacttgtggccatttctcttgcctcttcatgttgaaagcggatgtcttgtttgattggacatccagggacgattcttcctccgttgatatcattattgtcgaaatgatttcctttaagagaaggttggagwcggatcacgtgtgcctgtgttatgtaccacttccccagttgcggaattgctctcaagtgactcacatcaaggtatcatttatggcagtctccagggagggtgagattgaaattaagaggtgtggggttggtrtagtgtacagtaatgaagatgggaatcacaacaatcccccaatgatccgattcaactctatctcctctcctcctcctcctcctcgtagtaagtcaaccgttgtccttgaagaaatccatgaggaggaacctagtggaaatgggtgctctaatgttgatggctcagaagaagtgaggaggaggaacctagaactgctactgtctgytctgaggatcgctctgaatcagatattcggccacagaaatgcttga

SEQ ID NO: 102300 - protein, 1135 aa, Vitis vinifera
  misc_feature (6)..(6): The Xaa at location 6 stands for Ala, or Thr.
  misc_feature (98)..(98): The Xaa at location 98 stands for Met, or Val.
  misc_feature (137)..(137): The Xaa at location 137 stands for Asn, or Thr.
  misc_feature (174)..(174): The Xaa at location 174 stands for Asp, or Tyr.
  misc_feature (187)..(187): The Xaa at location 187 stands for Ile, or Thr.
  misc_feature (279)..(279): The Xaa at location 279 stands for Arg, or Leu.
  misc_feature (307)..(307): The Xaa at location 307 stands for Arg, or Cys.
  misc_feature (329)..(329): The Xaa at location 329 stands for Phe, or Ser.
  misc_feature (343)..(343): The Xaa at location 343 stands for Cys, or Tyr.
  misc_feature (413)..(413): The Xaa at location 413 stands for Leu, or Phe.
  misc_feature (460)..(460): The Xaa at location 460 stands for Ile, or Leu.
  misc_feature (480)..(480): The Xaa at location 480 stands for Glu, or Gly.
  misc_feature (496)..(496): The Xaa at location 496 stands for Asp, or Gly.
  misc_feature (613)..(613): The Xaa at location 613 stands for Lys, or Met.
  misc_feature (718)..(718): The Xaa at location 718 stands for Ala, or Val.
  misc_feature (880)..(880): The Xaa at location 880 stands for Arg, or Pro.
  misc_feature (896)..(896): The Xaa at location 896 stands for Pro, or Ser.
  misc_feature (900)..(900): The Xaa at location 900 stands for Ile, or Met.
  misc_feature (901)..(901): The Xaa at location 901 stands for Leu, or Pro.
  misc_feature (902)..(902): The Xaa at location 902 stands for Asp, or His.
  misc_feature (919)..(919): The Xaa at location 919 stands for Ile, or Thr.
  misc_feature (920)..(920): The Xaa at location 920 stands for Ala, or Val.
  misc_feature (1009)..(1009): The Xaa at location 1009 stands for Ser, or Thr.
  misc_feature (1053)..(1053): The Xaa at location 1053 stands for Ile, or Val.
  misc_feature (1121)..(1121): The Xaa at location 1121 stands for Ala, or Val.
MASAAXSSSSSSQTRYDVFLSFRGEDTRNNFTAHLYHALCQKGINTFIDDDKLERGQVISPALVAAIENSMFSIVVLSKNYAFSRWCLQELVKIVECXKSRRQRVVPIFYNVDPSDVRRQRGIFGEALAKHEENSEXMERVQSWKDALTQVANLSGWDSRNKNEPLLIKEIVTXILNKLLSTSISDXENLVGIDARMQEIEMRLCLGSDDFLMVGIWGMGGIGKTTLARAIYRKITCQFEACCFFENVGEDLAKEGLIGLQQKFLAQLLEEPNLNMKAXTSIKGRLHSKKDWFGRGSRIIITTRDKXLLISHGVLNYYEAQRFNYDEAXEFLTPYSLKHKIPXDDFMEVSKEVIGYAQGLPLALEVLGSFLFSMTKEEWRNQLDKLKSTPNMKIQEVLKVSYDGLDDKEKNIXLDIACFFKGEDKDYVMEILDGCGFFSLSGIRALIDKSLVTISWSNEXMMHDLIQEMGREIVRQQSLXEPGKRSRLWFHEDINXVLKKNTATEKIEGIFLNLSHLEEMLYFTTQALARMNRLRLLKVYNSKNISRNFKDTSNMENCKVNFSKDFKFCYHDLRCLYFYGYSLKSLPNDFNPKNLIELSMPYSRIKQLWKGIXVLANLKFMDLSHSKYLIETPNFRGVTNLKRLVLEGCVSLRKVHSSLGDLKNLIFLNLKNCQMLKSLPSSTCDLKSLETFILSGCSKFKEFPENFGSLEMLKELYXDEIAIGVLPSSFSFLRNLQILSFKGCKGPSSTLWLLPRRSSNSIGSILQPLSGLRSLIRLNLSNCNLSDEPNLSSLGFLSSLEELYLGGNDFVTLPSTISQLSNLTLLGLENCKRLQVLPELPSSIYYICAENCTSLKDVSYQVLKSLLPTGQHQKRKFMVXVVKPDTALAVLEASNXGIRXXXRASYQRIBPVVKLGIAXXALKAFIPGSRIPDWIRYQSSGSEVKAELPPNWFNSNFLGFAFSFVTCGHFSCLFMLKADVLFDWTSRDDSSSVDIIIVEMISFKRRLEXDHVCLCYVPLPQLRNCSQVTHIKVSFMAVSREGEIEIKRCGVGXVYSNEDGNHNNPPMIRFNSISSPPPPPRSKSTVVLEEIHEEEPSGNGCSNVDGSEEVRRRNLELLLSXLRIALNQIFGHRNA

SEQ ID NO: 102301 - DNA, 3735 bp, Vitis vinifera
  CDS (1)..(3735)
  misc_feature (841)..(841): r is g or a
  misc_feature (1107)..(1107): w is a or t
  misc_feature (1815)..(1815): k is g or t
atggcctcttcaatgatcaaccaaaaagattctgcttctcactggaattatgacgtgttcctgagtttcagaggtgaagacacccgcaggagttttaccgatcatctctatgctgctttggttgagaaaggggttcgcacttttagagatgacgaagaacttgagagaggaaaagagattgcaccagagcttttgaaagctatcgaagaatcaagaatttccgtggtggttttctccaagaattatgctcgttcggggtggtgtatggatgagctagtgaagatcattgagtgcatgaaagcgaagggacagacagttcttccagttttctatgatgtggatccgacccatgtccggaagcagactgggagtttcatggaagcatttgctagtcatggagaagacacagaggtgatagagagggctaaaaggtggagagctgccttgactcaagcagccaatttatctggatggcacctgcagaatgggtacgagtcgaagcttattaagaaaattattgaagagattttgagtaaattgagtcgaaaattgttatatgttgacaaacatctagttggagtgtcttctcgtttgaaagaaatacttctacgagtaagtattgaatcaaatgatgttcgtatggttgggatctgtggaataggtggagtgggtaagacaactatagccaaagttgtttataatctaatctctagtcaatttgagggcattagcttccttgcaaatattagagaagtctccaaaaactgtggtttgcttccattacagaaacaacttctaggtgatattttgatgggatggagtcaaaggataagcaatctcratgaaggaatcaatgtgctaatggacagacttcactctaaaaaggttcttattattcttgatgacgtggatgatttgaatcaattagaatccttagctggaaatgttgattggtttggtattggaagtagaattgttataacaactagagataaacatctactaaatgtgcatggagtgagtgaaatatatgaggctaaggaattagaaccagaggaagctcttcaacttttcagtcaatatgctttcaaaagaaaaagtccagawaaagattatatgaacctctctgacaatgtagtacattatgctaaaggccttccactggctcttaaagttttgggttctttcctatttagtaagacaatacttgagtgggaaagtgaattacataagctaaaaaaggagcttaatacaaaggttcaagatgttcttagaataagttttgatggattagattttacacagaaggagatatttcttgatcttgcgtgcttttttaaaggacaggagtatgattttgttataaaaatactagatggttgcggatttcatgcaaagagtggcataagagttctcagtgacaggtgcctcatagacttgttagataacaggttatggatgcatgatttgatacaacaaatgggttgggaaattgtacgccaagaatgtcctaaagatcctggaaaatggagcagactatgggattatgagcatatctacagtgtattgaagaaaaatacggttcttgataatttaaatactatcgaactcagtaactctcaacatctcatccatttgccaaacttctcaagcatgccaaatctagagagactagttcttgaaggttgtacaagttttcttgaggttgacccatctattgaagttctaaacaagcttattttcttgaatctgaaaaactgcaaaaaactaaggagttttccaagaagtattaagttggaatgccttaaatatctktctctttctgggtgttcagatctcaagaattttccagaaattcaaggcaatatgcaacatttgtctgagctttatttagatgggacagcaattagtgaattacctttctccattgggtatctcacaggactcattctgttagatttggaaaattgcaaaaggcttaagtctcttccaagtagcatttgtaagttgaaatcccttgagactctcattctctctgcttgctcaaaactagagagttttcctgaaatcatggagaacatggaacatttaaaaaagcttcttttggatggaactgccttaaaacagctgcacccatcaattgaacatctaaatggccttgtttctctgaacctgagagattgcaaaaaccttgcaactcttccttgcagcattggtaacttgaaatctcttgagacacttattgtttctggttgttcaaagctccaacaattgccagagaacctgggtagtttgcaatgtttagtgaagcttcaggcagatggaacactcgtaaggcaaccaccttcctcaattgttcttttaagaaatcttgaaatattgtcgtttgggggatgtaaaggacttgcatctaactcatggagttcactcttctcattctggttgttgccaagaaaaagttcagacaccattggtttgcaattgccttctttgtcgggtttgtgctccttaagagaactagatataagtgactgcaatctaatggagggagcagtgccctttgatatctgcaacttatcctcattggaaacattaaatctaagcagaaacaactttttcagcttacctgcaggcattagtaagctttcaaaactaagattcctctccttgaaccactgcaagagtctcttacaaattcccgagctcccatcaagtataatagaagtaaatgcacaatattgttcatcccttaacactatattaaccccatctagtgtctgcaataaccagcctgtttgccgttggctagtatttacactcccaaattgtttcaatctggatgctgaaaacccatgcagtaatgatatggcaattatatcacccagaatgcagattgtcacaaatatgctacagaaacttcagaattttcttccagattttgggtttagcatttttcttcctggaagtgaaattccagactggatctcgaatcagaatctcggatctgaagtgacaatagagctgcctcctcattggtttgaaagtaacttcttaggatttgctgtatgctgtgtttttgcatttgaggacatagcccccaatggatgcagttcccaacttctgtgtcaattgcaatctgatgaatctcattttagaggcattggtcatattttgcattcaatcgattgtgaaggcaatagtgaagacagactcaagtcacatcacatgtggctagcatacaagccccgtggacgacttcggatctcctatggtgattgccccaatagatggaggcatgctaaggcttcatttggcttcattagctgttgtccaagcaacatggtttgggttcaaggccttaaaaaggaattcttgccactactaagtgaagtttcctccagaatcagagctgaggaaggtcgtcaaacaatgatgctcgataatcactctattgaaggatcaacacttgtcatttcttcaccgaacaataacaacatcaggcttattgcagaatctggaaaagctgaaaaacctagaccatcaaccaacaaagatggtttatggtgtaaccattgtaagaagctgcgatacatgaaggagaattgttggaagcttcatggaaagaatcaatcatttggtcagaataatgcccaaactggacaacatggtggacaagcttatgtggctcaatctgatgaggtctcttatgagaaaaatatgttagacaactattaa

SEQ ID NO: 102302 - protein, 1244 aa, Vitis vinifera
  misc_feature (369)..(369): The Xaa at location 369 stands for Asp, or Glu.
MASSMINQKDSASHWNYDVFLSFRGEDTRRSFTDHLYAALVEKGVRTFRDDEELERGKEIAPELLKAIEESRISVVVFSKNYARSGWCMDELVKIIECMKAKGQTVLPVFYDVDPTHVRKQTGSFMEAFASHGEDTEVIERAKRWRAALTQAANLSGWHLQNGYESKLIKKIIEEILSKLSRKLLYVDKHLVGVSSRLKEILLRVSIESNDVRMVGICGIGGVGKTTIAKVVYNLISSQFEGISFLANIREVSKNCGLLPLQKQLLGDILMGWSQRISNLBEGINVLMDRLHSKKVLIILDDVDDLNQLESLAGNVDWFGIGSRIVITTRDKHLLNVHGVSEIYEAKELEPEEALQLFSQYAFKRKSPXKDYMNLSDNVVHYAKGLPLALKVLGSFLFSKTILEWESELHKLKKELNTKVQDVLRISFDGLDFTQKEIFLDLACFFKGQEYDFVIKILDGCGFHAKSGIRVLSDRCLIDLLDNRLWMHDLIQQMGWEIVRQECPKDPGKWSRLWDYEHIYSVLKKNTVLDNLNTIELSNSQHLIHLPNFSSMPNLERLVLEGCTSFLEVDPSIEVLNKLIFLNLKNCKKLRSFPRSIKLECLKYLSLSGCSDLKNFPEIQGNMQHLSELYLDGTAISELPFSIGYLTGLILLDLENCKRLKSLPSSICKLKSLETLILSACSKLESFPEIMENMEHLKKLLLDGTALKQLHPSIEHLNGLVSLNLRDCKNLATLPCSIGNLKSLETLIVSGCSKLQQLPENLGSLQCLVKLQADGTLVRQPPSSIVLLRNLEILSFGGCKGLASNSWSSLFSFWLLPRKSSDTIGLQLPSLSGLCSLRELDISDCNLMEGAVPFDICNLSSLETLNLSRNNFFSLPAGISKLSKLRFLSLNHCKSLLQIPELPSSIIEVNAQYCSSLNTILTPSSVCNNQPVCRWLVFTLPNCFNLDAENPCSNDMAIISPRMQIVTNMLQKLQNFLPDFGFSIFLPGSEIPDWISNQNLGSEVTIELPPHWFESNFLGFAVCCVFAFEDIAPNGCSSQLLCQLQSDESHFRGIGHILHSIDCEGNSEDRLKSHHMWLAYKPRGRLRISYGDCPNRWRHAKASFGFISCCPSNMVWVQGLKKEFLPLLSEVSSRIRAEEGRQTMMLDNHSIEGSTLVISSPNNNNIRLIAESGKAEKPRPSTNKDGLWCNHCKKLRYMKENCWKLHGKNQSFGQNNAQTGQHGGQAYVAQSDEVSYEKNMLDNY

SEQ ID NO: 102303 - DNA, 3048 bp, Vitis vinifera
  CDS (1)..(3048)
  misc_feature (6)..(6): y is t or c
  misc_feature (339)..(339): k is g or t
  misc_feature (718)..(718): m is a or c
  misc_feature (831)..(831): r is g or a
  misc_feature (861)..(861): r is g or a
  misc_feature (1013)..(1013): r is g or a
  misc_feature (1078)..(1078): k is g or t
  misc_feature (1143)..(1143): y is t or c
  misc_feature (1185)..(1185): r is g or a
  misc_feature (1302)..(1302): w is a or t
  misc_feature (1472)..(1472): r is g or a
  misc_feature (1629)..(1629): m is a or c
  misc_feature (1671)..(1671): r is g or a
  misc_feature (1725)..(1725): y is t or c
  misc_feature (1769)..(1769): r is g or a
  misc_feature (1852)..(1852): r is g or a
  misc_feature (1875)..(1875): r is g or a
  misc_feature (2008)..(2008): r is g or a
  misc_feature (2237)..(2237): s is g or c
  misc_feature (2454)..(2454): y is t or c
  misc_feature (2464)..(2464): r is g or a
  misc_feature (2610)..(2610): y is t or c
  misc_feature (2668)..(2668): r is g or a
  misc_feature (2891)..(2891): y is t or c
atggcygatccttctttccaacggagctatgatgtgttcctgagctttagaggagaagacacccgcaatagcttcactgcccatctctataaggagctacgcaccaaaggaatcaacacgttcattgacgatgacaagcttgagaggggtgatgtcatttcttctgcgcttgttgcggctattcaaaactccaagttttctctcgttgttttgtcagaaaattatgcatcttccgggtggtgtttggaggagctggtgaagattctagagtgcatgagaaccatgggacagagggttctccccattttctacgatgtggatccctcgcatgtaagacakcacaacggaaaatttggagaagcactggctaaacatgaagaaaatttgagaactatggagagggtgccgatttggagggatgctctcactcaagttgccaatttatccggttgggattccaggaataagcatgagcctatgcttatcaagggaattgccacttatatttggaataaattgtttagtagatcctcaaattatgctgatcagaacctagttggaatagaatctagcatacgagaaataaaatccctgctatttaccgagtctctagatgttcgcatggtggggatttggggcatgggcggcataggtaaaacaacccttgccagagctgtttataaccaaatctctcatcaatttgaagcttgctgctttmttgaaaatgttctcatcgtcattgatgatgtgaacaattcaaaaatattagaagacttgattgggaagcatggttggtttggtatcggaagtagaatcatcataacaacaagraataagcagttgctagttacacatggggtraatgaagtgtatgaggttgaaaaattaaatgatgataatgcagttgagctcttcagtcgatatgcctttaaaaaagcccatcctatagatgattatgtggagctctctcaatgtatagtggtttatgctcagggccttccattagctcttcragttttagataacgagagagatatatttttggacatcgcatgtttctttcaagggcatgataaakattatgtaatggaaatattcagatcttgtggtttcttccctgatattggaataagagttctcatygagaagtctcttatatctgttgttgagaataaattgatgatrcacaatttgttacaaaaaatgggtcgggaaattgttcgtgaagcatctcctaaggaacctggaaaacgcagcaggttgtggattcatgatgatgtaaatcatgtattgacaaaaaawacgggaaccgaagaagttgaaggaatatcccttgacttgtccagtttgaaagagataaatttcactaatgaagcttttgcaccgatgaataggctcagattgctcaaagtctatacattgaattttctcatggactccaaaagagagaagtgtaaagtgcacttttcccraggctttaaatttcactgcgaagaactgaggcacctatattggtatgaataccctttgaaatcactgcccaatgattttaacctcaagaatcttgttgacctcagcatgccttatagccaaataaaacaactttggaaagggaccaaggttcttgamaacttgaagttcatgaatctcaagcactccaaattcttaacrgaaaccccggatttctcaagggttaccaaccttgaacggttagttttaaaaggytgtatatctttgtataaggttcacccatcacttggagatttgarcaaactcaatttcttgagtttgaaaaattgcaaaatgctgaagagtcttccaagttgcatttgtgatttgaaatgccttgaartatttattctttctggttgctcraaatttgaagagttacctgagaattttgggaacttagaaatgttgaaggaattttgtgcggatggaactgctattagggtacttccctcctctttttctttattgagaaaccttgaaatattatcctttgagrgatgtaaaggaccaccaccatctacctcatggtggttgccaagaagaagttcaaatttcagtaatttcgtattgtctcctttgtcaagtttaagctccttaaaaactctaagcctaagtgcctgcaatatatcagatggagcaactcttgatagtcttggcttcttatcttcactggaagatttagatttaagtgagaacaactttgttactctgccttcaaatatcasccgacttcctcacttgaaaatgcttgggttggaaaattgtaaaagattgcaagcactgccagagcttccaacaagcatacgtagtataatggctcgtaattgcacatcattggaaacaatctcaaatcaatcatttagctccctactaatgactgtcagattgaaggaacatatctattgcccaataaatcgggatggacttttagttcctgcactyagtgcagttrtttttgggagtagaataccagactggataaggtaccagagctcagggagtgaagtaaaagcagagctacctccaaactggtttgattccaacttcctgggtcttgctttgtgtgttgtcactgttcccaggctggtgtcacttgcygatttttttggtcttttttggagatcatgtaccttgttctattccacatccagtcacrcttcttcctcctttgatgtttacacttatccaaatcatcttaagggaaaggtggagtcagatcacttgtggctggtttatgtaccgcttccccacttcatcaattggcagcaagtcactcacatcaaggcttcattcagaataaccaccttcatgcgccttaatgtaattaaggaatgtgggattggtctagtgtatgttaatgaagagttgaattactctcycttctctcctcctcctaatgagtcatctgttgtccttcaagaaatccatggggagggatctagtggaagtgggagctctaatattgatggctcagaatcagagaactccgattactattctgctgatgagggggaaccctctgcacccctgctgtaa

SEQ ID NO: 102304 - protein, 1015 aa, Vitis vinifera
  misc_feature (113)..(113): The Xaa at location 113 stands for Gln, or His.
  misc_feature (240)..(240): The Xaa at location 240 stands for Ile, or Leu.
  misc_feature (338)..(338): The Xaa at location 338 stands for Arg, or Gln.
  misc_feature (360)..(360): The Xaa at location 360 stands for Asp, or Tyr.
  misc_feature (395)..(395): The Xaa at location 395 stands for Ile, or Met.
  misc_feature (434)..(434): The Xaa at location 434 stands for Asn, or Lys.
  misc_feature (491)..(491): The Xaa at location 491 stands for Arg, or Gln.
  misc_feature (543)..(543): The Xaa at location 543 stands for Asp, or Glu.
  misc_feature (590)..(590): The Xaa at location 590 stands for Asn, or Ser.
  misc_feature (618)..(618): The Xaa at location 618 stands for Ile, or Val.
  misc_feature (670)..(670): The Xaa at location 670 stands for Arg, or Gly.
  misc_feature (746)..(746): The Xaa at location 746 stands for Ser, or Thr.
  misc_feature (822)..(822): The Xaa at location 822 stands for Ile, or Val.
  misc_feature (890)..(890): The Xaa at location 890 stands for Ala, or Thr.
  misc_feature (964)..(964): The Xaa at location 964 stands for Leu, or Pro.
MADPSFQRSYDVFLSFRGEDTRNSFTAHLYKELRTKGINTFIDDDKLERGDVISSALVAAIQNSKFSLVVLSENYASSGWCLEELVKILECMRTMGQRVLPIFYDVDPSHVRXHNGKFGEALAKHEENLRTMERVPIWRDALTQVANLSGWDSRNKHEPMLIKGIATYIWNKLFSRSSNYADQNLVGIESSIREIKSLLFTESLDVRMVGIWGMGGIGKTTLARAVYNQISHQFEACCFXENVLIVIDDVNNSKILEDLIGKHGWFGIGSRIIITTRNKQLLVTHGVNEVYEVEKLNDDNAVELFSRYAFKKAHPIDDYVELSQCIVVYAQGLPLALXVLDNERDIFLDIACFFQGHDKXYVMEIFRSCGFFPDIGIRVLIEKSLISVVENKLMXHNLLQKMGREIVREASPKEPGKRSRLWIHDDVNHVLTKXTGTEEVEGISLDLSSLKEINFTNEAFAPMNRLRLLKVYTLNFLMDSKREKCKVHFSXGFKFHCEELRHLYWYEYPLKSLPNDFNLKNLVDLSMPYSQIKQLWKGTKVLXNLKFMNLKHSKFLTETPDFSRVTNLERLVLKGCISLYKVHPSLGDLXKLNFLSLKNCKMLKSLPSCICDLKCLEXFILSGCSKFEELPENFGNLEMLKEFCADGTAIRVLPSSFSLLRNLEILSFEXCKGPPPSTSWWLPRRSSNFSNFVLSPLSSLSSLKTLSLSACNISDGATLDSLGFLSSLEDLDLSENNFVTLPSNIXRLPHLKMLGLENCKRLQALPELPTSIRSIMARNCTSLETISNQSFSSLLMTVRLKEHIYCPINRDGLLVPALSAVXFGSRIPDWIRYQSSGSEVKAELPPNWFDSNFLGLALCVVTVPRLVSLADFFGLFWRSCTLFYSTSSHXSSSFDVYTYPNHLKGKVESDHLWLVYVPLPHFINWQQVTHIKASFRITTFMRLNVIKECGIGLVYVNEELNYSXFSPPPNESSVVLQEIHGEGSSGSGSSNIDGSESENSDYYSADEGEPSAPLL

SEQ ID NO: 102305 - DNA, 3495 bp, Arabidopsis thaliana
  CDS (1)..(3495)
atgggtattttaggtatttgtattattacaaatcatttggatggagatagagttctctccaaatgcgaattcgacgtgttcgtgagtttcagaggcgcggatacgcgtcatgacttcacttctcacctcgttaagtacctgcgtgggaaaggtatcgatgttttctccgatgccaaactccggggaggtgagtacatctcgcttctctttgacaggatcgagcaatcgaagatgtcaatcgttgtcttctcagaggattacgccaactcctggtggtgcttggaggaagtcgggaagattatgcagcgcaggaaagaattcaatcatggagttttaccgatcttctacaaagtcagtaaatctgatgtttcgaatcagacagggagttttgaagccgtattccagagccccacaaagatttttaatggagatgaacaaaaaattgaggaattgaaggttgctctgaagacagcttccaatatccgtggctttgtatatcctgagaacagctcggagcctgattttttagatgaaatcgtgaagaatactttcaggatgctgaatgaattgtctccatgtgtaatccctgatgatctaccaggaattgaatcacgttccaaggaactggagaagctattgatgttcgataatgatgaatgtgtccgtgtcgttggagttcttgggatgactggtatcggcaagacaacggttgctgatatcgtatataaacagaacttccagaggtttgatggatacgagttccttgaagacattgaagataactctaagcggtatggattaccttatttgtaccaaaaactcctccataaattattggatggagaaaatgttgatgtcagagcgcagggaagaccggaaaactttctaaggaacaagaaattgtttattgtgctggacaatgtgaccgaagagaaacaaatagaatatcttatcggaaagaagaatgtgtacaggcaaggaagtaggattgttataataacaagagacaagaaactgctgcagaaaaacgctgatgctacatatgtggttcccagattaaatgacagggaagctatggagttattctgccttcaggtatttggcaaccactatcccacggaagaatttgtggatctatcaaacgattttgtttgttatgctaaagggcttccgttagctttgaagttgttaggtaagggtctattaacccatgatataaactactggaagaagaaattggagtttttacaggtaaatccagacaaggagcttcagaaagagctgaaatcgagttataaagcacttgatgatgatcagaagagcgtatttctggacatagcatgttttttcaggtcagagaaagcagattttgtttcaagcattctgaaatcagacgacattgatgctaaagatgtgatgagagaacttgaggagaagtgccttgtaaccatttcttacgataggattgagatgcatgatctattgcatgcaatggggaaggaaattggaaaagaaaaatccatcagaaaggcaggcgaacgtcgtaggttgtggaaccacaaagatattcgtgatatcctggagcataacacgggcactgaatgtgttagaggcatcttcttgaacatgtctgaagtcagaagaatcaagctttttcctgctgctttcacgatgttgtcaaaactcaaattcctgaaattccacagttctcattgttctcagtggtgtgataatgaccatatatttcagtgctccaaagtccctgatcactttccagatgagcttgtttaccttcactggcaggggtatccctatgattgcctgccatcagatttcgatccaaaggaacttgtcgatcttagtctgcgttatagccacatcaaacaactgtgggaagatgagaagaatacagaaagtttaagatgggtcgatctcggtcagtcaaaagacttgctaaatttatcaggtttatccagggccaaaaatcttgaaagattggatcttgaaggctgtacgagtttggatctcttgggctcagtaaaacagatgaacgaacttatttacctgaacctcagagactgcacaagccttgagagtcttccaaagggattcaaaataaaatctcttaagactctgatcctcagtggttgcttaaaacttaaggactttcatattatatcagaaagtattgaatcccttcatttggaaggcacagcaatcgaacgagttgttgaacacatcgagagtcttcacagccttattttgctgaatctcaagaattgtgagaaattgaagtatcttcccaacgatctttacaagctgaaatctctccaagaactggttctctctggttgttcagcgctggagagtcttccgcccatcaaagagaagatggaatgcttagagattttgcttatggatggaacgtctatcaaacaaacacctgaaatgagttgtttgagtaacctcaaaatttgttcgttctgtcgacctgttatcgacgattccacagggttgtacttagatgctcatgggtgtggttctctggaaaatgtttcaaaaccactaacgattcctctcgtaaccgagaggatgcatactactttcatttttacggattgcttcaagctgaaccaagcggagaaggaagatattgtagctcaggcccaactcaagagtcagttactggcaaggacatctcgtcatcataatcataagggactacttctggatcctctggttgccgtttgctttccaggacatgacataccctcatggttctcccatcaaaaaatgggatctttgatagaaaccgacctgcttccacactggtgtaacatcttcaaatggagcgaagagactaatgaaggtaatagatgtcatcccactagtgcctcattcgaattctaccttactgatgaaaccgaaagaaaactagaatgctgcgagattttaaggtgtgggatgaattttttatatgctcgagatgagaacgaccgtaaattccagggaatacgggttacagacactgttgagcgtacatctagtgaggctcttgtaaccattcgaggtcagtcccactcacggattgaagagagaagatatggcagaataagagatgaaatcatggatatgactggatcctccatgataggaggcttaagaacctttgggtttagaaaagttgctgagtctgaacaagaatgcgaatatgcaaacgatgattttgtgagaggtaaacctgagcttacgttggatattgaaatcacgagattgaaaagttttgtcacaggacaacctttcatgtttgaaggaatcctaccaggattggtttccccggagactatgatagcttattttatggctattaaggagaaattaaagacagctttagcaaaggatatatcaaaaccactttatgaattattggtctttttatattttatctttggactaattatttattttcttgttgttgttctgttgctcgactaa

SEQ ID NO: 102306 - protein, 1164 aa, Arabidopsis thaliana
MGILGICIITNHLDGDRVLSKCEFDVFVSFRGADTRHDFTSHLVKYLRGKGIDVFSDAKLRGGEYISLLFDRIEQSKMSIVVFSEDYANSWWCLEEVGKIMQRRKEFNHGVLPIFYKVSKSDVSNQTGSFEAVFQSPTKIFNGDEQKIEELKVALKTASNIRGFVYPENSSEPDFLDEIVKNTFRMLNELSPCVIPDDLPGIESRSKELEKLLMFDNDECVRVVGVLGMTGIGKTTVADIVYKQNFQRFDGYEFLEDIEDNSKRYGLPYLYQKLLHKLLDGENVDVRAQGRPENFLRNKKLFIVLDNVTEEKQIEYLIGKKNVYRQGSRIVIITRDKKLLQKNADATYVVPRLNDREAMELFCLQVFGNHYPTEEFVDLSNDFVCYAKGLPLALKLLGKGLLTHDINYWKKKLEFLQVNPDKELQKELKSSYKALDDDQKSVFLDIACFFRSEKADFVSSILKSDDIDAKDVMRELEEKCLVTISYDRIEMHDLLHAMGKEIGKEKSIRKAGERRRLWNHKDIRDILEHNTGTECVRGIFLNMSEVRRIKLFPAAFTMLSKLKFLKFHSSHCSQWCDNDHIFQCSKVPDHFPDELVYLHWQGYPYDCLPSDFDPKELVDLSLRYSHIKQLWEDEKNTESLRWVDLGQSKDLLNLSGLSRAKNLERLDLEGCTSLDLLGSVKQMNELIYLNLRDCTSLESLPKGFKIKSLKTLILSGCLKLKDFHIISESIESLHLEGTAIERVVEHIESLHSLILLNLKNCEKLKYLPNDLYKLKSLQELVLSGCSALESLPPIKEKMECLEILLMDGTSIKQTPEMSCLSNLKICSFCRPVIDDSTGLYLDAHGCGSLENVSKPLTIPLVTERMHTTFIFTDCFKLNQAEKEDIVAQAQLKSQLLARTSRHHNHKGLLLDPLVAVCFPGHDIPSWFSHQKMGSLIETDLLPHWCNIFKWSEETNEGNRCHPTSASFEFYLTDETERKLECCEILRCGMNFLYARDENDRKFQGIRVTDTVERTSSEALVTIRGQSHSRIEERRYGRIRDEIMDMTGSSMIGGLRTFGFRKVAESEQECEYANDDFVRGKPELTLDIEITRLKSFVTGQPFMFEGILPGLVSPETMIAYFMAIKEKLKTALAKDISKPLYELLVFLYFIFGLIIYFLVVVLLLD

SEQ ID NO: 102307 - DNA, 3507 bp, Arabidopsis thaliana
  CDS (1)..(3507)
atggcttcttcatcttcttctcgcaattgggtttatgatgttttcttgagcttcagtgggaaagacgtccgcgtaacattccgtagccactttctcaaagagcttgatcggaaactgatctctgctttcagagacaatgagatcgagagaagccactctctttggcccgatcttgaacaagcgatcaaggactccagaatcgcagtggtcgttttctccaaaaactacgcttcgtcgagctggtgtcttaacgagttgctggagattgtgaactgcaatgataaaattatcataccggttttctacggtgtggatccttcccaagtgaggtatcaaatcggtgaatttggaagtatctttgaaaagacttgcaagagacaaacagaggaagtgaaaaatcaatggaagaaagcgttgactgatgtagctaatatgcttggatttgattctgccaaatgggatgacgaagcaaaaatgattgaagaaatagccaatgatgttttggctaaactgcttttaacttcatccacggattctgctgagaactctattggcattgaagatcatattgcaaatatgagtgtattgttgaaattggaagctgaggaagtgagaatggttggtatatggggttcctcggggattggtaagactaccattgcaagagctctgtttaaccaactttctcggcatttcccagttagcaaattcatagacagagcttttgtatataagagtagagaaacttacaagggcgccaatccggacgacccgaacatgaagttgcacttgcaaggatgtttcctatcggaaattttggggaaaaaagacataaagattgatcatttaggtgcactgggagagaggctaaagcaccagaaaactctcatcatcattgatgatttggatgatctagtggtactagattcattggtgggtaaaactaattggtttggatgtgggagcaggatcatagtgattaccaataataagcaattcttaagggcccatggaattgatcatatttacgaagttagtctcccttctaaagagcgcgctcaagagatgttttgtcagtctgctttcggggaaaactctccacctgaaggttttgaggagctcgtagttgaaattgcatggcttgctggtagtcttcctttgggtcttactgtttttggttcagctctacgagggagaaaaaaggagtactgggtgaagatgttgccaaggcttcaaaatgatctagatggcaatattgaggagacattgaaagtcagctatgatgcgataggcaacgtaaaagatcaagcgttattccgtcttatcgcatgtcttttcaatcacgtcaaagtcagagacattgaattgttgctcgcagatagtggcttagatgtaaatattgcactggaaaacctagttgataagtcccttattcatgtcagaaatgatcatgtggagatgcaccgtttgctacaagaaacgggtagaaatattgtacgctcacagtccactgacaacccaggagaacgagtatttctggtggattcaaacgatagtcgtactgtactcagtgaaggcattggtactcgaaaggtgctaggaatatcattggatacaagtaaggttagtgagttttgtgtacatgagaatgccttcaaagggatgggtaatctccttttcttggatatttcctcgaagacttttatagaagaagaagtcaaagtgcatttaccggaaaaaataaactattattccgttcaacccaaacaattgatttgggatagatttccactgaaatgtatgccttatacttttcttcgaaacctcgtcaagctcgaaatgcatgacagcaagctagagaagctgtgggaaggagctatgtcatttacatgtctaaaggaattggatatgtgggcatctaaatacctgaaagaaatcccagatctttcaaaggccactaacattgagaaacttgactttggacattgctggagtttggtggagcttccttcctctatacgaaatctcaataaactgttggaattgaatatggaatactgcggtgaattggagactcttcctacgggtttcaacctcaaatccctggactacctcaatttcaatgaatgctggaagttgaggacttttcctgaattcgcaaccaacatctcaaatctcattctggcagaaacatctattgaagaatacccttccaatttgtatttcaagaatgtccgtgagctaagcatggggaaagcggatagtgatgagaataaatgccaaggagtgaagcccttcatgccgatgctgtctcccactttgaccctcttggagctctggaatatcccaaatttagtagagctttcgtcctcatttcagaatctcaataaccttgagaggttggacatttgttactgcagaaatctggagtctctacccaccggaatcaacctcgaatctctcgtttcccttaatctctttggatgctcacggttgaagcgctttcctgatatctcaaccaacatcaaatatctcgatctagaccaaactgggattgaagaggttccttggcagatcgagaacttctttaacctcactaagctaactatgaaaggttgccgcgagctaaaatgtgtatccctaaacatttttaaactcaaacatcttggggaagttagcttttccaattgcggggcattgaccagagttgatttgagttgctatccaagtggggtggagatgatgaaggcagacaatgctgacatagtttctgaggagaccacctcttctcttcctgatagttgcgtcctcaatgtcaatttcatggattgcgtcaatctggatcgagaacctgtccttcaccaacagtcgattattttcaactccatgatattgccaggtgaagaagtgccatcatatttcacttaccgaacatctgactctcaaccatttggaacgtcttcctctctgcccatccctctacttcccacacaactctctcaaccattcttcagatttagggtttgtgcagtggtaagtgcttccaatggagtatatatcggggtatatagtcggttcaaaggcagaattgggaacaaatttgattcctttggtgaggtacataatttcatggaaattgagaagggtattcatctgtgtatatttgactgtcgtatccgtctatacaaagataatgttcctctatctcaactgaactatgatcatgtggatataaatattcatataactagtggagattggagatctacggtcgttttaaaagaatggggtatacgactcttagagaccggttcatcagcagagaaccgacttggtaatccaaacagtactcttccacatgtttctcaagccgaagaaggcaatatggggtattatacacatgttcaaggacttgttaatgagattgaaaatagtgaagactctggagataacaatgtagagactgagagaagcaagaagcgcatgcggctacaccacttcatatga

SEQ ID NO: 102308 - protein, 1168 aa, Arabidopsis thaliana
MASSSSSRNWVYDVFLSFSGKDVRVTFRSHFLKELDRKLISAFRDNEIERSHSLWPDLEQAIKDSRIAVVVFSKNYASSSWCLNELLEIVNCNDKIIIPVFYGVDPSQVRYQIGEFGSIFEKTCKRQTEEVKNQWKKALTDVANMLGFDSAKWDDEAKMIEEIANDVLAKLLLTSSTDSAENSIGIEDHIANMSVLLKLEAEEVRMVGIWGSSGIGKTTIARALFNQLSRHFPVSKFIDRAFVYKSRETYKGANPDDPNMKLHLQGCFLSEILGKKDIKIDHLGALGERLKHQKTLIIIDDLDDLVVLDSLVGKTNWFGCGSRIIVITNNKQFLRAHGIDHIYEVSLPSKERAQEMFCQSAFGENSPPEGFEELVVEIAWLAGSLPLGLTVFGSALRGRKKEYWVKMLPRLQNDLDGNIEETLKVSYDAIGNVKDQALFRLIACLFNHVKVRDIELLLADSGLDVNIALENLVDKSLIHVRNDHVEMHRLLQETGRNIVRSQSTDNPGERVFLVDSNDSRTVLSEGIGTRKVLGISLDTSKVSEFCVHENAFKGMGNLLFLDISSKTFIEEEVKVHLPEKINYYSVQPKQLIWDRFPLKCMPYTFLRNLVKLEMHDSKLEKLWEGAMSFTCLKELDMWASKYLKEIPDLSKATNIEKLDFGHCWSLVELPSSIRNLNKLLELNMEYCGELETLPTGFNLKSLDYLNFNECWKLRTFPEFATNISNLILAETSIEEYPSNLYFKNVRELSMGKADSDENKCQGVKPFMPMLSPTLTLLELWNIPNLVELSSSFQNLNNLERLDICYCRNLESLPTGINLESLVSLNLFGCSRLKRFPDISTNIKYLDLDQTGIEEVPWQIENFFNLTKLTMKGCRELKCVSLNIFKLKHLGEVSFSNCGALTRVDLSCYPSGVEMMKADNADIVSEETTSSLPDSCVLNVNFMDCVNLDREPVLHQQSIIFNSMILPGEEVPSYFTYRTSDSQPFGTSSSLPIPLLPTQLSQPFFRFRVCAVVSASNGVYIGVYSRFKGRIGNKFDSFGEVHNFMEIEKGIHLCIFDCRIRLYKDNVPLSQLNYDHVDINIHITSGDWRSTVVLKEWGIRLLETGSSAENRLGNPNSTLPHVSQAEEGNMGYYTHVQGLVNEIENSEDSGDNNVETERSKKRMRLHHFI

SEQ ID NO: 102309 - DNA, 4137 bp, Populus trichocarpa
  CDS (1)..(4137)
atgaatcaactcaattgtgatgtctgtggcccgatccctgctcttgactctgctgcccaatgcgcgttcgctttccctttcatatcttttgactttttctcccccaaaagtccatcttctttacagtgtaagaaagggatccgtaagaaatccatgaaacttatcgggattttcatggcttccaccagcgtgcaaggaataacctcatcttcttcttcatcttcttctcctccacaatatatgtatgatgtgttccttagttttagaggcaaagacacccggaacaactttactagtcatttatattctaatctggctcagagaggcatcgatgtatacatggatgatagggagctcgagagaggaaagaccatcgaacctgctctctggaaggccatcgaagaatcaaggttttcagtcattatattttcaggagattacgcttcttcaccatggtgcttggatgaacttgtcaagattgttcagtgcatgaaagagatggggcacactgttctgccagttttttatgatgtggatccctcagaggtagccgagcggaaagggcaatatcagaaagccttcgttgagcatgaacaaaatttcaaggaaaatttggagaaggtctggatctggaaagattgtctctctacggtgaccaatctatctggctgggacgtacggaagaggaatgaatcagaatcaattgaaataattgctgaatacatatcatacaaactaagcgtcactatgccagttagcaaaaatttaattggaatggattctcgtttagagatattaaatggttatataggtgaagaagttggcgaagcaatattcattgggatttgtggaatgggaggcataggtaagacgactgttgcaagggtagtatatgataggtttcgttggcaatttaaaggcagctgcttcttagcaaatgtcagagaagtttttgatgagaaagatggacctcgccgtttacaggaacaacttgtttctgaaatcttaatgaaacgtgctaatatatgtgattcttctagaggtattgaaatgataaagcggaagttacaacgtaaaaagattcttattgttcttgatgatgtagatgaccgtaaacaactagaatccctggctgcagagagtaaatggtttggtccagggagcagaattatcataacaagcagagatagacaagtgttgactagaaatggtgttgctagaatttatgaggctgagaaattgaatgatgatgatgctcttatgttgtttagccaaaaagctttcaaaaatgaccaacctgctgaagatttcgtggaactatccaagcaagttgtgggttatgctaatggccttccactggctctagaagttataggttcgtttatgcatggaagaagtatccttgaatggggaagtgcgattaatagactaaatgagattcctgaccgtgaaattattgatgtgcttcgtattagttttgatggcctccatgaattagagaagaaaatatttttagacattgcctgtttcctgaaggggtttaaaaaagatagaataataaggatacttgacagctgtggattccatgcacatattggaacacaagttcttattgagaaatctctcataagtgtctctcgggatcaagtctggatgcataatttattacagataatgggtaaggaaattgttcgttgtgaatcccctgaagagcctggaagacgcagtagattgtggacatacgaggatgtctgccttgcactgatggacaacacaggaaaagaaaagatagaagccattttcttggacatacctggaataaaagaggcacaatggaacatgaaagccttctctaaaatgagcaagctaagattgctcaaaatcaacaacgtgcagctttctgaaggacctgaagatctttccaataagttgcgatttcttgaatggcattcttacccatcaaaatcattgccagctggtttacaagtggatgagctggttgaacttcacatggctaacagtagcattgagcaattatggtatgggtataagagtgcagttaagttgaaaatcatcaatctcagcaactcactatacctgtccaagtctccagatcttactggaattcctaatctcgagagtctgattcttgaaggttgtataagtttgtctgaggtccatccgtcacttggacgtcacaagaagcttcaatatgtgaatcttataaattgccgaagtattaggattctcccaagcaaccttgaaatggaatcgcttaaatttttcactcttgatggctgctcaaaacttgagaactttccagatatagtgggaaacatgaactgtttgatgaagctttgtttggacaggactggtattgctgaactatctccatcaattcgtcatatgattggcttagaagtattgagcatgaacaactgcaagaagcttgaaagcatttcgagaagcatagaatgcttgaaatcccttaaaaaacttgatctgtctggctgctctgaacttaaaaatataccagggaatttggagaaagttgaaagtttggaggagtttgatgtaagtggaacttcaataagacaactgccagcatccatttttctcttaaagaatcttgcagtattatctttggatggtttacgcgcttgcaatttaagagcacttcctgaagatattggctgcttatcttcattgaagtccttagatctgagccggaataactttgttagcctgcctaggagcataaatcagctttctggacttgaaaagcttgtcttggaggattgcacgatgcttgaatctttgcttgaggttccatctaaagttcaaacagtaaatttgaatggttgtataagcctaaaaacaattccagatccgataaagctaagcagttcccaaagatcagagttcatgtgtcttgactgctgggaattgtacgagcataatggtcaagatagcatggggtcgatcatgcttgaaagatacctccagggtttgtccaatccaagacctggatttcgtatcgttgttccaggaaatgaaattccaggctggtttaaccatcaaaagcttaaagaatggcagcatggatcctttagcaacattgagttgtcgtttcattcttacgagcgaggagtgaaggtgaagaattgtggtgtctgcttgttatcttctgtatatattacaccacaaccatctgccctttttactgttacaagcaaagaagcagcttcttcatataaaacttctttagctttttcttcatcttaccatcaatggacgacttatgttttccctggcatcagagtcacagacactagtaatgctttcacctatttaaagtcagatctagcccttagattcatcatgccagccgagaaggaaccagagaaagtaatggcaattagatcaagactctttgaggccattgaagaatcagggctgtcaattattatatttgcaagcgattgggcttctttaccttggtgctttggagaacttgtcaagattgtcggattcatgaatgagatgagattggacaccgtgtttccagtttcttatgatgtcaaacaatcaaagatagatgatcaaaaagagagttacacaattgtctttgataagattggaaaagatgtcagggaaaacgaggagaaggtacaaagatggatggatattctcagtgaagttgagatttcatctggatcgaaaagaaggtcaaggaaagcaatcaccagctgtcaaccgtccctgtcaaccgcccaaccgccttgccaccagtcaccttcacacctccagaagcgcgagcacttgtctgagcagcagctgcagctcgagcagctgcagcagcgaatgcagcagctgcagcagctgcagcggcggcggcggcggcagcggccggagaagctgcagcagcggcaggagcggcaggagcagctgcagcggctgcagcagctgcagcggcggcaggagcggctgcagctgctgcaggtgcagccgcaggagctgctccagcagcagatgcagctgctgcagcggcattttgggctgcagctgctccagcagcagcttgttgagcatctgcttcttgagcagcagctgcctgggttttggtttggaatctaa

SEQ ID NO: 102310 - protein, 1378 aa, Populus trichocarpa
MNQLNCDVCGPIPALDSAAQCAFAFPFISFDFFSPKSPSSLQCKKGIRKKSMKLIGIFMASTSVQGITSSSSSSSSPPQYMYDVFLSFRGKDTRNNFTSHLYSNLAQRGIDVYMDDRELERGKTIEPALWKAIEESRFSVIIFSGDYASSPWCLDELVKIVQCMKEMGHTVLPVFYDVDPSEVAERKGQYQKAFVEHEQNFKENLEKVWIWKDCLSTVTNLSGWDVRKRNESESIEIIAEYISYKLSVTMPVSKNLIGMDSRLEILNGYIGEEVGEAIFIGICGMGGIGKTTVARVVYDRFRWQFKGSCFLANVREVFDEKDGPRRLQEQLVSEILMKRANICDSSRGIEMIKRKLQRKKILIVLDDVDDRKQLESLAAESKWFGPGSRIIITSRDRQVLTRNGVARIYEAEKLNDDDALMLFSQKAFKNDQPAEDFVELSKQVVGYANGLPLALEVIGSFMHGRSILEWGSAINRLNEIPDREIIDVLRISFDGLHELEKKIFLDIACFLKGFKKDRIIRILDSCGFHAHIGTQVLIEKSLISVSRDQVWMHNLLQIMGKEIVRCESPEEPGRRSRLWTYEDVCLALMDNTGKEKIEAIFLDIPGIKEAQWNMKAFSKMSKLRLLKINNVQLSEGPEDLSNKLRFLEWHSYPSKSLPAGLQVDELVELHMANSSIEQLWYGYKSAVKLKIINLSNSLYLSKSPDLTGIPNLESLILEGCISLSEVHPSLGRHKKLQYVNLINCRSIRILPSNLEMESLKFFTLDGCSKLENFPDIVGNMNCLMKLCLDRTGIAELSPSIRHMIGLEVLSMNNCKKLESISRSIECLKSLKKLDLSGCSELKNIPGNLEKVESLEEFDVSGTSIRQLPASIFLLKNLAVLSLDGLRACNLRALPEDIGCLSSLKSLDLSRNNFVSLPRSINQLSGLEKLVLEDCTMLESLLEVPSKVQTVNLNGCISLKTIPDPIKLSSSQRSEFMCLDCWELYEHNGQDSMGSIMLERYLQGLSNPRPGFRIVVPGNEIPGWFNHQKLKEWQHGSFSNIELSFHSYERGVKVKNCGVCLLSSVYITPQPSALFTVTSKEAASSYKTSLAFSSSYHQWTTYVFPGIRVTDTSNAFTYLKSDLALRFIMPAEKEPEKVMAIRSRLFEAIEESGLSIIIFASDWASLPWCFGELVKIVGFMNEMRLDTVFPVSYDVKQSKIDDQKESYTIVFDKIGKDVRENEEKVQRWMDILSEVEISSGSKRRSRKAITSCQPSLSTAQPPCHQSPSHLQKREHLSEQQLQLEQLQQRMQQLQQLQRRRRRQRPEKLQQRQERQEQLQRLQQLQRRQERLQLLQVQPQELLQQQMQLLQRHFGLQLLQQQLVEHLLLEQQLPGFWFGI

SEQ ID NO: 102311 - DNA, 3366 bp, Populus trichocarpa
  CDS (1)..(3366)
atggctgcttcttattcacgtactaccactcggtggaaatatgatgtcttcctcagtttcagaggtgaagacacccggaagagttttactgaccatctttatactgccttgtgtcacagaggagtcatcacttttagagatgatcaagaacttgagagagggaatgaaatttcccgtgaacttcttcaagcaatacaagattcaaggttttcagtgatagttttctcaagaaactatacttcttccacatggtgcttgaacgaactagtaaaaattgtggaatgcatgaaacaaggtagacaaacagttattccagttttctatgatgttgatccttctgaagtaaggaatcagacagggagacttcaacaggcctttgctgatcatgaagaggttttcaaagacaacattgagaaggtgcagacctggaggattgcgatgaaactagtggccaatctttctggatgggatttgcaggataggcacgagtcagagtttattcaaggcattgttgaagagatagtatgcaagttgagaaaatcaagttacagcatgtcatgggtaaccgagaacttagttggaatggattggcgtttggaggaaatgagtttatatttaggagtagagcagctgaatgatgttcgcgttatagggatctgtgggatgggtggaataggtaagacgaccattgctagagctgtctatgagaagatgctgggtcattttgaaggcagcagctttcttgcaaatgttagagaagttgaggagaaacatggtttagttcgcttacaggaacaacttctttcagacacgttgatggatagaaggaccaaaatctctgatgttcatagaggaatgaatgaaataagggttaggctgcgttctagaatggttcttgttgttcttgatgatgttgatcaattggtccaattagaatctttagttggagatcgtaattggtttgacaatggaagtagagtcataataaccacaagagatgaacttcttctgaaacaatttggagttgataaaatatatagagttgcaagtttaaataacattgaagccgttcaactcttttgtctgaaagccttcagaagttattgtcccccggaagattatgtgcttcagaccatccaagttgtaaagtatgcagatggccttccattagctctccatgttttgggttcatttttttctgggatcagatctgtagaattgtggaaccattcattgaaaagactgaaagatatcccagataaaggaattctagataaacttaaaataagttttgatggacttaacgaagtagagaagaaaatatttctagatattgcttgttttttcaacgggtgggaagaagattgtgtgacaaaattaatggaaagttctggtttctatccacagattggaataaggattctcgtagaaaaatttctcataaatatttcagataacagagtatggatgcatgacttgcttcaagaaatgggtcgacaaattgtcaagagagagtctcatgaagaacctggaaaacgcactaggttgtggctctgtgaggatgtcattcacgttttgctaaataatacggtaaataacttactgttacaaccacaattctatgtatcagattttgagtttcccttttcctgttcatcattcctatttattaactttactgttcagggaaccgacaaagttgaaggcatcgtcctgaattcaaatgacgaagtagatggactatacttaagtgctgaatcaataatgaagatgaaaaggttaagaattctcaaactccaaaatataaacctttcccaggaaattaaatatctctccaatgagttgagatatcttgaatggtgccgatatcctttcaaatcattgccatcaacttttcaaccggataaacttgttgagctccacatgcgtcatagcagcattaaacaattatgggagggacctttaaagttgcttagagctattgatctcagacactcccgaaacttaataaagactccagacttcagacaagttccaaatcttgagaagctgaatcttgagggttgcagaaaactggtcaagattgacgactctatcggaattctgaaagggcttgttttcttgaatttgaaggactgcgtaaagcttgcctgtcttccaacaaacatatgtgagttgaagaccctcagaattcttaacttgtatggatgcttcaaacttgaaaaattgcctgagatgttgggaaatgtaataaatctggaggagcttgatgtaggcagaactgctataacacaactgccatcaacctttggtctctggaaaaaacttaaggtgctatcttttgatggatgcaagggaccagcacctaaatcatggtattctctcttctccttccggtcacttccaagaaatccttgtccaattactttgatgctgtcctctctgtcaacgctatactctttgacaaagctaaatctaagcaactgcaatctcatggaaggagaacttcctgatgatatgagctgcttcccatcattggaagaattagaccttattggaaataactttgtgagaataccttcaagcatcagccggctctctaaacttaaaagcctcaggttaggcaattgcaagaagcttcagtcacttccggatcttccatcaaggcttgaatatctcggggtggacggttgcgcttcgttgggaactcttccaaatctatttgaagaatgtgcccgctcaaagtttttgtccttgatttttatgaactgctccgagttgactgattatcaagggaatatcagcatgggaagtgaaattcctagttggtttcaccataagagcgtgggtcattctttaacaatacggctacttccttatgagcattggtccagcagtaagtggatgggattagctgtttgtgcattctttgaagagcttgattgtggtgattcatgtcttattacattgaacttcgatatcaaaggcttcaaatctaggagctactttctagagtaccctgaaggttcaacatttacgtcaaatcaggttttctttatcttctttcccagaggcaagtttccggaaccacttgctgtgtctaatactacttctcagcccattgaggtggagttccggtcatctattcaagaaagaaacaccaacaatgagtttcaggttctttctgcccgagtcatgaattgggggttccgcatggtgtacgaggaagacacagtgcagttcaacgaaccgaatacaagtgtcgactctatcaatggattgcattctgaagagttgaggatattggatgagaacaactccatcatcccatgcaaaaatattgagggcaaatgcctcccagaataa

SEQ ID NO: 102312 - protein, 1121 aa, Populus trichocarpa
MAASYSRTTTRWKYDVFLSFRGEDTRKSFTDHLYTALCHRGVITFRDDQELERGNEISRELLQAIQDSRFSVIVFSRNYTSSTWCLNELVKIVECMKQGRQTVIPVFYDVDPSEVRNQTGRLQQAFADHEEVFKDNIEKVQTWRIAMKLVANLSGWDLQDRHESEFIQGIVEEIVCKLRKSSYSMSWVTENLVGMDWRLEEMSLYLGVEQLNDVRVIGICGMGGIGKTTIARAVYEKMLGHFEGSSFLANVREVEEKHGLVRLQEQLLSDTLMDRRTKISDVHRGMNEIRVRLRSRMVLVVLDDVDQLVQLESLVGDRNWFDNGSRVIITTRDELLLKQFGVDKIYRVASLNNIEAVQLFCLKAFRSYCPPEDYVLQTIQVVKYADGLPLALHVLGSFFSGIRSVELWNHSLKRLKDIPDKGILDKLKISFDGLNEVEKKIFLDIACFFNGWEEDCVTKLMESSGFYPQIGIRILVEKFLINISDNRVWMHDLLQEMGRQIVKRESHEEPGKRTRLWLCEDVIHVLLNNTVNNLLLQPQFYVSDFEFPFSCSSFLFINFTVQGTDKVEGIVLNSNDEVDGLYLSAESIMKMKRLRILKLQNINLSQEIKYLSNELRYLEWCRYPFKSLPSTFQPDKLVELHMRHSSIKQLWEGPLKLLRAIDLRHSRNLIKTPDFRQVPNLEKLNLEGCRKLVKIDDSIGILKGLVFLNLKDCVKLACLPTNICELKTLRILNLYGCFKLEKLPEMLGNVINLEELDVGRTAITQLPSTFGLWKKLKVLSFDGCKGPAPKSWYSLFSFRSLPRNPCPITLMLSSLSTLYSLTKLNLSNCNLMEGELPDDMSCFPSLEELDLIGNNFVRIPSSISRLSKLKSLRLGNCKKLQSLPDLPSRLEYLGVDGCASLGTLPNLFEECARSKFLSLIFMNCSELTDYQGNISMGSEIPSWFHHKSVGHSLTIRLLPYEHWSSSKWMGLAVCAFFEELDCGDSCLITLNFDIKGFKSRSYFLEYPEGSTFTSNQVFFIFFPRGKFPEPLAVSNTTSQPIEVEFRSSIQERNTNNEFQVLSARVMNWGFRMVYEEDTVQFNEPNTSVDSINGLHSEELRILDENNSIIPCKNIEGKCLPE

SEQ ID NO: 102313 - DNA, 3531 bp, Medicago truncatula
  CDS (1)..(3531)
atgcggctgttttgctgcctgggcactggtaacagtgttgacttcatggaatcgatgtcatcttcatcatcatccttcaatttgatttctcaacaatggatctacgacgtgttcataaatttcagaggggaagacacgcgaaagagcctggtttctcatctatatgctgctctctcaaacgcgggaatcaacacttttcttgatgatgaaaagcttaaaaagggatgggaagtagaaccagaactattgcgagctatacaagggtctcaaatatgtttagttattttctcagaacactacacagaatctagttggtgtcttgttgaactcgtgaaaatcatggaacaccgcaaaactaataataacagtccagtggttatccccatattttaccatgttgacccttctgttgttcgtcgccaggtgggtgattttggaaaagctttagaagctattaccaaaagaattcacccaccaaaagagaggcaagaacttttgcggacatggaagcgtgctcttacccaagctgcaaatatttccggatgggattccagcattttcaggagtgaaagtgaactagtgaataaaattgttgatgaagttttgagaaagctggaaaacacattcttgcctacaacagaattcccagttggactagagtcccgtgtggaccaagtgatgttgtcgattgaaaatcaatcaagcaaagtgtctgcggtagggatttggggaatgggcgggttgggtaaaactaccacagccaaaggcatctacaataaaattcatcgcaaatttgtgcatagaagtttcattgagaatattagacaaacatgcgaatcagataaagggtatattcgtttgcaacaacaacttctgtcagatctcttcaaaacaaaggagaagatacacaacattgcatcagggacaattacaatcaacaaaaggctctctgcaaaaaaggtgctcattgtacttgatgatgtgaccaaagttcagcaggtaaaagcactatgtggaaattataaatgtttaggtttgggaagtgtactaattgttacaaccagagatgcacacgtgcttaggtcacttgaagttgactgtgtctgtacagcgaaagaaatggatgaaaatgagtcccttgagcttttcagttggcatgcttttagaaacgcaactccaagagcaaacttcagtgatctctcaaaaaatgtagttaattactgtggaggattacccttggctgttgaagtcctcggatcttacttatttgaaaggacaaaagaagaatggaaaagtgtgctatcaaagttagaaaaaattccccatgaagaagtgcaagagaaattgaaaataagctatgatggtttgacagatgacacaaagaaggctatatttcttgatgtatgttgtttctttatcggcaaggacagagactatgttaccgagatactaaacggttgtggactttttgctggtataggaatagctgtcctcatagagaggagccttttaaaagttgaaaagaataacaagcttggaatgcatgatttaataagagacatgggaagagaaattgttcgtggaagttcaacaaacgatccaggggagcgtagtcggttgtggcttcacgaggatgcacatagtgttttgacaaagaatacgggaacacaaaaagttgagggattgattttgaacttgcaaagtaaaggcagagatagcttcagtaccaatgttttccaacagatgcagaacatgagacttttgcaacttgattgtgttgacctcaccggagaatttgcacatctttccaaacagctgagatgggtcaattggcaacgatctaccttcaactgtataccgaaagacttttatcaaggaaatctagttgttttagaattaaaatttagcaatgttaaacaagtttggaaggaaaccaagttgttggacaagctaaaaatactcaatctcagtcattccaagtacttgaaaagtacccctgacttttcaaaattaccgaatctagaaaagctcattatgaaggattgtccaagtttgtccgagatacacccgtccattggagttctcaagaagcttcttctgataaatttgaaggactgtacaagtcttggcaatctaccaagggagatctatcagctgatatctgtgaaaactctcattctttttggttgttcaaagattgacaaattggaggaagatatagtgcaaatgaaatccttgacaactctagttgcagcaaatactggcgtcaaacaagcacccttttccattgttagatcaaaaagcattgtgtatatatccctatgcggatatgaaggattatcacgtgatatttttccttctctcatttggtcttggatgtcaccaacaatgaatcccttgccatatattcccctcacatccttggatgtagagagtaataatttggttttgggttatcaatcatcaatgcgcagtagttgttcagaacatagaagcgttagggtagaatgccaatcagtgattcaactaattcaaaaattaacaagttttcttgatggtctatatggtgcaaatcttactgaatcggaaacatcacatgcatcaaaaatctcggatatttccttgaaatctcttttgattacaatgggaagttgccacatagtcgtcgatactcttggcaagagcttatcacagggattgacaaccaatgattctagtgattctttccttccgggcgacaattatccttcttggttagcctatacaaatgaaggaccttcagtacggtttgaagtgcccgaggattgtgatggttgcttgaagggaataactttatatgttgtttattcatcgacacctgaaaacatggaaactgaatgtctcactggtgttttgatcattaattacacaaaatgcacgtttcatatatacaagcgagacacagtaatgtcctttaacgatgaagattggcagagtgtaatatcaaatttagcagttggggacagtgtggggatttttgtagcttttgggcatggattgactgttaagaagacagttgtctatctaacatatgccgagtcaagtgctatgcaaattgagccatcaattactgtggaagttaaaccatctagtgaagtgcaaatggagccattacctgaaccggaaatgcaaccatcatctaatgtgaaaacggagccatcactagaagaagtgcagccatcggctgatatgaagatggaaccattacctgaactggaagtgaaaccatcgtctaatgtgaaaagggaggcatcacctgatgtgaagatggagccattacctgaactggaagtgcaaccatcatctaatgtgaaaagggagtcattacttgaagatgaagtgcaaccatcacttgatgtgaagatggaaccatcacctatcatcaacaatgggccattacctaagagaaatacaaaaatatttgtaagattttcaaagaaattgggagaatgtttatgcttgaatcggaatagagatctcaataatttttaa

SEQ ID NO: 102314 - protein, 1176 aa, Medicago truncatula
MRLFCCLGTGNSVDFMESMSSSSSSFNLISQQWIYDVFINFRGEDTRKSLVSHLYAALSNAGINTFLDDEKLKKGWEVEPELLRAIQGSQICLVIFSEHYTESSWCLVELVKIMEHRKTNNNSPVVIPIFYHVDPSVVRRQVGDFGKALEAITKRIHPPKERQELLRTWKRALTQAANISGWDSSIFRSESELVNKIVDEVLRKLENTFLPTTEFPVGLESRVDQVMLSIENQSSKVSAVGIWGMGGLGKTTTAKGIYNKIHRKFVHRSFIENIRQTCESDKGYIRLQQQLLSDLFKTKEKIHNIASGTITINKRLSAKKVLIVLDDVTKVQQVKALCGNYKCLGLGSVLIVTTRDAHVLRSLEVDCVCTAKEMDENESLELFSWHAFRNATPRANFSDLSKNVVNYCGGLPLAVEVLGSYLFERTKEEWKSVLSKLEKIPHEEVQEKLKISYDGLTDDTKKAIFLDVCCFFIGKDRDYVTEILNGCGLFAGIGIAVLIERSLLKVEKNNKLGMHDLIRDMGREIVRGSSTNDPGERSRLWLHEDAHSVLTKNTGTQKVEGLILNLQSKGRDSFSTNVFQQMQNMRLLQLDCVDLTGEFAHLSKQLRWVNWQRSTFNCIPKDFYQGNLVVLELKFSNVKQVWKETKLLDKLKILNLSHSKYLKSTPDFSKLPNLEKLIMKDCPSLSEIHPSIGVLKKLLLINLKDCTSLGNLPREIYQLISVKTLILFGCSKIDKLEEDIVQMKSLTTLVAANTGVKQAPFSIVRSKSIVYISLCGYEGLSRDIFPSLIWSWMSPTMNPLPYIPLTSLDVESNNLVLGYQSSMRSSCSEHRSVRVECQSVIQLIQKLTSFLDGLYGANLTESETSHASKISDISLKSLLITMGSCHIVVDTLGKSLSQGLTTNDSSDSFLPGDNYPSWLAYTNEGPSVRFEVPEDCDGCLKGITLYVVYSSTPENMETECLTGVLIINYTKCTFHIYKRDTVMSFNDEDWQSVISNLAVGDSVGIFVAFGHGLTVKKTVVYLTYAESSAMQIEPSITVEVKPSSEVQMEPLPEPEMQPSSNVKTEPSLEEVQPSADMKMEPLPELEVKPSSNVKREASPDVKMEPLPELEVQPSSNVKRESLLEDEVQPSLDVKMEPSPIINNGPLPKRNTKIFVRFSKKLGECLCLNRNRDLNNF

SEQ ID NO: 102315 - DNA, 3174 bp, Medicago truncatula
  CDS (1)..(3174)
atggctagcagcagcaaatcatcttcagctcttgtgacttcttcaaagaaaaatcattatgatgtgtttgtcacctttagaggtgaagatactcgcaacaatttcactgattttctttttgatgcccttgaaacaaaaggcattatggtatttcgggatgtcattaatcttcaaaaaggtgaatgcataggacctgagctttttcgtgcaatcgaaatatctcaggtttacgttgcgatcttctcaaagaactatgcttcctcaacgtggtgcttgcaagaattagaaaagatatgtgaatgcattaaggggtcgggaaaacatgttcttcctgttttctatgatgttgatccttctgaggtgcggaagcaaagtggaatttatagtgaagcttttgtcaaacatgaacaaagattccaacaagactctatgaaggtgtcaagatggagagaagctctagagcaagtggggagtatatctggttgggatctacgtgatgagccactagctagagaaattaaagagattgttcaaaagataatcaatatattggaatgcaaatattcatgtgtttcaaaagatttagttgggattgattctcctatacaagcattacaaaatcatttgcttttgaactcagttgatggtgttcgtgctataggaatttgtggaatgggaggaatagggaaaacaacccttgctacgactttatatggccaaatatctcatcaatttagtgcatcttgttttattgacgatgtaaccaaaatttatggattacatgatgatccactcgatgtacaaaaacaaatcctatttcaaactctcggcatagaacaccaacaaatatgcaatcgttaccatgcaactactttgatacaaaggaagctatgtcatgaaagaacccttatgattcttgataatgtggaccaagttgaacaattggagaaaatagcggtgcatcgtgaatggttaggtccaggtagtagaattattatcatttctagagatgagcatgtattgaaagcgtatggagtggatgtagtttacaaagtttcactattggattggaatgaagctcacatgttattttgtcgaaaagctttcaaagatgagaaaattattatgagtaattatcaaaatttggtagatcagatactacattatgctaaaggtctaccactagcaattaaagtattgggctcgtttttgtttggtcgtaatgtgactgaatggaagagtgcattgactagattgagacaaagtccagttaaagatgtcatggatgtgctgcaattaagttttgatgggctcaatgaaacggaaaaagacatatttcttcatattgcttgttttttcaacaacgattcggaggaagatgttaaaaacattctaaactgttgtggatttcatgctgatattggattaagagttctcattgataaatcacttgtaagcattagttattcaattattaacatgcattctttgttggaagagctaggcagaaaaattgtgcaaaatagttcaagcaaagaaccaagaaaatggagcaggttgtggtccacagaacaactctacgatgttatgttggagaatatggaaaagcatgttgaagccatagttttgtattacaaagaagatgaagaggcggactttgaacacttgtcaaaaatgagtaatctcagattgctcttcatcgccaactatatttcaacgatgttaggattcccaagctgtctttcgaacaaattaagatttgttcactggtttagatatccttccaagtatttgccatcaaattttcaccccaatgaacttgtagaattgatcttgacggagagcaacattaaacaactatggaaaaacaagaagtatcttcccaatttgagaacattggatctacgtcactccagaaatctagaaaagataatagattttggagagttcccgaatcttgagcgtttagatttggaaggatgtataaaccttgttgagttggatccatctattggacttctaagaaagcttgtttacttgaacctaaaagattgcaaaagtctagttagcatacccaacaacatattcggtcttagctctcttcaatacctaaatatgtgtggctgttccaaagtatttaacaacccaaggcgtttgatgaagtctggtatatcctcagaaaagaagcagcagcatgatatacgtgaaagtgcatcacatcacctccctggcctaaaatggatcattttggctcacgattcatcacatatgttgccttccttgcatagtttatgttgtttgcgtaaggttgacataagcttttgctatctaagccatgtgcctgatgcaattgaatgtttacattggctagaaagattaaatttagcgggaaacgattttgtgacattacctagcctgaggaagctatccaaacttgtatatttaaatttggagcattgcaaattgttggaatctttgcctcaacttccttttcctaccaatactggggaggttcatcgtgagtacgacgactatttttgtggtgcaggattgctcattttcaactgtccaaaattgggtgagagggaacattgcaggagcatgacacttttatggatgaaacaattcattaaggcaaacccacgttcctcttctgagattcaaatagttaatccaggaagtgaaataccaagttggatcaacaatcagaggatgggttattcaatagcaatagaccgatctcctattaggcatgacaatgacaataatatcattggtattgtatgttgtgcagcatttacgatggcaccctatcgtgaaattttttattcctcggagttgatgaatctggctttcaagcgtattgattccaatgagaggttgttgaaaatgagagttccagtaaagctcagtcttgttacgaccaaatcaagtcacctatggattatctacttaccccgagagtaccccgggtattcctgtcatgaatttggaaaaatagaattaaaattttttgaggtggaaggtttggaggtcgagagttgcggttatcgttgggtatgtaaacaagatatacaagaattcaatttaatcatgaatcacaaaaattccttaactccaaagtgcaaaattttgacaattgaagatgagacacaaccagaaccgcaaccataa

SEQ ID NO: 102316 - protein, 1057 aa, Medicago truncatula
MASSSKSSSALVTSSKKNHYDVFVTFRGEDTRNNFTDFLFDALETKGIMVFRDVINLQKGECIGPELFRAIEISQVYVAIFSKNYASSTWCLQELEKICECIKGSGKHVLPVFYDVDPSEVRKQSGIYSEAFVKHEQRFQQDSMKVSRWREALEQVGSISGWDLRDEPLAREIKEIVQKIINILECKYSCVSKDLVGIDSPIQALQNHLLLNSVDGVRAIGICGMGGIGKTTLATTLYGQISHQFSASCFIDDVTKIYGLHDDPLDVQKQILFQTLGIEHQQICNRYHATTLIQRKLCHERTLMILDNVDQVEQLEKIAVHREWLGPGSRIIIISRDEHVLKAYGVDVVYKVSLLDWNEAHMLFCRKAFKDEKIIMSNYQNLVDQILHYAKGLPLAIKVLGSFLFGRNVTEWKSALTRLRQSPVKDVMDVLQLSFDGLNETEKDIFLHIACFFNNDSEEDVKNILNCCGFHADIGLRVLIDKSLVSISYSIINMHSLLEELGRKIVQNSSSKEPRKWSRLWSTEQLYDVMLENMEKHVEAIVLYYKEDEEADFEHLSKMSNLRLLFIANYISTMLGFPSCLSNKLRFVHWFRYPSKYLPSNFHPNELVELILTESNIKQLWKNKKYLPNLRTLDLRHSRNLEKIIDFGEFPNLERLDLEGCINLVELDPSIGLLRKLVYLNLKDCKSLVSIPNNIFGLSSLQYLNMCGCSKVFNNPRRLMKSGISSEKKQQHDIRESASHHLPGLKWIILAHDSSHMLPSLHSLCCLRKVDISFCYLSHVPDAIECLHWLERLNLAGNDFVTLPSLRKLSKLVYLNLEHCKLLESLPQLPFPTNTGEVHREYDDYFCGAGLLIFNCPKLGEREHCRSMTLLWMKQFIKANPRSSSEIQIVNPGSEIPSWINNQRMGYSIAIDRSPIRHDNDNNIIGIVCCAAFTMAPYREIFYSSELMNLAFKRIDSNERLLKMRVPVKLSLVTTKSSHLWIIYLPREYPGYSCHEFGKIELKFFEVEGLEVESCGYRWVCKQDIQEFNLIMNHKNSLTPKCKILTIEDETQPEPQP

SEQ ID NO: 102317 - DNA, 3405 bp, Medicago truncatula
  CDS (1)..(3405)
atggaagcctcttcttcttcttcttgcagatcaagttcaaccacaagtttatgcacctaccatgtctttttgagttttcgaggagaagatacacgcaaaggattcaccgatcatttatgtgctgcccttgaaagaaaagggatcacaacttttaaagatgacaaagaccttgagagagggcaagtcatttcagaaaagctaatcaatgcaataaaagattctatgtttgccatcactattctctcaccagactatgcttcttccacttggtgtttggatgagcttcaaatgatcatggagtgcagcagcaaaaacaacctgcatgttttgccagtcttctatggtgtggatccatctgatgtaaggcatcaaagaggatgctttgaggaagctttcagaaaacatcaagagaaattcggtcaacacagtgacagggttgatagatggagagatgctttcacacaagttgccagttactctggatgggactccaagggccagcatgaggcgtcactagtcgaaaacattgctcaacacatacatagaaagttggttcctaaattgccatcttgtacagagaaccttgttgggattgtttcaaaggtggaggaagtaaacaagttcttaggtatggggttgaatgacgttcgctttataggcatatggggtatgggtggcataggcaagtcaactattgctagagcggtctatgaaacaatccgatgtgaatttgaacttacttgctttctagaaaatgttagagagatatctgagacaaatggtttagttcacttacaaagacaacttctttctcatctgagtataagtaggaatgattttcatgatttgtatgatgggaaaaaaacaatacaaaactctttatgcagaaaaaaggttctacttgttcttgatgatgtgaatgaactaaaccagttggagaatttggttgggaaacaagattggtttggtccgggaagtagagtaataatcacaacaagagacaagcacttgctaatgacacatggagtacataaaacctataaaactggaatgttatgcaaacatgatgcccttgttctcttttgtttgaaagcctttaaaggagataaaccacaagaagggtatttggacttatccaaagaagtggtggactattgtggtggtcttccattggcacttgaggtgttaggttcctatctgtatggaagaaatattgatgtttggcatagtgctgttaaaaaattaagaagttttccccaccctagagtccaagataacctgaaaataagttatgatagtttagataccatggagaaggatatttttctagatattgcttgtttctttaagggaatgaagggagataaagttatagatatattagaaagttgtggctatttccctcaaattggaattcaaattttgattgaaagatcattgataactctagattctgtgaataataaattgggaatgcatgatttgcttcaagaaatgggcagggatattgtatttcaggaatctccaaatgatccttgtagacgtagcaggttgtggtctcaagaggacattgatcgcgtcttgacaaaaaacaagggaactgaagcaattaacagtattgatatgaaattacttcaaccatatgaagcacattggaacactgaagcattctcaaagacaagtcagctaaaatttctcagtttatgtgagatgcaacttcctcttggcctcagttgccttcctagttcattaaaagttcttcactggagagggtgtcctttaaaaactctccctataacaactcaacttgatgaacttgttgacattacattatctcatagcaaaattgaacaactctggcaaggagtaaagtttatggaaaagatgaagtacttgaatttggctttttccaagaacctaaagagattgcctgatttttctggtgttccaaatcttgaaaaattgattcttgaaggctgtgaaggcctaattgaggttcatccatcccttgcacaccacaagaaagttgttctggtgaatttgaaagactgcaaaagtcttaaatctctttcagggaagttggagatgagttccctgaagaagttaattctttcaggcagcagtaaatttaaattccttccagagtttggggaaaaaatggaaaatttatcaatgcttgctttagaaggaacagatataagaaaactgcccttatcacttggaagactagtcggacttactaatttgaacttaaaggactgcaaaagcctggtttgtcttccagataccattcatggattgaattccctcataactctggacatttcaggatgctcaaaactttgtagactgccagatggtttaaaggaaatcaagtgtttggaggaactccatgccaatgatactgctattgatgaactaccttcctccattttttatctagatagtcttaaagttttatcatttgctggttgccaagggccatcgacaacgtcaatgaactggtttcttcccttcaatttgatgtttgggagtcaaccagcttccaatggattcagattaccaagttctgtcatgggattaccttctttggaatatttaaacctaagttattgtaatctttctgaagaatcattcccgaattattttcaccacctatcatctttgaagtctttggatctgactggtaacaattttgttatcataccaagtagcatttctaaactttcaaggcttagatttctttgtctaaattggtgccaaaagcttcaattgttgccagagcttccattaaccatgacacagttgaatgcaagcaattgtgattcactggacactatgaaatttaatccagcaaagctatgcagtctctttgcatcacctagaaaactgtcctacgttcaagaactttacaagagatttgaggatcgttgtctccccacaacaagatttgacatgcttatcccaggggatgaaattccatcttggtttgttcctcaaagatccgtttcctgggcaaaagtacatatccctaataatttccctcaagatgaatgggtaggatttgcattgtgtttcctattagtgagttatgctgacccacctgaattgtgtaagcatgagattgattgttatttgtttgcatctaatggtaagaagttaatcaccaccaggagtttacctcctatggacccatgttatcctcatctttatattctctacatgtccatcgatgaatttcgcgatgaaattctcaaagatgattactggagtgagagtggcattgaatttgtattgaaatgttactgctgtcaatcattgcaagtagtgagttgtggttcccgtttggtttgtaagcaagatgttgaagattggagcaaaatgagtcatttcaacgagagttga

SEQ ID NO: 102318 - protein, 1134 aa, Medicago truncatula
MEASSSSSCRSSSTTSLCTYHVFLSFRGEDTRKGFTDHLCAALERKGITTFKDDKDLERGQVISEKLINAIKDSMFAITILSPDYASSTWCLDELQMIMECSSKNNLHVLPVFYGVDPSDVRHQRGCFEEAFRKHQEKFGQHSDRVDRWRDAFTQVASYSGWDSKGQHEASLVENIAQHIHRKLVPKLPSCTENLVGIVSKVEEVNKFLGMGLNDVRFIGIWGMGGIGKSTIARAVYETIRCEFELTCFLENVREISETNGLVHLQRQLLSHLSISRNDFHDLYDGKKTIQNSLCRKKVLLVLDDVNELNQLENLVGKQDWFGPGSRVIITTRDKHLLMTHGVHKTYKTGMLCKHDALVLFCLKAFKGDKPQEGYLDLSKEVVDYCGGLPLALEVLGSYLYGRNIDVWHSAVKKLRSFPHPRVQDNLKISYDSLDTMEKDIFLDIACFFKGMKGDKVIDILESCGYFPQIGIQILIERSLITLDSVNNKLGMHDLLQEMGRDIVFQESPNDPCRRSRLWSQEDIDRVLTKNKGTEAINSIDMKLLQPYEAHWNTEAFSKTSQLKFLSLCEMQLPLGLSCLPSSLKVLHWRGCPLKTLPITTQLDELVDITLSHSKIEQLWQGVKFMEKMKYLNLAFSKNLKRLPDFSGVPNLEKLILEGCEGLIEVHPSLAHHKKVVLVNLKDCKSLKSLSGKLEMSSLKKLILSGSSKFKFLPEFGEKMENLSMLALEGTDIRKLPLSLGRLVGLTNLNLKDCKSLVCLPDTIHGLNSLITLDISGCSKLCRLPDGLKEIKCLEELHANDTAIDELPSSIFYLDSLKVLSFAGCQGPSTTSMNWFLPFNLMFGSQPASNGFRLPSSVMGLPSLEYLNLSYCNLSEESFPNYFHHLSSLKSLDLTGNNFVIIPSSISKLSRLRFLCLNWCQKLQLLPELPLTMTQLNASNCDSLDTMKFNPAKLCSLFASPRKLSYVQELYKRFEDRCLPTTRFDMLIPGDEIPSWFVPQRSVSWAKVHIPNNFPQDEWVGFALCFLLVSYADPPELCKHEIDCYLFASNGKKLITTRSLPPMDPCYPHLYILYMSIDEFRDEILKDDYWSESGIEFVLKCYCCQSLQVVSCGSRLVCKQDVEDWSKMSHFNES

SEQ ID NO: 102319 - DNA, 3441 bp, Populus trichocarpa
  CDS (1)..(3441)
atgcagaaggaaaaacgccagcaatccaaagatgaagaaaacgattcatcctcgcgaaagagaagaaaagctgacctcagtaagcctgtcagttttgtctccacagctgccatgacagagccagagtcttctcgatctagaccagaaggggcctatgatgtcttcttgagttttagaggagaagacactcgcaagacatttacagatcatctatatactgccttagtccaagcaggaatccacacttttcgagatgatgatgaacttccaagaggagaagaaatctcggatcatctcctcagggcaattcaagaatcaaagatgtccatagttgtcttctcaaaaggatatgcttcttctagatggtgtctcaaagaactagtagagattcttaagtgcaaaaatggaaaaaccggtcagattgctcttcctatattctatgacattgatccttcagatgtgagaaaacagactggcagttttgcagaagcatttgttaaacatgaagagcgttttgaagagaagtacttggtgaaggagtggagaaaagctcttgaggaggctggaaatctatctggatggaatctcaatgatatggcaaatgggcatgaagcaaaatttatcaaagagattatcaaggatgtgttgaataaattagatcccaagtacttgtatgttcccgagcacctagtaggtatggatcggcttgctcacaatatttttgactttctaagtactgcaacagatgatgtacgcattgtgggcgtacatgggatgccaggaataggaaagacaactatagcacaagttgtatttaatcaactctgccatggattcgagggaagctgttttctttcggatatcaatgaaaggtcaaaacaagttaatggtcttgttcctttccaaaagcaacttcttcacgatattttaaaacaagatgttgcaaacttcgattgtgttgatagaggaaaggttctgatcaaagaacgacttcgtcgcaaaagagttcttgttgttgctgatgatatggctcatccggaccagctaaatgcattgatgggagatcgaagctggtttggtcccagaagtagactaattattacaacaagatattcaagtttacttcgtgaagcagatcaaacatatcagatcaaagaattggaaccagatgaggcccttcagcttttcagctggcatgcctttaaggacaccaagccagcagaagattatattgagctttcaaagaaagcagttgattactgtggaggacttcctttagctcttgaggttataggagctcttctgtacgggaaagaaaaacatagatgggaaagtgaaattgacaacttgagcagaattccagaaagcaatattcaaggaaagcttctaataagttttgacgcactggatggtgaactacgaaatgcattccttgatattgcatgcttctttattgatgtggagaaagaatacgtagcaaaactgctaggagcccgttgccgttacaatccagaagttgttttggaaactctccgtgaaaggtctttggttaaagtatttggagacatggtaaccatgcatgatctattacgagacatgggaagggaggtcgtttgtaaagcgtctccaaaagaacctggaaagaggacaagaatttggaatcagaaggatgcatggaatgtacttgagcagcagaagggtacggatgttgtagagggtcttgcactggatgtcagagcatcagaagctaaatcacttagcacaggatcatttgcaaaaatgaaacgcttaaatttactccaaatcaacggagcacatctcaccggatccttcaaactgctttctaaagagttgatgtggatttgttggcttcaatgtccttcgaaatattttccatctgattttaccttggacaatctagttgttcttgatatgcagtacagtaacctcaaagaattatggaagggaaaaaagattctcaataggctaaaaatcattaatctcagtcattctcagcatcttattaaaacaccaaacttgcacagttcaagtctagagaaactaattctgaaaggttgctctagtttagttgatgtccatcaatctattggaaacttgacgagccttgttttcttgaatctggagggatgttggagtctgaagattctccctaaaagcattggcaatgtaaagtctcttgaaactctgaatatttctgggtgttcacaacttgagaaattgccggaacacatgggtgatatggaatccttaactaagctgctagccgatgggattgaaaatgagcaatttctctcttcaattggacaattaaagtatgtcagaaggttatcattgcgtggatacaattcggctccatcaagttctttgatttcagcaggtgttttgaattggaaacgttggctaccaacatctttcgaatggagatcagtgaaaagtcttaagctttctaatggtagtttgtctgaccgcgcaactaactgtgttgattttaggggtttgttcgctctagaagaattggatctatcaggaaacaaattctctagcctgccttctgggatcggcttccttcccaagctagggttcttgtctgttcgggcatgcaaatatcttgtatcaatcccagatcttccctcaagtttacgctgtttgggtgcatcctcttgcaaatcattggaaagagtaagaataccaatcgagtcaaaaaaggaattatatatctttcatatatatctagatgaaagtcattcgttagaagagattcagggtatcgaaggtctaagtaatattttctggtatattggtgttgatagccgcgagcattcacgaaataaattacagaagagcgttgttgaggcaatgtgcaacggtggtcaccggtattgtattagctgccttcctggtgagatgccaaattggttgagctacagtgaagaaggatgctcattgtcattccatatacctccagtcttccgaggcttagttgtttggtttgtctgtccacttgagaaggaagattattattgcttcaacactgacattattattattattataagaaataaaagcaacggtattcaattgtttgaagataaacgaacaccagcaccttggggatggataagatacataagtagaagtgaaatggcaatggaagattactgtggagatgacgaattggaactattctctgcttattcaaatggcagattcgaacacattaaggaatgtggggtccatgtgatcgcagagaagtcagaagttggaagagatacagtgatgtcatatcatttgcttcctcatccccattgtggttcaattacagcgtctacacctaagcaatggagtgactacttattttcgaagctgcataaatataacctcaatttactacttgctggtaagaacaaatatttcatttag

SEQ ID NO: 102320 - protein, 1146 aa, Populus trichocarpa
MQKEKRQQSKDEENDSSSRKRRKADLSKPVSFVSTAAMTEPESSRSRPEGAYDVFLSFRGEDTRKTFTDHLYTALVQAGIHTFRDDDELPRGEEISDHLLRAIQESKMSIVVFSKGYASSRWCLKELVEILKCKNGKTGQIALPIFYDIDPSDVRKQTGSFAEAFVKHEERFEEKYLVKEWRKALEEAGNLSGWNLNDMANGHEAKFIKEIIKDVLNKLDPKYLYVPEHLVGMDRLAHNIFDFLSTATDDVRIVGVHGMPGIGKTTIAQVVFNQLCHGFEGSCFLSDINERSKQVNGLVPFQKQLLHDILKQDVANFDCVDRGKVLIKERLRRKRVLVVADDMAHPDQLNALMGDRSWFGPRSRLIITTRYSSLLREADQTYQIKELEPDEALQLFSWHAFKDTKPAEDYIELSKKAVDYCGGLPLALEVIGALLYGKEKHRWESEIDNLSRIPESNIQGKLLISFDALDGELRNAFLDIACFFIDVEKEYVAKLLGARCRYNPEVVLETLRERSLVKVFGDMVTMHDLLRDMGREVVCKASPKEPGKRTRIWNQKDAWNVLEQQKGTDVVEGLALDVRASEAKSLSTGSFAKMKRLNLLQINGAHLTGSFKLLSKELMWICWLQCPSKYFPSDFTLDNLVVLDMQYSNLKELWKGKKILNRLKIINLSHSQHLIKTPNLHSSSLEKLILKGCSSLVDVHQSIGNLTSLVFLNLEGCWSLKILPKSIGNVKSLETLNISGCSQLEKLPEHMGDMESLTKLLADGIENEQFLSSIGQLKYVRRLSLRGYNSAPSSSLISAGVLNWKRWLPTSFEWRSVKSLKLSNGSLSDRATNCVDFRGLFALEELDLSGNKFSSLPSGIGFLPKLGFLSVRACKYLVSIPDLPSSLRCLGASSCKSLERVRIPIESKKELYIFHIYLDESHSLEEIQGIEGLSNIFWYIGVDSREHSRNKLQKSVVEAMCNGGHRYCISCLPGEMPNWLSYSEEGCSLSFHIPPVFRGLVVWFVCPLEKEDYYCFNTDIIIIIIRNKSNGIQLFEDKRTPAPWGWIRYISRSEMAMEDYCGDDELELFSAYSNGRFEHIKECGVHVIAEKSEVGRDTVMSYHLLPHPHCGSITASTPKQWSDYLFSKLHKYNLNLLLAGKNKYFI

SEQ ID NO: 102321 - DNA, 3444 bp, Populus trichocarpa
  CDS (1)..(3444)
atgacagagccagagtcttctcgaagtagacctgaagggacctatgatgtcttcttgagctttagaggaaaagatactcgcaagacatttacagatcatctatatactgccctagtccaagcaggaatccacacttttcgagatgatgatgaacttcctagaggagaagaaatccacgatcatctcctcagggcaattcaagaatcaaagatatccatagttgtcttctcaaaaggatatgcttcttctagatggtgtctcaatgaacttgtagagattcttaagtgcaaaaataggaaaacgggtcagattgttcaacctatattctataacattgatccttcagatgtgagaaaacagaatggcagttttgcaaaagcatttgttaaacatgaagagcgttttgaagagaagttggtgaaggagtggagaaaagctcttgaggaggccggaaatctatctggatggaatctcaatgatatggcaaatgggcatgaagcaaaatttatcaaagagattatcaaggatgtgttgaataaattagatcccaagtacttgtatgttcctgagcacctagtaggtatcgatcggcttgctcacaatattattgactttctaagtactgcaacagatgatgtcctcattgtgggcatacatgggatgccaggaataggaaagacgactatagcaagagttgtatttaatcaactctgctatggattcgaagaaagctgttttctttcgaatatcaatgaaacatcaaaacaatttaatggtcttgttcctttacaaaagcaacttcttcacgatattttcaaacaggatgctgcaaacatcaattgtgtcgatagaggaaaggttctgatcaaagaacgactttgtcgccaaagagttcttgttgttgctgatgatgtggctcgtcaggaccagctaaatgctttgatgggagagcgaagttggtttggtcccggaagtagagtcattattacaacaagagattcaagtgttctacttaaagcagatcaaacatatcagatcgaagaattgaaaccagatgagtcccttcagcttttcagctggcatgccttgagggacaccgagccagcagaagattatattgagctttcgaaggatgtagttgattactgtggaggacttcctttggctcttgaggttatgggtgcttgtttgtctgggaaaaacagagatggttggaaatctgtaattgacaaattgagaagaattccaaaccacgatattcaaggaaagcttaaaataagttatgactcactggacggtgaagaactacaaaatgcattccttgatatcgcatgcttctttattgatagaaagaaagagtacgtcgcaaaagtgctaggagcccgttgcggttacaatccagaagttgatttggaaactctccgtggaaggtctctgattaaagttaatgccattggaaagataaccatgcatgatctattacgagacatgggaagggaggtcgttcgtgaaacgtctccaaaagaacctggaaagaggaccagaatttggaatcaagaggatgcatggaatgtacttgagcagcagaagggtacggatgttgtagagggtcttgcactggatgtcaaagcatcagaagctaaatcactgagcacaggatcatttgcaaaaatgaaacgcttaaatttactccaaatcaatggagtgcatctcaccggatccttcaaactactttctagagagttgatgttgatatgttggcttcaatgtcctttgaaatattttccatctgattttacctttgacaatctagatgttcttgatatgcagtacagtaatctcaaaaaactatggaagggaaaaaagattctcaacaggctaaaaatcattaatctcagtcattctcagaaccttattaaaacaccaaacttgcacagttcaagtctaaagaaactaaagctgaaaggttgctcgagtttagttgaggtgcatcaatctattggaaatttgacgagcctcattttcttgaatctggagggatgttggaggctaaagattctccctgaaagcattgtcaatgtaaagtctcttaaacgcttaaatatttctgggtgttcacaacttgagaaattgccagaacgcatgggtgatatggaatccttaattgagctgctagccgatgggattgaaaataagcaatttctctcttcaattggacaattaaaatatgtcagaaggctatcattgcgtggatacaatttcagccaggactcaccatcatggctttcaccgtcatctacatcttggcctccatcaatttcttcttttatttcagcaagtgttttatgtttgaaacgtttgctgccaacaactttcatcgattggagatcagtgaaaagtcttgaactttcttatgttggtttgtctgatcgagtaactaactgtgttgattttagaggtttttcctctctagaagaactagatctatcaggaaacaaattctctagcctgccttctgggatcggcttccttgccaagctagagatgatggatgttcaggaatgcaaatatcttgtatcaatccgagatcttccctcaaatttagtctatttgtttgcaggtggttgcaaatcattggaaagagtaagaataccaatcgagtcaaaaaaagaactatatataaatctacatgaaagtcattcgttagaagagattcagggcatcgaaggtcaaagtaatattttttggaatattcttgttgatgactgcattccttcaccaaataaattacagaagagcgttgttgaggcattctgcaacggttgttaccggtattttatttactgccttcctggtaagatgccaaattggatgagctacagtggagaaggatgcccattgtcattccatatacctccagtcttccaaggcttagttgtttggtttgtctgttcacttgagaaggttcatcgtcactccatatacttagacatagacattattattattataagaaataaaagcaacggtattcaattgtttgaagatgaacgaacaaaatacacatatccagcaccaaaaactgggggatggataagatacataagtggaagtgaaatggcaatggaagattactgtgcagatgacgaattggaactatacatatattcaaagccaatacggattgctgtgcgcaacagttatccattctacctcctgcacattaaagaatgtggggttcatgtgatcgcaggaaagtcaaattcatttgaagagtcggaagtagaaagagatacagtgatgccatatcatctgcttcctcaccctccttgtggttcaattacagcgtctacaccaaagcaatggagtgattatttatttccgaagctgcaaaatcataacctcaatttaacgcttgatggtaagaacaaatatttcatttag

SEQ ID NO: 102322 - protein, 1147 aa, Populus trichocarpa
MTEPESSRSRPEGTYDVFLSFRGKDTRKTFTDHLYTALVQAGIHTFRDDDELPRGEEIHDHLLRAIQESKISIVVFSKGYASSRWCLNELVEILKCKNRKTGQIVQPIFYNIDPSDVRKQNGSFAKAFVKHEERFEEKLVKEWRKALEEAGNLSGWNLNDMANGHEAKFIKEIIKDVLNKLDPKYLYVPEHLVGIDRLAHNIIDFLSTATDDVLIVGIHGMPGIGKTTIARVVFNQLCYGFEESCFLSNINETSKQFNGLVPLQKQLLHDIFKQDAANINCVDRGKVLIKERLCRQRVLVVADDVARQDQLNALMGERSWFGPGSRVIITTRDSSVLLKADQTYQIEELKPDESLQLFSWHALRDTEPAEDYIELSKDVVDYCGGLPLALEVMGACLSGKNRDGWKSVIDKLRRIPNHDIQGKLKISYDSLDGEELQNAFLDIACFFIDRKKEYVAKVLGARCGYNPEVDLETLRGRSLIKVNAIGKITMHDLLRDMGREVVRETSPKEPGKRTRIWNQEDAWNVLEQQKGTDVVEGLALDVKASEAKSLSTGSFAKMKRLNLLQINGVHLTGSFKLLSRELMLICWLQCPLKYFPSDFTFDNLDVLDMQYSNLKKLWKGKKILNRLKIINLSHSQNLIKTPNLHSSSLKKLKLKGCSSLVEVHQSIGNLTSLIFLNLEGCWRLKILPESIVNVKSLKRLNISGCSQLEKLPERMGDMESLIELLADGIENKQFLSSIGQLKYVRRLSLRGYNFSQDSPSWLSPSSTSWPPSISSFISASVLCLKRLLPTTFIDWRSVKSLELSYVGLSDRVTNCVDFRGFSSLEELDLSGNKFSSLPSGIGFLAKLEMMDVQECKYLVSIRDLPSNLVYLFAGGCKSLERVRIPIESKKELYINLHESHSLEEIQGIEGQSNIFWNILVDDCIPSPNKLQKSVVEAFCNGCYRYFIYCLPGKMPNWMSYSGEGCPLSFHIPPVFQGLVVWFVCSLEKVHRHSIYLDIDIIIIIRNKSNGIQLFEDERTKYTYPAPKTGGWIRYISGSEMAMEDYCADDELELYIYSKPIRIAVRNSYPFYLLHIKECGVHVIAGKSNSFEESEVERDTVMPYHLLPHPPCGSITASTPKQWSDYLFPKLQNHNLNLTLDGKNKYFI

SEQ ID NO: 102323 - DNA, 3441 bp, Solanum lycopersicum
  CDS (1)..(3441)
atggcatcttcttcttcttcttctgcaagtaattcaaagtattatcctcgatggaagtacgttgtttttctaagtttcagaggtgaagacactcgaaaaacatttacaggtcacttatacgaaggtttgagaaatagaggaataaacacatttcaagatgataaaagactagagcatggagattcaattccaaaagaactcttgagagctatagaagattctcaagttgcacttatcattttctcaaagaattatgctacatctaggtggtgcttgaatgaactagtgaagatcatggaatgcaaagaggaagaaaatggacaaacagtcataccgatcttttataatgtggatccatcacatgttcgataccaaactgaaagctttggagcagcatttgccaaacacgaatcaaagtataaggatgatgttgaggggatgcagaaggtgcaaagatggagaactgccctaactgctgccgcaaatctaaaaggatatgatatccgtaacgggattgaatcagagaatattcagcagatcgtagattgcatctcttccaaattttgtacgaatgcttattctttatcttttttgcaagatattgtgggaataaatgctcacttagagaaactaaaatcgaaacttcaaatagaaatcaatgatgttcggattttagggatctggggaataggcggagtcggtaaaacaagaatagcaaaagccatttttgatactctatcttatcaatttgaagcttcttgttttcttgctgatgttaaagaatttgcaaaaaagaataaactgcattctttacaaaatattcttctctctgaactgttaaggaaaaaaaatgattacgtctacaacaagtatgatggaaagtgtatgattccaaacagactttgttctttgaaggttctaattgtgcttgatgatatagatcatggtgatcagatggagtatttagcaggtgatatttgttggtttggtaatggcagcagagttattgtaacaactagaaacaaacatttgatagagaaagatgatgcgatatacgaagtgtctacactgcctgatcatgaagctatgcaattattcaatatgcatgcttttaaaaaagaagttccaaatgaggattttaaggagttggcgttagagatagtaaatcacgctaaaggcctccctttagccctcaaggtgtggggctgtttattgcataaaaaaaatctctctttatggaaaataacagtagagcaaataaagaaagactctaattcagaaattgttgaacaactcaaaataagttatgatgggttggagtccgaagagcaggaaatatttttagatatagcatgtttcttccgcggagagaaaagaaaagaggtcatgcaaattcttaagagttgtgactttggagctgaatacggattggatgttctgattaataaatctcttgtgttcatatctgaaaatgacaggattgaaatgcatgatttgattagagatatgggtagatatgtggtgaaaatgcaaaagcttcagaaaaaacgtagcagaatatgggatgttgaagatttcaaagaagtgatgatagactatacggggaccatgacagtggaagcaatctggtttagttgctttgaagaagtacgttttaataaggaggcaatgaaaaaaatgaaaaggcttaggatattacacatatttgatggttttgtcaaattcttctcttcgcctccctcttccaattccaatgattcagaagaagaagatgattcctacgacttagtcgtagatcaccatgatgactctattgagtacctgtccaataacttgcgttggttagtctggaatcactattcttggaagtcattgccagaaaattttaaaccagaaaagcttgttcatcttgaactccgttggagttcgcttcattatttatggaagaaaacagagcatttgccgtctctacgaaagctagatctcagcttatctaaaagtctggtgcaaacaccagatttcacggggatgccaaatttggagtatttgaatctggagtactgtagtaagcttgaagaggttcactattccctagcatattgcgaaaaactcattgagttaaatttgagttggtgtacaaagcttaggagatttccatatattaacatggaatctcttgaatctctggatctacaatattgctatggtataatggtgtttccagaaatcatcggaacgatgaagccggagttaatgattctctcagcaaacactatgataactgaactaccatcatctcttcagtacccaactcatctcacagagctagatttgagtggcatggaaaaccttgaagctcttccaagcagcattgtcaagttgaaagatttggtgaagctaaatgtgtcgtactgcttaacgcttaaaagcttgcctgaagagattggtgatttagaaaacttggaggaacttgatgcttcgcgtactctaatttcacagcctccatcttccattgtccgcttgaacaagcttaaatccttgaagttaatgaaacgaaacacattaacagatgatgtgtgctttgtgtttcctcctgtgaataacgggttactctcattggaaattctggagctcggttcctccaatttcgaagatggaagaattccggaagatattggatgtttatcctctttgaaagagttacgtctcgagggagataatttcaatcatttgcctcaaagcatagcccaacttggtgcacttcgattcttatacataaaagattgcaggagtcttacaagtctgccagaatttccaccgcaattagatacaatatttgcagattggagcaatgatttgatctgtaagtcactgtttctaaatatctcatcattccaacataacatctctgcttcagattcgttgtcgttaagagtgtttacgagtttggggagtagtatcccaatctggttccaccatcagggaacagatacaagtgtttcagtcaatttgcctgaaaactggtatgtatcagataacttcttgggattcgctgtatgttactatggcaatttaactgagaacacagctgaattgattatgagttctgcagggatgccatgtatcacctggaaacttttgttatcgaatcattcagaatgtacatatattaggattcattttttcttggtaccttttgctggcttatgggatacatctaacgccaatggtaaaacaccaaatgactataagcacattatgttatcttttcctcaagaattgaaggagtgtggagttcgtttgttctatgaagatgaatctgtgcttgagaccaccaatgatgaacttaccattggggtaaggaggatcagatacgacgacgacgatagtgaacattatgaggaggctggttgttcctcttctaagaaacaaagatcataa

SEQ ID NO: 102324 - protein, 1146 aa, Solanum lycopersicum
MASSSSSSASNSKYYPRWKYVVFLSFRGEDTRKTFTGHLYEGLRNRGINTFQDDKRLEHGDSIPKELLRAIEDSQVALIIFSKNYATSRWCLNELVKIMECKEEENGQTVIPIFYNVDPSHVRYQTESFGAAFAKHESKYKDDVEGMQKVQRWRTALTAAANLKGYDIRNGIESENIQQIVDCISSKFCTNAYSLSFLQDIVGINAHLEKLKSKLQIEINDVRILGIWGIGGVGKTRIAKAIFDTLSYQFEASCFLADVKEFAKKNKLHSLQNILLSELLRKKNDYVYNKYDGKCMIPNRLCSLKVLIVLDDIDHGDQMEYLAGDICWFGNGSRVIVTTRNKHLIEKDDAIYEVSTLPDHEAMQLFNMHAFKKEVPNEDFKELALEIVNHAKGLPLALKVWGCLLHKKNLSLWKITVEQIKKDSNSEIVEQLKISYDGLESEEQEIFLDIACFFRGEKRKEVMQILKSCDFGAEYGLDVLINKSLVFISENDRIEMHDLIRDMGRYVVKMQKLQKKRSRIWDVEDFKEVMIDYTGTMTVEAIWFSCFEEVRFNKEAMKKMKRLRILHIFDGFVKFFSSPPSSNSNDSEEEDDSYDLVVDHHDDSIEYLSNNLRWLVWNHYSWKSLPENFKPEKLVHLELRWSSLHYLWKKTEHLPSLRKLDLSLSKSLVQTPDFTGMPNLEYLNLEYCSKLEEVHYSLAYCEKLIELNLSWCTKLRRFPYINMESLESLDLQYCYGIMVFPEIIGTMKPELMILSANTMITELPSSLQYPTHLTELDLSGMENLEALPSSIVKLKDLVKLNVSYCLTLKSLPEEIGDLENLEELDASRTLISQPPSSIVRLNKLKSLKLMKRNTLTDDVCFVFPPVNNGLLSLEILELGSSNFEDGRIPEDIGCLSSLKELRLEGDNFNHLPQSIAQLGALRFLYIKDCRSLTSLPEFPPQLDTIFADWSNDLICKSLFLNISSFQHNISASDSLSLRVFTSLGSSIPIWFHHQGTDTSVSVNLPENWYVSDNFLGFAVCYYGNLTENTAELIMSSAGMPCITWKLLLSNHSECTYIRIHFFLVPFAGLWDTSNANGKTPNDYKHIMLSFPQELKECGVRLFYEDESVLETTNDELTIGVRRIRYDDDDSEHYEEAGCSSSKKQRS

SEQ ID NO: 102325 - DNA, 3411 bp, Solanum tuberosum
  CDS (1)..(3411)
atgaatcaggaaagttcattgcttccatccccagaaattattcgatggagttacgatgttttcttaagttttagaggtgaagatgtacgcaaaacatttgttgaccatctgtaccttgctctgcaacaaaagtgcattaatacctttaaagatgacgagaaactagagaaaggaaagttcatttcaccggaactcgtgagttcaattgaagagtcaaggatagctttgatcatattctctaaaaactatgctaattcaacatggtgtttagatgaattgacgaagatcatggagtgcaagaatgtgaaaggacaaattgttgttccggtgttctatgatgtagatccatcaacagtgaggaaacaaaaatccatatttggagaagcatttagcaaacatgaagcccggttccaggaggacaaggtgcaaaaatggagggcagcactggaggaagcagctaatatttctggctgggatttgccaaatacttccaatggacatgaagctagagtcatggagaaaattgcagaagatataatggctagattgggtagtcagagacacgcaagcaatgctagaaatcttgttggaatggagtcacacatgcaccaagtatataaaatgcttggaatcgggtctggtggggttcactttcttggaatattgggaatgagtggagtggggaagacaactctagcgagagttatttatgataacattcggagtcaatttcaaggtgcatgttttcttcacgaagtcagagaccgttcagcaaaacagggactagagcgcttgcaagagatacttctttctgagatccttgttgtaaaaaaactaaggatcaacgattcatttgaaggagctaatatgcaaaaacaaagactacagtacaaaaaggttcttcttgttctggatgatgttgatcacatagatcagttaaatgcattggccggggagcgtgaatggtttggtgacggaagtagaatcatcataacaaccaaagataaacacttgcttgttaagtatgagactgaaaagatatacagaatgaaaactttaaacaattatgaaagtttacaactttttaaacaacatgctttcaagaaaaaccgccctaccaaagaattcgaggatctatcagctcaagtgataaagcataccgatggactccccctagctctgaaagtcctgggaagtttcttgtatggaagaggtttggatgaatggataagtgaagtggagcgtttgaaacaaatcccagaaaatgaaattttgaagaaactcgaacaaagtttcactggtctccacaatactgagcaaaagatattcttagacattgcatgtttcttttcagggaagaagaaagattcagtgaccagaatacttgagagttttcatttttgccctgtcattgggataaaagttctcatggagaaatgtttgatcactacattacaaggtcgcattacaatacaccaattgatacaagatatgggctggcacattgttcgtcgagaagctactgacgatccaagaatgtgtagtaggttgtggaagcgcgaagatatttgtcctgtacttgaaagaaatttgggcactgacaagatcgaaggcatgtcgctgcacctgactaatgaagaagaagttaattttggtggcaaggccttcatgcagatgaccagactaaggtttctcaaattccagaatgcatatgtttgccagggacctgaatttcttccagatgagttgaggtggcttgattggcatggatatccttcaaaaagtctgccaaatagctttaagggagaccaacttgttagtttgaaattgaaaaaaagccgcatcatacaactttggaaaacctcaaaggatctaggaaaactgaagtacatgaaccttagccattcgcagaagctaataaggatgccagatttttcagttacgcctaatcttgaaagactggttcttgaagaatgcactagtttggtagaaatcaatttttctattgaaaatcttggaaagctagtcttgctgaatctgaagaactgcagaaatttaaagaccctaccgaagagaattcgattggaaaagcttgaaattctcgttcttacaggctgctcaaagttaagaacattcccagaaatagaagagaaaatgaattgtttagcagaactgtatttggatgcaacttctttgagtgaactacctgcatcagttgagaacctttcaggagttggtgtaataaatctaagttactgcaagcatcttgagagtctacctagcagtatttttaggttgaaatgtttgaaaacacttgatgtgtccggatgctcaaaacttaaaaatttaccagatgatttgggacttttggttggtttagagcagctccactgcactcacacagccatccaaacaattccgtcttctatgtctcttcttaaaaaccttaagcgcttatctctcagtggatgtaatgctttgagttcacaggtaagtagctcaagtcatggccagaagtctatgggtgtaaattttcagaatttgtcgggtctttgttcattgatcatgttggatcttagtgactgcaacatttcagatggaggcattttaagtaatcttgggttcttaccgtctttggagagactgattctcgatggtaacaatttttccaatattccggctgcaagcataagtcgtctcactcgacttaaaacccttaaattgcttggttgtgggaggctagagagtttaccggaacttcctccgagtataaaagggatatatgctaatgaatgcacatctttgatgagtattgatcaactaaccaaatatccaatgttgagtgatgcttcattcagaaactgtcgtcaactagtaaaaaataaacagcacacctccatggttgattcattgttgaagcagatgctcgaggcactatatatgaatgtcagatttggtttttacgtccctggtatggagattcccgagtggtttacatacaagagctgggggactcaatcaatgtcagtggccctccccacaaattggctcacacccacattcagggggtttactgtttgtgttgttttcgacaagtggatgcctttggttttaggtcccttcggtagtcataaagtccatggcctaaaaaatatgatatggttaaatctcaaaagatatgacggtttgcggcaaaaaattagcacatctttcggcccaataggaagtgaaaatcctggtggtttaggtaatactttaataacccatgtaccatttggaagtcgttggcagttggaggatgatctcgattactcttgtaataacgcctttcagcttgaatttagtgcctgtgatcattatcaaaaggatatggtcaaaggtttgggagtgcgtcttgtgtatgagaattga

SEQ ID NO: 102326 - protein, 1136 aa, Solanum tuberosum
MNQESSLLPSPEIIRWSYDVFLSFRGEDVRKTFVDHLYLALQQKCINTFKDDEKLEKGKFISPELVSSIEESRIALIIFSKNYANSTWCLDELTKIMECKNVKGQIVVPVFYDVDPSTVRKQKSIFGEAFSKHEARFQEDKVQKWRAALEEAANISGWDLPNTSNGHEARVMEKIAEDIMARLGSQRHASNARNLVGMESHMHQVYKMLGIGSGGVHFLGILGMSGVGKTTLARVIYDNIRSQFQGACFLHEVRDRSAKQGLERLQEILLSEILVVKKLRINDSFEGANMQKQRLQYKKVLLVLDDVDHIDQLNALAGEREWFGDGSRIIITTKDKHLLVKYETEKIYRMKTLNNYESLQLFKQHAFKKNRPTKEFEDLSAQVIKHTDGLPLALKVLGSFLYGRGLDEWISEVERLKQIPENEILKKLEQSFTGLHNTEQKIFLDIACFFSGKKKDSVTRILESFHFCPVIGIKVLMEKCLITTLQGRITIHQLIQDMGWHIVRREATDDPRMCSRLWKREDICPVLERNLGTDKIEGMSLHLTNEEEVNFGGKAFMQMTRLRFLKFQNAYVCQGPEFLPDELRWLDWHGYPSKSLPNSFKGDQLVSLKLKKSRIIQLWKTSKDLGKLKYMNLSHSQKLIRMPDFSVTPNLERLVLEECTSLVEINFSIENLGKLVLLNLKNCRNLKTLPKRIRLEKLEILVLTGCSKLRTFPEIEEKMNCLAELYLDATSLSELPASVENLSGVGVINLSYCKHLESLPSSIFRLKCLKTLDVSGCSKLKNLPDDLGLLVGLEQLHCTHTAIQTIPSSMSLLKNLKRLSLSGCNALSSQVSSSSHGQKSMGVNFQNLSGLCSLIMLDLSDCNISDGGILSNLGFLPSLERLILDGNNFSNIPAASISRLTRLKTLKLLGCGRLESLPELPPSIKGIYANECTSLMSIDQLTKYPMLSDASFRNCRQLVKNKQHTSMVDSLLKQMLEALYMNVRFGFYVPGMEIPEWFTYKSWGTQSMSVALPTNWLTPTFRGFTVCVVFDKWMPLVLGPFGSHKVHGLKNMIWLNLKRYDGLRQKISTSFGPIGSENPGGLGNTLITHVPFGSRWQLEDDLDYSCNNAFQLEFSACDHYQKDMVKGLGVRLVYEN

SEQ ID NO: 102327 - DNA, 3411 bp, Solanum tuberosum
  CDS (1)..(3411)
atgaatcaggaaagttcattgcttccatccccagaaattattcgatggagttacgatgttttcttaagttttagaggtgaagatgtacgcaaaacatttgttgaccatctgtaccttgctctgcaacaaaagtgcattaatacctttaaagatgacgagaaactagagaaaggaaagttcatttcaccggaactcatgagttcaattgaagagtcaaggatagctttgatcattttctctaaaaactatgctaattcaacatggtgtttagatgaattgacgaagatcatggagtgcaagaatgtgaaaggacaaattgttgttccggtgttctatgatgtagatccatcaacagtgaggaaacaaaaatccatatttggagaagcatttagcaaacatgaagcccggttccaggaggacaaggtgcaaaaatggagggcagcactggaggaagcagctaatatttctggctgggatttgccaaatacttccaatggacatgaagctagagtcatggagaaaattgcagaagatataatggctagattgggtagtcagagacatgcaagcaatgctagaaatcttgttggaatggagtcacacatgctcaaggtatataaaatgcttggaatcgggtctggtggagttcacttccttggaatattgggaatgagcggagtggggaagacaactctagcgagagttatttatgataacattcggagtcaatttcaaggtgcatgttttcttcacgaagtcagagaccgttcagcaaaacagggactagagcgcttgcaagagatacttctttctgagatccttgttgtaaaaaaactaaggatcaacaattcatttgaaggagctaatatgcaaaaacaaagactacagtacaaaaaggttcttcttgttctggatgatgttgatcacatagatcagttaaatgcattagccggggagcgtgaatggtttggtgacggaagtagaatcatcataacaaccaaagataaacacttgcttgttaagtatgagactgaaaagatatatagaatgaaaactttaaacaattatgaaagtttacaactttttaaacaacatgctttcaagaaaaaccgccctaccaaagaatttgaggatctatcagctcaagtgataaagcataccgatggactccccctagctctgaaagtcctgggaagtttcttgtatggaagaggtttggatgaatggataagtgaagtggagcgtttgaaacaaatcccagaaaatgaaattttgaagaaactcgaacaaagtttcactggtctccacaatactgagcaaaagatattcttagacattgcatgtttcttttcagggaagaagaaagattcagtgaccagaatacttgagagttttcatttttgccctgtcattgggataaaagttctcatggagaaatgtttgatcactatattacaaggtcgcattacaatacaccaattgatccaagatatgggctggcacattgttcgtcgagaagctactgacgatccaagaatgtgtagtaggttgtggaagcgcgaagatatttgtcctgtacttgaaagaaatttgggcactgacaagaacgaaggcatgtcgctgcacctgactaatgaagaagaagttaattttggtggcaaggccttcatgcagatgaccagactaaggtttctcaaattccggaatgcatatgtttgccagggacctgaatttcttccagatgagttgaggtggcttgattggcatggatatccttcaaaaagtctgccaaatagctttaagggagaccaacttgttggtttgaaattgaaaaaaagccgcatcatacaactttggaaaacctcaaaggatctaggaaaactgaagtacatgaaccttagccattcacagaagctaataaggacgccagatttttcagttacgcctaaccttgaaagactggttcttgaagaatgcactagtttggtagaaatcaatttttctattgaaaatcttggaaagctagtcttgctgaatctgaagaactgcagaaatttaaagaccctaccgaagagaattcgattggaaaagcttgaaattctcgttcttacaggctgctcaaagttaagaacattcccagaaatagaagagaaaatgaattgtttagcagaactgtatttgggtgcgacttctttgagtggactacctgcatcagttgagaacctttcaggagttggtgtaataaatctaagttactgcaagcatcttgagagtctacctagcagtatttttaggttgaaatgtttgaaaacacttgatgtgtccggatgctcaaaacttaaaaatttaccagatgatttgggacttttggttggtttagagaagctccactgcactcacacagccatccatacaattccgtcttctatgtctcttcttaaaaaccttaagcgcttatctctccgtggatgtaatgctttgagttcacaagtaagtagctcaagtcatggccagaagtctatgggtgtaaattttcagaatttgtcgggtctttgttcattgatcaggttggatcttagtgactgcgacatttcagatggaggcattttaagaaatcttgggttcttatcctctttgaaggtattgcttctcgatggtaacaatttttccaatattccagctgcaagcataagtcgtctcactcgacttaaaagccttgcattgcgtggttgtgggaggcttgagagtttaccggaacttcctccgagtataacagggatatatgctcatgattgcacatctttgatgagtattgatcaactaaccaaatatccaatgttgagtgatgtttcattcagaaactgtcatcaactcgtaaaaaataaacagcacacctccatggttgattcattgttgaagcagatgctcgaggcactatatatgaatgtcagatttggtttgtacgtccctggtatggagattcccgagtggtttacatacaagagctgggggactcaatcaatgtcagtggtcctccccacaaattggttcacacccacattcagggggtttactgtttgtgttcttttcgacaaatggatgcctatgattttaggtcccttcaatcttcataaagtctatggcctaaaaaatatgatatggttaaatctcaaaagatatgacggtttgcggcaaaaaattagcacatctttcggcccaataggaagtgaaaaacctggtggtttaggtaatactttaataacccatgtagcatttggaagttcttggcagttagaggatgatctcgattactatcgtaataacgcctttcagcttgaatttagtgcctgtgatcattatcaaaaggatatggtcaaaggtttgggagtgcgtcttgtgtatgagaattga

SEQ ID NO: 102328 - protein, 1136 aa, Solanum tuberosum
MNQESSLLPSPEIIRWSYDVFLSFRGEDVRKTFVDHLYLALQQKCINTFKDDEKLEKGKFISPELMSSIEESRIALIIFSKNYANSTWCLDELTKIMECKNVKGQIVVPVFYDVDPSTVRKQKSIFGEAFSKHEARFQEDKVQKWRAALEEAANISGWDLPNTSNGHEARVMEKIAEDIMARLGSQRHASNARNLVGMESHMLKVYKMLGIGSGGVHFLGILGMSGVGKTTLARVIYDNIRSQFQGACFLHEVRDRSAKQGLERLQEILLSEILVVKKLRINNSFEGANMQKQRLQYKKVLLVLDDVDHIDQLNALAGEREWFGDGSRIIITTKDKHLLVKYETEKIYRMKTLNNYESLQLFKQHAFKKNRPTKEFEDLSAQVIKHTDGLPLALKVLGSFLYGRGLDEWISEVERLKQIPENEILKKLEQSFTGLHNTEQKIFLDIACFFSGKKKDSVTRILESFHFCPVIGIKVLMEKCLITILQGRITIHQLIQDMGWHIVRREATDDPRMCSRLWKREDICPVLERNLGTDKNEGMSLHLTNEEEVNFGGKAFMQMTRLRFLKFRNAYVCQGPEFLPDELRWLDWHGYPSKSLPNSFKGDQLVGLKLKKSRIIQLWKTSKDLGKLKYMNLSHSQKLIRTPDFSVTPNLERLVLEECTSLVEINFSIENLGKLVLLNLKNCRNLKTLPKRIRLEKLEILVLTGCSKLRTFPEIEEKMNCLAELYLGATSLSGLPASVENLSGVGVINLSYCKHLESLPSSIFRLKCLKTLDVSGCSKLKNLPDDLGLLVGLEKLHCTHTAIHTIPSSMSLLKNLKRLSLRGCNALSSQVSSSSHGQKSMGVNFQNLSGLCSLIRLDLSDCDISDGGILRNLGFLSSLKVLLLDGNNFSNIPAASISRLTRLKSLALRGCGRLESLPELPPSITGIYAHDCTSLMSIDQLTKYPMLSDVSFRNCHQLVKNKQHTSMVDSLLKQMLEALYMNVRFGLYVPGMEIPEWFTYKSWGTQSMSVVLPTNWFTPTFRGFTVCVLFDKWMPMILGPFNLHKVYGLKNMIWLNLKRYDGLRQKISTSFGPIGSEKPGGLGNTLITHVAFGSSWQLEDDLDYYRNNAFQLEFSACDHYQKDMVKGLGVRLVYEN

SEQ ID NO: 102329 - DNA, 3366 bp, Solanum tuberosum
  CDS (1)..(3366)
atgaatcaggaaagttcattgcttccatccccagaaattattcgatggagttacgatgttttcttaagttttagaggtgaaaatgtacgcaaaacatttgttgaccatctgtaccttgctctggaacaaaagtgcattaatacctttaaagatgacgagaaactagagaaaggaaagttcatttcaccggaactcatgagttcaattgaagagtcaaggatagctttgatcatattctctaaaaactatgctaattcaacatggtgtttagatgaattgacaaagatcatagagtgcaagaatgtgaaaggacaaattgttgttccggtgttctatgatgtagatccatcaacagtgaggagacaaaaaaacatatttggagaagcatttagcaaacatgaagcccggttcgaggaggacaaggtgaaaaaatggagggcagcactggaggaagcagctaatatttctggctgggatttgccaaatacttccaatggacatgaagctagagtcatagagaaaattacagaagatataatggttagattgggtagtcagagacatgcaagcaatgctagaaatgttgttggaatggagtcacacatgcaccaagtatataaaatgcttggcatcgggtctggtggagttcgcttccttggaatattgggaatgagcggagtggggaagacaactcttgcaagagttatttatgataacattcagagtcaatttgaaggtgcatgttttcttcacgaagtcagagaccgttcagcaaaacagggactagagcacttgcaagagatacttctttctgagatccttgttgtaaaaaaactaaggatcaacgattcatttgaaggagctaatatgcaaaaacaaagactacagtacaaaaaggttcttcttgttctggatgatgttgatcacatagatcagttaaatgcattagccggggagcgggaatggtttggtgacggaagtagaatcatcataacaaccaaagacaaacacttgcttgttaagtatgagactgaaaagatatacagaatgggaactttagacaaatatgaaagcttacaactttttaaacaacatgctttcaagaaaaaccactctaccaaagaatttgaggatctatcagctcaagtgatagagcatactggtggactccccctagccctgaaagtccttggcagtttcttgtatggaagaggtttggatgaatggataagtgaagtggagcgtttgaaacaaatcccacaaaatgaaattttgaagaaactcgaaccaagtttcactggtctcaacaatattgagcaaaagatattcttagacattgcatgcttcttttcagggaagaagaaagattcagtgaccagaatacttgagagttttcattttagccctgtcattgggataaaagttctcatggagaaatgtttgatcactatattaaaaggtcgcattacaatacaccaattgatacaagaaatgggctggcacattgttcgtcgagaagcttcttacaatccaagaatatgtagtaggttgtggaagcgcgaagatatttgtcctgtactcgaacaaaatttgtgcactgacaagatcgaaggcatgtcgctgcacctgactaatgaagaagaagtcaattttggtggcaaggccctcatgcagatgaccagtctgaggtttctcaaattccggaatgcatatgtttaccagggacctgaatttcttcctgatgagttgaggtggcttgattggcatggatatccttcaaaaaatctgccaaatagctttaagggagaccaacttgttagtttgaaattgaaaaaaagccgcatcatacaactttggaaaacctcaaaggatctaggaaaactgaagtacatgaaccttagccattcacagaagctaataaggatgccagatttttcagttacacctaatcttgaaaggctggttcttgaagaatgtacaagtttggtagaaatcaatttttctattggagatcttggaaaactagtcttgctgaatctgaagaactgcagaaatttaaagaccataccaaagagaattcgattggaaaagcttgaagttctcgttctttctggctgctcaaagttaagaacattcccggaaatagaagagaaaatgaatcgtttagccgaactgtatttgggcgcgacttctttgagtgaactacctgcatcagttgagaacttttcaggagttggtgtaataaatctaagttactgcaagcatcttgagagtctacctagcagtatttttaggttgaaatgtttgaaaacacttgatgtgtccggatgctcaaaacttaaaaatttaccagatgatttgggacttttggttggtatagagaagctccactgcactcacacagccatccaaacaattccgtcttctatgtctcttcttaaaaaccttaagcacttatctctcagtggatgtaatgctttgagttcacaagtaagtagctcaagtcatggccagaagtctatgggtattaatttttttcagaatttatcgggtctttgttcattgatcaagttggatcttagtgactgcaacatttcagatggaggcattttaagtaatcttgggctcttaccctctttgaaggtattgattctcgatggcaacaatttttccaatattccggctgcaagcataagtcgtctcactcgacttaaatgccttgcattgcatggttgtacgagtcttgagattttaccgaaacttcctccgagtataaaagggatatatgctaatgaatccacatctttgatgggttttgatcaactaaccgaatttccaatgttgtctgaagtttcattagcaaaatgtcatcaactcgtaaaaaataaactgcacacctccatggctgatttattgttgaaggagatgctcgaggcactatacatgaatttcagattttgtttgtacgtccctggtatggagattcccgagtggtttacatacaagaactgggggactgaatcaatatcagtggccctccccacaaattggttcacacctacattcagggggtttactgtttgtgttgttttagacaagaggattcctttcattttaggtcccttcaatattcatatagtccatggcctaaaaattagcacatctttcggcccaataggaagtgaaaatcctggtggtttaggtaatactttaataacccatgtaccatttggaagtcattggcagttggaggatgatctcgattactcttgtaataacgcctttcagcttgaatttagtgcctgtgatcattatcaaaaggatatggtcaaaggtttgggagtgcgtcttgtgtatgagaattga

SEQ ID NO: 102330 - protein, 1121 aa, Solanum tuberosum
MNQESSLLPSPEIIRWSYDVFLSFRGENVRKTFVDHLYLALEQKCINTFKDDEKLEKGKFISPELMSSIEESRIALIIFSKNYANSTWCLDELTKIIECKNVKGQIVVPVFYDVDPSTVRRQKNIFGEAFSKHEARFEEDKVKKWRAALEEAANISGWDLPNTSNGHEARVIEKITEDIMVRLGSQRHASNARNVVGMESHMHQVYKMLGIGSGGVRFLGILGMSGVGKTTLARVIYDNIQSQFEGACFLHEVRDRSAKQGLEHLQEILLSEILVVKKLRINDSFEGANMQKQRLQYKKVLLVLDDVDHIDQLNALAGEREWFGDGSRIIITTKDKHLLVKYETEKIYRMGTLDKYESLQLFKQHAFKKNHSTKEFEDLSAQVIEHTGGLPLALKVLGSFLYGRGLDEWISEVERLKQIPQNEILKKLEPSFTGLNNIEQKIFLDIACFFSGKKKDSVTRILESFHFSPVIGIKVLMEKCLITILKGRITIHQLIQEMGWHIVRREASYNPRICSRLWKREDICPVLEQNLCTDKIEGMSLHLTNEEEVNFGGKALMQMTSLRFLKFRNAYVYQGPEFLPDELRWLDWHGYPSKNLPNSFKGDQLVSLKLKKSRIIQLWKTSKDLGKLKYMNLSHSQKLIRMPDFSVTPNLERLVLEECTSLVEINFSIGDLGKLVLLNLKNCRNLKTIPKRIRLEKLEVLVLSGCSKLRTFPEIEEKMNRLAELYLGATSLSELPASVENFSGVGVINLSYCKHLESLPSSIFRLKCLKTLDVSGCSKLKNLPDDLGLLVGIEKLHCTHTAIQTIPSSMSLLKNLKHLSLSGCNALSSQVSSSSHGQKSMGINFFQNLSGLCSLIKLDLSDCNISDGGILSNLGLLPSLKVLILDGNNFSNIPAASISRLTRLKCLALHGCTSLEILPKLPPSIKGIYANESTSLMGFDQLTEFPMLSEVSLAKCHQLVKNKLHTSMADLLLKEMLEALYMNFRFCLYVPGMEIPEWFTYKNWGTESISVALPTNWFTPTFRGFTVCVVLDKRIPFILGPFNIHIVHGLKISTSFGPIGSENPGGLGNTLITHVPFGSHWQLEDDLDYSCNNAFQLEFSACDHYQKDMVKGLGVRLVYEN

SEQ ID NO: 102331 - DNA, 3411 bp, Solanum tuberosum
  CDS (1)..(3411)
atgaatcaggaaagttcattgcttccatccccagatattattcgatggagttacgatgttttcttaagttttagaggtgaagatgtacgcaaaacatttgttgaccatctgtaccttgctctggaacaaaagtgcattaatacctttaaagatgacgagaaactagagaaaggaaagttcatttcaccggaactcgtgagttcaattgaagagtcaaggatagctttgatcattttctctaaaaactatgctaattcaacatggtgtttagatgaattgacaaagatcatggagtgcaagaatgtgaaaggacaaattgttgttccggtgttctatgatgtagatccatcaacagtgaggaaacaaaaatccatatttggagaagcatttagcaaacatgaagcccggttccaggaggacaaggtgcaaaaatggagggcagcactggaggaagcagctaatatttctggctgggatttgccaaatactgccaatggacatgaagctagagtcatggagaaaattgcagaagatataatggctagattgggtagtcagagacatgcaagcaatgctagaaatcttgttggaatggagtcacacatgcacaaggtatataaaatgcttggaatcgggtctggtggagttcacttccttggaatattgggaatgagcggagtggggaagacaactctagcgagagttatttatgataacattcggagtcaatttcaaggtgcatgttttcttcacgaagtcagagaccgttcagcaaaacagggactagagcgcttgcaagagatacttctttctgagatccttgttgtaaaaaaactaaggatcaacgattcatttgaaggagctaatatgcaaaaacaaagactacagtacaaaaaggttcttcttgttctggatgatgttgatcacatagatcagttaaatgcattagccggggagcgtgaatggtttggtgacggaagtagaatcatcataacaaccaaagataaacacttgcttgttaagtatgagactgaaaagatatacagaatgaaaactttaaacaattatgaaagtttacaactttttaaacaacatgctttcaagaaaaaccgccctaccaaagaattcgaggatctatcagctcaagtgataaagcataccgatggactccccctagctctgaaagtcctgggaagtttcttgtatggaagaggtttggatgaatggataagtgaagtggagcgtttgaaacaaatcccagaaaatgaaattttgaagaaactcgaacaaagtttcactggtctccacaatactgagcaaaagatattcttagacattgcatgtttcttttcagggaagaagaaagattcagtgaccagaatacttgagagttttcatttttgccctgtcattgggataaaagttctcatggagaaatgtttgatcactatattacaaggtcgcattacaatacaccaattgatccaagatatgggctggcacattgttcgtcgagaagctactgacgatccaagaatgtgtagtaggatgtggaagcgcgaagatatttgtcctgtacttgaaagaaatttgggcactgacaagaacgaaggcatgtcgctgcacctgactaatgaagaagaagttaattttggtggcaaggccttcatgcagatgaccagactaaggtttctcaaattccggaatgcatatgtttgccagggacctgaatttcttccagatgagttgaggtggcttgattggcatggatatccttcaaaaagtctgccaaatagttttaagggagaccaacttgttggtttgaaattgaaaaaaagccgcatcatacaactttggaaaacctcaaaggatctaggaaaactgaagtacatgaaccttagccattcacagaagctaataaggacgccagatttttcagttacgcctaaccttgaaagactggttcttgaagaatgcactagtttggtagaaatcaatttttctattgaaaatcttggaaagctagtcttgctgaatctgaagaactgcagaaatttaaagaccctaccgaagagaattcgattggaaaagcttgaaattctcgttcttacaggctgctcaaagttaagaacattcccagaaatagaagagaaaatgaattgtttagcagaactgtatttgggtgcgacttctttgagtgaactacctgcatcagttgagaacctttcaggagttggtgtaataaatctaagttactgcaagcatcttgagagtctacctagcagtatttttaggttgaaatgtttgaaaacacttgatgtgtccggatgctcaaaacttaaaaatttaccagatgatttgggacttttggttggtttagaggagctccactgcactcacacagccatccaaacaattccttcttctatgtctcttcttaaaaaccttaagcacttatctctcagtggatgtaatgctttgagttcacaagtaagcagctcaagtcatggccagaagtctatgggtgtaaattttcagaatttgtcaggtctttgttcattgatcatgttggatcttagtgactgcaacatttcagatggaggcattttaaataatcttgggttcttatcgtctttggagatactgattctcaatggtaacaatttttccaatattccggctgcaagcataagtcgtttcactcgacttaaacgccttaaattgcatggttgtgggaggcttgagagtttaccggaacttcctccgagtataaaagggatatttgctaatgaatgcacatctttgatgagtattgatcaactaaccaaatatccaatgttgagtgatgctacattcagaaactgtcgtcaactcgtaaaaaataaacagcacacctccatggttgattcattgttgaagcagatgctcgaggcactatatatgaatgtcagattttgcttgtacgtccctggtatggagattcccgagtggtttacatacaagagctgggggactcaatcaatgtcagtggccctccccacaaattggttcacacccacattcagggggtttactgtttgtgttattttagacaagaagatgcttttcattttaggtcgcttcaatactcataaagtctatggcctagaaaatatgatatggttaaatctcaaaagatatgacggtttgcggcaaaaaattagcacatctttcggcccaataggaagtgaaaaacctggtggtttaggtgatactttaataacccatatagcatttgaaagatcttggaagttggagaatgatctcgattactatcgtaataacgcctttcagcttgaatttagtgcctgtgatcattatcaaaaggatgtggtaaaaggtttgggagtgcgtcttgtgtatgagaattga

SEQ ID NO: 102332 - protein, 1136 aa, Solanum tuberosum
MNQESSLLPSPDIIRWSYDVFLSFRGEDVRKTFVDHLYLALEQKCINTFKDDEKLEKGKFISPELVSSIEESRIALIIFSKNYANSTWCLDELTKIMECKNVKGQIVVPVFYDVDPSTVRKQKSIFGEAFSKHEARFQEDKVQKWRAALEEAANISGWDLPNTANGHEARVMEKIAEDIMARLGSQRHASNARNLVGMESHMHKVYKMLGIGSGGVHFLGILGMSGVGKTTLARVIYDNIRSQFQGACFLHEVRDRSAKQGLERLQEILLSEILVVKKLRINDSFEGANMQKQRLQYKKVLLVLDDVDHIDQLNALAGEREWFGDGSRIIITTKDKHLLVKYETEKIYRMKTLNNYESLQLFKQHAFKKNRPTKEFEDLSAQVIKHTDGLPLALKVLGSFLYGRGLDEWISEVERLKQIPENEILKKLEQSFTGLHNTEQKIFLDIACFFSGKKKDSVTRILESFHFCPVIGIKVLMEKCLITILQGRITIHQLIQDMGWHIVRREATDDPRMCSRMWKREDICPVLERNLGTDKNEGMSLHLTNEEEVNFGGKAFMQMTRLRFLKFRNAYVCQGPEFLPDELRWLDWHGYPSKSLPNSFKGDQLVGLKLKKSRIIQLWKTSKDLGKLKYMNLSHSQKLIRTPDFSVTPNLERLVLEECTSLVEINFSIENLGKLVLLNLKNCRNLKTLPKRIRLEKLEILVLTGCSKLRTFPEIEEKMNCLAELYLGATSLSELPASVENLSGVGVINLSYCKHLESLPSSIFRLKCLKTLDVSGCSKLKNLPDDLGLLVGLEELHCTHTAIQTIPSSMSLLKNLKHLSLSGCNALSSQVSSSSHGQKSMGVNFQNLSGLCSLIMLDLSDCNISDGGILNNLGFLSSLEILILNGNNFSNIPAASISRFTRLKRLKLHGCGRLESLPELPPSIKGIFANECTSLMSIDQLTKYPMLSDATFRNCRQLVKNKQHTSMVDSLLKQMLEALYMNVRFCLYVPGMEIPEWFTYKSWGTQSMSVALPTNWFTPTFRGFTVCVILDKKMLFILGRFNTHKVYGLENMIWLNLKRYDGLRQKISTSFGPIGSEKPGGLGDTLITHIAFERSWKLENDLDYYRNNAFQLEFSACDHYQKDVVKGLGVRLVYEN

SEQ ID NO: 102333 - DNA, 3444 bp, Populus deltoides
  CDS (1)..(3444)
atgcagaaagaaaaacgcaagcaatccaaagatgaagaaaacgatccatcctcgcgaaagagaagaaaagctgacctcaagccagagtcttctcgatctagaccagaaggggcctatgatgtcttcttgagttttagaggagaagacactcgcaagacatttacagatcatctatatactgccttggtccaagcaggaatccacacttttcgagatgatgatgaacttccgaggggagaagaaatctccgatcatttcctcagggcaattcaagaatcaaagatatccatagctgtcttctcaaaaggatatgcttcttctagatggtgtctcaatgaacttgtagagattcttaagtgcaaaaaaaggaaaaccggtcagattgttcttcctatattctatgacattgatccttcagatgtgagaaaacagaatggcagttttgcagaagcatttgttaaacatgaagagcgttttgaagagaagttggtgaaggagtggagaaaagctcttgaggaggctggaaatctatctggatggaatctcaatgatatggcaaatgggcatgaagcaaaatttatcaaagagattatcaaggttgtgttgaataaattagaacccaagtacttatatgttcctgagcacctagtaggtatggatcagcttgctcgcaatatttttgactttctaagtgctgcaacagatgatgtacgcattgtgggcatacatgggatgccaggaataggaaagacaactatagcacaagctgtatttaatcaactctgctatggattcgagggaagctgttttctttcgagtatcaatgaaaggtcaaaacaagttaatggtcttgttcctttacaaaagcaacttcatcacgatattttaaaacaggatgttgcaaacttcgattgtgctgatagaggaaaggttctgatcaaagagcgacttcgtcgcaaaagagttcttgttgttgctgatgatgtggcgcatctggaacagctgaatgcattgatgggagatcgaagttggtttggtcccggaagtagagtaattattacaacaagagattcaaatcttcttcgtgaagcagatcaaatatatcagatcgaagaattgaaaccagatgagtcccttcagcttttcagcaggcatgcctttaaggactccaagccagcacaagactatattgagctttcgaagaaagccgttggttactgtggaggacttcctttagctcttgaggttataggagctcttctgtacaggaaaaacagaggtagatgcgtaagtgaaattgacaacttgagcagaattccaaaccaagatattcaaggaaagcttctaataagttatcacgcacttgatggtgaactacaaagagcattccttgatattgcatgcttctttattggtatagagagagaatacgtcacaaaagtgctaggagcccgttgccgtcccaatccagaagttgttttggaaactctcagtgaaaggtctctgattcaagtatttggagagacggtaagcatgcatgatctattacgagacatgggaagggaggtcgtttgtaaagcgtctcccaaacaacctggaaagaggaccagaatttggaatcaagaggatgcatggaatgtacttgagcagcagaaggtaagaggtacggatgttgtaaagggtcttgcactggatgtcagagcatcagaagctaaatcacttagcgcaggatcatttgcagaaatgaaatgcttaaatttactccaaatcaatggagtacatctcaccggatccttaaaactgttttctaaagagttgatgtggatttgttggcatgaatgtcctttgaaatatttgccatttgattttacattggacaatctagctgttcttgatatgcagtacagtaacctcaaagaactatggaagggaaaaaaggtgcgaaacatgctacaatccccaaaatttctccagtatgtaatttatatttacattttagaaaaactaaacctgaaaggttgctcgagtttagttgaggtgcatcaatctattggaaatttgacgagccttgatttcttgaatctggagggatgttggaggctgaagaatctccctgaaagcattggtaatgtaaagtctcttgaaactctgaatatttctgggtgttcacaacttgagaaattgccagaaagcatgggtgatatggaatccttaatcgaattgctagccgatgggattgaaaatgagcaatttctctcttcaattggacaattaaagcatgtcagaaggttatcattgcgtggatacagttcgactccaccaagttcttctttgatttcagcaggtgttttgaatttgaaacgttggctgccaacatctttcattcaatggatatcagtgaaacgtcttgagcttcctcatggtggtttgtctgatcgcgcagctaagtgtgttgatttcagtggtttgtccgctctagaagtattggatctaataggaaacaaattctctagcttgccttctgggatcggcttcctttccaagctaaagttcttgtctgtaaaggcatgcaaatatcttgtatcaatcccagatcttccctcaagtttagactgtttggatgcatcttattgcaaatcattggaaagagtaagaataccaatcgagccaaaaaaagaactagatataaatctatataaaagtcattcgttagaagagattcagggcatcgaaggtctaagtaataatatctggagtttagaagttgataccagcaggcattcaccaaataaattacagaagagcgttgttgaggcaatttgcaatggtcgtcaccggtattgtattcacggcattcctggtggtaacatgccaaattggatgagctacagtggagaaggatgctcattgtcattccatatacctccagtcttccatggcttagttcgttggtttgtctttcgaccacttgagatggatgttcgttattacttccacactaacattattagtattataagaaataaaagcaatggtattcaattgtttaaagataaacaaatagcaggagctgggggctggataagatacataagtagaagtgaaatggcaatggaagattactgtggagatgacgaattggaactatacatttcttcagtgccatcactggatgcggtgtacaacggtttgcaagtcaaacccgtacacgttaaagaatgtggggtccatgtgatcgcagggaagttagattcatttgaagagtcggcggtgggaagagatacaataatgtcttcaccgtccctgtatcatctgcttcctcatccccattgtggttcaattatagcgtctacacctaagcaatggagtgactttttatttccaaatatgcaagaactttccttcaatatatggatttatggtaagaacaaatatttcttttag

SEQ ID NO: 102334 - protein, 1147 aa, Populus deltoides
MQKEKRKQSKDEENDPSSRKRRKADLKPESSRSRPEGAYDVFLSFRGEDTRKTFTDHLYTALVQAGIHTFRDDDELPRGEEISDHFLRAIQESKISIAVFSKGYASSRWCLNELVEILKCKKRKTGQIVLPIFYDIDPSDVRKQNGSFAEAFVKHEERFEEKLVKEWRKALEEAGNLSGWNLNDMANGHEAKFIKEIIKVVLNKLEPKYLYVPEHLVGMDQLARNIFDFLSAATDDVRIVGIHGMPGIGKTTIAQAVFNQLCYGFEGSCFLSSINERSKQVNGLVPLQKQLHHDILKQDVANFDCADRGKVLIKERLRRKRVLVVADDVAHLEQLNALMGDRSWFGPGSRVIITTRDSNLLREADQIYQIEELKPDESLQLFSRHAFKDSKPAQDYIELSKKAVGYCGGLPLALEVIGALLYRKNRGRCVSEIDNLSRIPNQDIQGKLLISYHALDGELQRAFLDIACFFIGIEREYVTKVLGARCRPNPEVVLETLSERSLIQVFGETVSMHDLLRDMGREVVCKASPKQPGKRTRIWNQEDAWNVLEQQKVRGTDVVKGLALDVRASEAKSLSAGSFAEMKCLNLLQINGVHLTGSLKLFSKELMWICWHECPLKYLPFDFTLDNLAVLDMQYSNLKELWKGKKVRNMLQSPKFLQYVIYIYILEKLNLKGCSSLVEVHQSIGNLTSLDFLNLEGCWRLKNLPESIGNVKSLETLNISGCSQLEKLPESMGDMESLIELLADGIENEQFLSSIGQLKHVRRLSLRGYSSTPPSSSLISAGVLNLKRWLPTSFIQWISVKRLELPHGGLSDRAAKCVDFSGLSALEVLDLIGNKFSSLPSGIGFLSKLKFLSVKACKYLVSIPDLPSSLDCLDASYCKSLERVRIPIEPKKELDINLYKSHSLEEIQGIEGLSNNIWSLEVDTSRHSPNKLQKSVVEAICNGRHRYCIHGIPGGNMPNWMSYSGEGCSLSFHIPPVFHGLVRWFVFRPLEMDVRYYFHTNIISIIRNKSNGIQLFKDKQIAGAGGWIRYISRSEMAMEDYCGDDELELYISSVPSLDAVYNGLQVKPVHVKECGVHVIAGKLDSFEESAVGRDTIMSSPSLYHLLPHPHCGSIIASTPKQWSDFLFPNMQELSFNIWIYGKNKYFF

SEQ ID NO: 102335 - DNA, 3381 bp, Solanum tuberosum subsp
  CDS (1)..(3381)
atggcatcatcatcttcttcttctgagagtaattcacagtattcatgtcctcaacggaagtacaagtacgatgtgtttctaagttttagaggtaaagatactcgcagaaattttacaagtcacttgtacgaacgtttggataacaggggaatattcacctttctagatgataaaaggctagagaatggtgattccctctcgaaagaactagtgaaagctataaaagagtctcaagttgctgtaatcatcttctcaaagaattatgctacgtcgaggtggtgcctgaatgaagtagtgaagattatggaatgcaaggaagagaatggacaattagtcataccagtcttctatgatgtggatccatcagatgttcggaagcaaacgaagagctttgcagaagcctttgccgaacacgaatcgaggtataaggatgatgttgaaggaatgcagaaggtgcaacgatggaggactgctctaagtgaagctgcagatctaaaaggatatgatatccgtgaaaggattgaatcagaatgtattggggaacttgttaatgaaatttcgcccaaattatgcgagacttctttatcttatttgacagatgttgtgggaatagatgctcatttaaagaaagtcaactcccttctagagatgaaaatcgatgatgttcggattgtgtggatctggggaatggggggagttggtaaaacgacaatagcaagagctatttttgatatactctcatctaaatttgatggtgcttgtttccttccggacaataaagaaaacaagtatgaaatacattctctgcaaagtatccttctctctaaactggtaggggaaaaagaaaattgtgtgcatgataaggaggacgggaggcacctgatggctcgtagacttcgtttgaagaaagttctagttgtgcttgataacatagatcatgaagaccaattgaaatacctagcaggggatcttggttggtttggcaatggcaccagaattattgcaacaacgagagacaagcatttcattcggaaaaatgatgccgtatatcctgtgactacactacttgaacatgatgctgttcagttgttcaaccaatatgctttcaaaaatgaagttccagataagtgtttcgaggagataacgttggaggtagtaagtcatgctgaaggccttcctttagccctgaaagtgtggggttcttccttacataagaaggatatacatgtgtggaggagtgctgttgatcgaataaagaggaaccctagttcaaaagttgttgaaaacctcaaagtaagttatgatgggttggagcgcgaagatcaagagatatttctagatattgcatgcttcttaagagggagaaaacaaaccgagatcaagcaaattcttgagagctgtgattttggagctgatgacggattgagggtgctgattgacaagtctcttgtgttcatctctgaatatgatacgattcaaatgcatgacttaatacaagagatgggtaaatacatagtgacaatgcaaaaggatcggggagaagtcactagactatggctcactcaagatttcgaaaaattctcaaatgcaaaaatacaagggaccaaggctatcgaagcaatctggataccagaaattcaagacctaagctttagaaaaaaggccatgaaagatgtggaaaagcttaggatattatacatcaatggttttcatacacctgatggctccaacgatcagtaccttcccagcaacttgcgctggttcgactgttgtaagtatccttgggaatcattgccagccaaatttgatcctgacatgcttgttcatcttgatctccagcagagttcactgtttcatttatggactggaacaaagaaatttccttttctacggaggctagatctcagcagctgtgcaaacctgatgcgaacaccagatttcacggatatgccaaatttggagtatttgggtctggaagagtgtagtaatcttaaagaggttcatcattccctgagatgttccaaaaaactcattaagttaaatttgagagattgtaaaaaccttgagagttttagctatgtttgttgggaatctcttgaatgtctacatctacaaggttgctctaatttagagaaatttccgaggatccggggaaaattgaagccggagatagagattcaagtgcaacgctctgggataaggaaactaccatcagctattattcagcaccagtctagtcttacagagctagatttgagtggcatgaaaaaccttgcaacactttcatgcagcattggcgagttgaaaagtttggtgatgctaaaagtgtcctactgctcaaaactcaaaagcttgccagaagagataggtgatttagaaaacttggagatacttaaggccggatatactctaatctcacaacctccgtcttccatcgttcgcttgaacaggcttaaatttttgacttttgcaaaacaaaaatcagaagtaggcctcgaagatgaagtgcactttgtcttccctccggtgaatcagggattatgctcattgaaaactttgaatctcagttactgcaatctaaaagacgaaggacttccgcaagacatcggaagcttatcctctttggaagtgttgaatctgaggggaaataattttgagcatttgcctcaaagcttgacccgacttagttctcttcagtccttggacttattagattgcaagagtcttacacagctgccggaatttccacggcaattagacacaatatatgcagattggaacaatgattcgatctgtaattcgttgtttcaaaatatctcatcattccagcatgacatctgtgcttcagattccttgtcactaagagtgtttaccaatgagtggaaaaatatcccgagatggttccaccatcagggaaaagataaaagtgtatcagtcaaattgcctgaaaattggtatgtgtgcgataacttcttgggatttgctgtatgttactctggctgcttaattgaaaccacagctcaattcttatgtgatgaggggatgccgtgtatcacacagaaacttgccttacccaaacattcagaagaatttccagaatctgctattcattttttcttggtaccttctgctggcttattggatacatctaaggcaaacggaaaaacaccaaatgattataggcacattatgttatctttttcggaagagttgaaggagtttggacttcgtttgttgtatagagatgaatctaagcttaaggccttgtttaaaatgacggaaaataatgatgaaccaacagaatattgcgtcgtgaaaaggaggggtcaatatgatgaggccagatgctcctcttctaagaaacaaaggtcacagctctaa

SEQ ID NO: 102336 - protein, 1126 aa, Solanum tuberosum subsp
MASSSSSSESNSQYSCPQRKYKYDVFLSFRGKDTRRNFTSHLYERLDNRGIFTFLDDKRLENGDSLSKELVKAIKESQVAVIIFSKNYATSRWCLNEVVKIMECKEENGQLVIPVFYDVDPSDVRKQTKSFAEAFAEHESRYKDDVEGMQKVQRWRTALSEAADLKGYDIRERIESECIGELVNEISPKLCETSLSYLTDVVGIDAHLKKVNSLLEMKIDDVRIVWIWGMGGVGKTTIARAIFDILSSKFDGACFLPDNKENKYEIHSLQSILLSKLVGEKENCVHDKEDGRHLMARRLRLKKVLVVLDNIDHEDQLKYLAGDLGWFGNGTRIIATTRDKHFIRKNDAVYPVTTLLEHDAVQLFNQYAFKNEVPDKCFEEITLEVVSHAEGLPLALKVWGSSLHKKDIHVWRSAVDRIKRNPSSKVVENLKVSYDGLEREDQEIFLDIACFLRGRKQTEIKQILESCDFGADDGLRVLIDKSLVFISEYDTIQMHDLIQEMGKYIVTMQKDRGEVTRLWLTQDFEKFSNAKIQGTKAIEAIWIPEIQDLSFRKKAMKDVEKLRILYINGFHTPDGSNDQYLPSNLRWFDCCKYPWESLPAKFDPDMLVHLDLQQSSLFHLWTGTKKFPFLRRLDLSSCANLMRTPDFTDMPNLEYLGLEECSNLKEVHHSLRCSKKLIKLNLRDCKNLESFSYVCWESLECLHLQGCSNLEKFPRIRGKLKPEIEIQVQRSGIRKLPSAIIQHQSSLTELDLSGMKNLATLSCSIGELKSLVMLKVSYCSKLKSLPEEIGDLENLEILKAGYTLISQPPSSIVRLNRLKFLTFAKQKSEVGLEDEVHFVFPPVNQGLCSLKTLNLSYCNLKDEGLPQDIGSLSSLEVLNLRGNNFEHLPQSLTRLSSLQSLDLLDCKSLTQLPEFPRQLDTIYADWNNDSICNSLFQNISSFQHDICASDSLSLRVFTNEWKNIPRWFHHQGKDKSVSVKLPENWYVCDNFLGFAVCYSGCLIETTAQFLCDEGMPCITQKLALPKHSEEFPESAIHFFLVPSAGLLDTSKANGKTPNDYRHIMLSFSEELKEFGLRLLYRDESKLKALFKMTENNDEPTEYCVVKRRGQYDEARCSSSKKQRSQL

SEQ ID NO: 102337 - DNA, 3609 bp, Linum usitatissimum
  CDS (1)..(3609)
atggctgcagatatttcttcttctgctcctcgtacttctccgtataccggagaatgggagtacgatgttttcttgtgttttagaggcgacacacgccacggtttcaccagccacctcctgtctgctttatcagacaagcaaatcagaaccttcattgaccacaagctcgcaaaaactgaaagcatcgatgagctaatctcgatcctccagagatgtgctctttctgtggtggttttctccgagaagtttgcggattcagtgtggtgcttggaagaggtggttactattgctgaaaggatgaagaaagttgggcacagagttcttccggttttctataaagtggatccgttcgatgtgacagatgaaccgagaagctatatggctaccatcgatcgtgaatataaagctagaagtagctttttggaggataagaagagatggatggatgctgtgaacgctgtggctaattgtgctggtcatacttcgcaggccatcaaaattgaatcggaattgattaaggcggttgtggaaactgttcagaagcaactaattgacatgtcaccgagtatcaatcgtaataacttggttgctatgagttcacgtattttcgagattgagcgactattagctatggacaaactagatgatacttgcatcattgggctatggggaatgggcggtgttgggaaaacaactctagccgaagcgtgttatgacagggtaacttcgtccaacaaaggaatcaaacatcttttcgttcgaaacgtgaatgaaatatgtgaaaagcatcatggcgttgaaaaaattgttcacaaactctattcaaaattgttggacgagaataacatcgaccgtgaagatttgaatattgcttatcgaagggaacgtctttcgcacttgagggtattcgttgttctagacaacgttgaaactttggagcaattggagcaattggctttaggatatgtgttcaatctcagcaaagtctttgcagcggggagtaggatcatcatcaccacaagaaataaaaaggtgcttcaaaatgctatggccaagatttacaatgtcgagtgtttgaatgacgaggaatctacccggttgtttagcttacatgcattcaaacaagatcgacctcaagataattggatgggtaagtcacgtctcgcaacatcatattgcaaggggaatcctttggcactcaaaatcttggggggtgcattgttcggtgaagatgtacattattggagaagtctcttgaccggtttgaggcaatctggaaacctagggatggagactattctgaggagaagttatgataaacttgggaaggaagagaaaaaaatatttttggatgttgcctgtctgctcaatggcatgtcaaaatctagattgattgactatatggcgactatgtattcctcttcttatgtcaaggtgaaggatttaattgacaaatccctattaacatgtgttcctagcgagaatggagagatgattgaggtgcatggtttgcttaaagaaatggcttggaacattgtcaaagaagaaccaaagcttggcaaacgaagcagattagtagatccggatgatgtccataaattattgtcaacttcagaggttaaaaattggagtacatcaatcgtcaacctcttcaaaggcatagtgatggtcataccaaaaaggaagaaaagaaaagtcactgacatgcatcagaaaggcgatgatccattggaggaacatcgaacaactgaaggtatacgtttggatctctctaaaactaaagagatgtatttgaaagcaaatgcctttgagggtatgaattctcttacatttctcaaattcgagtcgccagaaattgagtatccttattaccgtttaaaaaatgtgaagatgaaaattcatttgccttacgatggacttaactcccttccggaggggttaagatggttgcagtgggatggatatccttcaaaatctctaccggcaaagttttatccgcaacacctcgtccatctcattatacgtcgaagtccaattcgaagatgttgggaaggatatgatcaaccccaacttgtgaacttgattgtgcttgatctctgctactgtgcaaatataatcgctattccggatatatcaagttctttgaatatcgaagaacttcttctttttggatgcaaaagcctagttgaggtaccatttcatgttcaatatttgaccaagctggtaacactagacatcagtcattgcgaaaacctcaagcctcttccgcctaaacttgactcaaagttacttaagcacgttcggatgaaaaatctcgaggtcacatgctgtccagagattgattcgagagagttggaggaatttgatttaagtggtacatctctcggagagttacccagtgcaatttacaatatcaagcaaaatggagtcctacatctccatggcaaaaacattaccaaatttcctggaattacaacaatattgaagcttttttcattaagcgagacttcaataagagagattgatttggccgattatcatcaacagcatcagaatttgtggttgacagacaaccggcaacttgaggtcctgccaaacggtatatggaacatgatttctgaacaactttggattggttggagcccgctgattgaaagtttgccggaaatctcagagcctatgaataccttaacttctcttcatgtatactgttgtagaagcctcacaagtattccaactagcatcagcaatttaagatctctggggtcgctttgtttatcagagacgggtattaagtctctgccttctagcatccaagaactaaggcagcttcatatgattgagcttcgttattgcgaaagcctcgagtcaattccaaacagtatccataagctttccaagttggtaactttctcaatgtctggctgtgagatcattatatctttgcctgaactcccaccaaatctgaaggaattggacgtaagtcgttgcaagtctttacaagctctaccaagcaacacatgtaagctgttgtacctgaatacgatccattttgaaggatgtccacaattggaccaggctattcctgctgagttcgtggcaaatttcctcgttcatgccagcttgtctccgtcacatgatcggcaagttagatgttcaggaagcgagcttccggaatggttttcgtacagaagcatggaggacgaggattgcagtactgtgaaagtggagttgcctcttgctaatgatagtcctgaccatccaatgattaagggaattgcattcggctgtgtgaattcttccgacccttactactcttggatgcgtatgggatgtcgttgcgaggtcggtaacaccactgttgcatcttgggtttccaacagaaaaggagtaaatgaccatgaagaaaagtcatcatcagaaaaggtatggttggtgttcaacaagaatttatcaagtacggggtctatgggaagcgaagaagatgaagcgtggtatgtgaagtatggcgggttcgatgtctcattcaatttctattttctagatgacgacgatgaaatcatgaagaaggtgaaaataaaaagatgtggagtctctctgatgtattaa

SEQ ID NO: 102338 - protein, 1202 aa, Linum usitatissimum
MAADISSSAPRTSPYTGEWEYDVFLCFRGDTRHGFTSHLLSALSDKQIRTFIDHKLAKTESIDELISILQRCALSVVVFSEKFADSVWCLEEVVTIAERMKKVGHRVLPVFYKVDPFDVTDEPRSYMATIDREYKARSSFLEDKKRWMDAVNAVANCAGHTSQAIKIESELIKAVVETVQKQLIDMSPSINRNNLVAMSSRIFEIERLLAMDKLDDTCIIGLWGMGGVGKTTLAEACYDRVTSSNKGIKHLFVRNVNEICEKHHGVEKIVHKLYSKLLDENNIDREDLNIAYRRERLSHLRVFVVLDNVETLEQLEQLALGYVFNLSKVFAAGSRIIITTRNKKVLQNAMAKIYNVECLNDEESTRLFSLHAFKQDRPQDNWMGKSRLATSYCKGNPLALKILGGALFGEDVHYWRSLLTGLRQSGNLGMETILRRSYDKLGKEEKKIFLDVACLLNGMSKSRLIDYMATMYSSSYVKVKDLIDKSLLTCVPSENGEMIEVHGLLKEMAWNIVKEEPKLGKRSRLVDPDDVHKLLSTSEVKNWSTSIVNLFKGIVMVIPKRKKRKVTDMHQKGDDPLEEHRTTEGIRLDLSKTKEMYLKANAFEGMNSLTFLKFESPEIEYPYYRLKNVKMKIHLPYDGLNSLPEGLRWLQWDGYPSKSLPAKFYPQHLVHLIIRRSPIRRCWEGYDQPQLVNLIVLDLCYCANIIAIPDISSSLNIEELLLFGCKSLVEVPFHVQYLTKLVTLDISHCENLKPLPPKLDSKLLKHVRMKNLEVTCCPEIDSRELEEFDLSGTSLGELPSAIYNIKQNGVLHLHGKNITKFPGITTILKLFSLSETSIREIDLADYHQQHQNLWLTDNRQLEVLPNGIWNMISEQLWIGWSPLIESLPEISEPMNTLTSLHVYCCRSLTSIPTSISNLRSLGSLCLSETGIKSLPSSIQELRQLHMIELRYCESLESIPNSIHKLSKLVTFSMSGCEIIISLPELPPNLKELDVSRCKSLQALPSNTCKLLYLNTIHFEGCPQLDQAIPAEFVANFLVHASLSPSHDRQVRCSGSELPEWFSYRSMEDEDCSTVKVELPLANDSPDHPMIKGIAFGCVNSSDPYYSWMRMGCRCEVGNTTVASWVSNRKGVNDHEEKSSSEKVWLVFNKNLSSTGSMGSEEDEAWYVKYGGFDVSFNFYFLDDDDEIMKKVKIKRCGVSLMY

SEQ ID NO: 102339 - DNA, 3192 bp, Arabidopsis thaliana
  CDS (1)..(3192)
atggtgaatacgccttttccaatttctccatcgtttatggctcatctactgatccacagacatttttgttctcgctactctattctcatggcttcctcttcttcttcgcctcgcacctggagataccgcgtcttcacgagcttccatggacctgacgtccgtaaaacctttctcagtcatttacgtaaacagtttatctgcaatgggactaccatgttcgatgatcaagcaatcgaaagaggccaaaccatttcccctgaactcacacgagggattagggaatcgaggatctcgatcgtagtgctctcgaagaactatgcttcatcgagctggtgtttggatgagctgttggagattttgaaatgcaaggaagatattgggcaaatagtgatgactgtcttctacggagtagatccatctgatgtgcgcaaacaaaccggagatatcttgaaagttttcaagaaaacttgttctggtaaaacggaggagaagaggcgaagatggagccaagctttgaacgatgttggcaacattgccggagaacatttccttaactgggataatgaatcgaagatgatggagaagattgcaagagatatttcaaacaaagtaaacactacaatctctagggattttgaagacatggtgggagttgagacacacctggagaaaatacagtctttgttacatttagataatgatgatgaagctatgattgttggaatctatggccctgcaggtattggtaagactaccattgccagagctttgcacagtctactctctgataggtttcagcttacttgttttatggagaatcttaggggaagctataatagtagtcttgacgagtatggtttgaagctgcaattacaagaacaacttctttccaagattttaaaccaaactggtatgagggtatacaatttaagtgcaatacagggaatgctatgcgaccaaaaagtgcttatcattcttgatgatgtggacgatctgaagcaactagaagctttggctaatgaaactaagtggtttggtcctgggagtagggttgtagtgaccacagaaaatcaagagcttttgaagcaacatgacgatattaagaatacatactatgtggattttcctactcagaaagaagctcgtcagatcttttgtagatatggttttaaacagagcactccacaagatggtttcgaaaatctttccgaaagagttataaagctttgcagcaaacttccactaggtcttagtgtcatgggtttatatctacgaaaaaagacagaagatgactgggaagatatactgcataggctagaaagtagctttgattcagttgatcgaaatatcgagagagtactaagagtcggatatgacggtttacatgagaaggatcaattgttatttctcctcattgcattcttcttcaactacaaagacgatgatcatgtgaaagcaatgcttgctgacaataacttgaatgtcagactcggtttgaaaactctcgagtataaatctcttatacaaagatcgtctggaggaaatatagtgatgcacaagttactacaacaagtgggtagagaagcggttcaaagacaagagccttggaaacgccaaatcttaattgatgctcatgagatttgtaatgtcctcgaaactgattctggttgtgcaaatgtgatgggcatatcctttaatgtatctacaatcccgaatggcgtgcatataagcgcaaaagcttttcaaaatatgcgtaatcttcgatttctaagcatctacgagacaagacgtgatgtaaaccttagagtaaatgtacccgatgacatggatttcccacatcgtctaaggtctttacattgggaggtatacccaggaaagtctcttccttctacatttaggccagaatatcttgtggaactcaacttgcaaaataacaagctagagaagctttgggaaggaacccagcctcttacaaatctcaacaagttggaattgtgtgggtccttgagattgaaggaacttccagatctttcaagtgctacaaatctcaagagactagatctaactggttgttggagtttggtagagattccttcctctgttggaaatcttcacaaactagaagagttggagatgaatttatgtttacagctacaagttgttccgactcacttcaacttggcatctcttagatcactcaggatgttgggatgctgggaattaaggaaatttccaggtatttctacgaacatcacatccctcgtaatcggagatgcaatgttagaagaaatgcttgaatcaattaggctttggtcttgccttgagactctggttgtatatggcagtgtcattacacataatttttgggcagtaactttaatagagaaaatgggcacagatatagagaggattcctgattgcatcaaagatctccctgcgttaaaatcgctttatataggtggctgtccaaaacttttttcactgccagagctccctggctcactcagaagactaacggtagaaacttgtgaatcactcaagactgtatcttttcctattgattctccaattgtgagtttcagtttccccaactgcttcgaattgggtgaagaagcacggagagtgattacacagaaagcaggtcagatgatagcatacttaccaggaagggaaatacctgcggagttcgtgcacagagctataggagattcgttgaccatccgttcatctttctgctccatatttaggatttgcgttgtggtttcccctaaatcagagatgaaagaagaatatgttggttttatgtgtcgcaaacgcataaacggttgccccattggcgataacttatttaaggcacagctccgtaaactccaagcggaacatctatttatatttcaatttgaattccttgaggaagacggatggctggaacaggacaacgaggtattgttcaaattcacgacctcatccgaggaactagacattattgaatgtggtatccagatattgacaggcgaaaccaacagaaacataagcacctatggaagctatgaatccagatcagagcaagtctctgaatacgaagatggatatcactctgataggagacttgagttccacgaacaaaagtccttgcccgggtggggtttctgtggaatttttcatggcttcttgagatgttttatggtctga

SEQ ID NO: 102340 - protein, 1063 aa, Arabidopsis thaliana
MVNTPFPISPSFMAHLLIHRHFCSRYSILMASSSSSPRTWRYRVFTSFHGPDVRKTFLSHLRKQFICNGTTMFDDQAIERGQTISPELTRGIRESRISIVVLSKNYASSSWCLDELLEILKCKEDIGQIVMTVFYGVDPSDVRKQTGDILKVFKKTCSGKTEEKRRRWSQALNDVGNIAGEHFLNWDNESKMMEKIARDISNKVNTTISRDFEDMVGVETHLEKIQSLLHLDNDDEAMIVGIYGPAGIGKTTIARALHSLLSDRFQLTCFMENLRGSYNSSLDEYGLKLQLQEQLLSKILNQTGMRVYNLSAIQGMLCDQKVLIILDDVDDLKQLEALANETKWFGPGSRVVVTTENQELLKQHDDIKNTYYVDFPTQKEARQIFCRYGFKQSTPQDGFENLSERVIKLCSKLPLGLSVMGLYLRKKTEDDWEDILHRLESSFDSVDRNIERVLRVGYDGLHEKDQLLFLLIAFFFNYKDDDHVKAMLADNNLNVRLGLKTLEYKSLIQRSSGGNIVMHKLLQQVGREAVQRQEPWKRQILIDAHEICNVLETDSGCANVMGISFNVSTIPNGVHISAKAFQNMRNLRFLSIYETRRDVNLRVNVPDDMDFPHRLRSLHWEVYPGKSLPSTFRPEYLVELNLQNNKLEKLWEGTQPLTNLNKLELCGSLRLKELPDLSSATNLKRLDLTGCWSLVEIPSSVGNLHKLEELEMNLCLQLQVVPTHFNLASLRSLRMLGCWELRKFPGISTNITSLVIGDAMLEEMLESIRLWSCLETLVVYGSVITHNFWAVTLIEKMGTDIERIPDCIKDLPALKSLYIGGCPKLFSLPELPGSLRRLTVETCESLKTVSFPIDSPIVSFSFPNCFELGEEARRVITQKAGQMIAYLPGREIPAEFVHRAIGDSLTIRSSFCSIFRICVVVSPKSEMKEEYVGFMCRKRINGCPIGDNLFKAQLRKLQAEHLFIFQFEFLEEDGWLEQDNEVLFKFTTSSEELDIIECGIQILTGETNRNISTYGSYESRSEQVSEYEDGYHSDRRLEFHEQKSLPGWGFCGIFHGFLRCFMV

SEQ ID NO: 102341 - DNA, 3483 bp, Arabidopsis thaliana
  CDS (1)..(3483)
atggcttcttcttcctcctcctcttctcgcaattggtcatatcacgttttcccgagtttcagcggagaagatgtccgcaacacattccttagccactttctaaaagaactggataggaaactgatcatttctttcaaagacaatgagatcgagagaagccagtcacttgatcccgaacttaaacatgggattagaaattccagaattgcggtggttgtgttctccaaaacctatgcctcttcaagctggtgccttaacgagctactggagattgtgaaatgcaagaaagagtttggccaacttgtgatacccattttctacaatttggatccatcccatgtgaggaaacagaccggagactttgggaagatctttgaaaagacatgccgaaataaaacagtggatgagaaaatccgatggaaggaagctttgaccgatgtagctaatatccttggatatcatattgttacctgggataacgaagcaagcatgatcgaagaaatcgccaatgatattttgggtaaaatgaatatatctccatcaaatgattttgaggacttggtcggtattgaagatcatatcacaaagatgagttcattgctgcacttggaatctgaggaagtgaggatggtcgggatatggggtccctcgggaattggcaaaacgaccattgcaagagctctatttagtcgactctcttgtcagtttcaaagtagtgttttcattgacaaggttttcatatctaagagtatggaagtttacagtggagctaatcttgttgactataacatgaagttgcacttgcaaagagcctttctagctgaaatttttgacaaaaaggacataaagatacatgtaggtgcaatggaaaagatggtaaagcaccggaaagctctcatcgttattgatgatttagatgatcaagatgtgctagatgctttagcggatcaaactcaatggtttggaagtgggagtagaatcattgtggttacagaaaataagcattttttaagggccaatcggattgatcacatttacaaggtctgtctcccatctaatgcgctggctcttgagatgttttgtcgttctgcttttaagaagaattctcctcctgatgactttttggagctttcttctgaagttgcattgcgtgctggtaatcttcctttgggcctgaacgtattgggttcaaatttacggggcataaacaaaggttactggatagatatgctaccgaggcttcaaggtttggatggaaaaatagggaaaacactaagagtcagctatgatgggttgaataacagaaaagatgaagcaatatttcgtcacattgcatgtattttcaatggtgagaaagtcagtgacatcaaactattactagcaaatagtaacttggatgttaatatcgggctaaaaaaccttgttgatagatcccttatctgtgaaagattcaatactctggagatgcactctttgctacaagaattgggtaaggagattgtccgtactcagtccaatcagcctggagaacgggagttccttgtggatttgaaggatatttgcgatgtacttgaacataacactggtactaagaaggttttaggtataacattggatatagatgagactgacgaactgcatatacatgagagctccttcaaaggaatgcacaatctcctttttctaaaaatttatactaagaaattggaccagaaaaaaaaagttagatggcacttaccggaacgcttcgactatttgccctctagacttagattattgaggtttgacagatacccatcgaaatgtcttccttctaactttcatcctgaaaacctggttaagcttcaaatgcagcagagcaaacttgagaagctgtgggacggagttcattcacttgcagggctcaggaatatggatttacggggatctagaaacctgaaagaaatcccagatctttcaatggccactaatctagaaacacttaaactcagcagttgctcgagtttggtggaacttccttcgtctattcagtacctgaataagctgaatgatttggacatgtcatactgcgatcatttggagactattccctctggagttaacctcaaatctctcgatcgtctcaatctcagtggatgctcacggttgaaaagttttcttgacataccaaccaacatctcatggcttgatataggccaaacagcggacattccctctaatttgcgtctacagaatctcgatgagcttatattgtgcgaaagagtgcagctgcgtacacctctcatgaccatgctttctcccactttgacgaggttgactttttcgaacaacccaagttttgtggaagtcccttcttcaattcagaatctctatcaacttgagcatttggaaattatgaactgcagaaatctggtgactcttcccactggaataaacctcgactctctcatttcacttgatctctctcattgttctcagttgaagacttttcctgatatctcaaccaacatctcagatctcaatctaagctacacagcgattgaagaggttcctttgtcgatcgagaaattatctctcctctgttacctagatatgaatggatgcagcaatttactatgtgtatccccaaacatttctaaactgaaacatctcgagagagctgacttttcagactgtgtggaattgactgaagctagctggaatggtagttcaagtgagatggtcaaacttcttccagctgataatttctcaacggtcaagctcaacttcatcaactgcttcaagttagatctaacagctcttattcaaaaccaaacatttttcatgcaactgatactaacaggtgaagaagtgccttcatatttcactcaccgtaccagtggggactctatctccctacctcacatctctgtatgccaatcattcttcagttttaggggttgcaccgtgattgatgtcgattctttttccacaatctctgtttcatttgacattgaagtatgttgtcggttcatagacagattcgggaaccactttgattctactgattttccaggatacttcataacaacaaagttgggtggtcatctggttgtctttgactgttattttccctttaacgaagaatttactacttttctggatggtcaattcaactacgatcacgtggatatacagtttcgtctcacgaatgacaactctcagctcaaactaaaaggatgcggtattctactttccgaagatgtcccatccctggataaccgaccttgtagtccaaatattcttccaggggtttgtgaagatagcgctttagagagaaggagtttccggactaaaatgcggatgattactgaagttgcaagcaccgttgtaagatctgatgaagaagctaggaatggagacattcgtgagagcagagaatatggaaaagctttatttttgtcagcaaaagattttgtgagtgggaatgatactgaagagtga

SEQ ID NO: 102342 - protein, 1160 aa, Arabidopsis thaliana
MASSSSSSSRNWSYHVFPSFSGEDVRNTFLSHFLKELDRKLIISFKDNEIERSQSLDPELKHGIRNSRIAVVVFSKTYASSSWCLNELLEIVKCKKEFGQLVIPIFYNLDPSHVRKQTGDFGKIFEKTCRNKTVDEKIRWKEALTDVANILGYHIVTWDNEASMIEEIANDILGKMNISPSNDFEDLVGIEDHITKMSSLLHLESEEVRMVGIWGPSGIGKTTIARALFSRLSCQFQSSVFIDKVFISKSMEVYSGANLVDYNMKLHLQRAFLAEIFDKKDIKIHVGAMEKMVKHRKALIVIDDLDDQDVLDALADQTQWFGSGSRIIVVTENKHFLRANRIDHIYKVCLPSNALALEMFCRSAFKKNSPPDDFLELSSEVALRAGNLPLGLNVLGSNLRGINKGYWIDMLPRLQGLDGKIGKTLRVSYDGLNNRKDEAIFRHIACIFNGEKVSDIKLLLANSNLDVNIGLKNLVDRSLICERFNTLEMHSLLQELGKEIVRTQSNQPGEREFLVDLKDICDVLEHNTGTKKVLGITLDIDETDELHIHESSFKGMHNLLFLKIYTKKLDQKKKVRWHLPERFDYLPSRLRLLRFDRYPSKCLPSNFHPENLVKLQMQQSKLEKLWDGVHSLAGLRNMDLRGSRNLKEIPDLSMATNLETLKLSSCSSLVELPSSIQYLNKLNDLDMSYCDHLETIPSGVNLKSLDRLNLSGCSRLKSFLDIPTNISWLDIGQTADIPSNLRLQNLDELILCERVQLRTPLMTMLSPTLTRLTFSNNPSFVEVPSSIQNLYQLEHLEIMNCRNLVTLPTGINLDSLISLDLSHCSQLKTFPDISTNISDLNLSYTAIEEVPLSIEKLSLLCYLDMNGCSNLLCVSPNISKLKHLERADFSDCVELTEASWNGSSSEMVKLLPADNFSTVKLNFINCFKLDLTALIQNQTFFMQLILTGEEVPSYFTHRTSGDSISLPHISVCQSFFSFRGCTVIDVDSFSTISVSFDIEVCCRFIDRFGNHFDSTDFPGYFITTKLGGHLVVFDCYFPFNEEFTTFLDGQFNYDHVDIQFRLTNDNSQLKLKGCGILLSEDVPSLDNRPCSPNILPGVCEDSALERRSFRTKMRMITEVASTVVRSDEEARNGDIRESREYGKALFLSAKDFVSGNDTEE

SEQ ID NO: 102343 - DNA, 3720 bp, Arabidopsis thaliana
  CDS (1)..(3720)
atggcttcttcttcttctcgcagctggacatacgatgttttcccgagtttcagtggggaagatgtccgtaaatcattcctcagccaccttctcaagaagcttcatcgcaaatcaatcaatacattcatagacaacaacatcgagagaagccacgcgatcgcccctgaccttttatccgcgataaataactcgatgatctcaatcgtggtattctctaagaagtatgcttcttccacctggtgcttgaatgaattggtggagatccacaagtgttataaggagttgactcaaattgtcattccgattttctacgaagttgatccttctgatgttagaaagcaaaccagagagtttggcgagttctttaaagtgacctgcgtggggaaaacagaagatgtgaagcaacaatggatagaagctcttgaagaggtagcaagtatagccggacatgattctaagaattggcctaacgaagcaaacatgattgaacatatcgccaaagatgtgttaaataaacttattgcaacatcatcatcgaattgttttggagatcttgtcgggatcgaagctcatttaaaggcagtgaagtcaatcttgtgcttggaatctgaggaagcaagaatggtagggattttggggccttcaggcattggtaagactaccatagctagaattttatacagtaagctctctagccaattcgactatcacgtttttggttcttttaagagaaccaaccaggacaactatggcatgaagttgagttgggaagagcagtttctgtcagaaattctagatcaaaaggacctaaagataagccaattaggtgtggtgaaacagaggctaaagcataagaaagtacttatcgttcttgatgatgtggataatctagagctattaaagactttagtgggacaaaccgggtggtttggacctggaagcagaattatcgtgaccactcaagataggatccttctcaagtctcacaagattgatcatatttatgaggtggggtacccatcgagaaaattggctcttcggattttatgtcgatctgctttcgacagaaactccccacctgatggtttcatgcagcttgcaaatgaagttacagagcttgttggtaatcttcctttggctctcaatatcatgggttcgtctttgaaagggagggacaaggaagagtggatagagatgatgcctagtctccgaaatagtttggtggatggagaaattctgaaaacattaagagtcagctatgatcgattacatgggaattatcaagaaatattcctttatattgcgtgtttactaaattgctgtggagtcgaatacattataagcatgcttggagataatgctatcattgggttgaaaatactggctgagaagtccctcatacatatatcaccactggacaaaactgtagagatgcacagtttgctacaaaagttgggtagaaagattgttcgtgatgaatcctttggaaatcctggaaaacgccggttcttgttggatgctgaggatatttgtgatgtatttaccgataataccggcacagaaactgtactaggtatatctcttaacacattggaaatcaacgggacattgtctgtagatgataaatcattccaaggtatgcataatctccaatttcttaaagttttcgagaattggcggcgggggagtggtgaaggcatattgtctttacctcaaggcctcaattctttgccccgaaaactcagactactacactggtataaattcccgttgaggtgtatgccttctaacttcaaggccgagtatctggttaacctagaaatggcgtatagccagcttgagaggttgtgggaaggaactcagcaacttggaagtctcaagaagatggatctgtccaagtccgaaaatttgaaagaaattccagatctttcttacgccgtaaatctagaggaaatggatctttgcagttgtaaatctttggtaacacttccttcctcagttcgaaatcttgataaacttagggtgttaagaatgagtagctgctcaaatgtcgaagttcttccaactgatctcaacttggaatctctcgatctccttaatcttgaagattgctcacagttgagaagttttcctcagatttcaaggaacatttcaattcttaatctaagtggaactgcaatagacgaagaaagttctttatggatagagaatatgtctaggctcactcatctccgctgggacttttgtccactgaaaagtctgccttctaactttcgtcaagaacatctcgtttctttacatatgacacatagcaagcttgagaagttatgggaaggagcccagccttttggaaatctcgtgaatattgatctttcgctatctgaaaagctgaaagaatttccaaatctttcaaaggtcaccaatctcgatacgttggatctttatggttgcaaaagtttggtgacagttccctcctcaattcagagtctcagtaagctgacggaattgaacatgagaagatgcacaggtctcgaggctcttcctacggatgtgaacttggaatctcttcatactctagatctcagtgggtgctcaaagttgacaacttttcctaagatttcaagaaacattgaacgtctccttctggacgacactgcgattgaagaagttccttcgtggattgatgatttctttgagctcactacactcagtatgaaaggttgcaagaggttaagaaacatctctacaagcatttgtgaattgaaatgtattgaggtggcaaacttctctgactgtgaaagactcacagaatttgatgatgcaagtatggtaagaagaatcttacgcaccattgatgatctgatagcactgtacgaggaggcttcatttcttcatgcaatatttgtactgtgcagaaaactcgtatcaatatgtgcaatggtttttaaatatccccaagctctctcttacttcttcaacagtccagaggctgatctcattttcgctaactgctccagtttggatcgagatgcggagacactcatcctagaatcaaatcacgggtgcgcggtcttaccaggtggaaaagtgcctaactgtttcatgaatcaagcttgtggaagttccgtatctattcctttacatgagagctattattctgaagaatttcttggctttaaggcttgcattgtgcttgaaactccgcctgacctgaattttaaacaatcgtggatttgggtacgctgctatttcagagacaaatgtgtcgagcatagtgtccagttttcctgggactcgaataagatggatcacctgcttatgatcaactttcggctccctacaaaagaaataattggatgtccatctcaattggacaccgatgacttgatgttttttttttaccaccatatgtattatgcttgtaattcctacgtaaatccttctccatgctcagtccaaaggataaaaggatgtggtataaaattttgggatgtctctcccagagttctatctcaaagtgagcttgatacttacttctcctggccagttaaaggtgaaggtgaagctgaaggtgaaagtgaaggtgaaagcgaagacgaacaagaagaagacgaagatgaagatgcatatttggagattgaggatgactcgagcttgtcgtcgtttgtggaggagaatattggtgaatcttttctaaatacaaacaccttagttcggtga

SEQ ID NO: 102344 - protein, 1239 aa, Arabidopsis thaliana
MASSSSRSWTYDVFPSFSGEDVRKSFLSHLLKKLHRKSINTFIDNNIERSHAIAPDLLSAINNSMISIVVFSKKYASSTWCLNELVEIHKCYKELTQIVIPIFYEVDPSDVRKQTREFGEFFKVTCVGKTEDVKQQWIEALEEVASIAGHDSKNWPNEANMIEHIAKDVLNKLIATSSSNCFGDLVGIEAHLKAVKSILCLESEEARMVGILGPSGIGKTTIARILYSKLSSQFDYHVFGSFKRTNQDNYGMKLSWEEQFLSEILDQKDLKISQLGVVKQRLKHKKVLIVLDDVDNLELLKTLVGQTGWFGPGSRIIVTTQDRILLKSHKIDHIYEVGYPSRKLALRILCRSAFDRNSPPDGFMQLANEVTELVGNLPLALNIMGSSLKGRDKEEWIEMMPSLRNSLVDGEILKTLRVSYDRLHGNYQEIFLYIACLLNCCGVEYIISMLGDNAIIGLKILAEKSLIHISPLDKTVEMHSLLQKLGRKIVRDESFGNPGKRRFLLDAEDICDVFTDNTGTETVLGISLNTLEINGTLSVDDKSFQGMHNLQFLKVFENWRRGSGEGILSLPQGLNSLPRKLRLLHWYKFPLRCMPSNFKAEYLVNLEMAYSQLERLWEGTQQLGSLKKMDLSKSENLKEIPDLSYAVNLEEMDLCSCKSLVTLPSSVRNLDKLRVLRMSSCSNVEVLPTDLNLESLDLLNLEDCSQLRSFPQISRNISILNLSGTAIDEESSLWIENMSRLTHLRWDFCPLKSLPSNFRQEHLVSLHMTHSKLEKLWEGAQPFGNLVNIDLSLSEKLKEFPNLSKVTNLDTLDLYGCKSLVTVPSSIQSLSKLTELNMRRCTGLEALPTDVNLESLHTLDLSGCSKLTTFPKISRNIERLLLDDTAIEEVPSWIDDFFELTTLSMKGCKRLRNISTSICELKCIEVANFSDCERLTEFDDASMVRRILRTIDDLIALYEEASFLHAIFVLCRKLVSICAMVFKYPQALSYFFNSPEADLIFANCSSLDRDAETLILESNHGCAVLPGGKVPNCFMNQACGSSVSIPLHESYYSEEFLGFKACIVLETPPDLNFKQSWIWVRCYFRDKCVEHSVQFSWDSNKMDHLLMINFRLPTKEIIGCPSQLDTDDLMFFFYHHMYYACNSYVNPSPCSVQRIKGCGIKFWDVSPRVLSQSELDTYFSWPVKGEGEAEGESEGESEDEQEEDEDEDAYLEIEDDSSLSSFVEENIGESFLNTNTLVR

SEQ ID NO: 102345 - DNA, 3699 bp, Arabidopsis thaliana
  CDS (1)..(3699)
atggcgacttcctcctcaaacgtagtggttcaccagcagcagccgccgccgcaacataaagtgttcataaatttccgaggagctgagctgcgacacaagttcatcagtcatctactgaaagccttggagagggaaagaatcaacgtgttcatagacactcgagaaacaatgggcacaggtctggaaaacctattccagagaatacaagagtcgaagattgcgattgtggtcatttcaagcaggtacactgagtcacaatggtgcttaaatgagctggtaaagatcaaagagtgtgtggaggcagggaccttggtggtatttccagtgttctacaaggtggacgttaaaatcgtgaggttcctaacaggatcgtttggtgaaaaattagaaacattagtgttgcgtcatagtgaaagatatgagccatggaagcaggctctagagtttgtgacctcgaagacaggcaagagggtggaggaaaatagcgacgagggtgcggaggttgaacaaatcgtggagcatgtaaaggaaatcctaagaacaatttcaggggagattccacgaggaagagaaagtgaatcgccgagaggagaaggagaaggagaagcagagcctaagactactccttcagatgattctctactccatgggattgaaacaagggtagagcaactaaaagagaagctagagttgaaatctgaaaatgtcactcgctttatcggcgttgttgggatgcctggaataggtaaaacgactcttgccaagagactattcagtgaatgtggaaaacatttcctgcataagatgtttctagatgacgtgagccagaagccagagccttttttagacgagacgctgcacacggacctattgctcgggttatggaagagcaaaaacaatgggagagatggaaatagagccaagttatcgattgactacataaagactcaactacaaggaaaaaaagtttttgttgttcttgacaatgtgggtgacaagagtcagatagataagattcttggtgggtgtgactggataaaagcaggaagcagaattgtgatcacaacgagcagcaaatcggtgattcaaggactcaacagcacttatctcgtcccggggctgagtagctgtgatgccctaaaccatttcaactatcacgcgttttctgctagtgacggtttctaccagccaagtttcacggatcttgcaaaacagtttgtggattactctatgggacatccatcagttctcaagctgcttgctcgtgagcttcgtagtaaagacgagagttactggaaagaaaagcttagtgctcttgctaatagcccaagcaacacgattcaagatgttttgagaataccttatgacgagcttaaggagcagcacaagatcgtgttcctcgacattgcctatttcttcaggtttgagaatgagagttacgtgaggagattgcttggttcttcggctcacgcagatgcgagtgaaataactgatctagccgataagtttttgatcgacattagtggcgatcgtgtcgagatgaatgatctgttgtatactttcgcgataggtctgaattcgcaagcatcctctgaaaatacaacaagtgagcgtaggctctcaaagcactctgagattgttgatgttctcatgaacaaagcggaagcaaccaaggtcagaggagtttaccttgacatgttcgaggtaaaggaaatgggcttagacagtgacacgttcaacaaaatggatgatctcagatacttgaagttctacaattctcattgtcatagagaatgtgaagctgaagacagcaaactaaacttccccgagggactcgagttcctgccgcaagagcttcgatatcttaactggcttaaatatccggagaagaaccttcctataaattttgacccaaagaatcttatcgacctcaagctgccttatagtcagattgagcagatttgggaggaggagaaggatacatccaacttacagtggctggatctgaatcattcaagtaagctgcactcattatcgggtttatcgcgggctcaaaagcttcaaagtataaaccttgaaggctgcacgggactgaagacgcttcctcaagtgctgcagaacatggaaagtctcatgttcctgaatctgagaggatgtacgagcctcgagtctcttccagatataacattggttggtctaagaactttaatcctcagcaactgctcaaggtttaaggaattcaagctgattgcaaagaatcttgaagaattgtacttagatggcactgccattaaggaacttccttcaacaatcggagacctccaaaagcttatctcgctgaaactgaaagactgcaagaatctgttgagtctccctgactctataggaaacctaaaagctattcaagaaataatactctctggttgttcaagccttgagagtttcccagaagttaaccaaaacttgaaacacttaaagactttactactagacggaacagccataaagaagattcctgaattatcgtcagtgcgacgtttatctctgagcagtaatgagttcagaatcttgccgaggagtattggttatctctaccatctaaactggcttgacttgaagcactgcaagaatcttgtctctgttccaatgcttccaccaaatcttcaatggttagacgcacacggctgcatttcattggaaacgatttccatcctttcagatcctcttctggcggaaacagagcatttgcactccacatttatcttcactaactgtaccaaactttataaagttgaggagaatagcatcgaatcctaccctcggaagaaaatccagttgatgtcaaacgcactagctcgctatgaaaagggattagctctcgatgttctgatcggaatctgctttcccggatggcaagtgcccgggtggttcaatcatcgaacggttggattagagttgaagcaaaacctgccgcgacattggaacgcaggcgggcttgccggtatagctctttgtgctgtggtctcattcaaggactacatatcaaagaataacaggctcttagttacatgtagcggtgagttcaaaaaagaagacaagactttgttccagtttagttgcattcttggtggttggactgaacatggaagctatgaagcccgcgagatcaagtctgatcatgtctttatcggctacaccagctggttgaatttcatgaaaagtgacgacagtataggatgtgttgcaaccgaggcttcactaagattccaagttacggacgggacaagagaggttacaaactgcactgtcgtcaagtgcggctttagtctcatctattcacacactaatgttgatcatagcttgtgtacagacaattattctgatgtaactacaactaccagtgggggtacaagctccggttcaataacggacgttggagaaagttgttaccaaaatggaagtgaagaaatcatagaggaagcaatgcttttcgcagcttcaagagaagttgaagaagaagaagacacagagagcttagtgacattaagctcactaatgggagaaagtccaaagagaagtgagaagaaggtactgatgagtgtccgtaatggttccactagagaggtagcgatagagagggacgttaacaacgcacattgcctttcgtttttaaatgtgtttagattttggcgggattga

SEQ ID NO: 102346 - protein, 1232 aa, Arabidopsis thaliana
MATSSSNVVVHQQQPPPQHKVFINFRGAELRHKFISHLLKALERERINVFIDTRETMGTGLENLFQRIQESKIAIVVISSRYTESQWCLNELVKIKECVEAGTLVVFPVFYKVDVKIVRFLTGSFGEKLETLVLRHSERYEPWKQALEFVTSKTGKRVEENSDEGAEVEQIVEHVKEILRTISGEIPRGRESESPRGEGEGEAEPKTTPSDDSLLHGIETRVEQLKEKLELKSENVTRFIGVVGMPGIGKTTLAKRLFSECGKHFLHKMFLDDVSQKPEPFLDETLHTDLLLGLWKSKNNGRDGNRAKLSIDYIKTQLQGKKVFVVLDNVGDKSQIDKILGGCDWIKAGSRIVITTSSKSVIQGLNSTYLVPGLSSCDALNHFNYHAFSASDGFYQPSFTDLAKQFVDYSMGHPSVLKLLARELRSKDESYWKEKLSALANSPSNTIQDVLRIPYDELKEQHKIVFLDIAYFFRFENESYVRRLLGSSAHADASEITDLADKFLIDISGDRVEMNDLLYTFAIGLNSQASSENTTSERRLSKHSEIVDVLMNKAEATKVRGVYLDMFEVKEMGLDSDTFNKMDDLRYLKFYNSHCHRECEAEDSKLNFPEGLEFLPQELRYLNWLKYPEKNLPINFDPKNLIDLKLPYSQIEQIWEEEKDTSNLQWLDLNHSSKLHSLSGLSRAQKLQSINLEGCTGLKTLPQVLQNMESLMFLNLRGCTSLESLPDITLVGLRTLILSNCSRFKEFKLIAKNLEELYLDGTAIKELPSTIGDLQKLISLKLKDCKNLLSLPDSIGNLKAIQEIILSGCSSLESFPEVNQNLKHLKTLLLDGTAIKKIPELSSVRRLSLSSNEFRILPRSIGYLYHLNWLDLKHCKNLVSVPMLPPNLQWLDAHGCISLETISILSDPLLAETEHLHSTFIFTNCTKLYKVEENSIESYPRKKIQLMSNALARYEKGLALDVLIGICFPGWQVPGWFNHRTVGLELKQNLPRHWNAGGLAGIALCAVVSFKDYISKNNRLLVTCSGEFKKEDKTLFQFSCILGGWTEHGSYEAREIKSDHVFIGYTSWLNFMKSDDSIGCVATEASLRFQVTDGTREVTNCTVVKCGFSLIYSHTNVDHSLCTDNYSDVTTTTSGGTSSGSITDVGESCYQNGSEEIIEEAMLFAASREVEEEEDTESLVTLSSLMGESPKRSEKKVLMSVRNGSTREVAIERDVNNAHCLSFLNVFRFWRD

SEQ ID NO: 102347 - DNA, 3567 bp, Arabidopsis thaliana
  CDS (1)..(3567)
atgacaagctcctcctcctgggtgaaaacggacggtgagacaccccaagatcaagtgttcattaatttccgtggagtcgaactgcgcaagaacttcgtcagtcatctggagaagggcttaaaaaggaaagggatcaatgccttcatagacacagatgaagagatgggccaagagttgagtgttctgctcgaaagaatagaaggttcgaggatcgcgctagccattttctctccaaggtacacggagtcaaaatggtgtttgaaggagcttgcgaagatgaaagaaagaacggaacaaaaggagctcgtggtgattccaatcttctacaaggtacagcccgtcactgttaaagaattgaagggagacttcggggataagttcagggagctggtgaagtctactgacaagaagacgaagaaagaatggaaggaagctttacaatatgttccatttttaaccggcatcgtgttggatgagaaaagtgttagcagcgatgaggacgaagtcatcaatataattatccgaaaggttaaagaaatactaaatagacgttcagagggtcctccttctaaatgttctgcactaccgccccaaagacaccagaaacgtcatgaaaccttttggggaatcgagctccgaattaagcaactagaagaaaagttacgttttgggtcggacgaaacaactcgtaccatcggtgttgttgggatgcccggtataggtaaaaccactctcgctacgatgctatatgagaagtggaatgatagattcctgagacacgtgttaatccgtgatatccatgaagcttcagaggaagacgggttaaattacttggccacgaaattcttgcaaggtttattgaaagttgagaatgccaacatcgagtccgtacaagctgctcatgaagcttacaaagatcagttactcgagaccaaagtccttgttattcttgacaatgtcagtaacaaggaccaagttgatgctcttcttggcgaacgcaactggattaagaaaggaagcaagattctcattactacaagcgacaagtcattgatgatacaaagtttggtcaatgatacttacgaagtccctccattaagcgacaaagatgccataaaacattttatacgttacgcatttgatggtaacgaaggagctgctcccggccccgggcaaggaaatttccccaagttgtcgaaagatttcgtgcattatactaaaggaaatccactagctctccagatgttgggtaaggagcttttggggaaagatgagagtcactggggcttaaaactaaatgcattggatcaacaccataacagtccacctggacaaagcatttgcaagatgcttcaaagggtctgggaagggagttataaagcactgagtcaaaaagaaaaagatgcacttcttgacatagcttgcttcaggtcgcaagatgagaattacgtagcgagtttattggattcagatggccctagtaatatattggaagatctcgtgaacaagttcatgattaatatttatgctggcaaagtagatatgcatgatacattgtatatgctctccaaggaacttggtcgagaagctactgctacagatagaaaggggcggcataggttgtggcaccatcacaccataattgctgtgctggacaaaaacaagggaggttctaatatcaggtctattttccttgacttgtctgatattacaagaaaatggtgcttctatcgccatgcttttgccatgatgagggatctaagatatctcaaaatctacagcactcattgtcctcaagaatgtgaaagtgacattaaattaaacttccccgaaggactcctgctaccgttgaatgaggtgcgatatctccactggctgaaattcccgttaaaagaagttccacaagatttcaacccgggtaatttggttgaccttaagcttccttatagcgagattgaacgagtttgggaagataacaaggatgcaccaaaattaaaatgggtaaacttaaatcactcaaagaagttgaacactttggcagggttaggaaaagctcaaaatcttcaagagctaaatcttgaaggttgcacggcattgaaagagatgcatgtggatatggaaaatatgaagtttcttgttttcttgaacctgagaggatgcacaagtctcaagtctcttccagagattcagttgatctctttgaaaactctcatcctcagtggctgctcaaaatttaaaacctttcaggttatttcagataagctggaagcactatacttggatggaactgcaataaaggaacttccttgtgacattgggagactccaaagacttgttatgttgaacatgaaaggctgcaagaagctgaaaaggctccctgacagtcttggtcagctgaaagctcttgaagaacttatcctctctggttgttcaaagctcaatgagtttccagaaacttggggaaacatgagccgcttagagatcttgcttctggatgagacagctataaaagatatgccgaagatactctccgtgcgtcgtttatgcttaaacaagaatgaaaagatcagccgccttccagatctcctcaataaattttctcaacttcaatggcttcatttgaagtattgtaagaatcttacacatgttccacagcttccaccaaatcttcagtatttaaacgttcatggttgtagctcactgaagacagttgcaaaaccgctggtatgttctataccgatgaagcatgtcaattcctcgttcattttcactaactgcaatgaattggaacaagctgcaaaggaggaaattgtagtatatgctgaaaggaagtgtcatttgcttgctagtgcgcttaaacgatgcgatgagagttgtgttcctgagattttgttctgcactagctttcctggatgtgaaatgccttcatggtttagtcacgatgcaattggatctatggtggagtttgaattacctcctcactggaatcacaataggctttctgggatagccctatgtgttgttgtctcattcaagaactgtaaaagtcatgccaacttgatagtcaagttctcttgtgagcaaaataacggagagggctcttccagcagcattacttggaaggttggaagtttgattgaacaagacaaccaagaagaaacagttgaatcagatcatgtctttattggctacaccaactgcttagacttcataaaacttgttaaaggccaaggtggtcctaaatgtgctccgaccaaagcatcccttgagtttagtgtgagaactggtactggtggggaagctacgcttgaagttttgaaatccggtttcagttttgtgtttgaacctgaagagaacagagttccatccccaaggaatgatgatgtaaaaggtaaagtaaaaatcaacaaaactccaagtgctaatggttgtttcaaggatcaagcaaaaggtaatgaatctccaaagggccagtggcagacttacattgaaaactctagcactaacatcccaagtgaagctcattcttcccaaaaaactggttttggttccactcttttgtgttaa

SEQ ID NO: 102348 - protein, 1188 aa, Arabidopsis thaliana
MTSSSSWVKTDGETPQDQVFINFRGVELRKNFVSHLEKGLKRKGINAFIDTDEEMGQELSVLLERIEGSRIALAIFSPRYTESKWCLKELAKMKERTEQKELVVIPIFYKVQPVTVKELKGDFGDKFRELVKSTDKKTKKEWKEALQYVPFLTGIVLDEKSVSSDEDEVINIIIRKVKEILNRRSEGPPSKCSALPPQRHQKRHETFWGIELRIKQLEEKLRFGSDETTRTIGVVGMPGIGKTTLATMLYEKWNDRFLRHVLIRDIHEASEEDGLNYLATKFLQGLLKVENANIESVQAAHEAYKDQLLETKVLVILDNVSNKDQVDALLGERNWIKKGSKILITTSDKSLMIQSLVNDTYEVPPLSDKDAIKHFIRYAFDGNEGAAPGPGQGNFPKLSKDFVHYTKGNPLALQMLGKELLGKDESHWGLKLNALDQHHNSPPGQSICKMLQRVWEGSYKALSQKEKDALLDIACFRSQDENYVASLLDSDGPSNILEDLVNKFMINIYAGKVDMHDTLYMLSKELGREATATDRKGRHRLWHHHTIIAVLDKNKGGSNIRSIFLDLSDITRKWCFYRHAFAMMRDLRYLKIYSTHCPQECESDIKLNFPEGLLLPLNEVRYLHWLKFPLKEVPQDFNPGNLVDLKLPYSEIERVWEDNKDAPKLKWVNLNHSKKLNTLAGLGKAQNLQELNLEGCTALKEMHVDMENMKFLVFLNLRGCTSLKSLPEIQLISLKTLILSGCSKFKTFQVISDKLEALYLDGTAIKELPCDIGRLQRLVMLNMKGCKKLKRLPDSLGQLKALEELILSGCSKLNEFPETWGNMSRLEILLLDETAIKDMPKILSVRRLCLNKNEKISRLPDLLNKFSQLQWLHLKYCKNLTHVPQLPPNLQYLNVHGCSSLKTVAKPLVCSIPMKHVNSSFIFTNCNELEQAAKEEIVVYAERKCHLLASALKRCDESCVPEILFCTSFPGCEMPSWFSHDAIGSMVEFELPPHWNHNRLSGIALCVVVSFKNCKSHANLIVKFSCEQNNGEGSSSSITWKVGSLIEQDNQEETVESDHVFIGYTNCLDFIKLVKGQGGPKCAPTKASLEFSVRTGTGGEATLEVLKSGFSFVFEPEENRVPSPRNDDVKGKVKINKTPSANGCFKDQAKGNESPKGQWQTYIENSSTNIPSEAHSSQKTGFGSTLLC

SEQ ID NO: 102349 - DNA, 3888 bp, Arabidopsis thaliana
  CDS (1)..(3888)
atggcttctcttccttcttcttcttcttcttcttcttcaacagtgtggaaaacggacgttttcgtgagttttagaggagaagatgtgcgtaaaacattcgtgagccatctattctgcgagtttgatcggatggggattaaagctttcagagacgatttggatctacagagaggaaaatccatctcccctgagcttatagatgcgatcaaaggctccagatttgccattgttgtggtctctaggaactacgcagcttcaagctggtgcttagacgagctcttgaagatcatggaatgtaataaagatacgattgtacccattttctacgaggttgatccttcggatgtgagaagacagagaggaagtttcggtgaagatgttgagagtcacagtgacaaggagaaagtggggaaatggaaagaagctttgaagaaattagctgccatttctggtgaagattctcggaattggagggatgactcaaagctgattaagaagattgttaaagacatttctgataaattggtttctacttcatgggatgattcaaaaggtttgattggaatgagttctcatatggactttctgcagtctatgatatctatagtggacaaggatgttcgaatgttggggatttggggaatgggtggagttgggaaaactacgattgccaaatacttatacaatcaactctcaggtcaatttcaagttcattgcttcatggagaatgtgaaggaagtctgtaacagatatggagttaggcgtttacaagtggagtttttatgcagaatgtttcaagagagagacaaagaagcgtggagttcggtttcttgttgcaatataataaaggaaaggttcaggcacaaaatggttttcattgttcttgacgatgtagatagatctgagcaactgaatgaattggtgaaggagactggttggtttggtccgggaagcagaatcatcgtgacaacacgggatagacatttgctactttcccatggaataaatttggtgtataaagtgaagtgtttacccaaaaaagaagctctccagctcttttgtaattatgctttcagagaagagattatacttccacatgggtttgaggagttatcggttcaagctgttaactatgcttctggtcttccactggctctaagagttttaggctccttcctttatcgaagaagccaaattgaatgggaaagtactcttgctaggcttaaaacttaccctcatagtgatatcatggaagttttgagagttagctacgacggattggatgagcaagagaaggctatttttctctatatatcatgtttttataacatgaagcaggttgattatgtcagaaaacttctggatctttgtggctatgctgctgaaatcggaataacgatacttaccgagaagtctttgatagttgaatcaaatggatgcgtaaagatacatgatttgcttgaacagatgggtagagagcttgttcgtcaacaagcagttaacaacccagcccaacggttactattatgggatcctgaagacatatgtcatttgctgtcagaaaattctggaacacaacttgttgaaggaatctctctgaacctctctgaaatttctgaggtatttgctagtgatcgagcgttcgagggattgtctaatctcaaacttctcaacttctatgatctttcgtttgatggagagactagagtgcatctacctaatggcctcagttatctcccacgcaagcttcgttatctccgttgggatggataccctttaaagactatgccttcaagattttttcctgagtttcttgttgaactttgtatgagtaatagcaatcttgaaaaactttgggatgggatccagcctctgaggaacttgaagaagatggatctttctcgctgtaaataccttgtcgaagttccagacctctcaaaagccacaaatctggaggaactaaacctttcctattgccaaagcttggttgaggttactccatctatcaagaacctaaagggactttcttgcttctacttgactaattgcatccaactcaaggacattccgattggaataattttgaagtcgcttgaaacagtgggaatgagtggatgctcaagcctaaagcattttccagaaatttcttggaatactagaagactctatctgagcagtacaaagatagaggaacttccatcatcaatcagccgtctctcttgtctggttaaattggatatgtcagattgtcagagactcaggactcttccaagctatctagggcacttggtctcactgaaatccctgaatttggacggttgcagacgtcttgagaacctcccagacacgttacagaatctaacatctcttgaaacgcttgaagtgtctggttgccttaatgtcaacgagttccctcgtgtttccacgagtatagaagttctgcgtatatctgagacatcaattgaagaaattcctgcaaggatctgtaatctctctcagcttaggtccttggatatctcagaaaacaaaagacttgcatcacttccggtaagcatttctgagctaagatcacttgaaaagctcaagctttctggatgttctgtactcgagagttttccactagaaatttgtcagacaatgagctgcttgaggtggtttgatttagataggactagcattaaagaactacctgaaaacattgggaatttagtagctcttgaggtgcttcaagccagtagaacagtgataaggcgagcaccatggtctattgcacgacttacccgtcttcaagttttagcgattgggaatagtttctttactccagaaggtttgttgcattctctttgtcctcccttatcaaggtttgatgacttgagagctctgagcctaagcaacatgaacatgacagagattcctaacagtattggtaacttatggaatctactagaactagatttgagtgggaacaattttgaattcatccccgcaagcatcaaacggctcaccaggttgaacagactgaatttaaacaattgccagagacttcaagcattgcccgatgagcttccacgaggtctcttgtatatctacatccatagctgcacatcactagtgagtatctcaggttgcttcaaccaatattgtctgcgaaagcttgtagctagcaactgttacaaattggatcaagcagcgcagattctcattcaccgtaacttgaagctagagtcagcaaaaccagaacactcttattttcctggaagtgacatacccacttgcttcaatcaccaagtcatgggtccttcgctgaatatacagttacctcagagtgaatcatcgtctgacattctgggattttctgcctgcatcatgattggagttgatggacagtacccgatgaacaatctgaagatacactgctcttgtatattaaaagatgctgatgcttgtgagctggttgttatggatgaggtgtggtatcctgatccaaaagctttcacaaacatgtattttggatcagatcaccttctcttattcagcagaacctgcacgtccatggaagcttacagcgaagccctgtttgaattctcagtcgaaaacacagaaggagattcctttagcccgcttggagaggttaaaaaatgtgcggtacaccttatatcactcaaagacatgatgcaagagttctctaatgactctgacaaaattcagagttctgatttggatcttccaaaggcatttgatgacgcaagaattttgaaaagaagagcatatgaaactgagttcttgcataaggaacaactaaatcccaagaggatcaagtttcttccagttcctttggctcgagagcgtcattccaaattacatcagcgaaatgtcatacgaaagtaa

SEQ ID NO: 102350 - protein, 1295 aa, Arabidopsis thaliana
MASLPSSSSSSSSTVWKTDVFVSFRGEDVRKTFVSHLFCEFDRMGIKAFRDDLDLQRGKSISPELIDAIKGSRFAIVVVSRNYAASSWCLDELLKIMECNKDTIVPIFYEVDPSDVRRQRGSFGEDVESHSDKEKVGKWKEALKKLAAISGEDSRNWRDDSKLIKKIVKDISDKLVSTSWDDSKGLIGMSSHMDFLQSMISIVDKDVRMLGIWGMGGVGKTTIAKYLYNQLSGQFQVHCFMENVKEVCNRYGVRRLQVEFLCRMFQERDKEAWSSVSCCNIIKERFRHKMVFIVLDDVDRSEQLNELVKETGWFGPGSRIIVTTRDRHLLLSHGINLVYKVKCLPKKEALQLFCNYAFREEIILPHGFEELSVQAVNYASGLPLALRVLGSFLYRRSQIEWESTLARLKTYPHSDIMEVLRVSYDGLDEQEKAIFLYISCFYNMKQVDYVRKLLDLCGYAAEIGITILTEKSLIVESNGCVKIHDLLEQMGRELVRQQAVNNPAQRLLLWDPEDICHLLSENSGTQLVEGISLNLSEISEVFASDRAFEGLSNLKLLNFYDLSFDGETRVHLPNGLSYLPRKLRYLRWDGYPLKTMPSRFFPEFLVELCMSNSNLEKLWDGIQPLRNLKKMDLSRCKYLVEVPDLSKATNLEELNLSYCQSLVEVTPSIKNLKGLSCFYLTNCIQLKDIPIGIILKSLETVGMSGCSSLKHFPEISWNTRRLYLSSTKIEELPSSISRLSCLVKLDMSDCQRLRTLPSYLGHLVSLKSLNLDGCRRLENLPDTLQNLTSLETLEVSGCLNVNEFPRVSTSIEVLRISETSIEEIPARICNLSQLRSLDISENKRLASLPVSISELRSLEKLKLSGCSVLESFPLEICQTMSCLRWFDLDRTSIKELPENIGNLVALEVLQASRTVIRRAPWSIARLTRLQVLAIGNSFFTPEGLLHSLCPPLSRFDDLRALSLSNMNMTEIPNSIGNLWNLLELDLSGNNFEFIPASIKRLTRLNRLNLNNCQRLQALPDELPRGLLYIYIHSCTSLVSISGCFNQYCLRKLVASNCYKLDQAAQILIHRNLKLESAKPEHSYFPGSDIPTCFNHQVMGPSLNIQLPQSESSSDILGFSACIMIGVDGQYPMNNLKIHCSCILKDADACELVVMDEVWYPDPKAFTNMYFGSDHLLLFSRTCTSMEAYSEALFEFSVENTEGDSFSPLGEVKKCAVHLISLKDMMQEFSNDSDKIQSSDLDLPKAFDDARILKRRAYETEFLHKEQLNPKRIKFLPVPLARERHSKLHQRNVIRK

SEQ ID NO: 102351 - DNA, 3459 bp, Arabidopsis thaliana
  CDS (1)..(3459)
atggctacttcttcctcttcttgcaattgggtttacgacgtcttcccaagcttcagtggagaagatgtccgcaaaacatttctcagccatcttcagttggtacttgatcgcaaactaatcacgagtttcaaagataatgagatcgagagaagccaatcaatagctccagagcttgtccaagggattaaggattcaaggattgctatcgtgatcttctccaaaaactacgcctcttcaagctggtgtttgaacgagcttttggagattgtgtcttgcaaagaagacaagggtcaactagtgatacctgttttctacgctttggatcctactcatgtcaggaaacagaccggtgattttggaatggcttttgaaaggacttgtctgaacaaaacagaggatgagaaaaatctttggagggtagctttaacacatgtcgctaacattcttggatatcattctgcgcaatgtagagccaacccggacgactacaacatgaagttgcatttgcaagaaacgtttctgtctacaattttagggaaacagaatataaagatagatcatttaggtgccttgggagagaggctaaaacaccagaaagttcttttatttattgatgatttagatcaacaagtggtgcttaacgccttggcgggtcaaattcaatggtttggaagtgggagtagaatcattgtggttacaaatgataagcatcttctaatatcccatgggattgaaaacatataccaggtttgtctcccatctaaagaactcgcccttgagatgttatgtcgatatgcttttaggcaaaacactccacctgatggcttcaagaagctggcagttgaagttgtgaggcatgcaggtattcttcctttgggtcttaacgttctaggttcgtatttgcgggggaggaacaaaaggtattggatggatatgctaccgaggcttcgaaaaggtctagatgggaaaatacagaaggctctaagagttggctatgatgggttggataacaaaaaagatgaagctatatttcgtcatatcgcatgtcttttcaattttgagaaagtcaatgacattaggctgctgctagcggatagtgacttgaattttaatattggtcttgaaaacttagtggataagtccctcgttaatgtaagatcaaatattgtggagatgcattgtttgctacaagaaatgggtagggaaatcgtccgagcacagtccaatgaggctggagaacgtgaattccttatggatacagaggatatatgcgatgtacttgatgataatattggtacaaaaaagatgttaggtatatcactagatgtagatgagattgatcatgagctgaatgtacatgagaaagcatttcaagggatgcgtaatcttcgttttctaaacatttacactaaggcattgatgtcagggcaaaaaatcagattgcacttacccgaaaactttgactatttgccgcctaagcttaaactattatgttgggacaaatacccaatgagatgtctaccttctagctttcgtcctgaaaacctcgttaagctcaaaatgcaagagagcgagcttgagaagttgtgggaaggagttgggtcgcttacatgcttgaaagacatggatttggagaaatctaaaaacctaaaagaaataccagatctttctatggcgaccaatctcaagacacttaatcttaagtactgctcgagtctggtgaagatttcttcctctattcagaatctcaataaactgacaaagttaaacatggaaggatgtacaaatttggagactcttccagctggtatcaaccttaaatctcttcaccgcctagatctcagaggatgctcacgtttgaggatgtttcctgatatctcaaacaatatctcagtgctttttctagacaagacatctattgaagagttcccctctaacttgcatcttaagaaactctttgatcttagcatgcaacaaatgaacagtgagaaactatgggaaggagtgcagccgcttacttgcctcatgaagatgttgtctcctcctttggcaaaaaatttcaacacactgtatctctcagatatcccaagtttggtggagcttccttgcggtattcaaaatctcaaaaaacttatggagttgagcattagacgatgcaagaatctggagtctcttcccactggtgctaacttcaaatatctggattaccttgatctcagtggatgttcaaagttgaggagttttcctgatatctcaagcaccatctcatgtctttgtctaaacagaacagggatcgaggaagttccttcgtggattgagaactttgttaggctcacatacctaactatgttggagtgcaacaagttgaaatatgtatccctaaatatatttaagctaaaacatcttgacaaggctgacttttcagactgtgggacattgactgaagttagctggtgcaacaaaacaatttccgtggcggcggcgacagcagataatatccagccaaagttactagtgtctgaggcctcctcttccctatgtgtccagaaatctgtggttagattcataaactgctttaaattggatcaggaagctctccttcaacaagaaccggttttcaagagcttgatcttgggaggtgaagaagtgcctgcatattttaatcaccgagctactggaaactccttggtcatccctctagttccgacctctatctctctggattttttaggattcagggcttgcgccttggttgatgttaaagctatgtccatgcctggtagagtagatatccaggtatcttgtcggtttagaggcagtctcaagaaccattttgattctgctgatcactcacacagtctagtggcctttcacaaggctagtcatctgcttatatttgactgtcgtttcgctctaaacaatgacagtaatcctctgaactacgctcatatggatataacgtttcatctcactactgactctgtgagcaaaataaatgcatgtggtatacggttctctgagggggtttcaccgcagaaacacctaaatggtccaagtagtattgtacatgtctgtgaagccgatgaaagcaagttggataatgatagaagacatgcccatgagactgaacacggtgaagagtgtggagacagcaatgtagagacagtggtaagcaggaagcgaatcaagaacaagaagaagaagaagaagaacaagggtttgaagaatccgaacaagaagaggaagacgagtcttaagaagaacaagggtttgaagaatccgaagaggaagacgagtcttaacaatgttttaaagtatccactcgctgatcattactctcctgaccaaatttcacaactaattcagtccttagaacctcatgtctctaaagtccgagaaagattcgttttgttgagtcgtagaaacagaagcagacaaaaccggatcatcagagtttag

SEQ ID NO: 102352 - protein, 1152 aa, Arabidopsis thaliana
MATSSSSCNWVYDVFPSFSGEDVRKTFLSHLQLVLDRKLITSFKDNEIERSQSIAPELVQGIKDSRIAIVIFSKNYASSSWCLNELLEIVSCKEDKGQLVIPVFYALDPTHVRKQTGDFGMAFERTCLNKTEDEKNLWRVALTHVANILGYHSAQCRANPDDYNMKLHLQETFLSTILGKQNIKIDHLGALGERLKHQKVLLFIDDLDQQVVLNALAGQIQWFGSGSRIIVVTNDKHLLISHGIENIYQVCLPSKELALEMLCRYAFRQNTPPDGFKKLAVEVVRHAGILPLGLNVLGSYLRGRNKRYWMDMLPRLRKGLDGKIQKALRVGYDGLDNKKDEAIFRHIACLFNFEKVNDIRLLLADSDLNFNIGLENLVDKSLVNVRSNIVEMHCLLQEMGREIVRAQSNEAGEREFLMDTEDICDVLDDNIGTKKMLGISLDVDEIDHELNVHEKAFQGMRNLRFLNIYTKALMSGQKIRLHLPENFDYLPPKLKLLCWDKYPMRCLPSSFRPENLVKLKMQESELEKLWEGVGSLTCLKDMDLEKSKNLKEIPDLSMATNLKTLNLKYCSSLVKISSSIQNLNKLTKLNMEGCTNLETLPAGINLKSLHRLDLRGCSRLRMFPDISNNISVLFLDKTSIEEFPSNLHLKKLFDLSMQQMNSEKLWEGVQPLTCLMKMLSPPLAKNFNTLYLSDIPSLVELPCGIQNLKKLMELSIRRCKNLESLPTGANFKYLDYLDLSGCSKLRSFPDISSTISCLCLNRTGIEEVPSWIENFVRLTYLTMLECNKLKYVSLNIFKLKHLDKADFSDCGTLTEVSWCNKTISVAAATADNIQPKLLVSEASSSLCVQKSVVRFINCFKLDQEALLQQEPVFKSLILGGEEVPAYFNHRATGNSLVIPLVPTSISLDFLGFRACALVDVKAMSMPGRVDIQVSCRFRGSLKNHFDSADHSHSLVAFHKASHLLIFDCRFALNNDSNPLNYAHMDITFHLTTDSVSKINACGIRFSEGVSPQKHLNGPSSIVHVCEADESKLDNDRRHAHETEHGEECGDSNVETVVSRKRIKNKKKKKKNKGLKNPNKKRKTSLKKNKGLKNPKRKTSLNNVLKYPLADHYSPDQISQLIQSLEPHVSKVRERFVLLSRRNRSRQNRIIRV

SEQ ID NO: 102353 - DNA, 3663 bp, Arabidopsis thaliana
  CDS (1)..(3663)
atgggttctgtaatgagcttgggctgttccaagaggaaagcaacaaatcaggatgttgattccgaatctcgtaaaagacgaaagatatgctcaacaaacgatgctgagaattgcagattcattcaggatgagtcatcttggaaacatccatggagtttatgtgccaacagagtcatcagtgtggcagccgtagctttaacaaatttcagattccaacaagataaccaagaaagtaattcttcttctttatctcttccctcccctgcaacttctgtgtctcgaaactggaaacacgatgtcttcccgagcttccacggagcagatgtccgaagaacctttcttagtcacatcatggaatcgttcagaagaaagggaattgacacattcattgataataatatagagaggagtaagtcgatcggtcctgagctcaaagaagctatcaaaggatcaaagatcgcaatcgttttgctctcaagaaaatatgcttcttcgtcttggtgtcttgatgagttggccgagatcatgaaatgcaggcaaatggtgggtcagattgtcatgaccattttctatgaagttgatccaactgacataaagaaacagaccggtgaatttggaaaagccttcacaaaaacatgtagaggtaaaccaaaagagcaagttgagagatggagaaaagctttggaggatgtggcaacaatcgccggatatcattctcacagctggaggaatgaagcagacatgattgagaaaatatccactgatgtttcaaacatgttaaatagtttcacaccatcaagagatttcgacgggttagtagggatgagagctcatatggatatgctggaacaattgttgcgcctagatttggatgaagtaaggatgatcgggatttggggaccgcctgggattggtaagacaactatcgccagatttctgtttaatcaagtctccgacagattccaacttagtgcaatcatggtcaatatcaaaggatgctatccaagaccttgtttcgatgagtacagtgcacaattgcaactacaaaaccaaatgttgtcccagatgatcaatcataaagatatcatgatttctcatttaggagtggctcaagaacggttgagagacaagaaagtgtttcttgttctcgatgaagtggatcaattaggacaactagatgccttggcgaaagaaactcgatggtttggtcctggaagtcggattattatcacaacagaagatctaggagttttgaaggctcatgggatcaatcatgtttacaaggtcgaatatccatcaaatgacgaggcttttcaaatcttctgtatgaatgcctttggtcagaaacaaccacatgaaggtttcgatgagattgcttgggaagttacctgccttgctggtgaacttcctttgggattgaaggttctaggctctgctttgcgggggaagtccaagcgagagtgggaaagaacactaccaaggttaaaaactagcctcgacggaaaaatcgggagcattatacagttcagttacgatgtcttatgtgacgaagataaatatctatttctttatatagcctgtctttttaacggcgaatcaacaaccaaagtgaaagagcttcttggaaagttcttggatgtgaaacaaggtcttcacttattagctcagaaatctctcatatcctttgatggagaaagaatacatatgcatactctgctcgaacaattcggaagagaaacttctcgtaagcaattcgttcatcatggctttacgaaacgtcagcttttggttggtgcaaggggtatatgtgaagtgctcgacgatgatacaacagatagtagacgttttatagggatacatttggagttgtctaataccgaggaagaattgaatataagtgagaaagtacttgaaagagtgcatgattttcatttcgttagaatcgatgctagttttcaacctgagagactgcagttagcactacaagatctgatttatcattctccaaagattagatcactgaactggtatggttacgagagtttatgtttgccttcaacttttaatccggagtttctggtcgaacttgatatgcgttccagcaatcttcggaagctatgggaaggaactaaacaacttagaaatctcaagtggatggatttgagttattctagttatctgaaagagcttcccaatctttcaactgcaactaatctcgaagaattaaagcttagaaattgctcaagtttagtggagctcccctcctctattgaaaaactcacgagtctccaaatattagatcttgaaaattgttcgagtcttgagaagctccccgctatcgagaatgcgactaagctccgtgaattgaagctccaaaattgctcaagtctaatagagctccctctttctattggaactgccacaaatctgaagcaattgaatattagcggatgctcaagtctcgtgaaactcccatcctcaattggagatatcactgatctcgaagtgtttgatctatctaactgctcaagtctggtgacgcttccttcctctataggaaaccttcaaaacttgtgcaagttaattatgagaggatgctcaaagctagaggctcttccaatcaacatcaacttgaaatctctcgatacacttaatctcacagattgctctcagttgaaaagttttcctgagatctccacacacatttcagagctcaggttaaaaggaactgcaataaaagaagttcccttgtcgatcatgtcgtggtctcctcttgctgactttcagatttcatactttgaaagcctcatggaattcccgcatgcttttgacatcatcacgaagctgcatttgagcaaagatatacaagaagttcctccatgggtcaagagaatgtctcgtttacgtgatcttagtctcaacaactgcaataatctggtatcactcccccaactttcagattcccttgattacatatatgcagataattgtaagtccctcgagagactggattgttgctttaacaatccagagatccgtctctatttccccaaatgcttcaaactgaatcaagaagccagagatctcatcatgcacacttgtatagatgcgatgtttccaggtacacaagtgcctgcctgcttcattcatcgagctacttctggggattccttgaaaatcaagttgaaggagtcgcctcttcctacaaccttgagatttaaggcttgtatcatgcttgttaaggttaatgaagaactgatgagttatgatcagacaccgatgatcgttgacattgtcatcagggacgaacataatgatctcaaagaaaagatatatccaagcatatatccaagcatatatccacttttaacagagcatatatacacatttgaacttgacgtagaggaggtgacttccacggagcttgtctttgagttcccacaactcaacaaaagaaattggaagataggagaatgcgggatactccaaagagaaacgagatcacttcgccggagctcttcgccggatctctcgccggaatcttctcgtgcgttctctctctctctctcactctctccttctatctctctgtctcatgaattggttaatgattcgatttctcctaatgggtttcaggtgtttctagctacgaccactgtttga

SEQ ID NO: 102354 - protein, 1220 aa, Arabidopsis thaliana
MGSVMSLGCSKRKATNQDVDSESRKRRKICSTNDAENCRFIQDESSWKHPWSLCANRVISVAAVALTNFRFQQDNQESNSSSLSLPSPATSVSRNWKHDVFPSFHGADVRRTFLSHIMESFRRKGIDTFIDNNIERSKSIGPELKEAIKGSKIAIVLLSRKYASSSWCLDELAEIMKCRQMVGQIVMTIFYEVDPTDIKKQTGEFGKAFTKTCRGKPKEQVERWRKALEDVATIAGYHSHSWRNEADMIEKISTDVSNMLNSFTPSRDFDGLVGMRAHMDMLEQLLRLDLDEVRMIGIWGPPGIGKTTIARFLFNQVSDRFQLSAIMVNIKGCYPRPCFDEYSAQLQLQNQMLSQMINHKDIMISHLGVAQERLRDKKVFLVLDEVDQLGQLDALAKETRWFGPGSRIIITTEDLGVLKAHGINHVYKVEYPSNDEAFQIFCMNAFGQKQPHEGFDEIAWEVTCLAGELPLGLKVLGSALRGKSKREWERTLPRLKTSLDGKIGSIIQFSYDVLCDEDKYLFLYIACLFNGESTTKVKELLGKFLDVKQGLHLLAQKSLISFDGERIHMHTLLEQFGRETSRKQFVHHGFTKRQLLVGARGICEVLDDDTTDSRRFIGIHLELSNTEEELNISEKVLERVHDFHFVRIDASFQPERLQLALQDLIYHSPKIRSLNWYGYESLCLPSTFNPEFLVELDMRSSNLRKLWEGTKQLRNLKWMDLSYSSYLKELPNLSTATNLEELKLRNCSSLVELPSSIEKLTSLQILDLENCSSLEKLPAIENATKLRELKLQNCSSLIELPLSIGTATNLKQLNISGCSSLVKLPSSIGDITDLEVFDLSNCSSLVTLPSSIGNLQNLCKLIMRGCSKLEALPININLKSLDTLNLTDCSQLKSFPEISTHISELRLKGTAIKEVPLSIMSWSPLADFQISYFESLMEFPHAFDIITKLHLSKDIQEVPPWVKRMSRLRDLSLNNCNNLVSLPQLSDSLDYIYADNCKSLERLDCCFNNPEIRLYFPKCFKLNQEARDLIMHTCIDAMFPGTQVPACFIHRATSGDSLKIKLKESPLPTTLRFKACIMLVKVNEELMSYDQTPMIVDIVIRDEHNDLKEKIYPSIYPSIYPLLTEHIYTFELDVEEVTSTELVFEFPQLNKRNWKIGECGILQRETRSLRRSSSPDLSPESSRAFSLSLSLSPSISLSHELVNDSISPNGFQVFLATTTV

SEQ ID NO: 102355 - DNA, 3600 bp, Arabidopsis thaliana
  CDS (1)..(3600)
atgggttctgtaatgagcttgggctgttccaagaggaaagcaacgagtcaggatgttgattccgaatctcgtaaaagacgaaagatatgctcaacaaacgatgctgagaattgcagattcattcaggatgagtcatcttggaaacatccatggagtttatgtgtcaacgtggcagccgcagcttttacaaaattcagattccaacaagacaacaaatatactaaatcttctgctttatctcttccatctcctccaacttcagtgtctcgaatctggaaacaccacgtcttcccgagcttccacggggcagatgttcgaaaaaccattcttagtcacatcctcgaatcgttcagaagaaagggaattgacccatttattgataataatatagagaggagtaagtcgatcggtcatgagctcaaagaagctatcaaaggatcaaagatcgcgatcgtcttgctctcaaagaactatgcttcttcatcttggtgccttgatgaattagcagaaatcatgaagtgtagggaattgttgggtcagatagtcatgactattttctatgaagtggatccaactgacataaagaaacagaccggtgaatttggaaaagccttcacaaaaacatgtaaaggtaaaacaaaagagtatgttgagagatggagaaaagctttggaggatgtggccacaatcgccggagaacattctcgcaactggaggaatgaagcagacatgattgagaaaatagccactgatgtttcaaacatgttaaatagtttcacaccatcaagagatttcgacgggttagtagggatgagagctcatatggatatgctggaacaattgttgcgcctagatttggatgaagtaaggatgatcgggatttggggaccgcctgggattggtaagacaactatcgccagatttctgtttaatcaagtctccgacagattccaacttagtgccatcattgtgaatatcagaggaatctatccaagaccttgtttcgatgagtacagtgcacaattgcaactacaaaaccaaatgttgtcccagatgatcaatcataaagatatcatgatttctcatttaggagtggctcaagaacggttgagagacaagaaagtgtttcttgttctcgatgaagtggatcaattaggacaactagatgccttggcgaaagaaactcgatggtttggtcctggaagtcggattattatcacaacagaagatctaggagttttgaaggctcatgggataaatcatgtttacaaagtgaaatatccatcaaatgacgaggcttttcaaatcttctgtatgaatgcctttggtcagaaacaaccacatgaaggtttcgatgagattgcatgggaagttatggctttagctggtgaactccctttgggattgaaggttctaggctctgctttgcgggggaagtccaagccagagtgggaaagaacactaccaaggttaaaaactagcctcgacggaaatatcgggagcattatacagttcagttacgatggcttatgtgacgaagataaatatctccttctttatatagcctgcctttttaactacgaatcaacaaccaaagtggaagaggttcttgcaaacaagttcttggatgtgaaacaaggtcttcacgtattagctcagaaatctctcatatccattgatgagaattccttatatggagacacaataaatatgcatactttgctcagacaattcggaagagaaacttctcgtaagcaattcgtttatcatggctttacgaaacgtcagcttttggttggtgaaagggatatatgtgaagtacttagtgacgatacaatagatagtaggcgttttatagggataactttcgatttatttgggactcaggattatttgaatataagtgagaaagctcttgaaagaatgaatgattttgaattcgttagaatcaatgctctcattccaactgagagactgcagttagcactacaagatttgatttgtcattctccaaagattagatcactgaagtggtatagttaccagaatatatgtttgccttctacttttaatccggagtttctcgtcgaactacatatgagtttcagcaagcttcggaagctatgggaaggaactaaacaacttagaaatctcaagtggatggatttgagtaattctgaagacttgaaagagcttcccaatctttcaactgcaactaatctcgaagaattgaagcttagagattgctcaagtttagtggagctcccctcctctattgaaaaactcaccagtctccagagattatatctccaaaggtgctcaagtcttgtggagcttccctcttttgggaatgcaactaaacttgaggaactatatcttgaaaattgttcgagtcttgagaagctcccaccatctatcaatgccaataatcttcagcaattgtctctaataaattgttcacgtgttgtggagctccccgctatcgagaatgcgactaatctccagaaactagatcttggaaattgctcaagtctaatagagctccctctttctattggaactgccacaaatctgaaggaattgaatattagcggatgctcaagtctcgtgaaactcccatcctcaattggagatatcactaatctcaaagagtttgatctatctaactgctcaaatctggtggagcttccaatcaacatcaacttgaaatttctcgatacacttaatctcgcaggttgctcgcagttgaaaagttttcctgagatctccacaaagatcttcacagattgctatcagagaatgtctcgtttacgtgatcttagaatcaacaactgcaataatctggtatcactcccccaacttccagactcccttgcttacttatatgcagataattgtaagtccctcgagagactggattgttgctttaacaatccagagattagtctcaatttccccaaatgcttcaaactgaatcaagaggccagagatctcatcatgcacacaacttgtataaatgcgacgttacccgggacacaagtgcctgcctgcttcaatcacagagctacttctggggattcattgaaaatcaagttgaaggagtcgtctcttcctacaaccttgagatttaaggcttgtatcatgcttgttaaggttaatgaagaaatgagttctgatctgaaatcgatgatttttgatccgatgcgtgtagacattgtcatcagggacgaacagaatgatctcaaagttcagtgtacaccaagctatcattttataaattattttatcatttcaacagagcatatatacacatttgaacttgaagtagaggaggtgacttccacggagcttgtctttgagttcatactagacaaggaaagcaattggaaacgaaattggaagataggagaatgcgggatactccaaagagaaacgagatcacttcgccggagctcttcgccggatctctcgccggaatcttctcgtgcgttctctctctctctctcactctctccttctatctctctgtctcatgaattggttaatgattcgatttctcctaatgggtttcaggtgtttctagctacgaccactgtttga

SEQ ID NO: 102356 - protein, 1199 aa, Arabidopsis thaliana
MGSVMSLGCSKRKATSQDVDSESRKRRKICSTNDAENCRFIQDESSWKHPWSLCVNVAAAAFTKFRFQQDNKYTKSSALSLPSPPTSVSRIWKHHVFPSFHGADVRKTILSHILESFRRKGIDPFIDNNIERSKSIGHELKEAIKGSKIAIVLLSKNYASSSWCLDELAEIMKCRELLGQIVMTIFYEVDPTDIKKQTGEFGKAFTKTCKGKTKEYVERWRKALEDVATIAGEHSRNWRNEADMIEKIATDVSNMLNSFTPSRDFDGLVGMRAHMDMLEQLLRLDLDEVRMIGIWGPPGIGKTTIARFLFNQVSDRFQLSAIIVNIRGIYPRPCFDEYSAQLQLQNQMLSQMINHKDIMISHLGVAQERLRDKKVFLVLDEVDQLGQLDALAKETRWFGPGSRIIITTEDLGVLKAHGINHVYKVKYPSNDEAFQIFCMNAFGQKQPHEGFDEIAWEVMALAGELPLGLKVLGSALRGKSKPEWERTLPRLKTSLDGNIGSIIQFSYDGLCDEDKYLLLYIACLFNYESTTKVEEVLANKFLDVKQGLHVLAQKSLISIDENSLYGDTINMHTLLRQFGRETSRKQFVYHGFTKRQLLVGERDICEVLSDDTIDSRRFIGITFDLFGTQDYLNISEKALERMNDFEFVRINALIPTERLQLALQDLICHSPKIRSLKWYSYQNICLPSTFNPEFLVELHMSFSKLRKLWEGTKQLRNLKWMDLSNSEDLKELPNLSTATNLEELKLRDCSSLVELPSSIEKLTSLQRLYLQRCSSLVELPSFGNATKLEELYLENCSSLEKLPPSINANNLQQLSLINCSRVVELPAIENATNLQKLDLGNCSSLIELPLSIGTATNLKELNISGCSSLVKLPSSIGDITNLKEFDLSNCSNLVELPININLKFLDTLNLAGCSQLKSFPEISTKIFTDCYQRMSRLRDLRINNCNNLVSLPQLPDSLAYLYADNCKSLERLDCCFNNPEISLNFPKCFKLNQEARDLIMHTTCINATLPGTQVPACFNHRATSGDSLKIKLKESSLPTTLRFKACIMLVKVNEEMSSDLKSMIFDPMRVDIVIRDEQNDLKVQCTPSYHFINYFIISTEHIYTFELEVEEVTSTELVFEFILDKESNWKRNWKIGECGILQRETRSLRRSSSPDLSPESSRAFSLSLSLSPSISLSHELVNDSISPNGFQVFLATTTV

SEQ ID NO: 102357 - DNA, 3654 bp, Arabidopsis thaliana
  CDS (1)..(3654)
atggagacatcatctatttccactgtggaagacaagccaccgcagcatcaggtgttcatcaatttccgtggggcagatttgcgccggagattcgtcagccatctcgtaacggccttgaaattgaacaacatcaacgtctttatcgacgactatgaagacagaggtcaacctctagatgtactgctgaagaggatagaggagtccaaaatcgttttggctatcttctccggcaactacaccgagtcagtctggtgcgtgagagagctggagaagatcaaagattgtacggatgaaggaacactcgttgcgattccaatcttctacaagctggagccatccaccgttagagatttgaaaggaaagttcggtgatagatttaggagtatggctaagggtgatgagaggaaaaagaaatggaaggaagcttttaacttgattcctaacattatgggcatcatcattgacaagaaaagtgtggagagtgagaaagtcaatgaaattgtgaaggcggtgaagacagcgttgaccggaataccaccggagggaagtcacaacgccgtcgtgggtgctttaggtaatagcaacgctggaacttcctcaggagacaaaaagcatgagacttttggaaacgaacaacggttaaaagatttggaagagaagttggatcgtgataaatacaagggaactcgtatcattggagttgttgggatgcccggaattggtaaaaccacactcctgaaagagctatataagacgtggcagggcaagttttcgaggcatgcgctaatcgatcaaatccgtgtaaagtccaagcacttggagttggatcgcttgcctcaaatgctcttaggcgagttgtccaagttaaacaatcctcacgtagacaatctcaaagatccatacagtcaactgcatgaacgcaaagtgcttgttgtacttgatgatgttagtaaaagggaacaaatagatgctcttcgtgagatactagactggattaaggagggtaaggagggaagcagggttgtcattgcaacaagcgacatgtccttaacaaatggtttggttgatgatacttacatggttcaaaatttgaaccacagagatagcttacaactatttcactatcatgcctttattgatgatcaagccaatcctcaaaagaaagatttcatgaagctgtcagaagggtttgtacattacgccagaggccatccactagccctcaaagtattgggtggagagcttaataagaaaagtatggatcattggaattcgaaaatgaagaaacttgcacagagccccagccctaatattgtcagtgtcttccaagtgagttatgatgaattgactacagcgcagaaagatgcatttctcgacatagcctgtttcagatcacaggacaaggattatgtagaaagtctactggcttcatctgaccttggttcggctgaagcaatgagtgcagtcaaatctctcacggataagttcctgattaatacttgtgatggccgagtggagatgcatgatctattatataaattttcaagggaagttgatctgaaggcatctaatcaggatggtagcagacaacggaggctgtggctccatcaacacataatcaagggaggcataatcaatgtattgcaaaataaaatgaaagctgccaatgttagaggtattttcctagacttgtctgaagtggaagacgaaacgagcttagaccgcgaccacttcataaatatgggaaatctccggtatctcaagttctacaattcccattgtccacaggaatgtaaaaccaacaataaaatcaacatccctgataaacttaagctaccattgaaagaagttcgatgcctccactggctgaaattcccattggagacacttccaaacgatttcaacccaattaatcttgtcgaccttaagctgccctacagtgaaacggaacaactttgggagggtgacaaggacacaccatgcttaaggtgggtcgatctcaatcactcaagtaagttgtgcagcttgtcagggttatcaaaagctgaaaagcttcaaaggttgaaccttgaaggttgcacaacactgaaagcgtttccacatgatatgaaaaaaatgaaaatgcttgctttcttgaatctgaaggggtgtacaagtctcgaatctcttccagagatgaatttgatttctctgaaaacacttactctcagcggctgctcaacttttaaggaatttccgttgatttcagataatatagaaactctatacttagatggcacagcaataagtcagcttcctatgaacatggagaagcttcagagacttgttgtattgaatatgaaagactgcaaaatgctagaggaaattccaggccgtgttggtgagctgaaagctcttcaagaactgatactctctgattgtttaaatctcaagattttcccagaaatcgacattagctttttaaacattttacttttggatgggacagccattgaagtgatgccacaattaccctcagtgcagtatttgtgcttaagcagaaatgctaagatcagctgccttcctgttggaatcagtcagctttctcaacttaaatggctggacctgaagtattgtacgagtcttacatcagttccagagtttccaccaaatcttcagtgcttagatgcacacggctgtagttcgctgaagacagtttcaaagcctttggcccgtatcatgccaactgaacagaatcattccacattcattttcaccaactgtgagaacctggaacaagctgcaaaggaggaaatcacatcgtatgctcaaaggaaatgccagctgttatcatatgctcggaaacgctacaatgggggtcttgtttcagaatctttgttcagcacttgctttcctggatgtgaagtgccttcttggttttgtcatgaaacagttggatctgagttagaagtaaaactcctcccacattggcatgacaagaagcttgccgggattgctctatgtgctgtaatctcatgtcttgacccccaagatcaagtcagccgcttgtcagtgacctgcacctttaaagtaaaagatgaagacaagtcttgggtcccatatacttgtccagtaggaagttggaccagacatggaggcgggaaagataagattgagctagaccatgtcttcattggatacaccagttgcccacatactataaaatgtcatgaagaaggtaactcagatgaatgcaatcctaccgaagcctctcttaaatttactgtgacaggaggtacaagtgagaatggaaaatacaaggtgtttaagtgtggtttaagtttggtgtatgctaaggataaagacaaaaatagtgctcttgaaacaaagtacgatatgcttattggaaagagctttcaagaaacttcagaaggggttgatggaagggtaaagaaaacgaaaggaaagtacgttatgcctgttgaaaagaactttcaagaaactacagaaggggttgatggaagagtaaagaaaaagaaaaaaacaagaatggataatggacggccaaagaagaagcagagatcaggaagagatgataatcaaactaggatgcaagtggaactccaagaaggaaatataaattcagtgatcatgcacacggttaagaatttctga

SEQ ID NO: 102358 - protein, 1217 aa, Arabidopsis thaliana
METSSISTVEDKPPQHQVFINFRGADLRRRFVSHLVTALKLNNINVFIDDYEDRGQPLDVLLKRIEESKIVLAIFSGNYTESVWCVRELEKIKDCTDEGTLVAIPIFYKLEPSTVRDLKGKFGDRFRSMAKGDERKKKWKEAFNLIPNIMGIIIDKKSVESEKVNEIVKAVKTALTGIPPEGSHNAVVGALGNSNAGTSSGDKKHETFGNEQRLKDLEEKLDRDKYKGTRIIGVVGMPGIGKTTLLKELYKTWQGKFSRHALIDQIRVKSKHLELDRLPQMLLGELSKLNNPHVDNLKDPYSQLHERKVLVVLDDVSKREQIDALREILDWIKEGKEGSRVVIATSDMSLTNGLVDDTYMVQNLNHRDSLQLFHYHAFIDDQANPQKKDFMKLSEGFVHYARGHPLALKVLGGELNKKSMDHWNSKMKKLAQSPSPNIVSVFQVSYDELTTAQKDAFLDIACFRSQDKDYVESLLASSDLGSAEAMSAVKSLTDKFLINTCDGRVEMHDLLYKFSREVDLKASNQDGSRQRRLWLHQHIIKGGIINVLQNKMKAANVRGIFLDLSEVEDETSLDRDHFINMGNLRYLKFYNSHCPQECKTNNKINIPDKLKLPLKEVRCLHWLKFPLETLPNDFNPINLVDLKLPYSETEQLWEGDKDTPCLRWVDLNHSSKLCSLSGLSKAEKLQRLNLEGCTTLKAFPHDMKKMKMLAFLNLKGCTSLESLPEMNLISLKTLTLSGCSTFKEFPLISDNIETLYLDGTAISQLPMNMEKLQRLVVLNMKDCKMLEEIPGRVGELKALQELILSDCLNLKIFPEIDISFLNILLLDGTAIEVMPQLPSVQYLCLSRNAKISCLPVGISQLSQLKWLDLKYCTSLTSVPEFPPNLQCLDAHGCSSLKTVSKPLARIMPTEQNHSTFIFTNCENLEQAAKEEITSYAQRKCQLLSYARKRYNGGLVSESLFSTCFPGCEVPSWFCHETVGSELEVKLLPHWHDKKLAGIALCAVISCLDPQDQVSRLSVTCTFKVKDEDKSWVPYTCPVGSWTRHGGGKDKIELDHVFIGYTSCPHTIKCHEEGNSDECNPTEASLKFTVTGGTSENGKYKVFKCGLSLVYAKDKDKNSALETKYDMLIGKSFQETSEGVDGRVKKTKGKYVMPVEKNFQETTEGVDGRVKKKKKTRMDNGRPKKKQRSGRDDNQTRMQVELQEGNINSVIMHTVKNF

SEQ ID NO: 102359 - DNA, 3654 bp, Arabidopsis thaliana
  CDS (1)..(3654)
atggagacatcatctatttccactgtggaagacaagccaccgcagcatcaggtgttcatcaatttccgtggggcagatttgcgccggagattcgtcagccatctcgtaacggccttgaaattgaacaacatcaacgtctttatcgacgactatgaagacagaggtcaacctctagatgtactgctgaagaggatagaggagtccaaaatcgttttggctatcttctccggcaactacaccgagtcagtctggtgcgtgagagagctcgagaagatcaaggattgtacggatgaaggaacactcgttgcgattccaatcttctacaagctggagccatccaccgttagagatttgaaaggaaagttcggtgatagatttaggagtatggctaagggtgatgagaggaaaaaaaaatggaaggaagcttttaacttgattcctaacattatgggcatcatcattgacaagaaaagtgtggagagtgagaaagtcaatgaaattgtgaaggcggtaaagacagcgttgaccggaataccaccggagggaagtcacaatgccgtcgtgggtgctttaggtaatagcgacgctggaacttcctcaggagacaaaaagcatgagacttttggaaacgaacaacggttaaaagatttggaagagaagttggatcgtgataaatacaagggaactcgtatcattggagttgttgggatgcccggaattggtaaaaccacactcctgaaagagctatataagacgtggcagggcaagttttcgaggcatgcgctaatcgatcaaatccgtgtaaagtccaagcacttggagttggatcgcttgcctcaaatgctcttaggcgagttgtcgaagttaaacaatcctcacgtagacaatctcaaagatccatacagtcaactgcatgaacgcaaagtgcttgttgtacttgatgatgttagtaaaagggaacaaatagatgctcttcgtgagatactagactggattaaggagggtaaggagggaagcagggttgtcattgcaacaagcgacatgtccttaacaaatggtttggttgatgatacttacatggttcaaaatttgaaccacagagatagcttacaactatttcactatcatgcctttattgatgatcaagccaatcctcaaaagaaagatttcatgaagctgtcagaagggtttgtacattacgccagaggccatccactagccctcaaagtattgggtggagagcttaataagaaaagtatggatcattggaattcgaaaatgaagaaacttgcacagagccccagccctaatattgtcagtgtcttccaagtgagttatgatgaattgactacagcgcagaaagatgcatttctcgacatagcctgtttcagatcacaggacaaggattatgtagaaagtctactggcttcatctgaccttggttcggctgaagcaatgagtgcagtcaaatctctcacggataagttcctgattaatacttgtgatggccgagtggagatgcatgatctattatataaattttcaagggaagttgatctgaaggcatctaatcaggatggtagcagacaacggaggctgtggctccatcaacacataatcaagggaggcataatcaatgtattgcaaaataaaatgaaagctgccaatgttagaggtattttcctagacttgtctgaagtggaagacgaaacgagcttagaccgcgaccacttcataaatatgggaaatctccggtatctcaagttctacaattcccattgtccacaggaatgtaaaaccaacaataaaatcaacatccctgataaacttaagctaccattgaaagaagttcgatgcctccactggctgaaattcccattggagacacttccaaacgatttcaacccaattaatcttgtcgaccttaagctgccctacagtgaaatggaacaactttgggagggtgacaaggacacaccatgcttaaggtgggtcgatctcaatcactcaagtaagttgtgcagcttgtcagggttatcaaaagctgaaaagcttcaaaggttgaaccttgaaggttgcacaacactgaaagcgtttccacatgatatgaaaaaaatgaaaatgcttgctttcttgaatctgaaggggtgtacaagtctcgaatctcttccagagatgaatttgatttctctgaaaacacttactctcagcggctgctcaacttttaaggaatttccgttgatttcagataatatagaaactctatacttagatggcacagcaataagtcagcttcctatgaacatggagaagcttcagagacttgttgtattgaatatgaaagactgcaaaatgctagaggaaattccaggccgtgttggtgagctgaaagctcttcaagaactgatactctctgattgtttaaatctcaagattttcccagaaatcgacattagctttttaaacattttacttttggatgggacagccattgaagtgatgccacaattaccctcagtgcagtatttgtgcttaagcagaaatgctaagatcagctgccttcctgttggaatcagtcagctttctcaacttaaatggctggacctgaagtattgtacgagtcttacatcagttccagagtttccaccaaatcttcagtgcttagatgcacacggctgtagttcgctgaagacagtttcaaagcctttggcccgtatcatgccaactgaacagaatcattccacattcattttcaccaactgtgagaacctggaacaagctgcaaaggaggaaatcacatcgtatgctcaaaggaaatgccagctgttatcatatgctcggaaacgccacaatgggggtcttgtttcagaatctttgttcagcacttgctttcctggatgtgaagtgccttcttggttttgtcatgaaacagttggatctgagttagaagtaaaactcctcccacattggcatgacaagaagcttgccgggattgctctatgtgctgtagtctcatgtcttgacccccaagatcaagtcagccgcttgtcagtgacctgcacctttaaagtaaaagatgaagacaagtcttgggtcccatatacttgtccagtaggaagttggaccagacatggaggcgggaaagataagattgagctagaccatgtcttcattggatacaccagttgcccacatactataaaatgtcatgaagaaggtaactcagatgaatgcaatcctaccgaagcctctcttaaatttactgtgacaggaggtacaagtgagaatggaaaatacaaggtgttgaagtgtggtttaagtttggtgtatgctaaggataaagacaaaaatagtgctcttgaaacaaagtacgatatgcttattggaaagagctttcaagaaacttcagaaggggttgatggaagggtaaagaaaacgaaaggaaagtacgttatgcctgttgaaaagaactttcaagaaactacagaaggggttgatggaagagtaaagaaaaagaaaaaaacaagaatggataatggacggccaaagaagaagcagagatcaggaagagatgataatcaaactaggatgcaagtggaactccaagaaggaaatataaattcagtgatcatgcacacggttaagaatttctga

SEQ ID NO: 102360 - protein, 1217 aa, Arabidopsis thaliana
METSSISTVEDKPPQHQVFINFRGADLRRRFVSHLVTALKLNNINVFIDDYEDRGQPLDVLLKRIEESKIVLAIFSGNYTESVWCVRELEKIKDCTDEGTLVAIPIFYKLEPSTVRDLKGKFGDRFRSMAKGDERKKKWKEAFNLIPNIMGIIIDKKSVESEKVNEIVKAVKTALTGIPPEGSHNAVVGALGNSDAGTSSGDKKHETFGNEQRLKDLEEKLDRDKYKGTRIIGVVGMPGIGKTTLLKELYKTWQGKFSRHALIDQIRVKSKHLELDRLPQMLLGELSKLNNPHVDNLKDPYSQLHERKVLVVLDDVSKREQIDALREILDWIKEGKEGSRVVIATSDMSLTNGLVDDTYMVQNLNHRDSLQLFHYHAFIDDQANPQKKDFMKLSEGFVHYARGHPLALKVLGGELNKKSMDHWNSKMKKLAQSPSPNIVSVFQVSYDELTTAQKDAFLDIACFRSQDKDYVESLLASSDLGSAEAMSAVKSLTDKFLINTCDGRVEMHDLLYKFSREVDLKASNQDGSRQRRLWLHQHIIKGGIINVLQNKMKAANVRGIFLDLSEVEDETSLDRDHFINMGNLRYLKFYNSHCPQECKTNNKINIPDKLKLPLKEVRCLHWLKFPLETLPNDFNPINLVDLKLPYSEMEQLWEGDKDTPCLRWVDLNHSSKLCSLSGLSKAEKLQRLNLEGCTTLKAFPHDMKKMKMLAFLNLKGCTSLESLPEMNLISLKTLTLSGCSTFKEFPLISDNIETLYLDGTAISQLPMNMEKLQRLVVLNMKDCKMLEEIPGRVGELKALQELILSDCLNLKIFPEIDISFLNILLLDGTAIEVMPQLPSVQYLCLSRNAKISCLPVGISQLSQLKWLDLKYCTSLTSVPEFPPNLQCLDAHGCSSLKTVSKPLARIMPTEQNHSTFIFTNCENLEQAAKEEITSYAQRKCQLLSYARKRHNGGLVSESLFSTCFPGCEVPSWFCHETVGSELEVKLLPHWHDKKLAGIALCAVVSCLDPQDQVSRLSVTCTFKVKDEDKSWVPYTCPVGSWTRHGGGKDKIELDHVFIGYTSCPHTIKCHEEGNSDECNPTEASLKFTVTGGTSENGKYKVLKCGLSLVYAKDKDKNSALETKYDMLIGKSFQETSEGVDGRVKKTKGKYVMPVEKNFQETTEGVDGRVKKKKKTRMDNGRPKKKQRSGRDDNQTRMQVELQEGNINSVIMHTVKNF

SEQ ID NO: 102361 - DNA, 3435 bp, Nicotiana glutinosa
  CDS (1)..(3435)
atggcatcttcttcttcttcttctagatggagctatgatgttttcttaagttttagaggcgaagatactcgaaaaacgtttacaagtcacttatacgaagtcttgaatgataagggaataaaaacctttcaagatgataaaaggctagagtacggcgcaaccatcccaggtgaactctgtaaagctatagaagagtctcaatttgccattgttgttttctcagagaattatgcaacatcaaggtggtgtttgaatgaactagtgaagatcatggaatgcaaaactcgatttaagcaaactgttataccgatattctatgatgtggatccatcacatgttcggaaccaaaaggagagctttgcaaaagcctttgaagaacatgaaacaaagtataaggatgatgttgagggaatacaaagatggaggattgctttaaatgaagcggccaatctcaaaggctcctgtgataatcgtgacaagactgatgcagactgtattcgacagattgttgaccaaatctcatccaaattatgcaagatttctttatcttatttgcaaaacattgttggaatagatactcatttagagaaaatagaatccttactagagataggaatcaatggtgttcggattatggggatctggggaatggggggagtcggtaaaacaacaatagcaagagctatatttgatactcttttaggaagaatggatagttcctatcaatttgatggtgcttgtttccttaaggatattaaagaaaacaaacgtggaatgcattctttgcaaaatgcccttctctctgaacttttaagggaaaaagctaattacaataatgaggaggatggaaagcaccaaatggctagtagacttcgttcgaagaaggtcctaattgtgcttgatgatatagataataaagatcattatttggagtatttagcaggtgatcttgattggtttggtaatggtagtagaattattataacaactagagacaagcatttgatagagaagaatgatataatatatgaggtgactgcactacccgatcatgaatccattcaattgttcaaacaacatgctttcggaaaagaagttccaaatgagaattttgagaagctttcattagaggtagtaaattatgctaaaggccttcctttagccctcaaagtgtggggttctttgctgcataacctacgattaactgaatggaaaagtgctatagagcacatgaaaaataactcttattctggaattattgataagctcaaaataagttatgatggattagagcccaaacaacaagagatgtttttagatatagcatgcttcttgcgaggggaagaaaaagattacatcctacaaatccttgagagttgtcatattggagctgaatacgggttacgtattttaattgacaaatctcttgtgttcatctctgaatataatcaggttcaaatgcatgacttaatacaggatatgggtaaatatatagtgaattttcaaaaagatcccggagaacgtagcagattatggctcgccaaggaagtcgaagaagtgatgagcaacaacacagggaccatggcaatggaagcaatttgggtttcttcttattctagtactctacgctttagcaatcaggccgtgaaaaatatgaaaaggcttagggtatttaacatggggaggtcgtcgacacattatgccatcgattatctgcccaacaacttgcgttgttttgtttgcactaactatccttgggagtcatttccatctacatttgaactcaaaatgcttgttcacctccaactccgacacaattctctgcgtcatttatggacagaaacaaagcatttgccgtctctacggaggatagatctcagctggtctaaaagattgacgcgaacaccagatttcacggggatgccaaatttggagtatgtgaatttgtatcaatgtagtaatcttgaagaagttcaccattccctgggatgttgcagcaaagtcattggtttatatttgaatgattgtaaaagccttaagaggtttccatgtgttaacgtggaatctcttgaatatctgggtctaagaagttgcgatagtttagagaaattgccagaaatctacgggagaatgaagccggagatacagattcacatgcaaggctctgggataagggaactaccatcatctatttttcagtacaaaactcatgttaccaagctattgttgtggaatatgaaaaaccttgtagctcttccaagcagcatatgtaggttgaaaagtttggttagtctgagtgtgtcgggttgctcaaaacttgaaagcttgccagaagagataggggatttagacaacttacgggtgtttgatgccagtgatactctaattttacgacctccgtcttccatcatacgcttgaacaaacttataatcttgatgtttcgaggcttcaaagatggagtgcactttgagttccctcctgtggctgaaggattacactcattggaatatctgaatctcagttactgcaatctaatagatggaggacttccggaagagattggatccttatcctctttgaaaaagttggatctcagtagaaataattttgagcatttgccttcaagtatagcccaacttggtgctcttcaatccttagacttaaaagattgccagaggcttacacagctaccagaacttcccccagaattaaatgaattgcatgtagattgtcatatggctctgaaatttatccattatttagtaacaaagagaaagaaactacatagagtgaaacttgatgatgcacacaatgatactatgtacaatttgtttgcatataccatgtttcagaatatctcttccatgaggcatgacatctctgcttcagattccttgtcactaacagtatttaccggtcaaccgtatcctgaaaagatcccgagttggttccaccatcagggttgggatagtagtgtatcagtcaatttgcctgaaaattggtatatacctgataaattcttgggatttgctgtatgttactctcgtagcttaattgacacaacagctcacttgattcccgtatgtgatgacaagatgtcgcgcatgacccagaaacttgccttatcagaatgtgatacagaatcatccaactattcagaatgggatatacattttttctttgtaccttttgctggcttatgggatacatctaaggcaaatggaaaaacaccaaatgattatgggattattaggctatctttttctggagaagagaagatgtatggacttcgtttgttgtataaagaaggaccagaggttaatgccttgttacaaatgagggaaaatagcaatgaaccaacagaacattccactgggataaggaggactcaatataacaacagaacttccttttatgagctcatcaatgggtga

SEQ ID NO: 102362 - protein, 1144 aa, Nicotiana glutinosa
MASSSSSSRWSYDVFLSFRGEDTRKTFTSHLYEVLNDKGIKTFQDDKRLEYGATIPGELCKAIEESQFAIVVFSENYATSRWCLNELVKIMECKTRFKQTVIPIFYDVDPSHVRNQKESFAKAFEEHETKYKDDVEGIQRWRIALNEAANLKGSCDNRDKTDADCIRQIVDQISSKLCKISLSYLQNIVGIDTHLEKIESLLEIGINGVRIMGIWGMGGVGKTTIARAIFDTLLGRMDSSYQFDGACFLKDIKENKRGMHSLQNALLSELLREKANYNNEEDGKHQMASRLRSKKVLIVLDDIDNKDHYLEYLAGDLDWFGNGSRIIITTRDKHLIEKNDIIYEVTALPDHESIQLFKQHAFGKEVPNENFEKLSLEVVNYAKGLPLALKVWGSLLHNLRLTEWKSAIEHMKNNSYSGIIDKLKISYDGLEPKQQEMFLDIACFLRGEEKDYILQILESCHIGAEYGLRILIDKSLVFISEYNQVQMHDLIQDMGKYIVNFQKDPGERSRLWLAKEVEEVMSNNTGTMAMEAIWVSSYSSTLRFSNQAVKNMKRLRVFNMGRSSTHYAIDYLPNNLRCFVCTNYPWESFPSTFELKMLVHLQLRHNSLRHLWTETKHLPSLRRIDLSWSKRLTRTPDFTGMPNLEYVNLYQCSNLEEVHHSLGCCSKVIGLYLNDCKSLKRFPCVNVESLEYLGLRSCDSLEKLPEIYGRMKPEIQIHMQGSGIRELPSSIFQYKTHVTKLLLWNMKNLVALPSSICRLKSLVSLSVSGCSKLESLPEEIGDLDNLRVFDASDTLILRPPSSIIRLNKLIILMFRGFKDGVHFEFPPVAEGLHSLEYLNLSYCNLIDGGLPEEIGSLSSLKKLDLSRNNFEHLPSSIAQLGALQSLDLKDCQRLTQLPELPPELNELHVDCHMALKFIHYLVTKRKKLHRVKLDDAHNDTMYNLFAYTMFQNISSMRHDISASDSLSLTVFTGQPYPEKIPSWFHHQGWDSSVSVNLPENWYIPDKFLGFAVCYSRSLIDTTAHLIPVCDDKMSRMTQKLALSECDTESSNYSEWDIHFFFVPFAGLWDTSKANGKTPNDYGIIRLSFSGEEKMYGLRLLYKEGPEVNALLQMRENSNEPTEHSTGIRRTQYNNRTSFYELING

SEQ ID NO: 102363 - DNA, 3261 bp, Glycine max
  CDS (1)..(3261)
atggctgcaacgacacgttcccttgcatccatctatgatgtgttcctcagcttcagagggacagacacacgctatggttttactggcaatctctacaaggctctttgtgacaagggatttcataccttctttgacgaagacaagcttcacagcggagaggaaataacacctgcacttttgaaggcaattcaagattccagggttgctattactgtgctttctcaaaactatgctttttcctcattttgtttagatgaacttgtaaccatctttcactgcaagagggaagggctgttggttataccggtcttttacaaagtagatccttcttatgtcagacaccagaaaggtagttatggagaagcaatgactaagcatcaggaaaggttcaaagataagatggagaagctgcaggaatggaggatggctttgaaacaagtagctgacttgtctggctatcatttcaaagatggagattcatatgaatacgagtttattgggagtattgtcgaggaggtctctaggaagattggtcgtgcttctttacatgttgcggattatccagttggtcaagagtcacaagtgacagaggtaatgaagcttttggatgttggatccgatgatgttgtccatatcatagggatccatggaatgggcgggttaggaaaaacaacacttgctctagaagtttataattcgattgctcgccattttgatgaatcctgttttcttcaaaacgtgagagaagaatcaaagaaacatgggttaaaacaccttcaaagcatcattctttcaaaattacttggtgagaaggacatcaccttaacaagttggcgagaaggagcttcaatgatacaacataggctccgacgaaagaaggttctcttgattttagacgatgttgacaagcgcgagcaattaaaggctattgttggaagatctgattggtttggtcccggtagcagagtcatcattaccactcgggacaaacatctgctaaaatatcatgaggttgaaagaacttatgaggtgaaggttttgaatcacaatgctgctcttcaattgcttacttggaatgcttttaaaagagaaaaaattgatccaagttatgaggacgtcttgaatcgtgtagtaacttatgcttctggccttccattggctttggaaatcataggttccaacatgtttggaaaaactgtagcagaatgggaatctgcggtggaacattataaaagaattcccaatgatgaaatcctagagattctaaaagtaagctttgatgctttgggggaagaacaaaagaatgtttttcttgacattgcttgttgcttcaaagggtataaatggacagaggttgataatatactccgtgacctttatggtaactgcacgaagcatcatattggggtgttggttgaaaaatctctcataaaggttagctgctgtgatactgttgaaatgcacgacatgatccaggacatgggtagagaaattgagcggcagagatcaccagaagagccagggaagtgcaagagattatggttaccaaaagatataattcaagttttaaaagacaacacggggactagtaaaattgaaatcatatgtctggatttctccatatctgacaaagaagaaacagtggaatggaatgaaaacgccttcatgaagatgaaaaaccttaaaatacttattattagaaattgcaaattttccaaaggtcccaattattttccagaaggtttaagagtactggaatggcacagatatccttcaaattgtttaccatctaactttgatcctatcaaccttgttatatgcaagttacctgacagctccattacgtcatttgagttccatggctcatccaagaagctcgggcatctaacagttttaaattttgaccggtgcgaatttttaacaaagatacctgatgtatctgatctcccaaatttgaaggaactttcatttaattggtgtgagagtttagttgcagttgatgactcaattggttttctgaataaacttaaaacattgagtgcttatggttgcaggaagcttacgagttttccgcctctcaacttgacctctcttgaaacacttaaccttggtgggtgttcgagtcttgagtattttccagaaatattaggagagatgaaaaacataacggtacttgctttgcatgaccttcacataaaagaattgccattttcatttcaaaatcttattggactcctgtttttatggctggatagttgtggaattgttcagttacgatgtagcttagccacgatgcccaaactgtctgaattctgtataacggatagttgcaacaggtggcaatgggtagaatcggaagaaggtgaagaaaaagtagtgggctcaatactatcttttgaggccacggactgcaatctatgtgatgattttttttttataggttccaagaggtttgctcatgtaggatatttaaatctaccggggaataatttcacaatccttcctgaattcttcaaagaactgcaatttttaacaactcttgtggtgcatgattgcaagcatcttcaggaaattagagggcttccaccaaacttaaagcatttcgatgcaagaaactgtgcatccttgacttcctcgagtaaaagcatgcttttaaatcaggaactgcatgaggctggaggaatcgagtttgtatttccaggaacaagtataccagagtggttcgatcagcaaagcagtggacattcaatttctttctggtttcgtaataaatttccagccaaacttctttgtcttcatattgcaccgtctactgggtcttttatccggtatccagaggtgttcatcaatggaaaatttcaagaatttgagtcccatgagacggacgatacagaaagtatgttgggattggatcatacacatatctttgatctccaagcgtatgctttcaaaaataataatcagtttgaagaagtggcttgggaaaaggaatggaaccatgtggaggttacatatcaaagtgtgttagacgatgaagaagaagagagtgaagaaggtgtgttagacgatgaagaagaagagagtgaagaaggtgtgttagacgatgaagaagaagagagagaagaaggtgtgttagagttagagagctcagtcattaaagcaattggaatccatatagtcagagaagaaggcagtatggaggaagatattcgatttgatgatccttatctcagcagctctgcatcagactacaaaccatag

SEQ ID NO: 102364 - protein, 1086 aa, Glycine max
MAATTRSLASIYDVFLSFRGTDTRYGFTGNLYKALCDKGFHTFFDEDKLHSGEEITPALLKAIQDSRVAITVLSQNYAFSSFCLDELVTIFHCKREGLLVIPVFYKVDPSYVRHQKGSYGEAMTKHQERFKDKMEKLQEWRMALKQVADLSGYHFKDGDSYEYEFIGSIVEEVSRKIGRASLHVADYPVGQESQVTEVMKLLDVGSDDVVHIIGIHGMGGLGKTTLALEVYNSIARHFDESCFLQNVREESKKHGLKHLQSIILSKLLGEKDITLTSWREGASMIQHRLRRKKVLLILDDVDKREQLKAIVGRSDWFGPGSRVIITTRDKHLLKYHEVERTYEVKVLNHNAALQLLTWNAFKREKIDPSYEDVLNRVVTYASGLPLALEIIGSNMFGKTVAEWESAVEHYKRIPNDEILEILKVSFDALGEEQKNVFLDIACCFKGYKWTEVDNILRDLYGNCTKHHIGVLVEKSLIKVSCCDTVEMHDMIQDMGREIERQRSPEEPGKCKRLWLPKDIIQVLKDNTGTSKIEIICLDFSISDKEETVEWNENAFMKMKNLKILIIRNCKFSKGPNYFPEGLRVLEWHRYPSNCLPSNFDPINLVICKLPDSSITSFEFHGSSKKLGHLTVLNFDRCEFLTKIPDVSDLPNLKELSFNWCESLVAVDDSIGFLNKLKTLSAYGCRKLTSFPPLNLTSLETLNLGGCSSLEYFPEILGEMKNITVLALHDLHIKELPFSFQNLIGLLFLWLDSCGIVQLRCSLATMPKLSEFCITDSCNRWQWVESEEGEEKVVGSILSFEATDCNLCDDFFFIGSKRFAHVGYLNLPGNNFTILPEFFKELQFLTTLVVHDCKHLQEIRGLPPNLKHFDARNCASLTSSSKSMLLNQELHEAGGIEFVFPGTSIPEWFDQQSSGHSISFWFRNKFPAKLLCLHIAPSTGSFIRYPEVFINGKFQEFESHETDDTESMLGLDHTHIFDLQAYAFKNNNQFEEVAWEKEWNHVEVTYQSVLDDEEEESEEGVLDDEEEESEEGVLDDEEEEREEGVLELESSVIKAIGIHIVREEGSMEEDIRFDDPYLSSSASDYKP

SEQ ID NO: 102365 - DNA, 3237 bp, Glycine max
  CDS (1)..(3237)
atgcaatcatcctcatcttcctttagttacagattcagcaacgatgtgttcctcagcttccggggggaagatactcgtcacagttttaccggcaatctctataaagctctctctgacagaggaattcacaccttcatcgatgacaagaagctccctagaggagaccaaatcagctcagcacttgagaaggcaattgaagagtccagaatattcatcatcgtgctctctgaaaactatgcatcgtcctccttctgcttaaatgaacttggttacatccttaagtttattaaggggaagggcctattggttttgcctgttttttataaggttgatccttctgatgtgagaaaccatgcaggtagttttggagagtcattggctcatcatgaaaagaagttcaacgctgataaggagactttcaagtgtaacctggtgaagctggagacatggaagatggctcttcaccaagtggctaacttgtctggttaccatttcaaacatggggaagaatacgaatataagtttattcagaggattgttgagttggtctctaagaagattaatcgtgttcctttacatgttgcggattatccagttggactagagtcacgaatgcaagaagtaaaagcacttctggatgttggatctgatgatgttgtccacatgctggggatacatgggctgggtggagtaggtaaaacgacacttgctgctgcagtttataattccattgctgaccattttgaagctttgtgtttccttgaaaacgtgagagaaacttcaaaaaaacatgggttacaacatctccaaagcaaccttctttctgaaacagttggagagcataagttaataggtgtgaaacaaggaatttccataatacagcataggcttcagcaacagaagattcttttgattctagatgatgttgacaaaagggagcagctacaggcgcttgctggaagacctgatttgtttggtcttggcagtagagtcatcatcacgactcgggacaaacaattgctagcatgtcacggtgttgaacgaacatatgaggtgaatgaattgaatgaggaacatgctcttgaattacttagttggaaagctttcaagttggaaaaagttgatccattttacaaggatgttctgaatcgagcagcaacttatgcttcgggccttccattagctttagaagtaataggttccaacttatatggaagaaatatagaacaatggatatctgctttagatcgatacaaaagaatccctaataaagagatccaagagatacttaaagtgagttatgatgctttggaagaagatgagcaaagtgtttttcttgacattgcttgttgcttcaaaaaatatggtttggtagaggttgaagatatacttcatgctcatcatgggcattgcaagaaacatcatattggagtgttggttgaaaaatctctcataaagattagttttgatggtaacgtaacactacatgacttgatagaggacatgggtaaagaaattgtcaggcaagaatcagtcaaagaacctgggaaacgtagcagattatggtttccaaaggatatagttcaagttttagaagaaaataagggaactagtcagattgaaatcatttgtatggatttccccatatttcaagaaatacaaatagaatgggatgggtatgccttcaagaagatgaaaaaactcaaaacacttattatcagaaatggtcatttctccaaaggtcccaaacatcttcctaatacattgagagttttggaatggaagagatatcctacacaaaattttccatatgatttttatccgaagaaacttgctatatgcaagttgccttacagcgggtttacatcacatgagttggctgtcttattaaaaaagaaatttgtaaatttgacaagtttaaattttgactactgtcaatatttaacacacataccagatgtattttgtctcccacatttggaaaatttgtcatttcaatggtgtcaaaatttatctgcaattcactattcagttgggttcttggaaaaacttaaaatcttagacggagaaggttgctccagacttaagagttttcccgccatgaagttgacctctcttgagcaattcaaacttcggtattgtcacagtcttgagagttttccagaaatattaggaaggatggaaagtataaaagaacttgatttgaaagaaactcctgtaaaaaaatttccactttcatttggaaaccttacccggcttcaaaaattacaactgtctttgaccggtgttaatggaattcccctttccagccttggcatgatgccagatctggtctctattataggttggagatgggaattgagtccattccctgaagatgatgacggtgcagaaaaagtgagctcaaccttgtcttcaaacattcaatatcttcagttcagatgctgcaacctaacagatgatttttttcgaatagttctcccatggtttgctaatgtgaagaacttagacctaccaggaaattcttttacagttattcccgaatgcatcaaggaatgccactttttaactaggcttaatttgaattattgtgagtttcttcgagaaattagagggattcctccaaacttgaaatatttctctgcaatagaatgtcgatctttgacttcttcatgtagaagcaagttactgaatcaggatctgcatgagggtggtagtaccttcttttatttgccaggagccaatattccagagtggtttgagttccaaacatcagaattgccaatatctttctggtttcgtaacaaattgccggccatagctatttgtcttgttatggaacaggtgtgtgtgtgtgagtattcttcctcgtcaaaaggtgacacattgagacccttgatgatccctactacatttagactcatgtcacccatcgtgatcatcaatggcaatgaacattttttgtttgacagttgggaaatggtccggatgggaagtgattgcacatgtctttttgatctgcgggagacaatacaacaaaataatttaaatgaaacacttttggaaaatgaatggaaccatgcagttattaaatgtccagatcttaattttggccaaaaatctataaaaaacggaatccacttattgaaacaggaaagtagcatggaggattttcgattcactaatccttttagaaaaagaaaattggttgatgatttcaatagttcagaatcataa

SEQ ID NO: 102366 - protein, 1078 aa, Glycine max
MQSSSSSFSYRFSNDVFLSFRGEDTRHSFTGNLYKALSDRGIHTFIDDKKLPRGDQISSALEKAIEESRIFIIVLSENYASSSFCLNELGYILKFIKGKGLLVLPVFYKVDPSDVRNHAGSFGESLAHHEKKFNADKETFKCNLVKLETWKMALHQVANLSGYHFKHGEEYEYKFIQRIVELVSKKINRVPLHVADYPVGLESRMQEVKALLDVGSDDVVHMLGIHGLGGVGKTTLAAAVYNSIADHFEALCFLENVRETSKKHGLQHLQSNLLSETVGEHKLIGVKQGISIIQHRLQQQKILLILDDVDKREQLQALAGRPDLFGLGSRVIITTRDKQLLACHGVERTYEVNELNEEHALELLSWKAFKLEKVDPFYKDVLNRAATYASGLPLALEVIGSNLYGRNIEQWISALDRYKRIPNKEIQEILKVSYDALEEDEQSVFLDIACCFKKYGLVEVEDILHAHHGHCKKHHIGVLVEKSLIKISFDGNVTLHDLIEDMGKEIVRQESVKEPGKRSRLWFPKDIVQVLEENKGTSQIEIICMDFPIFQEIQIEWDGYAFKKMKKLKTLIIRNGHFSKGPKHLPNTLRVLEWKRYPTQNFPYDFYPKKLAICKLPYSGFTSHELAVLLKKKFVNLTSLNFDYCQYLTHIPDVFCLPHLENLSFQWCQNLSAIHYSVGFLEKLKILDGEGCSRLKSFPAMKLTSLEQFKLRYCHSLESFPEILGRMESIKELDLKETPVKKFPLSFGNLTRLQKLQLSLTGVNGIPLSSLGMMPDLVSIIGWRWELSPFPEDDDGAEKVSSTLSSNIQYLQFRCCNLTDDFFRIVLPWFANVKNLDLPGNSFTVIPECIKECHFLTRLNLNYCEFLREIRGIPPNLKYFSAIECRSLTSSCRSKLLNQDLHEGGSTFFYLPGANIPEWFEFQTSELPISFWFRNKLPAIAICLVMEQVCVCEYSSSSKGDTLRPLMIPTTFRLMSPIVIINGNEHFLFDSWEMVRMGSDCTCLFDLRETIQQNNLNETLLENEWNHAVIKCPDLNFGQKSIKNGIHLLKQESSMEDFRFTNPFRKRKLVDDFNSSES

SEQ ID NO: 102367 - DNA, 3375 bp, Glycine max
  CDS (1)..(3375)
atggctaagcaatcatcctcatcttcctttagttacagattcaccaacgatgtgttcctcagcttccgagggaaagatactcgtcacagttttaccggcaatctctataaagcactctctgaaagaggaattaacaccttcatcgatgacaagaagatccctagaggagaccaaatcacctcagcacttgagaaggcaattgaagagtccagaatattcatcatcgtgctctctgaaaactatgcatcgtcctccttctgcttaaacgaacttgattacatccttaagtttattaaggggaagggcatattgattttgccagttttttataaggttgacccttctgatgtgagaaaccacacaggtagttttggaaaggcattgactaatcatgaaaagaagttcaaaagtactaataacatggagaagctggaaacatggaagatggctctgaacaaagtggctaatttatctggttaccatcatttcaaacatggggaagaatacgaatatcaatttattcagaggattgttgagttggtctctaagaagattaatcgtgctcctttacatgttgcggattatccagttggactagagtcacgaatacaagaagtaaaaacgcttctggatgttggatctgatgatgttgtccacatgctggggatacatgggctcggtggagtaggtaaaacgacacttgctgctgcagtttataattccattgctgaccattttgaagctttgtgtttccttcaaaacgtgagagaaacttcaaagaaacatgggttacaacatctacaaagaaaccttctttctgaaatggccggagaggataagttaataggtgtcaaacaaggaatttccataatagagcataggctccggcaaaagaaggttcttttgattctcgatgatgttgacaaaagggaacagctacaggcgcttgctggaagacctgatttgtttggtcctggcagtagagtcatcatcacgactcgggacaaacaattgctagcatgtcacggtgttgaaagaacatatgaggtgaatgaattgaatgaggaatatgctcttgagttacttaattggaaagctttcaagttggaaaaagttgatccattttacaaggatgttttgaatcgagcagcaacttatgcttcaggccttccattggctttagaagtaataggttccaacttatccggaaaaaatatagaacaatggatatctgctttagatcgatacaaaagaatccctaataaagagatccaagagatacttaaagtgagttatgatgctttggaagaagatgagcaaagtgtttttcttgacattgcttgttgcttcaaaaaatatgatttggcagaggtccaagatatacttcatgctcatcatggccattgcatgaaacatcatattggagtgttggttgaaaaatctctcataaagattagtttggatggctatgttacactacatgacttgatagaggacatgggtaaagaaattgtccggaaagaatctccccaagagcctgggaaacgtagtaggttatggctacctacagatataattcaagttttagaagagaacaagggaactagtcatattggaatcatatgcatgaatttctactcctcatttgaagaagtagaaatacagtgggatggagatgccttcaaaaagatgaaaaatctcaagacacttattatcagaagtggtcatttctccaaaggtcccaaacattttcctaagagtttaagagtattggaatggtggagatatccttcacattattttccatatgattttcaaatggagaagcttgctatattcaacttacccgactgtgggtttacttcacgtgagttggctgccatgttaaaaaagaagtttgtgaatctgacaagtctaaattttgactcatgtcaacatttaacactgatacctgatgtatcttgtgtcccacatttgcaaaaattgtcatttaaagattgtgataatttatatgccattcacccgtcagtaggcttcttggaaaaactgagaatcttggacgcagaaggttgctccaggcttaagaatttcccccccatcaagttgacctctcttgagcaactcaaacttgggttttgtcacagccttgagaattttccagaaatattaggaaagatggaaaacataacagaacttgacttggaacaaactcctgtaaaaaaattcactctttcatttcaaaatcttactcggcttcaaactgtacttctgtgtttccctcgaaaccagacaaacggttgtactggcattttcctttcgaacatttgcccgatgcaagaaagcccggaactgatcaatgtcataggtgtgggatgggaagggtgtctattccgtaaagaggatgagggtgcagagaatgtgagcttaaccacatcttcaaacgttcaatttcttgatctcagaaactgcaacctgtcagatgatttttttcgaatagctctcccatgctttgctaatgtaatgaggttaaacctatcaaggaataatttcacagttattcccgaatgcatcaaagaatgccgctttttaacaatgcttgacttgaattattgtgagcgacttcgagaaattagagggattcctccaaacttgaaatatttctatgcagaagaatgcctatcattgacttcctcatgtagaagcatgttactcagtcaggaactgcatgaggctggaagaaccttcttctatttgccaggagccaagattccagagtggtttgatttccaaacatcggaatttccaatttctttctggtttcgtaacaaattcccagccattgctatttgtcatattatcaaacgggtggctgagttttcctcatcgagaggttggacatttagacccaacattagaaccaaggtgatcatcaatggcaatgcaaatttgtttaactctgtggtgttgggaagtgattgtacatgtctttttgatctgcggggtgaaagagtaacagataatttagatgaagcacttttagaaaatgaatggaaccatgcagaagttacatgtccaggttttacttttacttttgccccaacctttataaaaactggactacatgtattgaaacaggaaagtaacatggaggatattcgattctctgatccttgtagaaaaacaaaattggataatgatttcaatagttcaaaaccaaaaaatcaaagatgggtgggcaatgatgttgccaagacacaagttgtgcagcagcaacaacttatgggctcttttttgtcacgcatgtggcactgggcactagtgtttctcatttctttcctagtgtttctcatttcttgccgccgcaacaatcaatga

SEQ ID NO: 102368 - protein, 1124 aa, Glycine max
MAKQSSSSSFSYRFTNDVFLSFRGKDTRHSFTGNLYKALSERGINTFIDDKKIPRGDQITSALEKAIEESRIFIIVLSENYASSSFCLNELDYILKFIKGKGILILPVFYKVDPSDVRNHTGSFGKALTNHEKKFKSTNNMEKLETWKMALNKVANLSGYHHFKHGEEYEYQFIQRIVELVSKKINRAPLHVADYPVGLESRIQEVKTLLDVGSDDVVHMLGIHGLGGVGKTTLAAAVYNSIADHFEALCFLQNVRETSKKHGLQHLQRNLLSEMAGEDKLIGVKQGISIIEHRLRQKKVLLILDDVDKREQLQALAGRPDLFGPGSRVIITTRDKQLLACHGVERTYEVNELNEEYALELLNWKAFKLEKVDPFYKDVLNRAATYASGLPLALEVIGSNLSGKNIEQWISALDRYKRIPNKEIQEILKVSYDALEEDEQSVFLDIACCFKKYDLAEVQDILHAHHGHCMKHHIGVLVEKSLIKISLDGYVTLHDLIEDMGKEIVRKESPQEPGKRSRLWLPTDIIQVLEENKGTSHIGIICMNFYSSFEEVEIQWDGDAFKKMKNLKTLIIRSGHFSKGPKHFPKSLRVLEWWRYPSHYFPYDFQMEKLAIFNLPDCGFTSRELAAMLKKKFVNLTSLNFDSCQHLTLIPDVSCVPHLQKLSFKDCDNLYAIHPSVGFLEKLRILDAEGCSRLKNFPPIKLTSLEQLKLGFCHSLENFPEILGKMENITELDLEQTPVKKFTLSFQNLTRLQTVLLCFPRNQTNGCTGIFLSNICPMQESPELINVIGVGWEGCLFRKEDEGAENVSLTTSSNVQFLDLRNCNLSDDFFRIALPCFANVMRLNLSRNNFTVIPECIKECRFLTMLDLNYCERLREIRGIPPNLKYFYAEECLSLTSSCRSMLLSQELHEAGRTFFYLPGAKIPEWFDFQTSEFPISFWFRNKFPAIAICHIIKRVAEFSSSRGWTFRPNIRTKVIINGNANLFNSVVLGSDCTCLFDLRGERVTDNLDEALLENEWNHAEVTCPGFTFTFAPTFIKTGLHVLKQESNMEDIRFSDPCRKTKLDNDFNSSKPKNQRWVGNDVAKTQVVQQQQLMGSFLSRMWHWALVFLISFLVFLISCRRNNQ

SEQ ID NO: 102369 - DNA, 20 bp, Artificial sequence
  primer
atggcggcctcctcttcctc

SEQ ID NO: 102370 - DNA, 21 bp, Artificial sequence
  primer
ttaaccagtgactttatcttc

SEQ ID NO: 102371 - protein, 1571 aa, Artificial sequence
  consensus sequence
  Variant (3)..(4): Xaa in position 3 to 4 is any amino acid
  Variant (6)..(6): Xaa in position 6 is any amino acid
  Variant (8)..(8): Xaa in position 8 is any amino acid
  Variant (10)..(10): Xaa in position 10 is any amino acid
  Variant (12)..(13): Xaa in position 12 to 13 is any amino acid
  Variant (15)..(16): Xaa in position 15 to 16 is any amino acid
  Variant (18)..(26): Xaa in position 18 to 26 is any amino acid
  Variant (28)..(29): Xaa in position 28 to 29 is any amino acid
  Variant (31)..(31): Xaa in position 31 is any amino acid
  Variant (33)..(43): Xaa in position 33 to 43 is any amino acid
  Variant (44)..(45): Xaa in position 44 to 45 is any or no amino acid
  Variant (47)..(49): Xaa in position 47 to 49 is any amino acid
  Variant (51)..(52): Xaa in position 51 to 52 is any amino acid
  Variant (54)..(60): Xaa in position 54 to 60 is any amino acid
  Variant (62)..(63): Xaa in position 62 to 63 is any amino acid
  Variant (65)..(66): Xaa in position 65 to 66 is any amino acid
  Variant (68)..(68): Xaa in position 68 is any amino acid
  Variant (72)..(72): Xaa in position 72 is any amino acid
  Variant (75)..(76): Xaa in position 75 to 76 is any amino acid
  Variant (78)..(79): Xaa in position 78 to 79 is any amino acid
  Variant (81)..(85): Xaa in position 81 to 85 is any amino acid
  Variant (86)..(94): Xaa in position 86 to 94 is any or no amino acid
  Variant (96)..(96): Xaa in position 96 is any amino acid
  Variant (99)..(99): Xaa in position 99 is any amino acid
  Variant (101)..(101): Xaa in position 101 is any amino acid
  Variant (103)..(104): Xaa in position 103 to 104 is any amino acid
  Variant (106)..(109): Xaa in position 106 to 109 is any amino acid
  Variant (111)..(111): Xaa in position 111 is any amino acid
  Variant (113)..(127): Xaa in position 113 to 127 is any amino acid
  Variant (128)..(139): Xaa in position 128 to 139 is any or no amino acid
  Variant (141)..(142): Xaa in position 141 to 142 is any amino acid
  Variant (145)..(151): Xaa in position 145 to 151 is any amino acid
  Variant (153)..(159): Xaa in position 153 to 159 is any amino acid
  Variant (160)..(163): Xaa in position 160 to 163 is any or no amino acid
  Variant (165)..(170): Xaa in position 165 to 170 is any amino acid
  Variant (171)..(172): Xaa in position 171 to 172 is any or no amino acid
  Variant (174)..(177): Xaa in position 174 to 177 is any amino acid
  Variant (178)..(180): Xaa in position 178 to 180 is any or no amino acid
  Variant (182)..(192): Xaa in position 182 to 192 is any amino acid
  Variant (193)..(265): Xaa in position 193 to 265 is any or no amino acid
  Variant (267)..(274): Xaa in position 267 to 274 is any amino acid
  Variant (275)..(277): Xaa in position 275 to 277 is any or no amino acid
  Variant (279)..(288): Xaa in position 279 to 288 is any amino acid
  Variant (289)..(291): Xaa in position 289 to 291 is any or no amino acid
  Variant (293)..(294): Xaa in position 293 to 294 is any amino acid
  Variant (296)..(297): Xaa in position 296 to 297 is any amino acid
  Variant (299)..(299): Xaa in position 299 is any amino acid
  Variant (304)..(304): Xaa in position 304 is any amino acid
  Variant (306)..(319): Xaa in position 306 to 319 is any amino acid
  Variant (320)..(360): Xaa in position 320 to 360 is any or no amino acid
  Variant (362)..(363): Xaa in position 362 to 363 is any amino acid
  Variant (364)..(387): Xaa in position 364 to 387 is any or no amino acid
  Variant (389)..(397): Xaa in position 389 to 397 is any amino acid
  Variant (399)..(404): Xaa in position 399 to 404 is any amino acid
  Variant (405)..(409): Xaa in position 405 to 409 is any or no amino acid
  Variant (411)..(414): Xaa in position 411 to 414 is any amino acid
  Variant (415)..(415): Xaa in position 415 is any or no amino acid
  Variant (417)..(419): Xaa in position 417 to 419 is any amino acid
  Variant (420)..(425): Xaa in position 420 to 425 is any or no amino acid
  Variant (429)..(432): Xaa in position 429 to 432 is any amino acid
  Variant (433)..(436): Xaa in position 433 to 436 is any or no amino acid
  Variant (438)..(441): Xaa in position 438 to 441 is any amino acid
  Variant (442)..(442): Xaa in position 442 is any or no amino acid
  Variant (444)..(463): Xaa in position 444 to 463 is any amino acid
  Variant (464)..(476): Xaa in position 464 to 476 is any or no amino acid
  Variant (478)..(478): Xaa in position 478 is any amino acid
  Variant (479)..(480): Xaa in position 479 to 480 is any or no amino acid
  Variant (483)..(505): Xaa in position 483 to 505 is any amino acid
  Variant (506)..(511): Xaa in position 506 to 511 is any or no amino acid
  Variant (514)..(514): Xaa in position 514 is any amino acid
  Variant (516)..(518): Xaa in position 516 to 518 is any amino acid
  Variant (520)..(521): Xaa in position 520 to 521 is any amino acid
  Variant (523)..(529): Xaa in position 523 to 529 is any amino acid
  Variant (530)..(530): Xaa in position 530 is any or no amino acid
  Variant (532)..(537): Xaa in position 532 to 537 is any amino acid
  Variant (539)..(548): Xaa in position 539 to 548 is any amino acid
  Variant (549)..(557): Xaa in position 549 to 557 is any or no amino acid
  Variant (559)..(560): Xaa in position 559 to 560 is any amino acid
  Variant (562)..(564): Xaa in position 562 to 564 is any amino acid
  Variant (566)..(571): Xaa in position 566 to 571 is any amino acid
  Variant (572)..(573): Xaa in position 572 to 573 is any or no amino acid
  Variant (576)..(576): Xaa in position 576 is any amino acid
  Variant (580)..(591): Xaa in position 580 to 591 is any amino acid
  Variant (592)..(594): Xaa in position 592 to 594 is any or no amino acid
  Variant (596)..(604): Xaa in position 596 to 604 is any amino acid
  Variant (605)..(612): Xaa in position 605 to 612 is any or no amino acid
  Variant (614)..(614): Xaa in position 614 is any amino acid
  Variant (615)..(615): Xaa in position 615 is any or no amino acid
  Variant (617)..(617): Xaa in position 617 is any amino acid
  Variant (619)..(626): Xaa in position 619 to 626 is any amino acid
  Variant (627)..(654): Xaa in position 627 to 654 is any or no amino acid
  Variant (657)..(657): Xaa in position 657 is any amino acid
  Variant (659)..(673): Xaa in position 659 to 673 is any amino acid
  Variant (674)..(693): Xaa in position 674 to 693 is any or no amino acid
  Variant (695)..(726): Xaa in position 695 to 726 is any amino acid
  Variant (727)..(768): Xaa in position 727 to 768 is any or no amino acid
  Variant (770)..(771): Xaa in position 770 to 771 is any amino acid
  Variant (773)..(774): Xaa in position 773 to 774 is any amino acid
  Variant (776)..(789): Xaa in position 776 to 789 is any amino acid
  Variant (790)..(836): Xaa in position 790 to 836 is any or no amino acid
  Variant (838)..(838): Xaa in position 838 is any amino acid
  Variant (840)..(840): Xaa in position 840 is any amino acid
  Variant (841)..(842): Xaa in position 841 to 842 is any or no amino acid
  Variant (844)..(847): Xaa in position 844 to 847 is any amino acid
  Variant (849)..(849): Xaa in position 849 is any amino acid
  Variant (850)..(850): Xaa in position 850 is any or no amino acid
  Variant (852)..(852): Xaa in position 852 is any amino acid
  Variant (853)..(855): Xaa in position 853 to 855 is any or no amino acid
  Variant (858)..(858): Xaa in position 858 is any amino acid
  Variant (860)..(863): Xaa in position 860 to 863 is any amino acid
  Variant (865)..(868): Xaa in position 865 to 868 is any amino acid
  Variant (871)..(876): Xaa in position 871 to 876 is any amino acid
  Variant (877)..(881): Xaa in position 877 to 881 is any or no amino acid
  Variant (883)..(886): Xaa in position 883 to 886 is any amino acid
  Variant (888)..(889): Xaa in position 888 to 889 is any amino acid
  Variant (891)..(892): Xaa in position 891 to 892 is any amino acid
  Variant (894)..(902): Xaa in position 894 to 902 is any amino acid
  Variant (903)..(905): Xaa in position 903 to 905 is any or no amino acid
  Variant (907)..(908): Xaa in position 907 to 908 is any amino acid
  Variant (910)..(910): Xaa in position 910 is any amino acid
  Variant (912)..(913): Xaa in position 912 to 913 is any amino acid
  Variant (915)..(916): Xaa in position 915 to 916 is any amino acid
  Variant (918)..(928): Xaa in position 918 to 928 is any amino acid
  Variant (929)..(929): Xaa in position 929 is any or no amino acid
  Variant (931)..(932): Xaa in position 931 to 932 is any amino acid
  Variant (934)..(936): Xaa in position 934 to 936 is any amino acid
  Variant (937)..(937): Xaa in position 937 is any or no amino acid
  Variant (939)..(940): Xaa in position 939 to 940 is any amino acid
  Variant (942)..(944): Xaa in position 942 to 944 is any amino acid
  Variant (946)..(951): Xaa in position 946 to 951 is any amino acid
  Variant (952)..(1094): Xaa in position 952 to 1094 is any or no amino acid
  Variant (1096)..(1098): Xaa in position 1096 to 1098 is any amino acid
  Variant (1099)..(1103): Xaa in position 1099 to 1103 is any or no amino acid
  Variant (1105)..(1142): Xaa in position 1105 to 1142 is any amino acid
  Variant (1143)..(1258): Xaa in position 1143 to 1258 is any or no amino acid
  Variant (1260)..(1291): Xaa in position 1260 to 1291 is any amino acid
  Variant (1292)..(1404): Xaa in position 1292 to 1404 is any or no amino acid
  Variant (1406)..(1407): Xaa in position 1406 to 1407 is any amino acid
  Variant (1409)..(1463): Xaa in position 1409 to 1463 is any amino acid
  Variant (1464)..(1530): Xaa in position 1464 to 1530 is any or no amino acid
  Variant (1532)..(1533): Xaa in position 1532 to 1533 is any amino acid
  Variant (1535)..(1553): Xaa in position 1535 to 1553 is any amino acid
  Variant (1554)..(1570): Xaa in position 1554 to 1570 is any or no amino acid
VFXXFXGXDXRXXFXXHXXXXXXXXXIXXFXDXXXXXXXXXXXXXLXXXIXXSXXXXXXXSXXYXXSXWCLXELXXIXXCXXXXXXXXXXXXXXPXFYXVXPXXVXXXXGXFXXXXXXXXXXXXXXXXXXXXXXXXXXXWXXALXXXXXXXGXXXXXXXXXXXEXXXXXXXXIXXXXXXXLXXXXXXXXXXXXXXXXXXXXXXXXXXXXXXXXXXXXXXXXXXXXXXXXXXXXXXXXXXXXXXXXXXXXXXXXXXXXXXXXXXXXGXXXXXXXXXXXLXXXXXXXXXXXXXGXXGXXGXGKTTXAXXXXXXXXXXXXXXXXXXXXXXXXXXXXXXXXXXXXXXXXXXXXXXXXXXXXXXXLXXXXXXXXXXXXXXXXXXXXXXXXXXLXXXXXXXXXDXXXXXXXXXXXLXXXXXWXXXXXXXXXGSRXXXXXXXXTXXXXXLXXXXXXXXXXXXXXXXXXXXXXXXXXXXXXXXXFXXXAFXXXXXXXXXXXXXXXXXXXXXXXXXXXXXPLXLXXXGXXLXXXXXXXXWXXXXXXLXXXXXXXXXXXXXXXXXXXLXXSXXXLXXXXXXXXFLXIACXXXXXXXXXXXXXXXLXXXXXXXXXXXXXXXXXLXXKXLXXXXXXXXXXXXXXXXXXXXXXXXXXXXXXXXXXXXMHXLXXXXXXXXXXXXXXXXXXXXXXXXXXXXXXXXXXXLXXXXXXXXXXXXXXXXXXXXXXXXXXXXXXXXXXXXXXXXXXXXXXXXXXXXXXXXXXXXXXXXXXXXXXXXXXMXXLXXLXXXXXXXXXXXXXXXXXXXXXXXXXXXXXXXXXXXXXXXXXXXXXXXXXXXXXXXXXXXXXLXWXXXPXXXXPXXFXXXXLVXLXXXXSXXXXLWXXXXXXXXXXXLXXXXLXXSXXLXXXXXXXXXXXXLXXLXLXXCXXLXXXXXXXXXXXXLXXLXXXXCXXLXXXPXXXXXXXXXXXXXXXXXXXXXXXXXXXXXXXXXXXXXXXXXXXXXXXXXXXXXXXXXXXXXXXXXXXXXXXXXXXXXXXXXXXXXXXXXXXXXXXXXXXXXXXXXXXXXXXXXXXXXXXXXXXXXXXXXXXXXXXXXXXXXXXXXXXXXLXXXXXXXXCXXXXXXXXXXXXXXXXXXXXXXXXXXXXXXXXXXXXXXXXXXXXXXXXXXXXXXXXXXXXXXXXXXXXXXXXXXXXXXXXXXXXXXXXXXXXXXXXXXXXXXXXXXXXXXXXXXXXXXXXXXXXXXXXXXXXXXXXXXXXXXXXXXXXXXXXXXLXXXXXXXXXXXXXXXXXXXXXXXXXXXXXXXXXXXXXXXXXXXXXXXXXXXXXXXXXXXXXXXXXXXXXXXXXXXXXXXXXXXXXXXXXXXXXXXXXXXXXXXXXXXXXXXXXXXXXXXXXXXXXXXXXXXXXXXXXXXXXXXXXCXXLXXXXXXXXXXXXXXXXXXXXXXXXXXXXXXXXXXXXXXXXXXXXXXXXXXXXXXXXXXXXXXXXXXXXXXXXXXXXXXXXXXXXXXXXXXXXXXXXXXXXXXXXXXXXXXXXXXXXXXXXXXPXXFXXXXXXXXXXXXXXXXXXXXXXXXXXXXXXXXXXXXC

SEQ ID NO: 102372 - protein, 25 aa, Artificial sequence
  protein pattern
  Variant (2)..(3): Xaa in position 2 to 3 is any amino acid
  Variant (5)..(7): Xaa in position 5 to 7 is any amino acid
  Variant (8)..(8): Xaa in position 8 is Ile, Leu or Val
  Variant (9)..(9): Xaa in position 9 is any amino acid
  Variant (10)..(10): Xaa in position 10 is Ile, Leu or Val
  Variant (11)..(11): Xaa in position 11 is Phe, Ile or Leu
  Variant (13)..(14): Xaa in position 13 to 14 is any amino acid
  Variant (16)..(16): Xaa in position 16 is Ala, Pro, Ser or Thr
  Variant (17)..(17): Xaa in position 17 is any amino acid
  Variant (19)..(19): Xaa in position 19 is any amino acid
  Variant (23)..(23): Xaa in position 23 is any amino acid
IXXSXXXXXXXSXXYXXSXWCLXEL

SEQ ID NO: 102373 - DNA, 1497 bp, Arabidopsis thaliana; identical to SEQ ID NO: 8403
  CDS (1)..(1497)

SEQ ID NO: 102374 - protein, 498 aa, Arabidopsis thaliana; identical to SEQ ID NO: 8404

SEQ ID NO: 102375 - DNA, 2347 bp, Oryza sativa; identical to SEQ ID NO: 15534
  CDS (116)..(1648)

SEQ ID NO: 102376 - protein, 510 aa, Oryza sativa; identical to SEQ ID NO: 15535

SEQ ID NO: 102377 - DNA, 1984 bp, Sorghum bicolor; identical to SEQ ID NO: 15538
  CDS (202)..(1710)

SEQ ID NO: 102378 - protein, 502 aa, Sorghum bicolor; identical to SEQ ID NO: 15539

SEQ ID NO: 102379 - DNA, 1875 bp, Triticum aestivum; identical to SEQ ID NO: 15546
  CDS (101)..(1630)

SEQ ID NO: 102380 - protein, 509 aa, Triticum aestivum; identical to SEQ ID NO: 15547

SEQ ID NO: 102381 - DNA, 1953 bp, Triticum aestivum; identical to SEQ ID NO: 15548
  CDS (152)..(1693)

SEQ ID NO: 102382 - protein, 513 aa, Triticum aestivum; identical to SEQ ID NO: 15549

SEQ ID NO: 102383 - DNA, 1953 bp, Triticum aestivum; identical to SEQ ID NO: 15548
  CDS (209)..(1693)

SEQ ID NO: 102384 - protein, 494 aa, Triticum aestivum; identical to SEQ ID NO: 15551

SEQ ID NO: 102385 - DNA, 1524 bp, Oryza sativa; identical to SEQ ID NO: 15558
  CDS (1)..(1524)

SEQ ID NO: 102386 - protein, 507 aa, Oryza sativa; identical to SEQ ID NO: 15559

SEQ ID NO: 102387 - DNA, 1883 bp, Brassica napus; identical to SEQ ID NO: 15560
  CDS (119)..(1651)

SEQ ID NO: 102388 - protein, 510 aa, Brassica napus; identical to SEQ ID NO: 8816

SEQ ID NO: 102389 - DNA, 1903 bp, Brassica napus; identical to SEQ ID NO: 16301
  CDS (122)..(1618)

SEQ ID NO: 102390 - protein, 498 aa, Brassica napus; identical to SEQ ID NO: 8854

SEQ ID NO: 102391 - DNA, 2063 bp, Glycine max; identical to SEQ ID NO: 15566
  CDS (192)..(1700)

SEQ ID NO: 102392 - protein, 502 aa, Glycine max; identical to SEQ ID NO: 8880

SEQ ID NO: 102393 - DNA, 1825 bp, Helianthus annuus; identical to SEQ ID NO: 15574
  CDS (128)..(1624)

SEQ ID NO: 102394 - protein, 498 aa, Helianthus annuus; identical to SEQ ID NO: 8834

SEQ ID NO: 102395 - DNA, 2075 bp, Zea mays; identical to SEQ ID NO: 15576
  CDS (198)..(1739)

SEQ ID NO: 102396 - protein, 513 aa, Zea mays; identical to SEQ ID NO: 8894

SEQ ID NO: 102397 - DNA, 1590 bp, Aedes aegypti; identical to SEQ ID NO: 15578
  CDS (1)..(1590)

SEQ ID NO: 102398 - protein, 529 aa, Aedes aegypti; identical to SEQ ID NO: 15579

SEQ ID NO: 102399 - DNA, 1560 bp, Aedes aegypti; identical to SEQ ID NO: 15580
  CDS (1)..(1560)

SEQ ID NO: 102400 - protein, 519 aa, Aedes aegypti; identical to SEQ ID NO: 15581

SEQ ID NO: 102401 - DNA, 1413 bp, Klebsiella pneumoniae subsp. pneumoniae MGH 78578; identical to SEQ ID NO: 15584
  CDS (1)..(1413): transl_table=11

SEQ ID NO: 102402 - protein, 470 aa, Klebsiella pneumoniae subsp. pneumoniae MGH 78578; identical to SEQ ID NO: 15585

SEQ ID NO: 102403 - DNA, 1557 bp, Xanthobacter autotrophicus Py2; identical to SEQ ID NO: 8651
  CDS (1)..(1557): transl_table=11

SEQ ID NO: 102404 - protein, 518 aa, Xanthobacter autotrophicus Py2; identical to SEQ ID NO: 8652

SEQ ID NO: 102405 - DNA, 1533 bp, Arabidopsis thaliana; identical to SEQ ID NO: 8391
  CDS (1)..(1533)

SEQ ID NO: 102406 - protein, 510 aa, Arabidopsis thaliana; identical to SEQ ID NO: 8392

SEQ ID NO: 102407 - DNA, 1494 bp, Arabidopsis thaliana; identical to SEQ ID NO: 8393
  CDS (1)..(1494)

SEQ ID NO: 102408 - protein, 497 aa, Arabidopsis thaliana; identical to SEQ ID NO: 8394

SEQ ID NO: 102409 - DNA, 1533 bp, Arabidopsis thaliana; identical to SEQ ID NO: 8395
  CDS (1)..(1533)

SEQ ID NO: 102410 - protein, 510 aa, Arabidopsis thaliana; identical to SEQ ID NO: 8396

SEQ ID NO: 102411 - DNA, 1479 bp, Arabidopsis thaliana; identical to SEQ ID NO: 8397
  CDS (1)..(1479)

SEQ ID NO: 102412 - protein, 492 aa, Arabidopsis thaliana; identical to SEQ ID NO: 8398

SEQ ID NO: 102413 - DNA, 1533 bp, Arabidopsis thaliana; identical to SEQ ID NO: 8399
  CDS (1)..(1533)

SEQ ID NO: 102414 - protein, 510 aa, Arabidopsis thaliana; identical to SEQ ID NO: 8400

SEQ ID NO: 102415 - DNA, 1740 bp, Arabidopsis thaliana; identical to SEQ ID NO: 8401
  CDS (1)..(1740)

SEQ ID NO: 102416 - protein, 579 aa, Arabidopsis thaliana; identical to SEQ ID NO: 8402

SEQ ID NO: 102417 - DNA, 1533 bp, Arabidopsis thaliana; identical to SEQ ID NO: 8405
  CDS (1)..(1533)

SEQ ID NO: 102418 - protein, 510 aa, Arabidopsis thaliana; identical to SEQ ID NO: 8406

SEQ ID NO: 102419 - DNA, 1413 bp, Vibrio cholerae O1 biovar eltor str. N16961; identical to SEQ ID NO: 15602
  CDS (1)..(1413): transl_table=11

SEQ ID NO: 102420 - protein, 470 aa, Vibrio cholerae O1 biovar eltor str. N16961; identical to SEQ ID NO: 15603

SEQ ID NO: 102421 - DNA, 1755 bp, Bacillus halodurans C-125; identical to SEQ ID NO: 15604
  CDS (1)..(1755): transl_table=11

SEQ ID NO: 102422 - protein, 584 aa, Bacillus halodurans C-125; identical to SEQ ID NO: 15605

SEQ ID NO: 102423 - DNA, 1740 bp, Halobacterium sp. NRC-1; identical to SEQ ID NO: 8411
  CDS (1)..(1740): transl_table=11

SEQ ID NO: 102424 - protein, 579 aa, Halobacterium sp. NRC-1; identical to SEQ ID NO: 8412

SEQ ID NO: 102425 - DNA, 1443 bp, Escherichia coli O157:H7 EDL933; identical to SEQ ID NO: 15614
  CDS (1)..(1443): transl_table=11
  misc_feature (850)..(850): r is g or a

SEQ ID NO: 102426 - protein, 480 aa, Escherichia coli O157:H7 EDL933; identical to SEQ ID NO: 15615
  misc_feature (284)..(284): The Xaa at location 284 stands for Ala, or Thr.

SEQ ID NO: 102427 - DNA, 1440 bp, Agrobacterium tumefaciens str. C58; identical to SEQ ID NO: 8419
  CDS (1)..(1440): transl_table=11

SEQ ID NO: 102428 - protein, 479 aa, Agrobacterium tumefaciens str. C58; identical to SEQ ID NO: 8420

SEQ ID NO: 102429 - DNA, 1716 bp, Arabidopsis thaliana; identical to SEQ ID NO: 8433
  CDS (1)..(1716)

SEQ ID NO: 102430 - protein, 571 aa, Arabidopsis thaliana; identical to SEQ ID NO: 8434

SEQ ID NO: 102431 - DNA, 1584 bp, Arabidopsis thaliana; identical to SEQ ID NO: 8435
  CDS (1)..(1584)

SEQ ID NO: 102432 - protein, 527 aa, Arabidopsis thaliana; identical to SEQ ID NO: 8436

SEQ ID NO: 102433 - DNA, 1791 bp, Arabidopsis thaliana; identical to SEQ ID NO: 8437
  CDS (1)..(1791)

SEQ ID NO: 102434 - protein, 596 aa, Arabidopsis thaliana; identical to SEQ ID NO: 8438

SEQ ID NO: 102435 - DNA, 1584 bp, Arabidopsis thaliana; identical to SEQ ID NO: 8439
  CDS (1)..(1584)

SEQ ID NO: 102436 - protein, 527 aa, Arabidopsis thaliana; identical to SEQ ID NO: 8440

SEQ ID NO: 102437 - DNA, 1428 bp, Fusobacterium nucleatum subsp. nucleatum ATCC 25586; identical to SEQ ID NO: 8443
  CDS (1)..(1428): transl_table=11

SEQ ID NO: 102438 - protein, 475 aa, Fusobacterium nucleatum subsp. nucleatum ATCC 25586; identical to SEQ ID NO: 8444

SEQ ID NO: 102439 - DNA, 1665 bp, Drosophila melanogaster; identical to SEQ ID NO: 15642
  CDS (1)..(1665)

SEQ ID NO: 102440 - protein, 554 aa, Drosophila melanogaster; identical to SEQ ID NO: 15643

SEQ ID NO: 102441 - DNA, 1752 bp, Thermoanaerobacter tengcongensis MB4; identical to SEQ ID NO: 8445
  CDS (1)..(1752): transl_table=11

SEQ ID NO: 102442 - protein, 583 aa, Thermoanaerobacter tengcongensis MB4; identical to SEQ ID NO: 8446

SEQ ID NO: 102443 - DNA, 1437 bp, Streptomyces coelicolor A3(2); identical to SEQ ID NO: 8447
  CDS (1)..(1437): transl_table=11

SEQ ID NO: 102444 - protein, 478 aa, Streptomyces coelicolor A3(2); identical to SEQ ID NO: 8448

SEQ ID NO: 102445 - DNA, 1431 bp, Streptomyces coelicolor A3(2); identical to SEQ ID NO: 8449
  CDS (1)..(1431): transl_table=11

SEQ ID NO: 102446 - protein, 476 aa, Streptomyces coelicolor A3(2); identical to SEQ ID NO: 8450

SEQ ID NO: 102447 - DNA, 1434 bp, Methanosarcina mazei Go1; identical to SEQ ID NO: 15650
  CDS (1)..(1434): transl_table=11

SEQ ID NO: 102448 - protein, 477 aa, Methanosarcina mazei Go1; identical to SEQ ID NO: 15651

SEQ ID NO: 102449 - DNA, 1785 bp, Thermosynechococcus elongatus BP-1; identical to SEQ ID NO: 8455
  CDS (1)..(1785): transl_table=11

SEQ ID NO: 102450 - protein, 594 aa, Thermosynechococcus elongatus BP-1; identical to SEQ ID NO: 8456

SEQ ID NO: 102451 - DNA, 1761 bp, Oceanobacillus iheyensis HTE831; identical to SEQ ID NO: 8457
  CDS (1)..(1761): transl_table=11

SEQ ID NO: 102452 - protein, 586 aa, Oceanobacillus iheyensis HTE831; identical to SEQ ID NO: 8458

SEQ ID NO: 102453 - DNA, 1437 bp, Brucella suis 1330; identical to SEQ ID NO: 16373
  CDS (1)..(1437): transl_table=11

SEQ ID NO: 102454 - protein, 478 aa, Brucella suis 1330; identical to SEQ ID NO: 16374

SEQ ID NO: 102455 - DNA, 1413 bp, Shigella flexneri 2a str. 301; identical to SEQ ID NO: 15660
  CDS (1)..(1413): transl_table=11

SEQ ID NO: 102456 - protein, 470 aa, Shigella flexneri 2a str. 301; identical to SEQ ID NO: 15661

SEQ ID NO: 102457 - DNA, 1440 bp, Shewanella oneidensis MR-1; identical to SEQ ID NO: 8371
  CDS (1)..(1440): transl_table=11

SEQ ID NO: 102458 - protein, 479 aa, Shewanella oneidensis MR-1; identical to SEQ ID NO: 8372

SEQ ID NO: 102459 - DNA, 1539 bp, Drosophila melanogaster; identical to SEQ ID NO: 15666
  CDS (1)..(1539)

SEQ ID NO: 102460 - protein, 512 aa, Drosophila melanogaster; identical to SEQ ID NO: 15667

SEQ ID NO: 102461 - DNA, 1455 bp, Pseudomonas putida KT2440; identical to SEQ ID NO: 15668
  CDS (1)..(1455): transl_table=11

SEQ ID NO: 102462 - protein, 484 aa, Pseudomonas putida KT2440; identical to SEQ ID NO: 15669

SEQ ID NO: 102463 - DNA, 1416 bp, Pseudomonas putida KT2440; identical to SEQ ID NO: 15670
  CDS (1)..(1416): transl_table=11

SEQ ID NO: 102464 - protein, 471 aa, Pseudomonas putida KT2440; identical to SEQ ID NO: 15671

SEQ ID NO: 102465 - DNA, 1629 bp, Escherichia coli CFT073; identical to SEQ ID NO: 15672
  CDS (1)..(1629): transl_table=11

SEQ ID NO: 102466 - protein, 542 aa, Escherichia coli CFT073; identical to SEQ ID NO: 15673

SEQ ID NO: 102467 - DNA, 1755 bp, Clostridium tetani E88; identical to SEQ ID NO: 15676
  CDS (1)..(1755): transl_table=11

SEQ ID NO: 102468 - protein, 584 aa, Clostridium tetani E88; identical to SEQ ID NO: 15677

SEQ ID NO: 102469 - DNA, 1761 bp, Lactobacillus plantarum WCFS1; identical to SEQ ID NO: 15678
  CDS (1)..(1761): transl_table=11

SEQ ID NO: 102470 - protein, 586 aa, Lactobacillus plantarum WCFS1; identical to SEQ ID NO: 15679

SEQ ID NO: 102471 - DNA, 1413 bp, Vibrio parahaemolyticus RIMD 2210633; identical to SEQ ID NO: 15682
  CDS (1)..(1413): transl_table=11

SEQ ID NO: 102472 - protein, 470 aa, Vibrio parahaemolyticus RIMD 2210633; identical to SEQ ID NO: 15683

SEQ ID NO: 102473 - DNA, 1758 bp, Enterococcus faecalis V583; identical to SEQ ID NO: 8473
  CDS (1)..(1758): transl_table=11

SEQ ID NO: 102474 - protein, 585 aa, Enterococcus faecalis V583; identical to SEQ ID NO: 8474

SEQ ID NO: 102475 - DNA, 1434 bp, Coxiella burnetii RSA 493; identical to SEQ ID NO: 8475
  CDS (1)..(1434): transl_table=11

SEQ ID NO: 102476 - protein, 477 aa, Coxiella burnetii RSA 493; identical to SEQ ID NO: 8476

SEQ ID NO: 102477 - DNA, 1437 bp, Streptomyces avermitilis MA-4680; identical to SEQ ID NO: 26528
  CDS (1)..(1437): transl_table=11

SEQ ID NO: 102478 - protein, 478 aa, Streptomyces avermitilis MA-4680; identical to SEQ ID NO: 26529

SEQ ID NO: 102479 - DNA, 1758 bp, Bacillus cereus ATCC 14579; identical to SEQ ID NO: 15690
  CDS (1)..(1758): transl_table=11

SEQ ID NO: 102480 - protein, 585 aa, Bacillus cereus ATCC 14579; identical to SEQ ID NO: 15691

SEQ ID NO: 102481 - DNA, 1431 bp, Rhodopirellula baltica SH 1; identical to SEQ ID NO: 15692
  CDS (1)..(1431): transl_table=11

SEQ ID NO: 102482 - protein, 476 aa, Rhodopirellula baltica SH 1; identical to SEQ ID NO: 15693

SEQ ID NO: 102483 - DNA, 1440 bp, Wigglesworthia glossinidia endosymbiont of Glossina brevipalpis; identical to SEQ ID NO: 8481
  CDS (1)..(1440): transl_table=11

SEQ ID NO: 102484 - protein, 479 aa, Wigglesworthia glossinidia endosymbiont of Glossina brevipalpis; identical to SEQ ID NO: 8482

SEQ ID NO: 102485 - DNA, 1440 bp, Haemophilus ducreyi 35000HP; identical to SEQ ID NO: 8369
  CDS (1)..(1440): transl_table=11

SEQ ID NO: 102486 - protein, 479 aa, Haemophilus ducreyi 35000HP; identical to SEQ ID NO: 8370

SEQ ID NO: 102487 - DNA, 1467 bp, Candidatus Blochmannia floridanus; identical to SEQ ID NO: 8483
  CDS (1)..(1467): transl_table=11

SEQ ID NO: 102488 - protein, 488 aa, Candidatus Blochmannia floridanus; identical to SEQ ID NO: 8484

SEQ ID NO: 102489 - DNA, 1818 bp, Gloeobacter violaceus PCC 7421; identical to SEQ ID NO: 8487
  CDS (1)..(1818): transl_table=11

SEQ ID NO: 102490 - protein, 605 aa, Gloeobacter violaceus PCC 7421; identical to SEQ ID NO: 8488

SEQ ID NO: 102491 - DNA, 1410 bp, Photorhabdus luminescens subsp. laumondii TTO1; identical to SEQ ID NO: 15702
  CDS (1)..(1410): transl_table=11

SEQ ID NO: 102492 - protein, 469 aa, Photorhabdus luminescens subsp. laumondii TTO1; identical to SEQ ID NO: 15703

SEQ ID NO: 102493 - DNA, 1488 bp, Vibrio vulnificus YJ016; identical to SEQ ID NO: 15704
  CDS (1)..(1488): transl_table=11

SEQ ID NO: 102494 - protein, 495 aa, Vibrio vulnificus YJ016; identical to SEQ ID NO: 15705

SEQ ID NO: 102495 - DNA, 1416 bp, Treponema denticola ATCC 35405; identical to SEQ ID NO: 8495
  CDS (1)..(1416): transl_table=11

SEQ ID NO: 102496 - protein, 471 aa, Treponema denticola ATCC 35405; identical to SEQ ID NO: 8496

SEQ ID NO: 102497 - DNA, 1758 bp, Bacillus cereus ATCC 10987; identical to SEQ ID NO: 15714
  CDS (1)..(1758): transl_table=11

SEQ ID NO: 102498 - protein, 585 aa, Bacillus cereus ATCC 10987; identical to SEQ ID NO: 15715

SEQ ID NO: 102499 - DNA, 1656 bp, Nasonia vitripennis; identical to SEQ ID NO: 15718
  CDS (1)..(1656)

SEQ ID NO: 102500 - protein, 551 aa, Nasonia vitripennis; identical to SEQ ID NO: 15719

SEQ ID NO: 102501 - DNA, 1587 bp, Magnaporthe grisea 70-15; identical to SEQ ID NO: 8497
  CDS (1)..(1587)

SEQ ID NO: 102502 - protein, 528 aa, Magnaporthe grisea 70-15; identical to SEQ ID NO: 8498

SEQ ID NO: 102503 - DNA, 1623 bp, Gibberella zeae PH-1; identical to SEQ ID NO: 8499
  CDS (1)..(1623)

SEQ ID NO: 102504 - protein, 540 aa, Gibberella zeae PH-1; identical to SEQ ID NO: 8500

SEQ ID NO: 102505 - DNA, 1554 bp, Apis mellifera; identical to SEQ ID NO: 15722
  CDS (1)..(1554)

SEQ ID NO: 102506 - protein, 517 aa, Apis mellifera; identical to SEQ ID NO: 15723

SEQ ID NO: 102507 - DNA, 1515 bp, Candida albicans SC5314; identical to SEQ ID NO: 8501
  CDS (1)..(1515): transl_table=12

SEQ ID NO: 102508 - protein, 504 aa, Candida albicans SC5314; identical to SEQ ID NO: 8502

SEQ ID NO: 102509 - DNA, 1587 bp, Ustilago maydis 521; identical to SEQ ID NO: 8503
  CDS (1)..(1587)

SEQ ID NO: 102510 - protein, 528 aa, Ustilago maydis 521; identical to SEQ ID NO: 8504

SEQ ID NO: 102511 - DNA, 1590 bp, Cryptococcus neoformans var. neoformans B-3501A; identical to SEQ ID NO: 15728
  CDS (1)..(1590)

SEQ ID NO: 102512 - protein, 529 aa, Cryptococcus neoformans var. neoformans B-3501A; identical to SEQ ID NO: 15729

SEQ ID NO: 102513 - DNA, 1719 bp, Cryptococcus neoformans var. neoformans B-3501A; identical to SEQ ID NO: 15730
  CDS (1)..(1719)

SEQ ID NO: 102514 - protein, 572 aa, Cryptococcus neoformans var. neoformans B-3501A; identical to SEQ ID NO: 15731

SEQ ID NO: 102515 - DNA, 1539 bp, Tribolium castaneum; identical to SEQ ID NO: 15734
  CDS (1)..(1539)

SEQ ID NO: 102516 - protein, 512 aa, Tribolium castaneum; identical to SEQ ID NO: 15735

SEQ ID NO: 102517 - DNA, 1611 bp, Tribolium castaneum; identical to SEQ ID NO: 15736
  CDS (1)..(1611)

SEQ ID NO: 102518 - protein, 536 aa, Tribolium castaneum; identical to SEQ ID NO: 15737

SEQ ID NO: 102519 - DNA, 1674 bp, Tribolium castaneum; identical to SEQ ID NO: 15738
  CDS (1)..(1674)

SEQ ID NO: 102520 - protein, 557 aa, Tribolium castaneum; identical to SEQ ID NO: 15739

SEQ ID NO: 102521 - DNA, 1593 bp, Tribolium castaneum; identical to SEQ ID NO: 15740
  CDS (1)..(1593)

SEQ ID NO: 102522 - protein, 530 aa, Tribolium castaneum; identical to SEQ ID NO: 15741

SEQ ID NO: 102523 - DNA, 1818 bp, Prochlorococcus marinus str. MIT 9303; identical to SEQ ID NO: 26582
  CDS (1)..(1818): transl_table=11

SEQ ID NO: 102524 - protein, 605 aa, Prochlorococcus marinus str. MIT 9303; identical to SEQ ID NO: 26583

SEQ ID NO: 102525 - DNA, 1761 bp, Clostridium difficile 630; identical to SEQ ID NO: 8505
  CDS (1)..(1761): transl_table=11

SEQ ID NO: 102526 - protein, 586 aa, Clostridium difficile 630; identical to SEQ ID NO: 8506

SEQ ID NO: 102527 - DNA, 1419 bp, Bradyrhizobium sp. ORS278; identical to SEQ ID NO: 15744
  CDS (1)..(1419): transl_table=11

SEQ ID NO: 102528 - protein, 472 aa, Bradyrhizobium sp. ORS278; identical to SEQ ID NO: 15745

SEQ ID NO: 102529 - DNA, 1758 bp, Listeria monocytogenes str. 4b F2365; identical to SEQ ID NO: 15752
  CDS (1)..(1758): transl_table=11

SEQ ID NO: 102530 - protein, 585 aa, Listeria monocytogenes str. 4b F2365; identical to SEQ ID NO: 15753

SEQ ID NO: 102531 - DNA, 1758 bp, Bacillus thuringiensis serovar konkukian str. 97-27; identical to SEQ ID NO: 15754
  CDS (1)..(1758): transl_table=11

SEQ ID NO: 102532 - protein, 585 aa, Bacillus thuringiensis serovar konkukian str. 97-27; identical to SEQ ID NO: 15755

SEQ ID NO: 102533 - DNA, 1413 bp, Erwinia carotovora subsp. atroseptica SCRI1043; identical to SEQ ID NO: 15756
  CDS (1)..(1413): transl_table=11

SEQ ID NO: 102534 - protein, 470 aa, Erwinia carotovora subsp. atroseptica SCRI1043; identical to SEQ ID NO: 15757

SEQ ID NO: 102535 - DNA, 1434 bp, Propionibacterium acnes KPA171202; identical to SEQ ID NO: 8521
  CDS (1)..(1434): transl_table=11

SEQ ID NO: 102536 - protein, 477 aa, Propionibacterium acnes KPA171202; identical to SEQ ID NO: 8522

SEQ ID NO: 102537 - DNA, 1746 bp, Desulfotalea psychrophila LSv54; identical to SEQ ID NO: 8525
  CDS (1)..(1746): transl_table=11

SEQ ID NO: 102538 - protein, 581 aa, Desulfotalea psychrophila LSv54; identical to SEQ ID NO: 8526

SEQ ID NO: 102539 - DNA, 1755 bp, Symbiobacterium thermophilum IAM 14863; identical to SEQ ID NO: 8529
  CDS (1)..(1755): transl_table=11

SEQ ID NO: 102540 - protein, 584 aa, Symbiobacterium thermophilum IAM 14863; identical to SEQ ID NO: 8530

SEQ ID NO: 102541 - DNA, 1758 bp, Bacillus licheniformis ATCC 14580; identical to SEQ ID NO: 15768
  CDS (1)..(1758): transl_table=11

SEQ ID NO: 102542 - protein, 585 aa, Bacillus licheniformis ATCC 14580; identical to SEQ ID NO: 15769

SEQ ID NO: 102543 - DNA, 1581 bp, Mannheimia succiniciproducens MBEL55E; identical to SEQ ID NO: 8531
  CDS (1)..(1581): transl_table=11

SEQ ID NO: 102544 - protein, 526 aa, Mannheimia succiniciproducens MBEL55E; identical to SEQ ID NO: 8532

SEQ ID NO: 102545 - DNA, 1449 bp, Azoarcus sp. EbN1; identical to SEQ ID NO: 15772
  CDS (1)..(1449): transl_table=11

SEQ ID NO: 102546 - protein, 482 aa, Azoarcus sp. EbN1; identical to SEQ ID NO: 15773

SEQ ID NO: 102547 - DNA, 1755 bp, Bacillus clausii KSM-K16; identical to SEQ ID NO: 8537
  CDS (1)..(1755): transl_table=11

SEQ ID NO: 102548 - protein, 584 aa, Bacillus clausii KSM-K16; identical to SEQ ID NO: 8538

SEQ ID NO: 102549 - DNA, 1473 bp, Neisseria gonorrhoeae FA 1090; identical to SEQ ID NO: 8539
  CDS (1)..(1473): transl_table=11

SEQ ID NO: 102550 - protein, 490 aa, Neisseria gonorrhoeae FA 1090; identical to SEQ ID NO: 8540

SEQ ID NO: 102551 - DNA, 1434 bp, Corynebacterium glutamicum ATCC 13032; identical to SEQ ID NO: 8543
  CDS (1)..(1434): transl_table=11

SEQ ID NO: 102552 - protein, 477 aa, Corynebacterium glutamicum ATCC 13032; identical to SEQ ID NO: 8544

SEQ ID NO: 102553 - DNA, 1452 bp, Colwellia psychrerythraea 34H; identical to SEQ ID NO: 8547
  CDS (1)..(1452): transl_table=11

SEQ ID NO: 102554 - protein, 483 aa, Colwellia psychrerythraea 34H; identical to SEQ ID NO: 8548

SEQ ID NO: 102555 - DNA, 1458 bp, Prochlorococcus marinus str. NATL2A; identical to SEQ ID NO: 16501
  CDS (1)..(1458): transl_table=11

SEQ ID NO: 102556 - protein, 485 aa, Prochlorococcus marinus str. NATL2A; identical to SEQ ID NO: 16502

SEQ ID NO: 102557 - DNA, 1434 bp, Thiobacillus denitrificans ATCC 25259; identical to SEQ ID NO: 8555
  CDS (1)..(1434): transl_table=11

SEQ ID NO: 102558 - protein, 477 aa, Thiobacillus denitrificans ATCC 25259; identical to SEQ ID NO: 8556

SEQ ID NO: 102559 - DNA, 1752 bp, Carboxydothermus hydrogenoformans Z-2901; identical to SEQ ID NO: 8561
  CDS (1)..(1752): transl_table=11

SEQ ID NO: 102560 - protein, 583 aa, Carboxydothermus hydrogenoformans Z-2901; identical to SEQ ID NO: 8562

SEQ ID NO: 102561 - DNA, 1749 bp, Moorella thermoacetica ATCC 39073; identical to SEQ ID NO: 8569
  CDS (1)..(1749): transl_table=11

SEQ ID NO: 102562 - protein, 582 aa, Moorella thermoacetica ATCC 39073; identical to SEQ ID NO: 8570

SEQ ID NO: 102563 - DNA, 1428 bp, Syntrophus aciditrophicus SB; identical to SEQ ID NO: 8571
  CDS (1)..(1428): transl_table=11

SEQ ID NO: 102564 - protein, 475 aa, Syntrophus aciditrophicus SB; identical to SEQ ID NO: 8572

SEQ ID NO: 102565 - DNA, 1437 bp, Francisella tularensis subsp. holarctica; identical to SEQ ID NO: 8577
  CDS (1)..(1437): transl_table=11

SEQ ID NO: 102566 - protein, 478 aa, Francisella tularensis subsp. holarctica; identical to SEQ ID NO: 8578

SEQ ID NO: 102567 - DNA, 1443 bp, Saccharophagus degradans 2-40; identical to SEQ ID NO: 8581
  CDS (1)..(1443): transl_table=11

SEQ ID NO: 102568 - protein, 480 aa, Saccharophagus degradans 2-40; identical to SEQ ID NO: 8582

SEQ ID NO: 102569 - DNA, 1440 bp, Ralstonia metallidurans CH34; identical to SEQ ID NO: 8585
  CDS (1)..(1440): transl_table=11

SEQ ID NO: 102570 - protein, 479 aa, Ralstonia metallidurans CH34; identical to SEQ ID NO: 8586

SEQ ID NO: 102571 - DNA, 1446 bp, Silicibacter sp. TM1040; identical to SEQ ID NO: 8589
  CDS (1)..(1446): transl_table=11

SEQ ID NO: 102572 - protein, 481 aa, Silicibacter sp. TM1040; identical to SEQ ID NO: 8590

SEQ ID NO: 102573 - DNA, 1434 bp, Myxococcus xanthus DK 1622; identical to SEQ ID NO: 8591
  CDS (1)..(1434): transl_table=11

SEQ ID NO: 102574 - protein, 477 aa, Myxococcus xanthus DK 1622; identical to SEQ ID NO: 8592

SEQ ID NO: 102575 - DNA, 1437 bp, Mesorhizobium sp. BNC1; identical to SEQ ID NO: 8595
  CDS (1)..(1437): transl_table=11

SEQ ID NO: 102576 - protein, 478 aa, Mesorhizobium sp. BNC1; identical to SEQ ID NO: 8596

SEQ ID NO: 102577 - DNA, 1764 bp, Trichodesmium erythraeum IMS101; identical to SEQ ID NO: 8603
  CDS (1)..(1764): transl_table=11

SEQ ID NO: 102578 - protein, 587 aa, Trichodesmium erythraeum IMS101; identical to SEQ ID NO: 8604

SEQ ID NO: 102579 - DNA, 1764 bp, Pediococcus pentosaceus ATCC 25745; identical to SEQ ID NO: 8615
  CDS (1)..(1764): transl_table=11

SEQ ID NO: 102580 - protein, 587 aa, Pediococcus pentosaceus ATCC 25745; identical to SEQ ID NO: 8616

SEQ ID NO: 102581 - DNA, 1434 bp, Oenococcus oeni PSU-1; identical to SEQ ID NO: 8617
  CDS (1)..(1434): transl_table=11

SEQ ID NO: 102582 - protein, 477 aa, Oenococcus oeni PSU-1; identical to SEQ ID NO: 8618

SEQ ID NO: 102583 - DNA, 1422 bp, Leuconostoc mesenteroides subsp. mesenteroides ATCC 8293; identical to SEQ ID NO: 15836
  CDS (1)..(1422): transl_table=11

SEQ ID NO: 102584 - protein, 473 aa, Leuconostoc mesenteroides subsp. mesenteroides ATCC 8293; identical to SEQ ID NO: 15837

SEQ ID NO: 102585 - DNA, 1452 bp, Magnetococcus sp. MC-1; identical to SEQ ID NO: 8621
  CDS (1)..(1452): transl_table=11

SEQ ID NO: 102586 - protein, 483 aa, Magnetococcus sp. MC-1; identical to SEQ ID NO: 8622

SEQ ID NO: 102587 - DNA, 1770 bp, Nostoc punctiforme PCC 73102; identical to SEQ ID NO: 96432
  CDS (1)..(1770): transl_table=11

SEQ ID NO: 102588 - protein, 589 aa, Nostoc punctiforme PCC 73102; identical to SEQ ID NO: 96433

SEQ ID NO: 102589 - DNA, 1428 bp, Fusobacterium nucleatum subsp. vincentii ATCC 49256; identical to SEQ ID NO: 15846
  CDS (1)..(1428): transl_table=11

SEQ ID NO: 102590 - protein, 475 aa, Fusobacterium nucleatum subsp. vincentii ATCC 49256; identical to SEQ ID NO: 15847

SEQ ID NO: 102591 - DNA, 1776 bp, Crocosphaera watsonii WH 8501; identical to SEQ ID NO: 8631
  CDS (1)..(1776): transl_table=11

SEQ ID NO: 102592 - protein, 591 aa, Crocosphaera watsonii WH 8501; identical to SEQ ID NO: 8632

SEQ ID NO: 102593 - DNA, 1749 bp, Exiguobacterium sibiricum 255-15; identical to SEQ ID NO: 15850
  CDS (1)..(1749): transl_table=11

SEQ ID NO: 102594 - protein, 582 aa, Exiguobacterium sibiricum 255-15; identical to SEQ ID NO: 15851

SEQ ID NO: 102595 - DNA, 1569 bp, Kineococcus radiotolerans SRS30216; identical to SEQ ID NO: 8633
  CDS (1)..(1569): transl_table=11

SEQ ID NO: 102596 - protein, 522 aa, Kineococcus radiotolerans SRS30216; identical to SEQ ID NO: 8634

SEQ ID NO: 102597 - DNA, 1743 bp, Prochlorococcus marinus str. MIT 9211
  CDS (1)..(1743): transl_table=11
atgacaaacatacattttaaaagaaggaccaagattgttgcgacgattggaccagcaactgaaagtaaagaacgtattacagagcttgttgaagctggcgcaacaaccttcaggcttaatttttcgcacggagaccatagcgagcatgccaagcgaatagaaacgatcagactagtcgaggcgaagcttggggttaagattggtattcttcaagatcttcaaggacccaaaatacgtctgggtagatttaaagatggtcctataagactaaatagtggtgacaagttcgtacttacctcaaaggacgtaggttgtaataacgaaatagctaatgtcacatatgaaaagttagtcagtgaggtgtcaataaataaacgaatacttttagatgatggcagagtggagatggtcgtggaaagggtagataaacttgaggaaaagctacattgcaaagtcgttgtaggtggaatgttatctaataataaaggtgtaaatttccctgatgttcagttatcaataaatgctttgactccaaaggataagatcgatctttcctttggactttctcagagtattgactgggtagcacttagttttgttaggaaccctgatgatataaaagagattaaagagcttattagaagtcatggatataccacaccagtagttgcaaaaatagagaagtttgaagctattgatcaaatagatgccattcttcgcttatgtgacggtgtaatggttgctaggggcgatttgggtgtagaggtgcctgctgaagaagtcccattactacaaaaagagctcattaaaaaatccaatagtttgggaattccaataattacggcaacgcaaatgcttgactctatggcttctagcccaagaccaaccagggcagaagttagtgatgttgcaaatgccattcttgatggcactgatgctgtaatgctttcgaacgaaactgctgtaggagactatccaatagaagctgtgaaaaccatggcgactattgccaaacgaattgagaaagattacccgcaaagagcgctagaaagccatctaccaagcaccattccaaatgcaattagtgctgctgttagctctatatcaagacaattaaatgcctctgcaatattgccattaactaaaagtggttcaactgctcataatgtaagcaaattcaggcctccaacccctatagttgctgtaactaatgaaactgatgttgcaagaaggctccaattagtttggggagttactccaatagttattaaagaacaagaaactacaactaaaacatttaacttagccatggagatggcccagggtatgggcttacttaagccaggtgctcttgtggtccaaacagctggcacaataactggagtaagtggatcaactgacctaataaaggttggcatagttaatgacatagttgcccgtggaaattctgaaggcaataattctgtttgtgggaaagtgagaattgcaaaggaacaaaaagatttatccgaattgaagaaaggtgaaatattagttttagataaaaatattaataattattctcaagctttgaaatatgcagcaggaattatattagaaggaaccttaaatatagaaaataataatactgtgccaacaatatataatgtaaaaggtgctacagatatcctaagagatggtgatatggtcacactagtcctaaaggaagggactatttgtagaggtgaaattcttaacgattaa

SEQ ID NO: 102598 - protein, 580 aa, Prochlorococcus marinus str. MIT 9211
MTNIHFKRRTKIVATIGPATESKERITELVEAGATTFRLNFSHGDHSEHAKRIETIRLVEAKLGVKIGILQDLQGPKIRLGRFKDGPIRLNSGDKFVLTSKDVGCNNEIANVTYEKLVSEVSINKRILLDDGRVEMVVERVDKLEEKLHCKVVVGGMLSNNKGVNFPDVQLSINALTPKDKIDLSFGLSQSIDWVALSFVRNPDDIKEIKELIRSHGYTTPVVAKIEKFEAIDQIDAILRLCDGVMVARGDLGVEVPAEEVPLLQKELIKKSNSLGIPIITATQMLDSMASSPRPTRAEVSDVANAILDGTDAVMLSNETAVGDYPIEAVKTMATIAKRIEKDYPQRALESHLPSTIPNAISAAVSSISRQLNASAILPLTKSGSTAHNVSKFRPPTPIVAVTNETDVARRLQLVWGVTPIVIKEQETTTKTFNLAMEMAQGMGLLKPGALVVQTAGTITGVSGSTDLIKVGIVNDIVARGNSEGNNSVCGKVRIAKEQKDLSELKKGEILVLDKNINNYSQALKYAAGIILEGTLNIENNNTVPTIYNVKGATDILRDGDMVTLVLKEGTICRGEILND

SEQ ID NO: 102599 - DNA, 1788 bp, Synechococcus sp. WH 5701; identical to SEQ ID NO: 15854
  CDS (1)..(1788): transl_table=11

SEQ ID NO: 102600 - protein, 595 aa, Synechococcus sp. WH 5701; identical to SEQ ID NO: 15855

SEQ ID NO: 102601 - DNA, 1437 bp, Pseudoalteromonas tunicata D2; identical to SEQ ID NO: 8645
  CDS (1)..(1437): transl_table=11

SEQ ID NO: 102602 - protein, 478 aa, Pseudoalteromonas tunicata D2; identical to SEQ ID NO: 8646

SEQ ID NO: 102603 - DNA, 1413 bp, Photobacterium sp. SKA34; identical to SEQ ID NO: 15858
  CDS (1)..(1413): transl_table=11

SEQ ID NO: 102604 - protein, 470 aa, Photobacterium sp. SKA34; identical to SEQ ID NO: 15859

SEQ ID NO: 102605 - DNA, 1437 bp, Oceanospirillum sp. MED92; identical to SEQ ID NO: 8649
  CDS (1)..(1437): transl_table=11

SEQ ID NO: 102606 - protein, 478 aa, Oceanospirillum sp. MED92; identical to SEQ ID NO: 8650

SEQ ID NO: 102607 - DNA, 1431 bp, Flavobacteria bacterium BBFL7; identical to SEQ ID NO: 8653
  CDS (1)..(1431): transl_table=11

SEQ ID NO: 102608 - protein, 476 aa, Flavobacteria bacterium BBFL7; identical to SEQ ID NO: 8654

SEQ ID NO: 102609 - DNA, 1431 bp, Rickettsiella grylli; identical to SEQ ID NO: 8657
  CDS (1)..(1431): transl_table=11

SEQ ID NO: 102610 - protein, 476 aa, Rickettsiella grylli; identical to SEQ ID NO: 8658

SEQ ID NO: 102611 - DNA, 1437 bp, Alteromonadales bacterium TW-7; identical to SEQ ID NO: 8661
  CDS (1)..(1437): transl_table=11

SEQ ID NO: 102612 - protein, 478 aa, Alteromonadales bacterium TW-7; identical to SEQ ID NO: 8662

SEQ ID NO: 102613 - DNA, 1437 bp, marine gamma proteobacterium HTCC2143; identical to SEQ ID NO: 8663
  CDS (1)..(1437): transl_table=11

SEQ ID NO: 102614 - protein, 478 aa, marine gamma proteobacterium HTCC2143; identical to SEQ ID NO: 8664

SEQ ID NO: 102615 - DNA, 1416 bp, Pseudomonas putida GB-1; identical to SEQ ID NO: 8667
  CDS (1)..(1416): transl_table=11

SEQ ID NO: 102616 - protein, 471 aa, Pseudomonas putida GB-1; identical to SEQ ID NO: 8668

SEQ ID NO: 102617 - DNA, 1455 bp, Pseudomonas putida GB-1; identical to SEQ ID NO: 8669
  CDS (1)..(1455): transl_table=11

SEQ ID NO: 102618 - protein, 484 aa, Pseudomonas putida GB-1; identical to SEQ ID NO: 8670

SEQ ID NO: 102619 - DNA, 1449 bp, Marinobacter sp. ELB17; identical to SEQ ID NO: 8671
  CDS (1)..(1449): transl_table=11

SEQ ID NO: 102620 - protein, 482 aa, Marinobacter sp. ELB17; identical to SEQ ID NO: 8672

SEQ ID NO: 102621 - DNA, 1761 bp, Bacillus sp. SG-1; identical to SEQ ID NO: 15880
  CDS (1)..(1761): transl_table=11

SEQ ID NO: 102622 - protein, 586 aa, Bacillus sp. SG-1; identical to SEQ ID NO: 15881

SEQ ID NO: 102623 - DNA, 1431 bp, unidentified eubacterium SCB49; identical to SEQ ID NO: 15882
  CDS (1)..(1431): transl_table=11

SEQ ID NO: 102624 - protein, 476 aa, unidentified eubacterium SCB49; identical to SEQ ID NO: 15883

SEQ ID NO: 102625 - DNA, 1413 bp, Moritella sp. PE36; identical to SEQ ID NO: 15884
  CDS (1)..(1413): transl_table=11

SEQ ID NO: 102626 - protein, 470 aa, Moritella sp. PE36; identical to SEQ ID NO: 15885

SEQ ID NO: 102627 - DNA, 1464 bp, Riemerella anatipestifer; identical to SEQ ID NO: 8673
  CDS (1)..(1464): transl_table=11

SEQ ID NO: 102628 - protein, 487 aa, Riemerella anatipestifer; identical to SEQ ID NO: 8674

SEQ ID NO: 102629 - DNA, 1503 bp, Vitis vinifera; identical to SEQ ID NO: 15892
  CDS (1)..(1503)

SEQ ID NO: 102630 - protein, 500 aa, Vitis vinifera; identical to SEQ ID NO: 15893

SEQ ID NO: 102631 - DNA, 1743 bp, Vitis vinifera; identical to SEQ ID NO: 15894
  CDS (1)..(1743)
  misc_feature (200)..(200): y is t or c
  misc_feature (1338)..(1338): y is t or c

SEQ ID NO: 102632 - protein, 580 aa, Vitis vinifera; identical to SEQ ID NO: 15895
  misc_feature (67)..(67): The Xaa at location 67 stands for Met, or Thr.

SEQ ID NO: 102633 - DNA, 1866 bp, Vitis vinifera; identical to SEQ ID NO: 15896
  CDS (1)..(1866)

SEQ ID NO: 102634 - protein, 621 aa, Vitis vinifera; identical to SEQ ID NO: 15897

SEQ ID NO: 102635 - DNA, 1755 bp, Bacillus subtilis; identical to SEQ ID NO: 8681
  CDS (1)..(1755): transl_table=11

SEQ ID NO: 102636 - protein, 584 aa, Bacillus subtilis; identical to SEQ ID NO: 8682

SEQ ID NO: 102637 - DNA, 1428 bp, Zymomonas mobilis; identical to SEQ ID NO: 8683
  CDS (1)..(1428): transl_table=11

SEQ ID NO: 102638 - protein, 475 aa, Zymomonas mobilis; identical to SEQ ID NO: 8684

SEQ ID NO: 102639 - DNA, 2100 bp, Ostreococcus tauri; identical to SEQ ID NO: 8685
  CDS (1)..(2100)

SEQ ID NO: 102640 - protein, 699 aa, Ostreococcus tauri; identical to SEQ ID NO: 8686

SEQ ID NO: 102641 - DNA, 1692 bp, Crassostrea gigas; identical to SEQ ID NO: 15908
  CDS (1)..(1692)

SEQ ID NO: 102642 - protein, 563 aa, Crassostrea gigas; identical to SEQ ID NO: 15909

SEQ ID NO: 102643 - DNA, 1533 bp, Arabidopsis thaliana; identical to SEQ ID NO: 8689
  CDS (1)..(1533)

SEQ ID NO: 102644 - protein, 510 aa, Arabidopsis thaliana; identical to SEQ ID NO: 8690

SEQ ID NO: 102645 - DNA, 1536 bp, Capsicum annuum; identical to SEQ ID NO: 8691
  CDS (1)..(1536)

SEQ ID NO: 102646 - protein, 511 aa, Capsicum annuum; identical to SEQ ID NO: 8692

SEQ ID NO: 102647 - DNA, 1731 bp, Medicago truncatula; identical to SEQ ID NO: 15914
  CDS (1)..(1731)

SEQ ID NO: 102648 - protein, 576 aa, Medicago truncatula; identical to SEQ ID NO: 15915

SEQ ID NO: 102649 - DNA, 1590 bp, Medicago truncatula; identical to SEQ ID NO: 15916
  CDS (1)..(1590)

SEQ ID NO: 102650 - protein, 529 aa, Medicago truncatula; identical to SEQ ID NO: 15917

SEQ ID NO: 102651 - DNA, 1437 bp, Nitrosovibrio sp; identical to SEQ ID NO: 15918
  CDS (1)..(1437): transl_table=11

SEQ ID NO: 102652 - protein, 478 aa, Nitrosovibrio sp; identical to SEQ ID NO: 15919

SEQ ID NO: 102653 - DNA, 1455 bp, Nitrosospira sp
  CDS (1)..(1455): transl_table=11
atgattcgaagaacaaagatcgtagcaacacttggtcctgcatcccgagatgcaaaggtgctggagcggatgataaacgccggcgttgatgtagtccgtatcaatttttcccatgggaccagggaagagcatatcgaaggtgccgagttggcgcgctccctggcacgcgctgccggtcacgcggtgggtgtgctggcggacctgcaggggcccaagattcgaatcggcaaatttgaaaataataaaattctgctgaaaacgggcgatcaattcatactcgacgctgaatgcgagcttggaaaccaggaacgggtgggcctggattacaaggaattggccagcgatgtcgagaccggtgcaacgctgatcctggatgatggccgcatcgtgctcggcgtttccgaagtcaagggaagccaggtttattgcgtggttgaacagggtggaatactgtccaacaacaagggaatcaaccggaaaggcgggggtctgagtgcgcctgccctcaccggcaaggatgtggaagatatccggacggccgcagcgcttaaagccgattatctggcggtatcgtttccccgttctggggaagatatgcgctgggcgcgcgatgtaatgcgcgaggcgggcgggaaaagtttattgatggcgaagatcgaacgatcggaagccatcctggcgctggacgacattctggaggcctccgatgcgatcatggttgcgcgtggagaccttgcggtagaggtaggcgatgcagtggtgccggcgttgcaaaaacggatgatccgcactgcccgaaccaagaacaagctggtggtaaccgccacccagatgatggagtccatggtcagcagtcccatccccacccgcgcggaggtatcggatgtagcaaatgcggtactggatggcactgatgcggtgatgctgtcagcggaatccgccaccgggcaatatcccgttgaagcagttgcggcaatggcaagggtatgcctggaggcggaaaaggaatacctggtaagcagtgaaaatcgacggctgcagggcggcctgcccgataatatcgaagaagcgattgcccgtgcgaccatgttcaccgcagggggattgaagatcagagctattgcggcgcttacgcaaagcggcaggaccgtgttgctgatgtcgcgcaggagttccaccgtgcccatattcgcgttgagtccgcaggaggatacacggcgcaagatgacgttatttcgcggcgtgtatccggtcaagttcggcggaggttcgaacgaccccgaaatcatcctgaatcacgccgaaaacgagttgctcaggcgtggcgcggtgcgcaacggcgacctgatcatcatgaccatcggtgaaccggtgggcaaggcaggcggcaccaataccatgaaaatagtgaaggtcggcgagcacaggaagcaggaacggaaggtggaatcctga

SEQ ID NO: 102654 - protein, 484 aa, Nitrosospira sp
MIRRTKIVATLGPASRDAKVLERMINAGVDVVRINFSHGTREEHIEGAELARSLARAAGHAVGVLADLQGPKIRIGKFENNKILLKTGDQFILDAECELGNQERVGLDYKELASDVETGATLILDDGRIVLGVSEVKGSQVYCVVEQGGILSNNKGINRKGGGLSAPALTGKDVEDIRTAAALKADYLAVSFPRSGEDMRWARDVMREAGGKSLLMAKIERSEAILALDDILEASDAIMVARGDLAVEVGDAVVPALQKRMIRTARTKNKLVVTATQMMESMVSSPIPTRAEVSDVANAVLDGTDAVMLSAESATGQYPVEAVAAMARVCLEAEKEYLVSSENRRLQGGLPDNIEEAIARATMFTAGGLKIRAIAALTQSGRTVLLMSRRSSTVPIFALSPQEDTRRKMTLFRGVYPVKFGGGSNDPEIILNHAENELLRRGAVRNGDLIIMTIGEPVGKAGGTNTMKIVKVGEHRKQERKVES

SEQ ID NO: 102655 - DNA, 1620 bp, Phaeodactylum tricornutum; identical to SEQ ID NO: 8699
  CDS (1)..(1620)

SEQ ID NO: 102656 - protein, 539 aa, Phaeodactylum tricornutum; identical to SEQ ID NO: 8700

SEQ ID NO: 102657 - DNA, 1632 bp, Phaeodactylum tricornutum; identical to SEQ ID NO: 8701
  CDS (1)..(1632)

SEQ ID NO: 102658 - protein, 543 aa, Phaeodactylum tricornutum; identical to SEQ ID NO: 8702

SEQ ID NO: 102659 - DNA, 1542 bp, Phaeodactylum tricornutum; identical to SEQ ID NO: 8703
  CDS (1)..(1542)

SEQ ID NO: 102660 - protein, 513 aa, Phaeodactylum tricornutum; identical to SEQ ID NO: 8704

SEQ ID NO: 102661 - DNA, 1998 bp, Phaeodactylum tricornutum; identical to SEQ ID NO: 8705
  CDS (1)..(1998)

SEQ ID NO: 102662 - protein, 665 aa, Phaeodactylum tricornutum; identical to SEQ ID NO: 8706

SEQ ID NO: 102663 - DNA, 1533 bp, Solanum tuberosum; identical to SEQ ID NO: 8707
  CDS (1)..(1533)

SEQ ID NO: 102664 - protein, 510 aa, Solanum tuberosum; identical to SEQ ID NO: 8708

SEQ ID NO: 102665 - DNA, 1533 bp, Citrus sinensis; identical to SEQ ID NO: 8709
  CDS (1)..(1533)

SEQ ID NO: 102666 - protein, 510 aa, Citrus sinensis; identical to SEQ ID NO: 8710

SEQ ID NO: 102667 - DNA, 1740 bp, Arabidopsis thaliana; identical to SEQ ID NO: 8711
  CDS (1)..(1740)

SEQ ID NO: 102668 - protein, 579 aa, Arabidopsis thaliana; identical to SEQ ID NO: 8712

SEQ ID NO: 102669 - DNA, 1509 bp, Glycine max; identical to SEQ ID NO: 8713
  CDS (1)..(1509)

SEQ ID NO: 102670 - protein, 502 aa, Glycine max; identical to SEQ ID NO: 8714

SEQ ID NO: 102671 - DNA, 1530 bp, Zea mays; identical to SEQ ID NO: 8715
  CDS (1)..(1530)

SEQ ID NO: 102672 - protein, 509 aa, Zea mays; identical to SEQ ID NO: 8716

SEQ ID NO: 102673 - DNA, 1767 bp, Lactobacillus casei; identical to SEQ ID NO: 15934
  CDS (1)..(1767): transl_table=11

SEQ ID NO: 102674 - protein, 588 aa, Lactobacillus casei; identical to SEQ ID NO: 8718

SEQ ID NO: 102675 - DNA, 1521 bp, Saccharomyces bayanus; identical to SEQ ID NO: 8719
  CDS (1)..(1521)

SEQ ID NO: 102676 - protein, 506 aa, Saccharomyces bayanus; identical to SEQ ID NO: 8720

SEQ ID NO: 102677 - DNA, 1584 bp, Arabidopsis thaliana; identical to SEQ ID NO: 8721
  CDS (1)..(1584)

SEQ ID NO: 102678 - protein, 527 aa, Arabidopsis thaliana; identical to SEQ ID NO: 8722

SEQ ID NO: 102679 - DNA, 1533 bp, Glycine max; identical to SEQ ID NO: 8723
  CDS (1)..(1533)

SEQ ID NO: 102680 - protein, 510 aa, Glycine max; identical to SEQ ID NO: 8724

SEQ ID NO: 102681 - DNA, 1536 bp, Glycine max; identical to SEQ ID NO: 8725
  CDS (1)..(1536)

SEQ ID NO: 102682 - protein, 511 aa, Glycine max; identical to SEQ ID NO: 8726

SEQ ID NO: 102683 - DNA, 1791 bp, Arabidopsis thaliana; identical to SEQ ID NO: 8727
  CDS (1)..(1791)

SEQ ID NO: 102684 - protein, 596 aa, Arabidopsis thaliana; identical to SEQ ID NO: 8728

SEQ ID NO: 102685 - DNA, 1584 bp, Arabidopsis thaliana; identical to SEQ ID NO: 8729
  CDS (1)..(1584)

SEQ ID NO: 102686 - protein, 527 aa, Arabidopsis thaliana; identical to SEQ ID NO: 8730

SEQ ID NO: 102687 - DNA, 1665 bp, Drosophila melanogaster; identical to SEQ ID NO: 15948
  CDS (1)..(1665)

SEQ ID NO: 102688 - protein, 554 aa, Drosophila melanogaster; identical to SEQ ID NO: 15949

SEQ ID NO: 102689 - DNA, 1740 bp, Arabidopsis thaliana; identical to SEQ ID NO: 8731
  CDS (1)..(1740)

SEQ ID NO: 102690 - protein, 579 aa, Arabidopsis thaliana; identical to SEQ ID NO: 8732

SEQ ID NO: 102691 - DNA, 1581 bp, Aspergillus oryzae; identical to SEQ ID NO: 8733
  CDS (1)..(1581)

SEQ ID NO: 102692 - protein, 526 aa, Aspergillus oryzae; identical to SEQ ID NO: 8734

SEQ ID NO: 102693 - DNA, 1545 bp, Arabidopsis thaliana; identical to SEQ ID NO: 8739
  CDS (1)..(1545)

SEQ ID NO: 102694 - protein, 514 aa, Arabidopsis thaliana; identical to SEQ ID NO: 8740

SEQ ID NO: 102695 - DNA, 1704 bp, Arabidopsis thaliana; identical to SEQ ID NO: 8741
  CDS (1)..(1704)

SEQ ID NO: 102696 - protein, 567 aa, Arabidopsis thaliana; identical to SEQ ID NO: 8742

SEQ ID NO: 102697 - DNA, 1533 bp, Lilium longiflorum; identical to SEQ ID NO: 8743
  CDS (1)..(1533)

SEQ ID NO: 102698 - protein, 510 aa, Lilium longiflorum; identical to SEQ ID NO: 8744

SEQ ID NO: 102699 - DNA, 1413 bp, Vibrio marinus; identical to SEQ ID NO: 8745
  CDS (1)..(1413): transl_table=11

SEQ ID NO: 102700 - protein, 470 aa, Vibrio marinus; identical to SEQ ID NO: 8746

SEQ ID NO: 102701 - DNA, 1752 bp, Ricinus communis; identical to SEQ ID NO: 8747
  CDS (1)..(1752)

SEQ ID NO: 102702 - protein, 583 aa, Ricinus communis; identical to SEQ ID NO: 8748

SEQ ID NO: 102703 - DNA, 1782 bp, Nicotiana tabacum; identical to SEQ ID NO: 8749
  CDS (1)..(1782)

SEQ ID NO: 102704 - protein, 593 aa, Nicotiana tabacum; identical to SEQ ID NO: 8750

SEQ ID NO: 102705 - DNA, 1494 bp, Arabidopsis thaliana; identical to SEQ ID NO: 8751
  CDS (1)..(1494)

SEQ ID NO: 102706 - protein, 497 aa, Arabidopsis thaliana; identical to SEQ ID NO: 8752

SEQ ID NO: 102707 - DNA, 1533 bp, Solanum tuberosum; identical to SEQ ID NO: 8753
  CDS (1)..(1533)

SEQ ID NO: 102708 - protein, 510 aa, Solanum tuberosum; identical to SEQ ID NO: 8754

SEQ ID NO: 102709 - DNA, 1536 bp, Glycine max; identical to SEQ ID NO: 8755
  CDS (1)..(1536)

SEQ ID NO: 102710 - protein, 511 aa, Glycine max; identical to SEQ ID NO: 8756

SEQ ID NO: 102711 - DNA, 1527 bp, Nicotiana tabacum; identical to SEQ ID NO: 15976
  CDS (1)..(1527)

SEQ ID NO: 102712 - protein, 508 aa, Nicotiana tabacum; identical to SEQ ID NO: 8758

SEQ ID NO: 102713 - DNA, 1689 bp, Nicotiana tabacum; identical to SEQ ID NO: 8759
  CDS (1)..(1689)

SEQ ID NO: 102714 - protein, 562 aa, Nicotiana tabacum; identical to SEQ ID NO: 8760

SEQ ID NO: 102715 - DNA, 1506 bp, Candida glabrata; identical to SEQ ID NO: 8763
  CDS (1)..(1506)

SEQ ID NO: 102716 - protein, 501 aa, Candida glabrata; identical to SEQ ID NO: 8764

SEQ ID NO: 102717 - DNA, 1413 bp, Escherichia coli O157; identical to SEQ ID NO: 8765
  CDS (1)..(1413): transl_table=11

SEQ ID NO: 102718 - protein, 470 aa, Escherichia coli O157; identical to SEQ ID NO: 8766

SEQ ID NO: 102719 - DNA, 1413 bp, Salmonella typhi; identical to SEQ ID NO: 15984
  CDS (1)..(1413): transl_table=11

SEQ ID NO: 102720 - protein, 470 aa, Salmonella typhi; identical to SEQ ID NO: 15985

SEQ ID NO: 102721 - DNA, 1413 bp, Salmonella typhimurium; identical to SEQ ID NO: 8767
  CDS (1)..(1413): transl_table=11

SEQ ID NO: 102722 - protein, 470 aa, Salmonella typhimurium; identical to SEQ ID NO: 8768

SEQ ID NO: 102723 - DNA, 1503 bp, Saccharomyces cerevisiae; identical to SEQ ID NO: 8769
  CDS (1)..(1503)

SEQ ID NO: 102724 - protein, 500 aa, Saccharomyces cerevisiae; identical to SEQ ID NO: 8770

SEQ ID NO: 102725 - DNA, 1449 bp, Agrobacterium vitis; identical to SEQ ID NO: 15990
  CDS (1)..(1449): transl_table=11

SEQ ID NO: 102726 - protein, 482 aa, Agrobacterium vitis; identical to SEQ ID NO: 15991

SEQ ID NO: 102727 - DNA, 1527 bp, Candida glabrata; identical to SEQ ID NO: 8771
  CDS (1)..(1527)

SEQ ID NO: 102728 - protein, 508 aa, Candida glabrata; identical to SEQ ID NO: 8772

SEQ ID NO: 102729 - DNA, 1443 bp, Escherichia coli; identical to SEQ ID NO: 8363
  CDS (1)..(1443): transl_table=11

SEQ ID NO: 102730 - protein, 480 aa, Escherichia coli; identical to SEQ ID NO: 8364

SEQ ID NO: 102731 - DNA, 1443 bp, Salmonella typhimurium; identical to SEQ ID NO: 8773
  CDS (1)..(1443): transl_table=11

SEQ ID NO: 102732 - protein, 480 aa, Salmonella typhimurium; identical to SEQ ID NO: 8774

SEQ ID NO: 102733 - DNA, 1521 bp, Saccharomyces cerevisiae; identical to SEQ ID NO: 8775
  CDS (1)..(1521)

SEQ ID NO: 102734 - protein, 506 aa, Saccharomyces cerevisiae; identical to SEQ ID NO: 8776

SEQ ID NO: 102735 - DNA, 1599 bp, Agaricus bisporus; identical to SEQ ID NO: 16002
  CDS (1)..(1599)

SEQ ID NO: 102736 - protein, 532 aa, Agaricus bisporus; identical to SEQ ID NO: 16003

SEQ ID NO: 102737 - DNA, 1506 bp, Ashbya gossypii; identical to SEQ ID NO: 8777
  CDS (1)..(1506)

SEQ ID NO: 102738 - protein, 501 aa, Ashbya gossypii; identical to SEQ ID NO: 8778

SEQ ID NO: 102739 - DNA, 1581 bp, Aspergillus niger; identical to SEQ ID NO: 8779
  CDS (1)..(1581)

SEQ ID NO: 102740 - protein, 526 aa, Aspergillus niger; identical to SEQ ID NO: 8780

SEQ ID NO: 102741 - DNA, 1758 bp, Bacillus licheniformis; identical to SEQ ID NO: 8781
  CDS (1)..(1758): transl_table=11

SEQ ID NO: 102742 - protein, 585 aa, Bacillus licheniformis; identical to SEQ ID NO: 8782

SEQ ID NO: 102743 - DNA, 1761 bp, Bacillus psychrophilus; identical to SEQ ID NO: 16010
  CDS (1)..(1761): transl_table=11

SEQ ID NO: 102744 - protein, 586 aa, Bacillus psychrophilus; identical to SEQ ID NO: 8784

SEQ ID NO: 102745 - DNA, 1764 bp, Bacillus stearothermophilus; identical to SEQ ID NO: 8785
  CDS (1)..(1764): transl_table=11

SEQ ID NO: 102746 - protein, 587 aa, Bacillus stearothermophilus; identical to SEQ ID NO: 8786

SEQ ID NO: 102747 - DNA, 1758 bp, Bacillus subtilis; identical to SEQ ID NO: 8787
  CDS (1)..(1758): transl_table=11

SEQ ID NO: 102748 - protein, 585 aa, Bacillus subtilis; identical to SEQ ID NO: 8788

SEQ ID NO: 102749 - DNA, 1443 bp, Buchnera aphidicola subsp; identical to SEQ ID NO: 16016
  CDS (1)..(1443): transl_table=11

SEQ ID NO: 102750 - protein, 480 aa, Buchnera aphidicola subsp; identical to SEQ ID NO: 16017

SEQ ID NO: 102751 - DNA, 1422 bp, Clostridium acetobutylicum; identical to SEQ ID NO: 8791
  CDS (1)..(1422): transl_table=11

SEQ ID NO: 102752 - protein, 473 aa, Clostridium acetobutylicum; identical to SEQ ID NO: 8792

SEQ ID NO: 102753 - DNA, 1428 bp, Corynebacterium glutamicum; identical to SEQ ID NO: 16020
  CDS (1)..(1428): transl_table=11

SEQ ID NO: 102754 - protein, 475 aa, Corynebacterium glutamicum; identical to SEQ ID NO: 16021

SEQ ID NO: 102755 - DNA, 1515 bp, Debaryomyces hansenii; identical to SEQ ID NO: 8793
  CDS (1)..(1515)

SEQ ID NO: 102756 - protein, 504 aa, Debaryomyces hansenii; identical to SEQ ID NO: 8794

SEQ ID NO: 102757 - DNA, 1602 bp, Drosophila melanogaster; identical to SEQ ID NO: 16024
  CDS (1)..(1602)

SEQ ID NO: 102758 - protein, 533 aa, Drosophila melanogaster; identical to SEQ ID NO: 16025

SEQ ID NO: 102759 - DNA, 1581 bp, Emericella nidulans; identical to SEQ ID NO: 8795
  CDS (1)..(1581)

SEQ ID NO: 102760 - protein, 526 aa, Emericella nidulans; identical to SEQ ID NO: 8796

SEQ ID NO: 102761 - DNA, 1437 bp, Haemophilus influenzae; identical to SEQ ID NO: 8373
  CDS (1)..(1437): transl_table=11

SEQ ID NO: 102762 - protein, 478 aa, Haemophilus influenzae; identical to SEQ ID NO: 8374

SEQ ID NO: 102763 - DNA, 1506 bp, Kluyveromyces lactis; identical to SEQ ID NO: 8797
  CDS (1)..(1506)

SEQ ID NO: 102764 - protein, 501 aa, Kluyveromyces lactis; identical to SEQ ID NO: 8798

SEQ ID NO: 102765 - DNA, 1452 bp, Methylobacterium extorquens; identical to SEQ ID NO: 16032
  CDS (1)..(1452): transl_table=11

SEQ ID NO: 102766 - protein, 483 aa, Methylobacterium extorquens; identical to SEQ ID NO: 16033

SEQ ID NO: 102767 - DNA, 1506 bp, Saccharomyces castellii; identical to SEQ ID NO: 8801
  CDS (1)..(1506)

SEQ ID NO: 102768 - protein, 501 aa, Saccharomyces castellii; identical to SEQ ID NO: 8802

SEQ ID NO: 102769 - DNA, 1506 bp, Saccharomyces kluyveri; identical to SEQ ID NO: 8803
  CDS (1)..(1506)

SEQ ID NO: 102770 - protein, 501 aa, Saccharomyces kluyveri; identical to SEQ ID NO: 8804

SEQ ID NO: 102771 - DNA, 1530 bp, Schizosaccharomyces pombe; identical to SEQ ID NO: 8805
  CDS (1)..(1530)

SEQ ID NO: 102772 - protein, 509 aa, Schizosaccharomyces pombe; identical to SEQ ID NO: 8806

SEQ ID NO: 102773 - DNA, 1758 bp, Staphylococcus aureus; identical to SEQ ID NO: 8517
  CDS (1)..(1758): transl_table=11

SEQ ID NO: 102774 - protein, 585 aa, Staphylococcus aureus; identical to SEQ ID NO: 8518

SEQ ID NO: 102775 - DNA, 1758 bp, Staphylococcus epidermidis; identical to SEQ ID NO: 16042
  CDS (1)..(1758): transl_table=11

SEQ ID NO: 102776 - protein, 585 aa, Staphylococcus epidermidis; identical to SEQ ID NO: 16043

SEQ ID NO: 102777 - DNA, 1401 bp, Thermotoga maritima; identical to SEQ ID NO: 8407
  CDS (1)..(1401): transl_table=11

SEQ ID NO: 102778 - protein, 466 aa, Thermotoga maritima; identical to SEQ ID NO: 8408

SEQ ID NO: 102779 - DNA, 1617 bp, Trichoderma reesei; identical to SEQ ID NO: 8807
  CDS (1)..(1617)

SEQ ID NO: 102780 - protein, 538 aa, Trichoderma reesei; identical to SEQ ID NO: 8808

SEQ ID NO: 102781 - DNA, 1533 bp, Oryza sativa; identical to SEQ ID NO: 8809
  CDS (1)..(1533)

SEQ ID NO: 102782 - protein, 510 aa, Oryza sativa; identical to SEQ ID NO: 8810

SEQ ID NO: 102783 - DNA, 1752 bp, Oryza sativa; identical to SEQ ID NO: 8811
  CDS (1)..(1752)

SEQ ID NO: 102784 - protein, 583 aa, Oryza sativa; identical to SEQ ID NO: 8812

SEQ ID NO: 102785 - DNA, 1647 bp, Oryza sativa; identical to SEQ ID NO: 8379
  CDS (1)..(1647)

SEQ ID NO: 102786 - protein, 548 aa, Oryza sativa; identical to SEQ ID NO: 8380

SEQ ID NO: 102787 - DNA, 1536 bp, Oryza sativa; identical to SEQ ID NO: 8381
  CDS (1)..(1536)

SEQ ID NO: 102788 - protein, 511 aa, Oryza sativa; identical to SEQ ID NO: 8382

SEQ ID NO: 102789 - DNA, 1737 bp, Oryza sativa; identical to SEQ ID NO: 16058
  CDS (1)..(1737)

SEQ ID NO: 102790 - protein, 578 aa, Oryza sativa; identical to SEQ ID NO: 16059

SEQ ID NO: 102791 - DNA, 1713 bp, Oryza sativa; identical to SEQ ID NO: 8383
  CDS (1)..(1713)

SEQ ID NO: 102792 - protein, 570 aa, Oryza sativa; identical to SEQ ID NO: 8384

SEQ ID NO: 102793 - DNA, 1584 bp, Oryza sativa; identical to SEQ ID NO: 8385
  CDS (1)..(1584)

SEQ ID NO: 102794 - protein, 527 aa, Oryza sativa; identical to SEQ ID NO: 8386

SEQ ID NO: 102795 - DNA, 1584 bp, Oryza sativa; identical to SEQ ID NO: 8813
  CDS (1)..(1584)

SEQ ID NO: 102796 - protein, 527 aa, Oryza sativa; identical to SEQ ID NO: 8814

SEQ ID NO: 102797 - DNA, 1584 bp, Oryza sativa; identical to SEQ ID NO: 8387
  CDS (1)..(1584)

SEQ ID NO: 102798 - protein, 527 aa, Oryza sativa; identical to SEQ ID NO: 8388

SEQ ID NO: 102799 - DNA, 1584 bp, Oryza sativa; identical to SEQ ID NO: 16068
  CDS (1)..(1584)

SEQ ID NO: 102800 - protein, 527 aa, Oryza sativa; identical to SEQ ID NO: 16069

SEQ ID NO: 102801 - DNA, 1716 bp, Brassica napus; identical to SEQ ID NO: 8817
  CDS (1)..(1716)

SEQ ID NO: 102802 - protein, 571 aa, Brassica napus; identical to SEQ ID NO: 8818

SEQ ID NO: 102803 - DNA, 1584 bp, Brassica napus; identical to SEQ ID NO: 8819
  CDS (1)..(1584)

SEQ ID NO: 102804 - protein, 527 aa, Brassica napus; identical to SEQ ID NO: 8820

SEQ ID NO: 102805 - DNA, 1584 bp, Brassica napus; identical to SEQ ID NO: 8823
  CDS (1)..(1584)

SEQ ID NO: 102806 - protein, 527 aa, Brassica napus; identical to SEQ ID NO: 8824

SEQ ID NO: 102807 - DNA, 1581 bp, Glycine max; identical to SEQ ID NO: 16795
  CDS (1)..(1581)

SEQ ID NO: 102808 - protein, 526 aa, Glycine max; identical to SEQ ID NO: 15541

SEQ ID NO: 102809 - DNA, 1581 bp, Glycine max; identical to SEQ ID NO: 8825
  CDS (1)..(1581)

SEQ ID NO: 102810 - protein, 526 aa, Glycine max; identical to SEQ ID NO: 8826

SEQ ID NO: 102811 - DNA, 1545 bp, Triticum aestivum; identical to SEQ ID NO: 8827
  CDS (1)..(1545)

SEQ ID NO: 102812 - protein, 514 aa, Triticum aestivum; identical to SEQ ID NO: 8828

SEQ ID NO: 102813 - DNA, 1584 bp, Triticum aestivum; identical to SEQ ID NO: 8829
  CDS (1)..(1584)

SEQ ID NO: 102814 - protein, 527 aa, Triticum aestivum; identical to SEQ ID NO: 8830

SEQ ID NO: 102815 - DNA, 1584 bp, Brassica napus; identical to SEQ ID NO: 8835
  CDS (1)..(1584)

SEQ ID NO: 102816 - protein, 527 aa, Brassica napus; identical to SEQ ID NO: 8836

SEQ ID NO: 102817 - DNA, 1743 bp, Brassica napus; identical to SEQ ID NO: 8837
  CDS (1)..(1743)

SEQ ID NO: 102818 - protein, 580 aa, Brassica napus; identical to SEQ ID NO: 8838

SEQ ID NO: 102819 - DNA, 1743 bp, Brassica napus; identical to SEQ ID NO: 8839
  CDS (1)..(1743)

SEQ ID NO: 102820 - protein, 580 aa, Brassica napus; identical to SEQ ID NO: 8840

SEQ ID NO: 102821 - DNA, 1764 bp, Brassica napus; identical to SEQ ID NO: 8841
  CDS (1)..(1764)

SEQ ID NO: 102822 - protein, 587 aa, Brassica napus; identical to SEQ ID NO: 8842

SEQ ID NO: 102823 - DNA, 1533 bp, Brassica napus; identical to SEQ ID NO: 8843
  CDS (1)..(1533)

SEQ ID NO: 102824 - protein, 510 aa, Brassica napus; identical to SEQ ID NO: 8844

SEQ ID NO: 102825 - DNA, 1497 bp, Brassica napus; identical to SEQ ID NO: 8845
  CDS (1)..(1497)

SEQ ID NO: 102826 - protein, 498 aa, Brassica napus; identical to SEQ ID NO: 8846

SEQ ID NO: 102827 - DNA, 1584 bp, Brassica napus; identical to SEQ ID NO: 8847
  CDS (1)..(1584)

SEQ ID NO: 102828 - protein, 527 aa, Brassica napus; identical to SEQ ID NO: 8848

SEQ ID NO: 102829 - DNA, 1533 bp, Brassica napus; identical to SEQ ID NO: 8849
  CDS (1)..(1533)

SEQ ID NO: 102830 - protein, 510 aa, Brassica napus; identical to SEQ ID NO: 8850

SEQ ID NO: 102831 - DNA, 1584 bp, Brassica napus; identical to SEQ ID NO: 21831
  CDS (1)..(1584)

SEQ ID NO: 102832 - protein, 527 aa, Brassica napus; identical to SEQ ID NO: 8822

SEQ ID NO: 102833 - DNA, 1584 bp, Brassica napus; identical to SEQ ID NO: 8851
  CDS (1)..(1584)

SEQ ID NO: 102834 - protein, 527 aa, Brassica napus; identical to SEQ ID NO: 8852

SEQ ID NO: 102835 - DNA, 1497 bp, Brassica napus; identical to SEQ ID NO: 8855
  CDS (1)..(1497)

SEQ ID NO: 102836 - protein, 498 aa, Brassica napus; identical to SEQ ID NO: 8856

SEQ ID NO: 102837 - DNA, 1584 bp, Zea mays; identical to SEQ ID NO: 8857
  CDS (1)..(1584)

SEQ ID NO: 102838 - protein, 527 aa, Zea mays; identical to SEQ ID NO: 8858

SEQ ID NO: 102839 - DNA, 1728 bp, Glycine max; identical to SEQ ID NO: 8859
  CDS (1)..(1728)

SEQ ID NO: 102840 - protein, 575 aa, Glycine max; identical to SEQ ID NO: 8860

SEQ ID NO: 102841 - DNA, 1584 bp, Glycine max; identical to SEQ ID NO: 8861
  CDS (1)..(1584)

SEQ ID NO: 102842 - protein, 527 aa, Glycine max; identical to SEQ ID NO: 8862

SEQ ID NO: 102843 - DNA, 1584 bp, Glycine max; identical to SEQ ID NO: 8863
  CDS (1)..(1584)

SEQ ID NO: 102844 - protein, 527 aa, Glycine max; identical to SEQ ID NO: 8864

SEQ ID NO: 102845 - DNA, 1638 bp, Glycine max; identical to SEQ ID NO: 8865
  CDS (1)..(1638)

SEQ ID NO: 102846 - protein, 545 aa, Glycine max; identical to SEQ ID NO: 8866

SEQ ID NO: 102847 - DNA, 1638 bp, Glycine max; identical to SEQ ID NO: 8867
  CDS (1)..(1638)

SEQ ID NO: 102848 - protein, 545 aa, Glycine max; identical to SEQ ID NO: 8868

SEQ ID NO: 102849 - DNA, 1728 bp, Glycine max; identical to SEQ ID NO: 8869
  CDS (1)..(1728)

SEQ ID NO: 102850 - protein, 575 aa, Glycine max; identical to SEQ ID NO: 8870

SEQ ID NO: 102851 - DNA, 1749 bp, Glycine max; identical to SEQ ID NO: 8871
  CDS (1)..(1749)

SEQ ID NO: 102852 - protein, 582 aa, Glycine max; identical to SEQ ID NO: 8872

SEQ ID NO: 102853 - DNA, 1584 bp, Glycine max; identical to SEQ ID NO: 8873
  CDS (1)..(1584)

SEQ ID NO: 102854 - protein, 527 aa, Glycine max; identical to SEQ ID NO: 8874

SEQ ID NO: 102855 - DNA, 1749 bp, Glycine max; identical to SEQ ID NO: 8875
  CDS (1)..(1749)

SEQ ID NO: 102856 - protein, 582 aa, Glycine max; identical to SEQ ID NO: 8876

SEQ ID NO: 102857 - DNA, 1728 bp, Glycine max; identical to SEQ ID NO: 8877
  CDS (1)..(1728)

SEQ ID NO: 102858 - protein, 575 aa, Glycine max; identical to SEQ ID NO: 8878

SEQ ID NO: 102859 - DNA, 1749 bp, Glycine max; identical to SEQ ID NO: 8881
  CDS (1)..(1749)

SEQ ID NO: 102860 - protein, 582 aa, Glycine max; identical to SEQ ID NO: 8882

SEQ ID NO: 102861 - DNA, 1542 bp, Hordeum vulgare; identical to SEQ ID NO: 8883
  CDS (1)..(1542)

SEQ ID NO: 102862 - protein, 513 aa, Hordeum vulgare; identical to SEQ ID NO: 8884

SEQ ID NO: 102863 - DNA, 1584 bp, Oryza sativa; identical to SEQ ID NO: 8885
  CDS (1)..(1584)

SEQ ID NO: 102864 - protein, 527 aa, Oryza sativa; identical to SEQ ID NO: 8886

SEQ ID NO: 102865 - DNA, 1803 bp, Zea mays; identical to SEQ ID NO: 8887
  CDS (1)..(1803)

SEQ ID NO: 102866 - protein, 600 aa, Zea mays; identical to SEQ ID NO: 8888

SEQ ID NO: 102867 - DNA, 1698 bp, Triticum aestivum; identical to SEQ ID NO: 8889
  CDS (1)..(1698)

SEQ ID NO: 102868 - protein, 565 aa, Triticum aestivum; identical to SEQ ID NO: 8890

SEQ ID NO: 102869 - DNA, 1584 bp, Zea mays; identical to SEQ ID NO: 8891
  CDS (1)..(1584)

SEQ ID NO: 102870 - protein, 527 aa, Zea mays; identical to SEQ ID NO: 8892

SEQ ID NO: 102871 - DNA, 1728 bp, Zea mays; identical to SEQ ID NO: 8895
  CDS (1)..(1728)

SEQ ID NO: 102872 - protein, 575 aa, Zea mays; identical to SEQ ID NO: 8896

SEQ ID NO: 102873 - DNA, 1707 bp, Zea mays; identical to SEQ ID NO: 8897
  CDS (1)..(1707)

SEQ ID NO: 102874 - protein, 568 aa, Zea mays; identical to SEQ ID NO: 8898

SEQ ID NO: 102875 - DNA, 1629 bp, Zea mays; identical to SEQ ID NO: 8899
  CDS (1)..(1629)

SEQ ID NO: 102876 - protein, 542 aa, Zea mays; identical to SEQ ID NO: 8900

SEQ ID NO: 102877 - DNA, 1548 bp, Zea mays; identical to SEQ ID NO: 8901
  CDS (1)..(1548)

SEQ ID NO: 102878 - protein, 515 aa, Zea mays; identical to SEQ ID NO: 8902

SEQ ID NO: 102879 - DNA, 1542 bp, Zea mays; identical to SEQ ID NO: 8905
  CDS (1)..(1542)

SEQ ID NO: 102880 - protein, 513 aa, Zea mays; identical to SEQ ID NO: 8906

SEQ ID NO: 102881 - DNA, 1530 bp, Zea mays; identical to SEQ ID NO: 8903
  CDS (1)..(1530)

SEQ ID NO: 102882 - protein, 509 aa, Zea mays; identical to SEQ ID NO: 8904

SEQ ID NO: 102883 - DNA, 1707 bp, Zea mays; identical to SEQ ID NO: 8831
  CDS (1)..(1707)

SEQ ID NO: 102884 - protein, 568 aa, Zea mays; identical to SEQ ID NO: 8832

SEQ ID NO: 102885 - DNA, 1584 bp, Zea mays; identical to SEQ ID NO: 8907
  CDS (1)..(1584)

SEQ ID NO: 102886 - protein, 527 aa, Zea mays; identical to SEQ ID NO: 8908

SEQ ID NO: 102887 - DNA, 1554 bp, Zea mays; identical to SEQ ID NO: 8909
  CDS (1)..(1554)

SEQ ID NO: 102888 - protein, 517 aa, Zea mays; identical to SEQ ID NO: 8910

SEQ ID NO: 102889 - DNA, 1707 bp, Zea mays; identical to SEQ ID NO: 8911
  CDS (1)..(1707)

SEQ ID NO: 102890 - protein, 568 aa, Zea mays; identical to SEQ ID NO: 8912

SEQ ID NO: 102891 - DNA, 1728 bp, Zea mays; identical to SEQ ID NO: 8913
  CDS (1)..(1728)

SEQ ID NO: 102892 - protein, 575 aa, Zea mays; identical to SEQ ID NO: 8914

SEQ ID NO: 102893 - DNA, 20 bp, Artificial sequence
  primer
atggcgatgatagagcaaag

SEQ ID NO: 102894 - DNA, 22 bp, Artificial sequence
  primer
tcacttgacggtcaagatcttg

SEQ ID NO: 102895 - protein, 542 aa, Artificial sequence
  consensus sequence
  Variant (5)..(5): Xaa in position 5 is any amino acid
  Variant (7)..(7): Xaa in position 7 is any amino acid
  Variant (10)..(21): Xaa in position 10 to 21 is any amino acid
  Variant (22)..(23): Xaa in position 22 to 23 is any or no amino acid
  Variant (25)..(28): Xaa in position 25 to 28 is any amino acid
  Variant (29)..(29): Xaa in position 29 is any or no amino acid
  Variant (31)..(31): Xaa in position 31 is any amino acid
  Variant (33)..(33): Xaa in position 33 is any amino acid
  Variant (37)..(40): Xaa in position 37 to 40 is any amino acid
  Variant (42)..(62): Xaa in position 42 to 62 is any amino acid
  Variant (63)..(69): Xaa in position 63 to 69 is any or no amino acid
  Variant (71)..(72): Xaa in position 71 to 72 is any amino acid
  Variant (73)..(76): Xaa in position 73 to 76 is any or no amino acid
  Variant (79)..(80): Xaa in position 79 to 80 is any amino acid
  Variant (82)..(93): Xaa in position 82 to 93 is any amino acid
  Variant (94)..(100): Xaa in position 94 to 100 is any or no amino acid
  Variant (102)..(121): Xaa in position 102 to 121 is any amino acid
  Variant (122)..(128): Xaa in position 122 to 128 is any or no amino acid
  Variant (130)..(135): Xaa in position 130 to 135 is any amino acid
  Variant (136)..(138): Xaa in position 136 to 138 is any or no amino acid
  Variant (140)..(146): Xaa in position 140 to 146 is any amino acid
  Variant (147)..(151): Xaa in position 147 to 151 is any or no amino acid
  Variant (153)..(157): Xaa in position 153 to 157 is any amino acid
  Variant (159)..(178): Xaa in position 159 to 178 is any amino acid
  Variant (179)..(186): Xaa in position 179 to 186 is any or no amino acid
  Variant (188)..(190): Xaa in position 188 to 190 is any amino acid
  Variant (191)..(202): Xaa in position 191 to 202 is any or no amino acid
  Variant (204)..(207): Xaa in position 204 to 207 is any amino acid
  Variant (210)..(211): Xaa in position 210 to 211 is any amino acid
  Variant (213)..(221): Xaa in position 213 to 221 is any amino acid
  Variant (222)..(222): Xaa in position 222 is any or no amino acid
  Variant (224)..(227): Xaa in position 224 to 227 is any amino acid
  Variant (230)..(234): Xaa in position 230 to 234 is any amino acid
  Variant (236)..(250): Xaa in position 236 to 250 is any amino acid
  Variant (251)..(259): Xaa in position 251 to 259 is any or no amino acid
  Variant (261)..(261): Xaa in position 261 is any amino acid
  Variant (263)..(272): Xaa in position 263 to 272 is any amino acid
  Variant (273)..(275): Xaa in position 273 to 275 is any or no amino acid
  Variant (277)..(280): Xaa in position 277 to 280 is any amino acid
  Variant (282)..(283): Xaa in position 282 to 283 is any amino acid
  Variant (292)..(292): Xaa in position 292 is any amino acid
  Variant (294)..(294): Xaa in position 294 is any amino acid
  Variant (296)..(302): Xaa in position 296 to 302 is any amino acid
  Variant (305)..(306): Xaa in position 305 to 306 is any amino acid
  Variant (308)..(314): Xaa in position 308 to 314 is any amino acid
  Variant (316)..(316): Xaa in position 316 is any amino acid
  Variant (318)..(318): Xaa in position 318 is any amino acid
  Variant (319)..(319): Xaa in position 319 is any or no amino acid
  Variant (322)..(322): Xaa in position 322 is any amino acid
  Variant (324)..(325): Xaa in position 324 to 325 is any amino acid
  Variant (328)..(330): Xaa in position 328 to 330 is any amino acid
  Variant (332)..(332): Xaa in position 332 is any amino acid
  Variant (338)..(339): Xaa in position 338 to 339 is any amino acid
  Variant (345)..(346): Xaa in position 345 to 346 is any amino acid
  Variant (349)..(349): Xaa in position 349 is any amino acid
  Variant (351)..(352): Xaa in position 351 to 352 is any amino acid
  Variant (356)..(356): Xaa in position 356 is any amino acid
  Variant (358)..(358): Xaa in position 358 is any amino acid
  Variant (360)..(360): Xaa in position 360 is any amino acid
  Variant (362)..(362): Xaa in position 362 is any amino acid
  Variant (365)..(368): Xaa in position 365 to 368 is any amino acid
  Variant (369)..(370): Xaa in position 369 to 370 is any or no amino acid
  Variant (372)..(372): Xaa in position 372 is any amino acid
  Variant (373)..(378): Xaa in position 373 to 378 is any or no amino acid
  Variant (380)..(413): Xaa in position 380 to 413 is any amino acid
  Variant (414)..(426): Xaa in position 414 to 426 is any or no amino acid
  Variant (428)..(430): Xaa in position 428 to 430 is any amino acid
  Variant (432)..(433): Xaa in position 432 to 433 is any amino acid
  Variant (435)..(436): Xaa in position 435 to 436 is any amino acid
  Variant (438)..(443): Xaa in position 438 to 443 is any amino acid
  Variant (446)..(448): Xaa in position 446 to 448 is any amino acid
  Variant (449)..(449): Xaa in position 449 is any or no amino acid
  Variant (451)..(467): Xaa in position 451 to 467 is any amino acid
  Variant (468)..(486): Xaa in position 468 to 486 is any or no amino acid
  Variant (488)..(489): Xaa in position 488 to 489 is any amino acid
  Variant (491)..(516): Xaa in position 491 to 516 is any amino acid
  Variant (517)..(541): Xaa in position 517 to 541 is any or no amino acid
TKIVXTXGPXXXXXXXXXXXXXXGXXXXXRXNXSHGXXXXHXXXXXXXXXXXXXXXXXXXXXXXXXXXXDXXXXXXGPXXRXXXXXXXXXXXXXXXXXXXGXXXXXXXXXXXXXXXXXXXXXXXXXXXYXXXXXXXXXGXXXXXXXXXXXXGXXXXXVXXXXXXXXXXXXXXXXXXXXXXXXXXXXNXXXXXXXXXXXXXXXPXXXXKDXXDXXXXXXXXXXDXXXXSFXXXXXDXXXXXXXXXXXXXXXXXXXXXXXXKXEXXXXXXXXXXXXXIXXXXDXXMVARGDLGXEXPXXXXXXXQKXXIXXXXXXXKXVXXATXMXXSMXXXPXPTRAEXXDVANAXXDGXDXXMLSXEXAXGXYPXXXXXXMXXXXXXXEXXXXXXXXXXXXXXXXXXXXXXXXXXXXXXXXXXXXXXXXXXXXXXXIXXXTXXGXXAXXXXXXRPXXXXIXXXXXXXXXXXXXXXXXXXXXXXXXXXXXXXXXXXXGXXPXXXXXXXXXXXXXXXXXXXXXXXXXXXXXXXXXXXXXXXXXXXXXXXXXXXG

SEQ ID NO: 102896 - protein, 45 aa, Artificial sequence
  protein pattern
  Variant (2)..(4): Xaa in position 2 to 4 is any or no amino acid
  Variant (6)..(6): Xaa in position 6 is Ala, Glu, Asn or Gln
  Variant (8)..(8): Xaa in position 8 is Leu or Met
  Variant (9)..(9): Xaa in position 9 is Asp, Glu, Asn or Gln
  Variant (10)..(10): Xaa in position 10 is Ser or Thr
  Variant (12)..(16): Xaa in position 12 to 16 is any amino acid
  Variant (17)..(17): Xaa in position 17 is Ala or Pro
  Variant (22)..(23): Xaa in position 22 to 23 is any amino acid
  Variant (25)..(25): Xaa in position 25 is any amino acid
  Variant (26)..(26): Xaa in position 26 is Ala, Glu, Gly, Ser or Thr
  Variant (27)..(27): Xaa in position 27 is any amino acid
  Variant (29)..(29): Xaa in position 29 is Ile or Val
  Variant (30)..(30): Xaa in position 30 is any amino acid
  Variant (31)..(31): Xaa in position 31 is Asp, Glu or Gln
  Variant (32)..(32): Xaa in position 32 is any amino acid
  Variant (33)..(33): Xaa in position 33 is Ala, Ser or Thr
  Variant (34)..(34): Xaa in position 34 is Asp, Gly or Ser
  Variant (35)..(36): Xaa in position 35 to 36 is any amino acid
  Variant (38)..(38): Xaa in position 38 is any amino acid
  Variant (40)..(40): Xaa in position 40 is Ala, Gly or Asn
  Variant (42)..(42): Xaa in position 42 is Ser or Thr
  Variant (43)..(43): Xaa in position 43 is Ala, Ser or Thr
  Variant (44)..(44): Xaa in position 44 is any amino acid
AXXXTXMXXXMXXXXXXTRAEXXDXXXAXXXXXXXXMXSXEXXXG

SEQ ID NO: 102897 - protein, 18 aa, Artificial sequence
  protein pattern
  Variant (2)..(4): Xaa in position 2 to 4 is any amino acid
  Variant (5)..(5): Xaa in position 5 is any or no amino acid
  Variant (7)..(7): Xaa in position 7 is Ala, Gly, Ser or Val
  Variant (8)..(8): Xaa in position 8 is any amino acid
  Variant (10)..(10): Xaa in position 10 is Ile or Val
  Variant (15)..(15): Xaa in position 15 is Leu or Met
  Variant (16)..(16): Xaa in position 16 is Ala or Gly
  Variant (17)..(17): Xaa in position 17 is any amino acid
  Variant (18)..(18): Xaa in position 18 is Glu or Gln
IXXXXDXXMXARGDXXXX

SEQ ID NO: 102898 - protein, 11 aa, Artificial sequence
  protein pattern
  Variant (2)..(2): Xaa in position 2 is any amino acid
  Variant (3)..(3): Xaa in position 3 is Ile or Leu
  Variant (4)..(4): Xaa in position 4 is Ile or Val
  Variant (5)..(5): Xaa in position 5 is Ala, Cys, Gly or Ser
  Variant (7)..(7): Xaa in position 7 is Ile, Leu or Val
  Variant (10)..(10): Xaa in position 10 is any amino acid
  Variant (11)..(11): Xaa in position 11 is Ala, Cys, Ser, Thr or Val
TXXXXTXGPXX

SEQ ID NO: 102899 - DNA, 900 bp, Arabidopsis thaliana
  CDS (1)..(900)
atggtgaaaaaaagcaaaggtcgtcaaaaaatagagatggtcaaaatgaaaaatgaaagtaaccttcaagttactttttcaaaaagaagatctggacttttcaaaaaggctagtgagctttgcacactttgtggtgcagaagtggccatagttgtgttctcacctggtcgaaaagtcttttcttttggtcatccaaatgttgattctgtaattgatcgattcataaacaataaccctctacctcctcaccaacacaacaacatgcaacttagagaaactcgtcgaaattcgattgttcaggatctgaataatcatcttactcaggtgttgagtcaattagaaacagagaaaaagaagtacgacgagttaaagaaaataagagaaaagacaaaagcccttgggaattggtgggaagatcccgttgaggaacttgcgttatctcaactcgaggggttcaaaggtaatcttgaaaatttgaagaaagtagttacagtcgaagcttccagattttttcaggcaaatgttccaaacttctatgtgggaagttctagtaataatgctgcttttgggattgatgatggtagtcatatcaaccctgatatggatctctttagccaaagaagaatgatggacataaatgccttcaactacaaccagaaccaaattcaccctaatcatgcattaccaccctttggaaacaatgcttatggtattaatgaagggtttgttccagaatacaatgtgaacttcagaccagagtataacccaaaccaaaaccaaatccaaaaccaaaatcaagttcaaatccaaatccaaaaccagagttttaagagagaaaacatctctgaatatgaacatcatcatggttatcctccccagtctagatctgattactattaa

SEQ ID NO: 102900 - protein, 299 aa, Arabidopsis thaliana
MVKKSKGRQKIEMVKMKNESNLQVTFSKRRSGLFKKASELCTLCGAEVAIVVFSPGRKVFSFGHPNVDSVIDRFINNNPLPPHQHNNMQLRETRRNSIVQDLNNHLTQVLSQLETEKKKYDELKKIREKTKALGNWWEDPVEELALSQLEGFKGNLENLKKVVTVEASRFFQANVPNFYVGSSSNNAAFGIDDGSHINPDMDLFSQRRMMDINAFNYNQNQIHPNHALPPFGNNAYGINEGFVPEYNVNFRPEYNPNQNQIQNQNQVQIQIQNQSFKRENISEYEHHHGYPPQSRSDYY

SEQ ID NO: 102901 - DNA, 744 bp, Arabidopsis thaliana
  CDS (1)..(744)
atggcgagaaagaatcttggtcgtagaaaaatagagttggtaaaaatgaccaacgaatcaaaccttcaagttacgttttcaaaaagaagatctggtcttttcaaaaaaggcagtgaactttgcaccttatgtgacgcggaaattgcgataatcgtgttttcaccctcgggaaaagcatactcttttggtcatccaaatgttaacaagttacttgaccactctttagggcgtgttataagacacaacaacacaaactttgctgaaagccgcacaaagctccgtattcaaatgctcaatgagtctttaactgaggtgatggctgaaaaagaaaaagaacaagagaccaagcagtcaatagtccaaaatgaaagagagaacaaggacgctgagaagtggtggaggaactctccaacagaactcaacttagctcaatcaacttccatgaaatgtgatcttgaagctttgaagaaggaagttgatgaaaaagtcgctcaacttcatcatagaaacctaaacttctatgttggaagttctagcaatgttgctgctccagcagctgttagtggtggtaatatctccacaaaccatggtttctttgatcaaaacggaaactctacttctgctccaacactgccgtttggatttaatgttatgaatcgcacaccagctgggtacaacagttaccaactccaaaaccaggaggttaaacaagtccatcctcagtattgggctcgttactattag

SEQ ID NO: 102902 - protein, 247 aa, Arabidopsis thaliana
MARKNLGRRKIELVKMTNESNLQVTFSKRRSGLFKKGSELCTLCDAEIAIIVFSPSGKAYSFGHPNVNKLLDHSLGRVIRHNNTNFAESRTKLRIQMLNESLTEVMAEKEKEQETKQSIVQNERENKDAEKWWRNSPTELNLAQSTSMKCDLEALKKEVDEKVAQLHHRNLNFYVGSSSNVAAPAAVSGGNISTNHGFFDQNGNSTSAPTLPFGFNVMNRTPAGYNSYQLQNQEVKQVHPQYWARYY

SEQ ID NO: 102903 - DNA, 681 bp, Arabidopsis thaliana
  CDS (1)..(681)
atggtgaaaaaaactcttggtcgtagaaaggtagagatagtgaaaatgactaaggaatcaaaccttcaagtcacattttccaagagaaaagctggtctttttaagaaggctagtgaattttgcacattatgtgatgcaaaaattgcgatgatcgtgttttcaccagctggaaaagtattttcttttggtcatccaaatgttgatgttctgcttgaccactttcgagggtgtgttgtaggacacaacaacacaaaccttgatgaaagctacacaaagcttcatgttcaaatgctcaacaaatcctacactgaggtgaaggcggaagtagaaaaagaacaaaagaataagcagtcgcgggctcaaaatgaaagagaaaacgaaaacgctgaggagtggtggagtaagtctccattagaactcaacttaagtcaatcaacctgtatgatacgtgttcttaaagatttgaagaagatagttgatgaaaaagcaattcaattaatccatcaaacaaacccaaacttctatgttggaagttctagcaatgctgctgctccagcaactgttagtggtggtaatatctccacaaaccaggggttctttgatcaaaacggaatgacgactaatcctactcaaacacttctgtttggatttgatattatgaatcgcacaccaggagtttaa

SEQ ID NO: 102904 - protein, 226 aa, Arabidopsis thaliana
MVKKTLGRRKVEIVKMTKESNLQVTFSKRKAGLFKKASEFCTLCDAKIAMIVFSPAGKVFSFGHPNVDVLLDHFRGCVVGHNNTNLDESYTKLHVQMLNKSYTEVKAEVEKEQKNKQSRAQNERENENAEEWWSKSPLELNLSQSTCMIRVLKDLKKIVDEKAIQLIHQTNPNFYVGSSSNAAAPATVSGGNISTNQGFFDQNGMTTNPTQTLLFGFDIMNRTPGV

SEQ ID NO: 102905 - DNA, 747 bp, Arabidopsis thaliana
  CDS (1)..(747)
atggtgagaagtaccaaaggtcgtcagaaaatagagatgaaaaaaatggaaaacgaaagcaaccttcaggttactttctcaaaaagaagattcggtcttttcaaaaaagctagtgaactttgcacattaagtggtgcagagattctgttgattgtgttctctcctggtgggaaagtgttttcttttggccatccaagtgttcaagaactcattcatcgcttttcgaatcctaaccataattctgccattgtccatcatcagaacaacaatctccaacttgttgaaacccgtccggatagaaatatccaatatctcaacaatatactcactgaggtgctggcaaaccaggaaaaggagaaacagaagagaatggttttggacctattgaaagaatccagagaacaagtaggaaactggtatgaaaaagatgtgaaagatctcgacatgaatgaaaccaaccagctgatatctgctcttcaagatgtgaaaaagaaactggtaagagaaatgtctcaatattctcaagtaaatgtttcgcagaattactttggtcaaagttctggcgtgattggtggtggtaatgttggcattgatctttttgatcaaagaagaaatgcattcaactataatccaaacatggtgtttcccaatcatacaccaccaatgtttggatacaacaatgatggagttctcgttccgatatccaacatgaactacatgtcaagttacaacttcaaccagagctag

SEQ ID NO: 102906 - protein, 248 aa, Arabidopsis thaliana
MVRSTKGRQKIEMKKMENESNLQVTFSKRRFGLFKKASELCTLSGAEILLIVFSPGGKVFSFGHPSVQELIHRFSNPNHNSAIVHHQNNNLQLVETRPDRNIQYLNNILTEVLANQEKEKQKRMVLDLLKESREQVGNWYEKDVKDLDMNETNQLISALQDVKKKLVREMSQYSQVNVSQNYFGQSSGVIGGGNVGIDLFDQRRNAFNYNPNMVFPNHTPPMFGYNNDGVLVPISNMNYMSSYNFNQS

SEQ ID NO: 102907 - DNA, 795 bp, Arabidopsis thaliana
  CDS (1)..(795)
atgtatgttacaaaatataaaaataaattaccaactttgcaagttgatctcataataatgccacaccagactcaagcatgtatatataaacaaacactttctctccaccaaatattccaacaaagaaaagcaactaaaaccctccatacaaaaaaaactatgatgtcgaagaagaaagaaagcatcggacgacaaaaaattccaatggtaaaaataaagaaagagagccaccggcaagtcacattctccaaacgcagagccggtctcttcaagaaagctagtgagctttgcactttgtgtggtgcagagattgggatcatcgtgttttctcccgcgaaaaagcctttctcattcggacatccaagtgttgaatctgtattggatcgctacgtgtctcgaaacaatatgtccttagctcagtcgcagcaactgcaaggaagccctgcagcgagctgcgaactgaatatgcagttaacgcatattttgagcgaggtagaagaagagaagaagaagggtcaagcgatggaagagatgagaaaagagagtgtgaggcggtcgatgattaattggtgggaaaagccagtagaggagatgaatatggttcagttacaggaaatgaagtatgcattggaggagttgaggaagacggttgtgacaaacatggcgtcgtttaatgaggccaaagacgatgtgtttggtttcttggacaacaaagtgacagtccctccttacgtgaacatgccttctggtccctcaaatatttataattttgccaatggaaatggttgtttctga

SEQ ID NO: 102908 - protein, 264 aa, Arabidopsis thaliana
MYVTKYKNKLPTLQVDLIIMPHQTQACIYKQTLSLHQIFQQRKATKTLHTKKTMMSKKKESIGRQKIPMVKIKKESHRQVTFSKRRAGLFKKASELCTLCGAEIGIIVFSPAKKPFSFGHPSVESVLDRYVSRNNMSLAQSQQLQGSPAASCELNMQLTHILSEVEEEKKKGQAMEEMRKESVRRSMINWWEKPVEEMNMVQLQEMKYALEELRKTVVTNMASFNEAKDDVFGFLDNKVTVPPYVNMPSGPSNIYNFANGNGCF

SEQ ID NO: 102909 - DNA, 714 bp, Medicago truncatula
  CDS (1)..(714)
atgtcaagtggaaggaaaagccaaggtcgccaaaagattgaaatgaaaaaaattaccaacgagagcaacttgcaagtgactttctcgaagcgccgtagtgggctcttcaaaaaagccagtgagctttgcaccctctgtggtgcagatgttgctcttgttgttttctcacctagagagaaggtattttcatttggccaccccaatgttgatacggtcatagatcgttatctctctcgggtcccaccccaaaacaatggtaccatgcaattcattgaggctcaccgtagtgccagcgtgtgcgagctcaatattcaggtgactcagatcaaccagctactggacatcgagaagaaacgtgctgaagagctgagcaacttgcacaaggcgactgagactcaattttggtgggctggtcccgttgatgggatgaatagggcccaacttgaattattcaagaaggctctggatgagcttaagaaacttgttgctcatcatgttgataggcttgtaatccagggtgctcctactcaaacccttccgtattttgctggaaacagttcgtcctccaacatgcctctccatcatcaaccaaatcctccacaagctcatatgtttccagcacagttttatcagaacccaatgttgcaacctcatttatttggcttcaacaacatggggggaggaggtggatatggaccctccagattcttttga

SEQ ID NO: 102910 - protein, 237 aa, Medicago truncatula
MSSGRKSQGRQKIEMKKITNESNLQVTFSKRRSGLFKKASELCTLCGADVALVVFSPREKVFSFGHPNVDTVIDRYLSRVPPQNNGTMQFIEAHRSASVCELNIQVTQINQLLDIEKKRAEELSNLHKATETQFWWAGPVDGMNRAQLELFKKALDELKKLVAHHVDRLVIQGAPTQTLPYFAGNSSSSNMPLHHQPNPPQAHMFPAQFYQNPMLQPHLFGFNNMGGGGGYGPSRFF

SEQ ID NO: 102911 - DNA, 639 bp, Vitis vinifera
  CDS (1)..(639)
atggctactgtaaggaaaagtaagggccgccagaggattgagatcgctaaaataaagaatgagagtaacttacaggttactttctccaaacgtcgggctggcctttttaagaaggctagcgagttgtgcactctttgcggtgctgaaacagccatcataatcttctcgccagggaaaaagatatattcatttggtcacccttgtattgaatcaatcattgataggttcctggcgcgaaacccttttctaaatgctggtgcactgcagctcttccaggctcaccgtagtgctaatatcaacgagcttaatatggagctaactgaggttctgaaggaagttgaggctgagaagaaacgtggtgaagcacttgacaagacgacgaaagctttccagagacagtgctggtgggcagctccagttgaggagcttaacttggagcagcttcagatgctaaaggtgtcattggagatgctgaggaagaaagttgaaaggcaagctgataagcttatcattgaggcatcagaaccccctgctttttctgctccatattcagttggagcaatccctccatatgaaccacagacggctggatttgatcctcaaggctctacctttggttttgatggtcatttcttttga

SEQ ID NO: 102912 - protein, 212 aa, Vitis vinifera
MATVRKSKGRQRIEIAKIKNESNLQVTFSKRRAGLFKKASELCTLCGAETAIIIFSPGKKIYSFGHPCIESIIDRFLARNPFLNAGALQLFQAHRSANINELNMELTEVLKEVEAEKKRGEALDKTTKAFQRQCWWAAPVEELNLEQLQMLKVSLEMLRKKVERQADKLIIEASEPPAFSAPYSVGAIPPYEPQTAGFDPQGSTFGFDGHFF

SEQ ID NO: 102913 - DNA, 645 bp, Vitis vinifera
  CDS (1)..(645)
atggtgaagaagccaagcaagggccgccagaagatcgaaatctcaaaaatacccaagaaaaatcatctacaagtcaccttctctaaaagaaggtccgggctcttcaagaaagctagtgagctttgcactctctgtggggcaaatgtggctatcatagttttttccccggcagggaaggtgttctcctttgggcaccccgatgttgagtccatcgtcgatcggttcttcacgtgcaaccctatacccgaacccaatggtcttcacctaatcgaagctcatcggaatgctagtgtccgtgagctcaacctgcaactcacacaagttcttaatcaactagaagctgagaaaaagagaggagaaatacttagccaaatgagaagagcaagccaaactcaatgctggtgggaagcccccatcaacgagctgagtatgccagagcttgaacagctgaaggtttccatggaggaactaaagaaggtcgtactgagtcaaggtgacaagcttttgatggaggctgctaatccttcgcctttctacatgatcaatggtagctctgcaatggttgatcacttcgagattgagaggaaacctagtgagattcatggtaatgttcataattttggttatggacaggggttcttctga

SEQ ID NO: 102914 - protein, 214 aa, Vitis vinifera
MVKKPSKGRQKIEISKIPKKNHLQVTFSKRRSGLFKKASELCTLCGANVAIIVFSPAGKVFSFGHPDVESIVDRFFTCNPIPEPNGLHLIEAHRNASVRELNLQLTQVLNQLEAEKKRGEILSQMRRASQTQCWWEAPINELSMPELEQLKVSMEELKKVVLSQGDKLLMEAANPSPFYMINGSSAMVDHFEIERKPSEIHGNVHNFGYGQGFF

SEQ ID NO: 102915 - DNA, 651 bp, Vitis vinifera
  CDS (1)..(651)
  misc_feature (367)..(367): r is g or a
  misc_feature (374)..(374): r is g or a
  misc_feature (594)..(594): r is g or a
atggtgaaaaaacatagcaggggaagacagaagatcgaaataaaaaaaattgtgaagaaaagctccttggaggtcaccttctccaagcgtcgaacaggactcttcaagaaggctggcgagctttgcgttttgtgcggtgctgaggccgccgtcatcgtcttctctccgggcaggagggccttcgtcttcggccacccctccgcggacgctgtcatcgatcgcttcctccatcgcgagaccaactctcgtgcgcttgttccggcgggacaggtgcatgggcacgttcagaggcaatacttggaagctcttggaaggctggaggtgaagagggagcaagaagagacggtggggggagatggggagggtrggttttrgtgggacgcgcccattgagaacatggggttgaatgaactggagcagttcaggggttcccttgaggagctgaggaagaaggtggcggatcgagtggaggagatgactatgatgatgatgatggagagcggtccttcttcgactgccatggttgaatatgcagcgccaccgcaggagtataattcttctggtggtgttctgcatggccatgatttggctgcrcatggtgttcctcatggtttcgattttgggttcggtttcgatgaacaccttttctga

SEQ ID NO: 102916 - protein, 216 aa, Vitis vinifera
  misc_feature (123)..(123): The Xaa at location 123 stands for Arg, or Gly.
  misc_feature (125)..(125): The Xaa at location 125 stands for Stop, or Trp.
MVKKHSRGRQKIEIKKIVKKSSLEVTFSKRRTGLFKKAGELCVLCGAEAAVIVFSPGRRAFVFGHPSADAVIDRFLHRETNSRALVPAGQVHGHVQRQYLEALGRLEVKREQEETVGGDGEGXFXWDAPIENMGLNELEQFRGSLEELRKKVADRVEEMTMMMMMESGPSSTAMVEYAAPPQEYNSSGGVLHGHDLAAHGVPHGFDFGFGFDEHLF

SEQ ID NO: 102917 - DNA, 735 bp, Arabidopsis thaliana
  CDS (1)..(735)
atggcgagaaagaatcttggtcgtagaaaaatagagttggtaaaaatgaccaacgaatcaaaccttcaagttacgttttcaaaaagaagatctggtcttttcaaaaaaggcagtgaactttgcaccttatgtgacgcggaaattgcgataatcgtgttttcaccctcgggaaaagcatactcttttggtcatccaaatgttaacaagttacttgaccactctttagggcgtgttataagacacaacaacacaaactttgctgaaagccgcacaaagctccgtattcaaatgctcaatgagtctttaactgaggtgatggctgaaaaagaaaaagaacaagagaccaagcagtcaatagtccaaaatgaaagagagaacaaggacgctgagaagtggtggaggaactctccaacagaactcaacttagctcaatcaacttccatgaaatgtgatcttgaagctttgaagaaggaagttgatgaaaaagtcgctcaacttcatcatagaaacctaaacttctatgttggaagttctagcaatgttgctgctccagcagctgttagtggtggtaatatctccacaaaccatggtttctttgatcaaaacggaaactctacttctgctccaacactgccgtttggatttaatgttatgaatcgcacaccagctgggtacaacagttaccaactccaaaaccaggagtccattccgtataaaaacctaagcaacaactga

SEQ ID NO: 102918 - protein, 244 aa, Arabidopsis thaliana
MARKNLGRRKIELVKMTNESNLQVTFSKRRSGLFKKGSELCTLCDAEIAIIVFSPSGKAYSFGHPNVNKLLDHSLGRVIRHNNTNFAESRTKLRIQMLNESLTEVMAEKEKEQETKQSIVQNERENKDAEKWWRNSPTELNLAQSTSMKCDLEALKKEVDEKVAQLHHRNLNFYVGSSSNVAAPAAVSGGNISTNHGFFDQNGNSTSAPTLPFGFNVMNRTPAGYNSYQLQNQESIPYKNLSNN

SEQ ID NO: 102919 - DNA, 714 bp, Medicago truncatula
  CDS (1)..(714)
atgtcgagtggaaggaaaagccgaggtcgccaaaagattgagatgaaaaaaatgagcaacgagagcaacttgcaagtgactttctcgaagcgccgtagtgggctcttcaagaaagccagtgagctttgcactctctgtggtgcagatgttgctctcattattttctcacctggggagaaggtattttcatttggccaacccaatgttgatacggtcatagatcattatctctctcgagtcccactcaaaaacaatggtaccatgcaattcattgaggctcaccgtagtgccaacgtgcgcgagctgaatattcaactgactcagatcaaccagctactggacaatgagaagaaacgtgatgaagagctgagccacttgcgcaaggcgaatgagactcaattttggtgggctggttccgttgatgggatgaatagggcccaacttgaagttttcaaaaaggctttggaggagattaagaaacttgttgcacatcatgctaacaggcttgtaatccaggctgctcctactcaaacctttccattttttgttggaaatggttcatcctctaacatgcctctcgatcatcaaccaaatcctcggcaaactcaaatgtttccagcacaactttttcagaaccctatgttgcaacctcatctgtttggtttcaacaatatggggggaggaggtggatatggaccctccagattcttttga

SEQ ID NO: 102920 - protein, 237 aa, Medicago truncatula
MSSGRKSRGRQKIEMKKMSNESNLQVTFSKRRSGLFKKASELCTLCGADVALIIFSPGEKVFSFGQPNVDTVIDHYLSRVPLKNNGTMQFIEAHRSANVRELNIQLTQINQLLDNEKKRDEELSHLRKANETQFWWAGSVDGMNRAQLEVFKKALEEIKKLVAHHANRLVIQAAPTQTFPFFVGNGSSSNMPLDHQPNPRQTQMFPAQLFQNPMLQPHLFGFNNMGGGGGYGPSRFF

SEQ ID NO: 102921 - DNA, 687 bp, Medicago truncatula
  CDS (1)..(687)
atgtcgagtgtaaggaaaggccgaggccgccaaaagatcgagatgaaaaagattagcaacgagagcaacttgcaagttactttctcaaagcaccataacgggctcttcaagaaggcaagtgagctttgcaccctttgtggtgcagatgttgctctcgttgtattctcacctagtggaaaggtattttcctttggtcaccccaatcttgatacggtcatagaccgctttctttctctcatcccaacccaaaacgatggcaccatgcaattcattgaggctcaccgcaatgccaacgtgcgtgaactcaatgctcagctgactcaaatcaataacacgttggatgccgagaagaagattggtgatgagctgagcaatttgcacaaggaaactgaggctaagttttggtgggcttgtgttgttgatgggatgaatagggatcaacttgaaatatttaagaaagctttggaggagcttaagaaacttgtaattcagcatgctgctactcgaactcttccattttttgttggcaacacttcatcctcgaacatttatctccatcatcaaccaaatcctcaacaagctgaaatgtttccgccacaaatttttcaaaacgctatgttgcaattgcaaactcatttctttgatggctcgatgattcctcaccatgtcttcaataatatggtgtaa

SEQ ID NO: 102922 - protein, 228 aa, Medicago truncatula
MSSVRKGRGRQKIEMKKISNESNLQVTFSKHHNGLFKKASELCTLCGADVALVVFSPSGKVFSFGHPNLDTVIDRFLSLIPTQNDGTMQFIEAHRNANVRELNAQLTQINNTLDAEKKIGDELSNLHKETEAKFWWACVVDGMNRDQLEIFKKALEELKKLVIQHAATRTLPFFVGNTSSSNIYLHHQPNPQQAEMFPPQIFQNAMLQLQTHFFDGSMIPHHVFNNMV

SEQ ID NO: 102923 - DNA, 687 bp, Medicago truncatula
  CDS (1)..(687)
atgtcgagtggaaagaaaggccgaggtcgccaaaagatcgaaatgaaaaagatgagcaacgagagcaacctacaagtgactttctcaaagcgtcgtagcggactcttcaagaaagccagtgagctttgcaccctttgtggtgcagatgctgctctcgttgtattctcacctagtggaaaggtattttcctttggtcaccccaatcttgatacggtcatagaccgctatctttctcttgtaccaccacaaaacaacggcaccatgcaactcattgaggctcaccgcaatgccaacgttcgtgaactcaatgctcagatgactcaaatcaacaacacgttggatgccgagaagaagattggcgatgagctgagccattttctcaaggaaacagaggctaatttttggtgggcttgtccggttgatggaatgaataaagatcaacttgaattattcaaaaaggcattggaggagcttaagaaacttctaattcaacatgctacaactcgaactcttccattttttgttggcaatgcttcttcctcgaacgtttatctccatcatcagccaaatgctcaacaagctgaaatgttgccaccacaattttttcaaaaccctatgttgcaattgcagcctcatttgtttgatggatcaatgatgcctcaccatggcttcaataatatggtgtaa

SEQ ID NO: 102924 - protein, 228 aa, Medicago truncatula
MSSGKKGRGRQKIEMKKMSNESNLQVTFSKRRSGLFKKASELCTLCGADAALVVFSPSGKVFSFGHPNLDTVIDRYLSLVPPQNNGTMQLIEAHRNANVRELNAQMTQINNTLDAEKKIGDELSHFLKETEANFWWACPVDGMNKDQLELFKKALEELKKLLIQHATTRTLPFFVGNASSSNVYLHHQPNAQQAEMLPPQFFQNPMLQLQPHLFDGSMMPHHGFNNMV

SEQ ID NO: 102925 - DNA, 675 bp, Brassica juncea
  CDS (1)..(675)
atggcgagagggaagatccagatcaagaggatagagaaccaaaccaatcgacaagtgacgtattcaaagagaagaaatggtttgttcaagaaagctcacgagctcacagtcttgtgtgacgctagggtttctattatcatgttctctagctccaacaagcttcacgagttcatcagcccaaacaccacaacgaaggagatcatagatctgtaccaaacagtttctgatgttgatgtttggagcgctcactatgagagaatgcaagaaaccaagaggaaactgttggagacaaatagaaatcttcggactcagattaaacagaggctaggtgagtgtttggacgagcttgatactcaggagctgcgtagtcttgaggaagaaatggaaaacactttcaaactcgttcgcgggcgcaagtttaaatcacttgggaatcaaatcgagaccaccaagaaaaagaacaagagtcaacaagacatacaaaagaatctcatacatgagctggaactaagagcagaagatcctcattatggactagtagacgatggaggagactacgattcggtccttggatatcaacttcgtttccaaccaaaccagcaccaccattaccccaaccatgcccttcatgcagcatctgcctctgatatcattaccttccaccttcttgaataa

SEQ ID NO: 102926 - protein, 224 aa, Brassica juncea
MARGKIQIKRIENQTNRQVTYSKRRNGLFKKAHELTVLCDARVSIIMFSSSNKLHEFISPNTTTKEIIDLYQTVSDVDVWSAHYERMQETKRKLLETNRNLRTQIKQRLGECLDELDTQELRSLEEEMENTFKLVRGRKFKSLGNQIETTKKKNKSQQDIQKNLIHELELRAEDPHYGLVDDGGDYDSVLGYQLRFQPNQHHHYPNHALHAASASDIITFHLLE

SEQ ID NO: 102927 - DNA, 840 bp, Arabidopsis thaliana
  CDS (1)..(840)
atggtgaaaaaaagcaaaggtcgtcaaaaaatagagatggtcaaaatgaaaaatgaaagtaaccttcaagttactttttcaaaaagaagatctggacttttcaaaaaggctagtgagctttgcacactttgtggtgcagaagtggccatagttgtgttctcacctggtcgaaaagtcttttcttttggtcatccaaatgttgattctgtaattgatcgattcataaacaataaccctctacctcctcaccaacacaacaaccaggtgttgagtcaattagaaacagagaaaaagaagtacgacgagttaaagaaaataagagaaaagacaaaagcccttgggaattggtgggaagatcccgttgaggaacttgcgttatctcaactcgaggggttcaaaggtaatcttgaaaatttgaagaaagtagttacagtcgaagcttccagattttttcaggcaaatgttccaaacttctatgtgggaagttctagtaataatgctgcttttgggattgatgatggtagtcatatcaaccctgatatggatctctttagccaaagaagaatgatggacataaatgccttcaactacaaccagaaccaaattcaccctaatcatgcattaccaccctttggaaacaatgcttatggtattaatgaagggtttgttccagaatacaatgtgaacttcagaccagagtataacccaaaccaaaaccaaatccaaaaccaaaatcaagttcaaatccaaatccaaaaccagagttttaagagagaaaacatctctgaatatgaacatcatcatggttatcctccccagtctagatctgattactattaa

SEQ ID NO: 102928 - protein, 279 aa, Arabidopsis thaliana
MVKKSKGRQKIEMVKMKNESNLQVTFSKRRSGLFKKASELCTLCGAEVAIVVFSPGRKVFSFGHPNVDSVIDRFINNNPLPPHQHNNQVLSQLETEKKKYDELKKIREKTKALGNWWEDPVEELALSQLEGFKGNLENLKKVVTVEASRFFQANVPNFYVGSSSNNAAFGIDDGSHINPDMDLFSQRRMMDINAFNYNQNQIHPNHALPPFGNNAYGINEGFVPEYNVNFRPEYNPNQNQIQNQNQVQIQIQNQSFKRENISEYEHHHGYPPQSRSDYY

SEQ ID NO: 102929 - DNA, 633 bp, Arabidopsis thaliana
  CDS (1)..(633)
atgtcgaagaagaaagaaagcatcggacgacaaaaaattccaatggtaaaaataaagaaagagagccaccggcaagtcacattctccaaacgcagagccggtctcttcaagaaagctagtgagctttgcactttgtgtggtgcagagattgggatcatcgtgttttctcccgcgaaaaagcctttctcattcggacatccaagtgttgaatctgtattggatcgctacgtgtctcgaaacaatatgtccttagctcagtcgcagcaactgcaaggaagccctgcagcgagctgcgaactgaatatgcagttaacgcatattttgagcgaggtagaagaagagaagaagaagggtcaagcgatggaagagatgagaaaagagagtgtgaggcggtcgatgattaattggtgggaaaagccagtagaggagatgaatatggttcagttacaggaaatgaagtatgcattggaggagttgaggaagacggttgtgacaaacatggcgtcgtttaatgaggccaaagacgatgtgtttggtttcttggacaacaaagtgacagtccctccttacgtgaacatgccttctggtccctcaaatatttataattttgccaatggaaatggttgtttctga

SEQ ID NO: 102930 - protein, 210 aa, Arabidopsis thaliana
MSKKKESIGRQKIPMVKIKKESHRQVTFSKRRAGLFKKASELCTLCGAEIGIIVFSPAKKPFSFGHPSVESVLDRYVSRNNMSLAQSQQLQGSPAASCELNMQLTHILSEVEEEKKKGQAMEEMRKESVRRSMINWWEKPVEEMNMVQLQEMKYALEELRKTVVTNMASFNEAKDDVFGFLDNKVTVPPYVNMPSGPSNIYNFANGNGCF

SEQ ID NO: 102931 - DNA, 750 bp, Brassica napus
  CDS (1)..(750)
atggatgaaagtgggagtagtcacgatgcagagagtagcaagaagataggtagagggaagatagagataaagaggatagagaacacaacaaatcgtcaagtaaccttctgcaaacgacgcaatggtcttctcaagaaagcttatgagctctctgtcttgtgtgatgctgaagttgccctcgttatcttctccactcgtggccgtctctatgaatacgccagcaacagtgtgaagggtacaattgaaaggtataagaaagcttgttccgatgccgttaaccctcctactgtcaccgaagctaatactcagtactatcagcaagaagcctctaagcttcggaggcagattcgggacattcagaattcgaacaggcatattgttggggaatcacttggctccttgaacttcaaggaactcaaaaacctagaaggacggcttgaaaaaggaatcagccgcgtccgatccaagaagagtgaacttttagtggcagagatagagtatatgcagaagaggaaaatggagttgcagcacgataacatgtacctaagagctaagatagaacaaggcgcgagattgaatccggaacagcatggatcgggtgtaatacaagggacggcggtttatgattccggtctgtcttcttctcctgatcagtcgcagcattataaccggaactatattccggttaaccttcttgaaccgaatcaacaattctccggtcaagaccaacctcctcttcaacttgtttaa

SEQ ID NO: 102932 - protein, 249 aa, Brassica napus
MDESGSSHDAESSKKIGRGKIEIKRIENTTNRQVTFCKRRNGLLKKAYELSVLCDAEVALVIFSTRGRLYEYASNSVKGTIERYKKACSDAVNPPTVTEANTQYYQQEASKLRRQIRDIQNSNRHIVGESLGSLNFKELKNLEGRLEKGISRVRSKKSELLVAEIEYMQKRKMELQHDNMYLRAKIEQGARLNPEQHGSGVIQGTAVYDSGLSSSPDQSQHYNRNYIPVNLLEPNQQFSGQDQPPLQLV

SEQ ID NO: 102933 - DNA, 738 bp, Glycine max
  CDS (1)..(738)
atgggtagagggagagttgagctgaagaggatagagaacaaaatcaaccgccaagtaactttctcaaaaagaaggaacggtttgctcaagaaagcctatgagctctcagttctctgtgatgctgaggttgctctcatcattttctcaagccgtggcaagctctatgaatttggaagtgttgggactaccaaaactattgagcgataccatcgtagctcttttactcctcaagacgaacacgttgaatgtgaaactcagagctggtaccaagaggtatcaaagctaaaggcaaagtatgattctcttcaaaggacccagaggcatttgcttggggaagatcttggaccattgaacataaaggagctgcagaatcttgagaaacagcttgaaggggctttagcacaagcaaggcaaaggaagacacaaatcatgattgaacaaatggaagagcttcgcagaagggagcgccatcttggagacatgaataagcaactgagactcaagcttgaagcagagggatttaatcttaaagctatggaaagcttgttgagctctacttcagaagctggaaatagtggctttcactttcagcagcctcctcaaaccaatcctatggattaccagcaggcagaaccctttttgcaaatagggtaccatcaatatgttcaagctgaggcttctaatgttccaaagagcatggcttgtgaaactaatttcatgcagggatggatcctttga

SEQ ID NO: 102934 - protein, 245 aa, Glycine max
MGRGRVELKRIENKINRQVTFSKRRNGLLKKAYELSVLCDAEVALIIFSSRGKLYEFGSVGTTKTIERYHRSSFTPQDEHVECETQSWYQEVSKLKAKYDSLQRTQRHLLGEDLGPLNIKELQNLEKQLEGALAQARQRKTQIMIEQMEELRRRERHLGDMNKQLRLKLEAEGFNLKAMESLLSSTSEAGNSGFHFQQPPQTNPMDYQQAEPFLQIGYHQYVQAEASNVPKSMACETNFMQGWIL

SEQ ID NO: 102935 - DNA, 732 bp, Glycine max
  CDS (1)..(732)
atggcttttccaaaccaatccatgtcatcagagtctccccagagaaagatgggaagagggaagattgagatcaagaggattgagaacaccaccagtcgacaagttaccttctgcaagcgcacaaatggcttgctcaagaaggcatatgagttatctgtgctttgtgatgcagaggttgctctaattgtcttttcaaaccgtggccgcctctatgaatatgctaataacagcgtcaaagcttcaattgagaggtacaagaaagcaagttcagattcatctagtggtggacgatctgcttctgaggctaatgctcagttttatcagcaagaagcagccaaactgcgtgtgcagatcagcaatctgcagaatcacaataggcaaatgatgggtgagggtttgagcaccatgaatggcaaggatctcaaaaacctagagactaaattagaaaaaggaatcagcagaattcgttccaagaagaatgagatgctatttgcagaaattgagcacatgaagaaaagggagatacacttgaacaatgacaatcagcttcttagagcaaagatagcagcaggtgagaggagtcaccataatgttaacgggttgtctggaagcataagctatgaatcgatgcaatctcagtttgactctcgcggcttcttccaagtaactggattacaacctaataataatcagtatgccggacaagacaacatgtcccttcaatttgtttga

SEQ ID NO: 102936 - protein, 243 aa, Glycine max
MAFPNQSMSSESPQRKMGRGKIEIKRIENTTSRQVTFCKRTNGLLKKAYELSVLCDAEVALIVFSNRGRLYEYANNSVKASIERYKKASSDSSSGGRSASEANAQFYQQEAAKLRVQISNLQNHNRQMMGEGLSTMNGKDLKNLETKLEKGISRIRSKKNEMLFAEIEHMKKREIHLNNDNQLLRAKIAAGERSHHNVNGLSGSISYESMQSQFDSRGFFQVTGLQPNNNQYAGQDNMSLQFV

SEQ ID NO: 102937 - DNA, 20 bp, Artificial sequence
  primer
atggtgaaaaaaagcaaagg

SEQ ID NO: 102938 - DNA, 20 bp, Artificial sequence
  primer
ttaatagtaatcagatctag

SEQ ID NO: 102939 - protein, 165 aa, Artificial sequence
  consensus sequence
  Variant (3)..(3): Xaa in position 3 is any amino acid
  Variant (7)..(16): Xaa in position 7 to 16 is any amino acid
  Variant (25)..(25): Xaa in position 25 is any amino acid
  Variant (32)..(32): Xaa in position 32 is any amino acid
  Variant (35)..(36): Xaa in position 35 to 36 is any amino acid
  Variant (39)..(39): Xaa in position 39 is any amino acid
  Variant (41)..(46): Xaa in position 41 to 46 is any amino acid
  Variant (49)..(51): Xaa in position 49 to 51 is any amino acid
  Variant (53)..(55): Xaa in position 53 to 55 is any amino acid
  Variant (58)..(80): Xaa in position 58 to 80 is any amino acid
  Variant (81)..(103): Xaa in position 81 to 103 is any or no amino acid
  Variant (105)..(153): Xaa in position 105 to 153 is any amino acid
  Variant (154)..(159): Xaa in position 154 to 159 is any or no amino acid
  Variant (161)..(164): Xaa in position 161 to 164 is any amino acid
GRXKIEXXXXXXXXXXQVTFSKRRXGLFKKAXELXXLCXAXXXXXXFSXXXKXXXFGXXXXXXXXXXXXXXXXXXXXXXXXXXXXXXXXXXXXXXXXXXXXXXLXXXXXXXXXXXXXXXXXXXXXXXXXXXXXXXXXXXXXXXXXXXXXXXXXXXXXXXLXXXXK

SEQ ID NO: 102940 - protein, 60 aa, Artificial sequence
  protein pattern
  Variant (3)..(3): Xaa in position 3 is any amino acid
  Variant (5)..(5): Xaa in position 5 is Ile or Val
  Variant (6)..(6): Xaa in position 6 is Glu or Pro
  Variant (7)..(7): Xaa in position 7 is Ile, Leu or Met
  Variant (8)..(8): Xaa in position 8 is any amino acid
  Variant (9)..(9): Xaa in position 9 is Lys or Arg
  Variant (10)..(10): Xaa in position 10 is Ile or Met
  Variant (11)..(13): Xaa in position 11 to 13 is any amino acid
  Variant (14)..(14): Xaa in position 14 is Asn, Ser or Thr
  Variant (15)..(16): Xaa in position 15 to 16 is any amino acid
  Variant (17)..(17): Xaa in position 17 is Glu or Gln
  Variant (21)..(21): Xaa in position 21 is Cys or Ser
  Variant (23)..(23): Xaa in position 23 is His or Arg
  Variant (24)..(25): Xaa in position 24 to 25 is any amino acid
  Variant (28)..(28): Xaa in position 28 is Phe or Leu
  Variant (31)..(31): Xaa in position 31 is Ala or Gly
  Variant (32)..(32): Xaa in position 32 is any amino acid
  Variant (34)..(34): Xaa in position 34 is Phe or Leu
  Variant (35)..(35): Xaa in position 35 is Cys or Ser
  Variant (36)..(36): Xaa in position 36 is Thr or Val
  Variant (38)..(38): Xaa in position 38 is Cys or Ser
  Variant (39)..(39): Xaa in position 39 is Asp or Gly
  Variant (41)..(41): Xaa in position 41 is any amino acid
  Variant (42)..(42): Xaa in position 42 is Ala, Ile or Val
  Variant (43)..(43): Xaa in position 43 is Ala, Gly or Leu
  Variant (44)..(44): Xaa in position 44 is Ile, Leu, Met or Val
  Variant (45)..(46): Xaa in position 45 to 46 is Ile or Val
  Variant (49)..(49): Xaa in position 49 is Asn, Pro or Thr
  Variant (50)..(51): Xaa in position 50 to 51 is any amino acid
  Variant (52)..(52): Xaa in position 52 is Lys or Arg
  Variant (53)..(53): Xaa in position 53 is Ala, Leu, Pro or Val
  Variant (54)..(54): Xaa in position 54 is Phe or Tyr
  Variant (55)..(55): Xaa in position 55 is any amino acid
  Variant (56)..(56): Xaa in position 56 is Phe or Tyr
  Variant (57)..(57): Xaa in position 57 is Ala or Gly
  Variant (58)..(58): Xaa in position 58 is any amino acid
  Variant (59)..(59): Xaa in position 59 is Asn or Pro
  Variant (60)..(60): Xaa in position 60 is Asp, Asn or Ser
GRXKXXXXXXXXXXXXXVTFXKXXXGLXKKXXEXXXLXXAXXXXXXFSXXXXXXXXXXXX

SEQ ID NO: 102941 - DNA, 1425 bp, Azotobacter vinelandii
  CDS (1)..(1425): transl_table=11
atggccggcaaaacgctctacgacaaactctgggacatgcatgaggtgaagcggcgcgacgatggctcgtcgctgatctacatcgatcgccagattctccacgaagtgacctcgccgcaggccttcgaggggctgcgcctggccgggcgcaagccgtggcgcgtggatgccaacatcgccaccccggaccacaacgtgccgaccacccaggatcgccagtcgggggtcgccgccatcgccgacgaaacctcgcgcatccaggtgcagaccctggacgagaactgcgacgagttcggcatcgtcgagttcaagatgaacgacccgcgccagggcatcgtccatgtggtcggcccggagcagggcgccaccctgccgggcatgaccgtggtctgcggcgactcgcacacgtccacccatggcgccttcggcgcgctggcccacggcatcggtacctccgaggtggagcatgtgctcgccacccaatgcctggtggccaagaagatgaagaacatgcaggtgcgcgtggagggcgaactgcccctgggcgtcagcgccaaggacatagtgctcgccgtgatcggccggatcggcaccgccggcggtaccggccacgccctggagttcgccggcagcgccatccgcggcttgtccatggagggccgcatgaccctctgcaacatggccatcgaagccggggcccgggtcggcatggtggcggtggacgagaagaccatcgactacgtcaagggccgcccctatgcaccgcagggcgccgactgggacaaggcggtcgcccagtggcgggaactggtgtccgatgccgatgccgggttcgacaccgtcgtcgaactgaaggccgaagaaatcaggccgcaggtcacctgggggacctcgccggagatggtcctgccggtcgacgagcgcgtgccggacccggcttccgagagcgatccggtcaagcgcgattccatcgttcgcgcgctgaagtacatgggcctcgcggccaatcagccgatcggcgagatcaaggtcgaccgcgtgttcatcggttcctgcaccaactcgcggatcgaggatctgcgcgccgccgccgaggtggccaagggccgcaaggtcgccgcgagcgtcaagcaggcgctggtggtgccgggctccgggctggtcaaggagcaggcggagaaggaggggctggacaggatcttcatcgaggccggtttcgagtggcgcgagccgggttgctccatgtgcctggcgatgaacccggaccgcctggagagcggcgagcactgcgcctccacgtccaaccgcaacttcgagggccgtcagggcgccggcgggcgtacccacctggtcagtccggccatggccgccgccgccgcggtcgccggccgtttcgtcgatgtacgccaattgctccaggcctga

SEQ ID NO: 102942 - protein, 474 aa, Azotobacter vinelandii
MAGKTLYDKLWDMHEVKRRDDGSSLIYIDRQILHEVTSPQAFEGLRLAGRKPWRVDANIATPDHNVPTTQDRQSGVAAIADETSRIQVQTLDENCDEFGIVEFKMNDPRQGIVHVVGPEQGATLPGMTVVCGDSHTSTHGAFGALAHGIGTSEVEHVLATQCLVAKKMKNMQVRVEGELPLGVSAKDIVLAVIGRIGTAGGTGHALEFAGSAIRGLSMEGRMTLCNMAIEAGARVGMVAVDEKTIDYVKGRPYAPQGADWDKAVAQWRELVSDADAGFDTVVELKAEEIRPQVTWGTSPEMVLPVDERVPDPASESDPVKRDSIVRALKYMGLAANQPIGEIKVDRVFIGSCTNSRIEDLRAAAEVAKGRKVAASVKQALVVPGSGLVKEQAEKEGLDRIFIEAGFEWREPGCSMCLAMNPDRLESGEHCASTSNRNFEGRQGAGGRTHLVSPAMAAAAAVAGRFVDVRQLLQA

SEQ ID NO: 102943 - DNA, 1969 bp, Sorghum bicolor
  CDS (192)..(1715)
gcacgaggccacttcccacctcaccccggtgaccctcgcgggccccacacgccacggcggccaacaccacacgacacttgactccccaagcacacgcgtgagacgcgccgcaccaccccccgccccaaatccccgatccctccctcactctcgccgcgcccgccgggtgttcgacgcttcgccgccacgccatggcctcctccatctccgccgccgccaaggcctccacggccttcgcccacaagaaggagctcgccgcgccggcgcccgcgcagcaccgcgcgggctcgagccgccggaccaagccatgccgcgtgcgcgccgtcgcctcgcctgcgcgcgctccccgcgccccgtcgtccaccggctcggtgaagagcgcgatgacgatgacggagaagatcctggcgcgggcgtcggagcgcgcggcgctggagcccggggagaacgtgtgggtggacgtcgacgtgctcatgacgcacgacgtctgcggccccggcaccatcggcatcttcaagaaggaattcggggaggacgccaaggtctgggaccgcgagaaggtcgtcatcatcccggaccactacatcttcaccaccgacgagcgtgccaaccgcaatgtcgacatcctcagggacttctgtctcgagcagaacatcaagtacttctatgacatcaaggacctcagcaatttcaaggctaatccagactacaaaggtgtctgccacgttgcacttgctcaggaaggccactgccgaccaggcgaggttctcctgggcactgattctcatacgtgcaatgctggagcctttggtcaatttgctaccggaattggaaacaccgatgctggttttgtgttgggcactggaaaggctcttctcaaggtgccacctacaatcaggtttgtattagatggagaaatgccgccttatttacttgcgaaggatctgattttgcaaattattggtgagatttcagtatctggcgcaacctacaaatcaatggagtttgttggatcaactgtagagagtctaactatggaagagcgtatgacactatgcaacatggttattgaagctggtggaaagaacggtgttgtgcctgctgatgaaactacatttaaataccttgagggtaagacatcagttgattatgaacctgtctacagtgatgctcaggccagattttttagtgactaccgttttgatgtatcaaaactggagccagtagttgccaagccacattcgcctgacaaccgtgctctagcaagagaatgcaaagatgtcaaggttgaccgagtctatattggttcttgcactggtggtaagactgaggacttccttgctgctgcaaaggtgttcttagcctcgggaaagaaggttaaagttcccacatttcttgtccctgccacacaaaaggtgtggatggacgtatatagcctccctgtaccaggatctggtggcaaaacttgctcccagatatttgaggaggctggttgtgatacaccagcaagtcctagctgtggtgcttgtttgggtggtcctcgtgatacatatgcacggatgaatgaacctatggtctgcgtgtccactacgaacaggaacttcccgggcaggatggggcacaaggaagggcagatctacctggcgtctccctacactgcagctgcctcagccctgacggggtatgttacggaccccagggacttcctcatgtaattttgaaacaacagagttcatgatgtaacagattgcctgtagcctctgtttttcgtgttgaaccttagtttaggcgtgtctttcgttgaggaataagctgcatgtcgggaggttggcatgtatggttttgcattattacagtgtactaccaattaagaacatacttgagtgttacaagggaaatacattcttctgagtattgatggcagttcctagactcaaaacttcttgctataaggcctgttgagtgatct

SEQ ID NO: 102944 - protein, 507 aa, Sorghum bicolor
MASSISAAAKASTAFAHKKELAAPAPAQHRAGSSRRTKPCRVRAVASPARAPRAPSSTGSVKSAMTMTEKILARASERAALEPGENVWVDVDVLMTHDVCGPGTIGIFKKEFGEDAKVWDREKVVIIPDHYIFTTDERANRNVDILRDFCLEQNIKYFYDIKDLSNFKANPDYKGVCHVALAQEGHCRPGEVLLGTDSHTCNAGAFGQFATGIGNTDAGFVLGTGKALLKVPPTIRFVLDGEMPPYLLAKDLILQIIGEISVSGATYKSMEFVGSTVESLTMEERMTLCNMVIEAGGKNGVVPADETTFKYLEGKTSVDYEPVYSDAQARFFSDYRFDVSKLEPVVAKPHSPDNRALARECKDVKVDRVYIGSCTGGKTEDFLAAAKVFLASGKKVKVPTFLVPATQKVWMDVYSLPVPGSGGKTCSQIFEEAGCDTPASPSCGACLGGPRDTYARMNEPMVCVSTTNRNFPGRMGHKEGQIYLASPYTAAASALTGYVTDPRDFLM

SEQ ID NO: 102945 - DNA, 2298 bp, Zea mays
  CDS (298)..(1815)
gtgatacaaccagcaagtcctaattgcggcgctcgtttgggtggccctcgcgatacgtatgcacggatgaatgaacctacggtctgcgtgtccaccacgaacaggaacttcccgggcaggatggggcccacaaggacggccgggggagctctacaccgtccattggcctcgaggccggccgggaaggcctcagcgtgctcgctcacctcctctgtcgcttgacctacccccctccgccccccgccgggcccgcagggtgttcgacccttcgcccgcccgcccgagcgccgccacggcatggcttcctccatctccgccgccgctaaggcctccgcggcctttgcccacaagaaggagctggccgcgccggcgccgcaccgcgcgggctcgagccgtcggaccaagccgtgccgcgtgcgcgccgtcgcgtcgcccgcgcgcaccccccgcgccccgtcgtccaccggctcggtgaagaccgcgatgacgatgacggagaagatcctggcgagggcgtcggagcgcgcggcgctggagcccggggagaacgtgtgggtggacatcgacgtgctcatgacgcacgacgtctgcgggcccggcaccatcggcatcttcaagaaggagttcggggaggatgccaaggtctgggaccgcgagaaggtcgtcatcatccccgaccactacatcttcaccagcgacgagcgcgccaaccgcaacgtcgatatcctcagggacttctgtctggagcagaacatcaagtacttctatgatatcaaggacctcagcgatttcagggctaatccagactacaagggtgtctgccacattgcacttgctcaggaaggccactgccgaccaggcgaggttctcctgggtactgattctcatacgtgcaatgctggagcctttggtcaatttgcaaccggaattggaaacactgatgcaggttttgtgatgggcactggaaaggctcttctcaaggtgccacctactatcaggtttgtattagatggagaaatgccgccttatttacttgcgaaggatctgattttgcaaattattggtgagatttcagtatctggtgcaacctacaaatcgatggagtttgttggatcaactgtagaaagtctaaccatggaagaacgtatgacactatgcaacatggttgttgaagctggtggaaagaacggtgtcgtgcctgctgatgaaactacatttaaataccttgagggtaggacatcagttgattatcaacctgtctacagtgatgctgaggccagattttttagtgactaccggtttgatgtatcgaaactggagccagtagttgccaagccacattcgcctgacaaccgtgccctagcaagagaatgcaaagatgtcaagatcgaccgagtctatattggttcctgcactggtggcaagactgaggacttccttgctgccgcaaaggtgttcttagcctcgggaaagaaggttaaagttcccacattccttgtccctgccacacaaaaggtgtggatggacgtatatagccttcctgtaccaggatctggcggcaaaacttgcgcccagatattcgaggaggctggttgtgatacaccagcaagtcctaattgcggcgcttgtctgggtggccctcgcgatacgtatgcacggatgaatgaacctacggtctgcgtgtccaccacgaacaggaacttcccgggcaggatggggcacaaggaagggcagatctacctggcgtccccctacaccgctgcagcctcggccctgacggggtacgtcacggaccccagggacttcctcatgtgaacgatcttgaaacagccacagagtgcctgcaccgctgttttttgtgttgaaccttagtttaggcgtgtgcccttcgttgagaaataaactcccatgtcgggaggctgccattgccatttatgttttttgcgttatatttattacagtgactgccgataacgtagttgagcgttacaagggaaatacattcattcttcccagtatcgatggcagtcactagactccgttcttacaaaaaaaaaggcatgtcgagagatcttgtagttcatacacttgttaaaacacttttttgtacaatgtatgggaaagaagctcagtcgatctttcttgtttaaaaaaaaaaaaaaaaaaaaaaaaactctaaaacctcccccttggccgcccttttttttttttttttttttacataaaacactcttttaatggggttgcttgcatgactttaaaggccaaaacaaaaaaaggtttacaaattaatatgaa

SEQ ID NO: 102946 - protein, 505 aa, Zea mays
MASSISAAAKASAAFAHKKELAAPAPHRAGSSRRTKPCRVRAVASPARTPRAPSSTGSVKTAMTMTEKILARASERAALEPGENVWVDIDVLMTHDVCGPGTIGIFKKEFGEDAKVWDREKVVIIPDHYIFTSDERANRNVDILRDFCLEQNIKYFYDIKDLSDFRANPDYKGVCHIALAQEGHCRPGEVLLGTDSHTCNAGAFGQFATGIGNTDAGFVMGTGKALLKVPPTIRFVLDGEMPPYLLAKDLILQIIGEISVSGATYKSMEFVGSTVESLTMEERMTLCNMVVEAGGKNGVVPADETTFKYLEGRTSVDYQPVYSDAEARFFSDYRFDVSKLEPVVAKPHSPDNRALARECKDVKIDRVYIGSCTGGKTEDFLAAAKVFLASGKKVKVPTFLVPATQKVWMDVYSLPVPGSGGKTCAQIFEEAGCDTPASPNCGACLGGPRDTYARMNEPTVCVSTTNRNFPGRMGHKEGQIYLASPYTAAASALTGYVTDPRDFLM

SEQ ID NO: 102947 - DNA, 1683 bp, Glycine max
  CDS (75)..(1577)
agatataacagcagacactacctgcggaagacgatccggagccgccacctattcttttgttcatcacatattcaatggcttcctctcttctctctccatcatttacatccttcctccgcaccaaggatctctctctctctgctttcacttctcagcgatgcttcaaagcggtgccaaggaaaataatccgttgtgctattgcggcgcctcagcgccaaccttccaccactggatcagtgaggactgcaatgaccatgactgagaagatattggccagagcttctgagaaggcacagctgacccctggggataatgtttgggtcaatgttgatattttgatgacacatgatgtgtgtggccctggttctattgggattttcaagagggagtttggcgaggatgccaaggtttgggaccgtgaaaagcttgtaataatacctgaccactatattttcacaagtgatgaacgtgccaatcgcaatgtagacatattaagagatttctgccatgagcagaatatcaagtacttttatgatattaaggatcttagtaattttaaggtaaatccagactataagggtgtttgccatgttgctcttgctcaggaaggtcattgtaggccaggagaggttctcttaggtactgattctcacacttgtactgctggagcatttggtcaatttgctacagggattggtaatactgatgccggctttgtgctgggaactgggaaacttctgctcaaggtgcccccaactttgagatttgtaatggatggagaaatgcccgattatttgctttctaaggatttgattctgcaaattattggtgaaataactgtggctggggcaacatataaatcgatggagtttgttggtacaaccgttgaaagtttaactatggaagaacggatgacattgtgcaacatggttgttgaagctggtggaaagaatggtgttgttcctgctgacagcactacatttaaatatcttgagggcaagacatctctgccatatgaacctgtttatagtgacgatcaagcaagatttctcgcagagtatagatttgatgtctcaaaattggagccagtggtggccaagcctcattctccggataatcgtgctttggcaagagagtgcaaggatgtgaaaattgacagagtatacataggatcttgtacaggtggcaaaacagaggatttcatggctgcagcaaaagtttttctggcatcaggtaaacaggtcaaagttcctacatttcttgtgcctgcaacacaaaaggtttggatggacttgtactccctccctgtccctggatctggtggtaagacatgctcacagatatttgaagaagttgggtgtgacacaccagctagtcctagttgtggtgcttgtttgggtggcccaaaagatacttacgcacgcatgaatgaacctaaggtttgtgtttcaactacgaacaggaacttcccgggccgaatgggacacaaggaaggtcaaatctatttggcttccccttatacagctgctgcatctgcattgaccggttatgttactgatcctagagagttcttgtagtagaatgttgttacaatcatctcattgtgttgtactcgttgttggttatttgtgtattctctactctctactagtcataagttaaaactgacaactatttaagctc

SEQ ID NO: 102948 - protein, 500 aa, Glycine max
MASSLLSPSFTSFLRTKDLSLSAFTSQRCFKAVPRKIIRCAIAAPQRQPSTTGSVRTAMTMTEKILARASEKAQLTPGDNVWVNVDILMTHDVCGPGSIGIFKREFGEDAKVWDREKLVIIPDHYIFTSDERANRNVDILRDFCHEQNIKYFYDIKDLSNFKVNPDYKGVCHVALAQEGHCRPGEVLLGTDSHTCTAGAFGQFATGIGNTDAGFVLGTGKLLLKVPPTLRFVMDGEMPDYLLSKDLILQIIGEITVAGATYKSMEFVGTTVESLTMEERMTLCNMVVEAGGKNGVVPADSTTFKYLEGKTSLPYEPVYSDDQARFLAEYRFDVSKLEPVVAKPHSPDNRALARECKDVKIDRVYIGSCTGGKTEDFMAAAKVFLASGKQVKVPTFLVPATQKVWMDLYSLPVPGSGGKTCSQIFEEVGCDTPASPSCGACLGGPKDTYARMNEPKVCVSTTNRNFPGRMGHKEGQIYLASPYTAAASALTGYVTDPREFL

SEQ ID NO: 102949 - DNA, 1688 bp, Zea mays
  CDS (264)..(1595)
  misc_feature (1673)..(1673): n is a, g, c or t
gcacgagctgacgcaccaccccgaagccctcccgccgcgctcgcagggtgttcgacccttcgcccgcgcgccctcacgacatggcctcctccgtctccgccgccgccaaggccgccgcggcgttcgcgcacaaggtccagaaggagctggccgcgccggcgcagcgccgcgcgggcttgacccgccggaccaagccgtgcagcgtgcgcgccgtcgcttcgcccgcgcgcgccctgtcgtccaccggctcggtgaagagcgcgatgacgatgacggagaagatactggcgcgggcgtcggagcgcgcggcgctggagcccggggagaacgtgtgggtcgacgtcgacgtgctcatgacgcacgacgtctgcgggcccggcgccttcgacatcttcaagaaggagttcggggaggacgccagggtctgggaccgcgagaagctcgtcgtcatcccggaccactacatcttcaccagcgacggccgtgccaaacgcaacgtcgacatcctcagggacttctgtgcggagcagaacatcaagtacttctatgacatcaaggacctcagcgatttcagggctaatccggactacaaaggcgtctgccacatcgcacttgctcaggaagcccactgccgaccaggcgaggttctcttgggcactgattctcatacatgcaatgctggagcttttggtcagtttgcaactggaatcggaaacactgatgcaggttttgtgttgggcactggaaaggctcttctcaaggtgccacctactatcaggtttatattagatggagagatgccgccttatttacttgcgaaggatctgattttgcaaattattggagagatttcagtatctggtgcgacctacaaatcaatggagtttgttggatcaactgtagaaagtctaaccatggaagagcgtatgacactatgcaacatggttattgaagctggtggaaagaacggtgttgtgcctgctgatgaaactacatttaaataccttgagggtaagacatcagtcgattatgaacctgtctacagtgatgctcaagccagattttttagcgactaccggtttgatgtatcaaaactggagccagtagttgccaagccacattcgcctgacaaccgtgctccagcacgagaatgcaaagatgtgaagatcgaccgagtctatattggttcttgcactggtggtaagaccgaggatttccttgctgctgcaaaggtgttcttagcctcgggaaagaaggttaaagttcccacatttcttgtccctgccacacaaaaggtgtggttggacatatatagcctccctgtaccaggatctggtggcaaaacttgctcccagatatttgaggaggctggttgtgacacaccagcaagtcctaattgtggtgcttgtttgggtggccctcgtgatacatatgcacggatgaatgaacctactgtctgcgtgtccaccacgaacaggaactttccgggcaggatgggccacaaggaagggcaaatctacctggcgtctccctacactgcggctgcctcagccctgacggggtatgttacggaccccaaggacttcctcatgtaaccgtcttgaaacaacaacagatttcatgatgtaacagagtggttgtactgctgtttttcgtgctgaacttttgtccangcatgtccttcgttg

SEQ ID NO: 102950 - protein, 443 aa, Zea mays
MTMTEKILARASERAALEPGENVWVDVDVLMTHDVCGPGAFDIFKKEFGEDARVWDREKLVVIPDHYIFTSDGRAKRNVDILRDFCAEQNIKYFYDIKDLSDFRANPDYKGVCHIALAQEAHCRPGEVLLGTDSHTCNAGAFGQFATGIGNTDAGFVLGTGKALLKVPPTIRFILDGEMPPYLLAKDLILQIIGEISVSGATYKSMEFVGSTVESLTMEERMTLCNMVIEAGGKNGVVPADETTFKYLEGKTSVDYEPVYSDAQARFFSDYRFDVSKLEPVVAKPHSPDNRAPARECKDVKIDRVYIGSCTGGKTEDFLAAAKVFLASGKKVKVPTFLVPATQKVWLDIYSLPVPGSGGKTCSQIFEEAGCDTPASPNCGACLGGPRDTYARMNEPTVCVSTTNRNFPGRMGHKEGQIYLASPYTAAASALTGYVTDPKDFLM

SEQ ID NO: 102951 - DNA, 1804 bp, Zea mays
  CDS (84)..(1598)
acctcctctgtcgacgcaccaccccgaagcccccccgccgcgctcgcagggtgttcgacccttcgcccgcgcgccctcacgacatggcctcctccgtctccgccgccgccaaggccgccgcggcgttcgcgcacaaggtccagaaggagctggccgcgccggcgcagcgccgcgcgggcttgacccgccggaccaagccgtgcagcgtgcgcgccgtcgcttcgcccgcgcgcgccctgtcgtccaccggctcggtgaagagcgcgatgacgatgacggagaagatactggcgcgggcgtcggagcgcgcggcgttggagcctggggagaacgtgtgggtcgacgtcgacgtgctcatgacgcacgacgtctgcgggcccggcgccttcgacatcttcaagaaggagttcggggaggacgccagggtctgggaccgcgagaagctcgtcgtcatcccggaccactacatcttcaccagcgacgaccgcgccaaccgcaacgtcgacatcctcagggacttctgtgcggagcagaacatcaagtacttctatgacatcaaggacctcagcgatttcagggctaatccggactacaaaggcgtctgccacatcgcacttgctcaggaaggccactgccgaccaggcgaggttctcttgggcactgattctcacacatgcaatgctggagcttttggtcagtttgcaactggaatcggaaacactgacgcaggttttgtgttgggcactggaaaggctcttctcaaggtgccacctactatcaggtttatattagatggagagatgccgccttatttacttgcaaaggatctgattttgcaaattattggtgagatttcagtatctggtgcaacctacaaatcaatggagtttgttggatcaactgtagaaagtctaaccatggaagagcgtatgacactgtgcaacatggttattgaagctggtggaaagaacggtgttgtgcctgctgatgaaactacatttaaataccttgagggtaagacatcagtcgattatgaacctgtctacagtgatgctcaagccagattttttagcgactaccggtttgatgtatcaaaactggagccagtagttgccaagccacattcgcctgacaaccgtgctccagcaagagaatgcaaagatgtgaagatcgaccgagtctatattggttcttgcactggtggtaagaccgaggatttccttgctgctgcaaagttgttcttagcctcgggaaagaaggttaaagttcccacatttcttgtccctgccacgcaaaaggtgtggttggacgtatatagcctccctgtaccaggatctggtggcaaaacttgctcccagatatttgaggaggctggttgtgacacaccagcaagtcctaattgtggtgcttgtttgggtggccctcgtgatacatatgcacggatgaatgaacctactgtctgcgtgtccaccacgaacaggaactttccgggcaggatggggcacaaggaagggcaaatctacctggcgtctccctacactgcggctgcctcagccctgacggggtacgttacggacccaagggacttcctcatgtaacgtcttgaaacaacaacagatttcatgatgtaacagagtggctgtactgctgtttttcgtgctgaacttttgtctaggcatgtccttcgttgagaaataaactgcactagaataagcagcgacttctcgggcgccatagcagatgtgacctcatatttatttgtgcaactttttttgtttttggctctgtaaaaaaaaaaaaaaaa

SEQ ID NO: 102952 - protein, 504 aa, Zea mays
MASSVSAAAKAAAAFAHKVQKELAAPAQRRAGLTRRTKPCSVRAVASPARALSSTGSVKSAMTMTEKILARASERAALEPGENVWVDVDVLMTHDVCGPGAFDIFKKEFGEDARVWDREKLVVIPDHYIFTSDDRANRNVDILRDFCAEQNIKYFYDIKDLSDFRANPDYKGVCHIALAQEGHCRPGEVLLGTDSHTCNAGAFGQFATGIGNTDAGFVLGTGKALLKVPPTIRFILDGEMPPYLLAKDLILQIIGEISVSGATYKSMEFVGSTVESLTMEERMTLCNMVIEAGGKNGVVPADETTFKYLEGKTSVDYEPVYSDAQARFFSDYRFDVSKLEPVVAKPHSPDNRAPARECKDVKIDRVYIGSCTGGKTEDFLAAAKLFLASGKKVKVPTFLVPATQKVWLDVYSLPVPGSGGKTCSQIFEEAGCDTPASPNCGACLGGPRDTYARMNEPTVCVSTTNRNFPGRMGHKEGQIYLASPYTAAASALTGYVTDPRDFLM

SEQ ID NO: 102953 - DNA, 1401 bp, Klebsiella pneumoniae subsp. pneumoniae MGH 78578
  CDS (1)..(1401): transl_table=11
atggcgaagacgttatacgaaaaattatttgatgcgcacgtagtgtatgaggcgcagaacgaaaccccgctgctgtatatcgaccgccatctggtgcacgaagtcacctctccgcaggcgtttgacggcctgcgcgcccatggccgccaggtgcgccagccgggtaaaaccttcgctaccatggatcataacgtctcgacgcagaccaaagacattaacgcgtccggtgagatggcccgcattcagatgcaggagctgattaagaactgtaaagagttcggcgttgaactgtacgacctgaaccacccgtatcagggcatcgtccacgtcatgggcccggaacaaggggttaccctgccggggatgacgatcgtgtgcggtgactcccataccgccacccacggcgcgttcggtgcgctggcgttcggtatcggcacctccgaagtggagcatgtactggcgacccagaccctgaaacagggccgcgcgaagaccatgaaaatcgaagtccagggcaaagcggcgccgggcattaccgccaaagatatcgtgctggccatcattggtaaaaccggtagcgccggcggcaccggccatgtggttgagttctgcggcgaagcgatccgcgatctgagcatggaagggcgtatgaccctgtgcaacatggcgatcgagatgggcgccaaagcgggcctggtcgcgccggacgaaaccaccttcaattacgtacgcggccgtctgcatgcgccgaaaggcaaagattttgacgatgccgtagcgtactggaaaaccctgaaaaccgacgacggcgcgacgtttgataccgtggtgacgctgcaggcggcggaaattgccccgcaggtgacctggggcaccaacccgggccaggtgatctcggtgacggataacatccccgatccagcgtcgttcagcgatccggtggaacgcgccagcgccgaaaaagcgctggcctatatggggctgaaatccgggatcccgctgacggaagtcgctatcgataaagtgtttatcggctcctgcaccaactcgcgcatcgaagatttacgcgccgcggcggaaatcgctaaagggcgtaaagtggcgccgggcgtccaggcgctggtggtgccgggttctggtccggtgaaagcgcaggcggaagcggaaggtctggataagatctttatcgaagccggctttgagtggcgcttacctggttgctctatgtgtctggcaatgaataatgaccgcctgaatccgggcgaacgctgtgcctcaaccagcaaccgtaactttgaaggccgtcagggccgcggcggacgcacgcacctggtgagcccggcaatggccgcggcggcagccgttaccggccatttcgccgatatccgtaatctgaagtaa

SEQ ID NO: 102954 - protein, 466 aa, Klebsiella pneumoniae subsp. pneumoniae MGH 78578
MAKTLYEKLFDAHVVYEAQNETPLLYIDRHLVHEVTSPQAFDGLRAHGRQVRQPGKTFATMDHNVSTQTKDINASGEMARIQMQELIKNCKEFGVELYDLNHPYQGIVHVMGPEQGVTLPGMTIVCGDSHTATHGAFGALAFGIGTSEVEHVLATQTLKQGRAKTMKIEVQGKAAPGITAKDIVLAIIGKTGSAGGTGHVVEFCGEAIRDLSMEGRMTLCNMAIEMGAKAGLVAPDETTFNYVRGRLHAPKGKDFDDAVAYWKTLKTDDGATFDTVVTLQAAEIAPQVTWGTNPGQVISVTDNIPDPASFSDPVERASAEKALAYMGLKSGIPLTEVAIDKVFIGSCTNSRIEDLRAAAEIAKGRKVAPGVQALVVPGSGPVKAQAEAEGLDKIFIEAGFEWRLPGCSMCLAMNNDRLNPGERCASTSNRNFEGRQGRGGRTHLVSPAMAAAAAVTGHFADIRNLK

SEQ ID NO: 102955 - DNA, 1434 bp, Kineococcus radiotolerans SRS30216
  CDS (1)..(1434): transl_table=11
atggcgcgcacgctggcggagaaggtctgggacgaccacgtcgtccgcaaggggcaggacggcgaacccgacctgctctacatcgacctccacctcgtccacgaggtcaccagcccgcaggccttcgacgggctgcgggccgccggtcgcccggtgcgccgcctcgacctcaccatcgccaccgaggaccacaacacccccaccgtcgacatcgaccgcccgctgtcgctgctggaggacaagacctcggccaagcagctgcagacgctgcgcgagaactgcgcggagttcggcgtccggctgcaccccctcggcgacgccgagcagggcatcgtgcacgtcgtcggcccgcagctgggcctcacccagcccggcatgacggtcgtctgcggggactcccacacctccacccacggcgccttcggctccctgggcatgggcatcggcaccagcgaggtcgagcacgtcctggccacccagacgctgccgctgaagccgttcaagacgatggcgatcacggtcgacgggacgctgaagcccgggaccaccgccaaggacgtcatcctcgccgtgatcgccgagatcggcaccggcggcgggcagggctacgtcctggagtaccgcggcgaggccatccgcaacctctccatggaggggcggatgacgatctgcaacatgtcgatcgaggccggggcgcgggccgggatggtcgcccccgacgagacgaccttcgcctacctcgagggccgcccgcacgccccgcagggcgccgactgggacgcggccgtggagtactggcggaccctgcgcaccgacgacgacgccgagttcgacgccgaggtcgtcctcgacggcagtgcgctggaacccttcgtcacctggggcaccaaccccggccagggcgtcccgctgtcgggctcggtccccgagcccgagcgcatcggcgacgacggggtgcgccagggcgtcgagcgcgccctggagtacatgggcctggagggcgggacgccgatgcgcgacatcgccgtcgacaccgtcttcatcggctcctgcaccaacagccgcatcgaggacctgcgcgcggcggccgacgtcgtgcgcgggcgcaggaaggccgactcggtgcgcgtcatggtcgtccccgggtcggccaaggtgcgcctgcaggccgaggccgaggggatcgacaccgtcttcaaggagttcggcgccgactggcggttcgcgggctgctcgatgtgcctgggcatgaaccccgaccagctcgcgccgggggagcgctgcgcctcgacgtccaaccgcaacttcgagggccgccagggcaagggcgggcgcacccacctggtgagcccgctggtggcggccgcgacggccgtgcggggcaccctgagctccccggccgacctcgaaccccccgtccccacgaacgtctga

SEQ ID NO: 102956 - protein, 477 aa, Kineococcus radiotolerans SRS30216
MARTLAEKVWDDHVVRKGQDGEPDLLYIDLHLVHEVTSPQAFDGLRAAGRPVRRLDLTIATEDHNTPTVDIDRPLSLLEDKTSAKQLQTLRENCAEFGVRLHPLGDAEQGIVHVVGPQLGLTQPGMTVVCGDSHTSTHGAFGSLGMGIGTSEVEHVLATQTLPLKPFKTMAITVDGTLKPGTTAKDVILAVIAEIGTGGGQGYVLEYRGEAIRNLSMEGRMTICNMSIEAGARAGMVAPDETTFAYLEGRPHAPQGADWDAAVEYWRTLRTDDDAEFDAEVVLDGSALEPFVTWGTNPGQGVPLSGSVPEPERIGDDGVRQGVERALEYMGLEGGTPMRDIAVDTVFIGSCTNSRIEDLRAAADVVRGRRKADSVRVMVVPGSAKVRLQAEAEGIDTVFKEFGADWRFAGCSMCLGMNPDQLAPGERCASTSNRNFEGRQGKGGRTHLVSPLVAAATAVRGTLSSPADLEPPVPTNV

SEQ ID NO: 102957 - DNA, 1443 bp, Xanthobacter autotrophicus Py2
  CDS (1)..(1443): transl_table=11
atgaccgcacctgcgaacgccgcacccgcgaacggcccccgcaccctctatgacaagatcttcgacgaccacgtggtggcgcggcaggaggatggcacctgcctcctctatatcgaccgccacctggtccatgaggtgaccagcccccaggccttcgagggcctgcgcatgaccgggcgcaccgtgcgcgcgccgcacaagacgctggcggtggtggaccataacgtccccaccaccgaccgcaccctgccgaacccggacccggagagcgtggcgcagatcgccgcgctggcggagaatacccgcgagttcggcgtcgaatattatgacggcttcgacaagcgccagggcgtggtccatgtggtgggccccgagcagggcttcaccctgcccggcaccaccatcgtctgcggcgacagccacacctccacccacggcgccttcggggcgctcgcccatggcatcggcacgtccgaggtggagcatgtgctcgccacccagacgctgatccagaagaaggcgaagaacatgcgcgtcaccgtctccgggcctctgcccgagggcgttggcgccaaggacgtggtgctcgccatcatcggcaccatcggcaccgccggcggcaccggctatgtcatcgaatacgcgggcgacgccatcacctccctgtccatggaagggcggatgacggtgtgcaacatgtccatcgagggcggcgcccgcgccggcctcgtggcccctgacgagaaggccttcgcctatctgaaggaccggcccaagtcgcccaagggtgccgactgggatgccgccctgcgcttctggcagaccctgcgcaccgacgcgggcgcccatttcgacgccgagatccagctcgacggcgccaacctgccgcccatcgtctcctggggcaccagccctgaggacgtgatctcggtggagggcctggtgcctgatccggccctcatcgccgacgagggcaagcgcgccgccaagatccgcgcgctgggctatatgggcctgaccgccggcaccaagatcaccgacatcacgctggaccgcgtgttcatcggctcgtgcaccaacggccgcatcgaggatctgcggcaggccgcggccatcgtcgccggccacaccgtgaacgcgaatgtgaacgccatggtggtgccgggctcgggcctcgtgaaggagcaggccgaggcggaaggcctcgacaagatcttcctcgccgccggcttcgagtggcgcgagccgggctgctccatgtgccttgccatgaacgccgaccgcctcgccccggaagagcgctgcgcctccacctcgaaccgcaatttcgagggccgtcagggcttcaagggacgcacccacctggtgtcgcccgccatggctgcggctgcggccatcgccggccacttcgtggatgtgcgccactggcccaaggcggcgtga

SEQ ID NO: 102958 - protein, 480 aa, Xanthobacter autotrophicus Py2
MTAPANAAPANGPRTLYDKIFDDHVVARQEDGTCLLYIDRHLVHEVTSPQAFEGLRMTGRTVRAPHKTLAVVDHNVPTTDRTLPNPDPESVAQIAALAENTREFGVEYYDGFDKRQGVVHVVGPEQGFTLPGTTIVCGDSHTSTHGAFGALAHGIGTSEVEHVLATQTLIQKKAKNMRVTVSGPLPEGVGAKDVVLAIIGTIGTAGGTGYVIEYAGDAITSLSMEGRMTVCNMSIEGGARAGLVAPDEKAFAYLKDRPKSPKGADWDAALRFWQTLRTDAGAHFDAEIQLDGANLPPIVSWGTSPEDVISVEGLVPDPALIADEGKRAAKIRALGYMGLTAGTKITDITLDRVFIGSCTNGRIEDLRQAAAIVAGHTVNANVNAMVVPGSGLVKEQAEAEGLDKIFLAAGFEWREPGCSMCLAMNADRLAPEERCASTSNRNFEGRQGFKGRTHLVSPAMAAAAAIAGHFVDVRHWPKAA

SEQ ID NO: 102959 - DNA, 1428 bp, Buchnera aphidicola str. APS (Acyrthosiphon pisum)
  CDS (1)..(1428): transl_table=11
atggtgaatgacatgaagaaaacattatacgataaaatatatgattcacatattgtttatgaagagaaaaataatacatctcttttatatatagatttacatttacttcatgaggttacatcacctcaagcctttgattcattacgagataaaaatcgaaaggttagacagcctaaaaaaacttttgctacaatggatcataatgtttcgacaactagtcaagatattaatgcttcaggttctatggcaaaggtacaaatgcaagaattaattaaaaattgttccgagtttaatatatcattatatgatataaaaaatcctaatcaagggattgttcatgttattagtcctgagaaagggatgactttgccgggtatgactattgtatgtggtgactcacatacatcgacgcatggtgcatttggagcattatcttttggtattggtacttcagaagttgaacatgttcttgcaactcaaacattaaaacaacagcgttttaaaaatatgaaaatagaaattacaggagaaattcaaaaatttgtcactgctaaagatttgattttgtttattattggaaaattaggatcatctggaggtgcaggatatataattgaattttgtggtaatgtaattgaaaaaatgagcatggaagaaagaatgacaatttgtaatatggcaattgaaataggtgcaaagtcaggtttgatagcaccagatgaagtgacattttcttatctgaaaaataaaatgtatgcaccacgtggtgttttttggaaaaaagcattaaatttttggaagaatttgaaatctgataaaaatgctttttttgataaagttgtgaatataaatatttctgatctctcgccacaaattacctgggggacaaatcctgatcaggtgatctcaatcgatcaaaaaatacctgattttagtagttttgataatttaataaagaaagatttagcgaaatctgcatgtaaatatatgggtttaaaaataggtacttatttaactaatattactgttgataaagtttttattggatcttgtactaatggaagaatagaagatttaagagctgcctcaaagatacttaaagataaaaaaattgctaataatgttaaagctattgttgttcctggatcaggttcagttaagagagaagctgaaaatgaaggtttagataaaatatttattagtgcaggattcgaatggcgtttacctggttgttctatgtgtttaggtatgaataaagatagattaaatgatggtgaacgttgtgcgtctactagcaatcgaaattttgagggtcgccaggggagaggggggcgaacacatttagtaagtcctattatggcggctgcagctgctgtatacggtaaatttgttgatgttagaaaattatataatggtgagaataattaa

SEQ ID NO: 102960 - protein, 475 aa, Buchnera aphidicola str. APS (Acyrthosiphon pisum)
MVNDMKKTLYDKIYDSHIVYEEKNNTSLLYIDLHLLHEVTSPQAFDSLRDKNRKVRQPKKTFATMDHNVSTTSQDINASGSMAKVQMQELIKNCSEFNISLYDIKNPNQGIVHVISPEKGMTLPGMTIVCGDSHTSTHGAFGALSFGIGTSEVEHVLATQTLKQQRFKNMKIEITGEIQKFVTAKDLILFIIGKLGSSGGAGYIIEFCGNVIEKMSMEERMTICNMAIEIGAKSGLIAPDEVTFSYLKNKMYAPRGVFWKKALNFWKNLKSDKNAFFDKVVNINISDLSPQITWGTNPDQVISIDQKIPDFSSFDNLIKKDLAKSACKYMGLKIGTYLTNITVDKVFIGSCTNGRIEDLRAASKILKDKKIANNVKAIVVPGSGSVKREAENEGLDKIFISAGFEWRLPGCSMCLGMNKDRLNDGERCASTSNRNFEGRQGRGGRTHLVSPIMAAAAAVYGKFVDVRKLYNGENN

SEQ ID NO: 102961 - DNA, 1980 bp, Aquifex aeolicus VF5; identical to SEQ ID NO: 66782
  CDS (1)..(1980): transl_table=11

SEQ ID NO: 102962 - protein, 659 aa, Aquifex aeolicus VF5; identical to SEQ ID NO: 66783

SEQ ID NO: 102963 - DNA, 1458 bp, Mycobacterium leprae TN
  CDS (1)..(1458): transl_table=11
ttggagatggataacgagaggaaacaagtgggtggcgcccgcaaaccgcgcacgttggccgaaaaggtttgggacgaccacgttgtggtagccggtcagggctaccatcaagatcggggtcccgatttgatttacatcgatctacatttggtgcacgaggtcaccagcccgcaggctttcgatggcctgcgcttggccggccggtgggtgcggcgccccgatttaacagtggccaccgaggatcacaacgtgcccaccgtcgacatcgacaagccgatcgctgacccggtgtcgcgcattcaagtggagacgttgcggcgcaactgcgccgaatttggtgtccggttacacccgatgggcgatatcgagcagggcatcgttcatgtcgtagggccacagttaggcctcactcaaccgggcatgacgatcgtttgcggcgacagtcacacctctacccatggcgcttttggtgcaatcgcgatgggcatcggcacctcggagatcgagcatgtactcgctacccaaacgctgccgttgcgcccattcaagacaatggcggtcactgtcgatgggcggttgcccgccggcgtcacagccaaggacatcatccttgcgttgattgctaagattggcaccggcggcgggcagggctatgtactcgaataccggggcagtgtcatcgaatcgatgtccatggaaggacggatgacgatctgcaacatgagcatcgaagccggtgctcgagcaggaatggtggctcccgacgagactacctacgagttcttacgtgaccgtccgcacgcaccgactggcaagcaatgggatgccgcagtagcctactggcaacagctgcgcactgacgacgacgctgtgttcgacaccgaggtctatctcgatgcgacctcgttgagcccgtttgtcacctgggggacaaaccccggtcaaggagtgccgttggccgcatctgtgcctgatcccgaactgatgattgacgatgttgcccgacaagccgccgagaaagctttggcgtacatggaccttcgcccaggtacaccgatgcgcgatattgcggtcgatgcggtgttcgttgggtcgtgtaccaacggccgcattgaggatctgcggttggtggccgatgtgttacgtggccacaaggtggccgacggtgtgcggatgctgatcgtccccggctcgatgcgggtacgtgcgcaggctgaagccgaggggctcggtgagatttttattactgcgggagcgcagtggcggcagccgggttgttcgatgtgtctgggcatgaaccccgatcagcttgcgcccggggagcggtgcgctgcgacgtccaaccgaaacttcgaaggacggcaaggcaagggtggccgtacacatttggtatccccggccgtcgccgctgccaccgcggttcgcggcactttctctgctccggccgatttgaactaa

SEQ ID NO: 102964 - protein, 485 aa, Mycobacterium leprae TN
MEMDNERKQVGGARKPRTLAEKVWDDHVVVAGQGYHQDRGPDLIYIDLHLVHEVTSPQAFDGLRLAGRWVRRPDLTVATEDHNVPTVDIDKPIADPVSRIQVETLRRNCAEFGVRLHPMGDIEQGIVHVVGPQLGLTQPGMTIVCGDSHTSTHGAFGAIAMGIGTSEIEHVLATQTLPLRPFKTMAVTVDGRLPAGVTAKDIILALIAKIGTGGGQGYVLEYRGSVIESMSMEGRMTICNMSIEAGARAGMVAPDETTYEFLRDRPHAPTGKQWDAAVAYWQQLRTDDDAVFDTEVYLDATSLSPFVTWGTNPGQGVPLAASVPDPELMIDDVARQAAEKALAYMDLRPGTPMRDIAVDAVFVGSCTNGRIEDLRLVADVLRGHKVADGVRMLIVPGSMRVRAQAEAEGLGEIFITAGAQWRQPGCSMCLGMNPDQLAPGERCAATSNRNFEGRQGKGGRTHLVSPAVAAATAVRGTFSAPADLN

SEQ ID NO: 102965 - DNA, 1428 bp, Agrobacterium tumefaciens str. C58
  CDS (1)..(1428): transl_table=11
atgacaaggcatagagccatgagcgcaccccgcactttatatgacaagatctgggacgaccacgtcgtcaatcgtgacccggacggaacctgtcttctctacatcgaccgtcatctcgtgcatgaggtgacgagcccacaggccttcgaaggtttgcgcattgccggtagacccgtgcattcgccgacccgcacgctcgccgtggtcgaccataacgttccgaccacagccgaccggctggaaggcatcaagaacgaggaaagccgcattcaggtggaagcgcttgcgcagaacgccaaggagttcggtgtcgaatattattccgagcgcgacaagcgccagggcatcgtccacatcgtcggccccgagcagggcttcaccctgcccggcatgacgatcgtctgcggcgatagccacacctccacccacggcgctttcggcgctctggcgcacggtatcggcacgtcggaagtggagcatgttctggccacccagacgctgatccagaaaaaggccaagaacatgctggtgcgtgtcgatggcaagcttccggaaagcgtgaccgccaaggacatcatccttgccattatcggcgagatcggcacggccggcggcaccggccatgtgatcgaatttgctggcgaggcgatccgctcgctctccatggaagggcgcatgacggtctgcaacatgaccatcgagggcggcgcccgcgccggtctgatcgcacccgatgaaacgactttcgattacatcaaggacaaaccgcgtgcgccgaagggtgagacgctggaacaggccatcgcatattggaagacgctgaaatccgatgagggcgcccattacgacaaggttgtcatcctcgatgcagccaatctgccgccaattgtctcctggggttcatctccggaggatgtgacctccgttgaaggcatcgttcccaatcccgatgatatcgaggaagaaaacaagcgcacttccaaatggcgcgcgcttgactatatgggcctgaaacccggcacgcgcatcaccgatatcgccatcgaccgtgtcttcatcggctcctgcaccaatggccgcatcgaggatctgcgggcggcggccaagatcgtcgatggccgcaaggtggcttccaccgtctcggccatgatcgtgcccggctccggactcgtcaaggaacaggcggaaaaagaaggtctggacaagattttcctcgacgccggtttcgaatggcgcgaaccgggctgctctatgtgccttgccatgaatgacgaccgcctgaagcccggcgaacgctgtgcctccacctcgaaccgcaacttcgagggccgtcagggctataagagccgaacccacctcgtctcgccagccatggctgcggctgcggcaattgccggtcatttcgtcgacgtgcgcgagtggcaataa

SEQ ID NO: 102966 - protein, 475 aa, Agrobacterium tumefaciens str. C58
MTRHRAMSAPRTLYDKIWDDHVVNRDPDGTCLLYIDRHLVHEVTSPQAFEGLRIAGRPVHSPTRTLAVVDHNVPTTADRLEGIKNEESRIQVEALAQNAKEFGVEYYSERDKRQGIVHIVGPEQGFTLPGMTIVCGDSHTSTHGAFGALAHGIGTSEVEHVLATQTLIQKKAKNMLVRVDGKLPESVTAKDIILAIIGEIGTAGGTGHVIEFAGEAIRSLSMEGRMTVCNMTIEGGARAGLIAPDETTFDYIKDKPRAPKGETLEQAIAYWKTLKSDEGAHYDKVVILDAANLPPIVSWGSSPEDVTSVEGIVPNPDDIEEENKRTSKWRALDYMGLKPGTRITDIAIDRVFIGSCTNGRIEDLRAAAKIVDGRKVASTVSAMIVPGSGLVKEQAEKEGLDKIFLDAGFEWREPGCSMCLAMNDDRLKPGERCASTSNRNFEGRQGYKSRTHLVSPAMAAAAAIAGHFVDVREWQ

SEQ ID NO: 102967 - DNA, 2634 bp, Ralstonia solanacearum GMI1000; identical to SEQ ID NO: 66818
  CDS (1)..(2634): transl_table=11

SEQ ID NO: 102968 - protein, 877 aa, Ralstonia solanacearum GMI1000; identical to SEQ ID NO: 66819

SEQ ID NO: 102969 - DNA, 1530 bp, Arabidopsis thaliana
  CDS (1)..(1530)
atggcttctgttatctcttcctctccttttctatgcaaatcatcctccaagagtgatttggggatttcttcgtttcctaaatcttctcagatttcgattcatcgatgtcagaagaaatcgatctcacggaagattgtttccgttatggctcctcaaaaggatcggtctcctggaactacaggatcggtgaaaactgggatgacaatgacggagaagattctagctagagcttcggagaagtcattagtggttcctggtgataacatttgggttaatgttgatgttcttatgactcatgatgtttgtggtcctggtgcttttggtatcttcaagagagagtttggtgaaaaagccaaggtttgggatccggagaagattgttgtgattccggatcattatattttcactgctgataagcgtgcaaaccggaatgttgacatcatgagggagcattgcagggaacagaatattaagtatttctatgatatcactgaccttggaaattttaaggctaatcctgactacaaaggtgtttgccatgttgcacttgcacaagaaggtcattgcaggccaggagaggttttgttaggaacagactcacacacttgtactgctggagcatttggtcaatttgctacagggattggaaacactgatgcaggttttgtgttaggcactggaaaaatcctccttaaggttccaccaacgatgaggtttatcttggatggtgagatgcctagttatttgcaagcaaaggatctgattttacaaattattggtgaaatatctgttgctggtgcaacttacaagacgatggagttcagtggtacaactatcgaaagtctgagtatggaagaaagaatgacattgtgcaacatggttgtggaagctgggggaaagaatggtgtcatccctcctgatgcgacgacattaaattatgttgagaataggacatctgtaccatttgagccagtatatagtgatggaaatgcaagctttgtcgcagattatagatttgacgtgtcaaagctggagcctgtggtggctaagcctcattctcctgacaaccgagctctagctagagaatgcaaagacgtgaaaattgacagagtatacatcggttcttgtactggtgggaagacagaggattttatggctgcagctaaacttttccacgcagcaggaagaaaggtcaaagttccaactttccttgtcccggctactcagaaggtgtggatggatgtgtatgctctcccggtacctggagcaggtggaaagacatgtgcgcagatctttgaagaagctggctgtgacacaccagccagccctagctgtggtgcttgccttggtggcccagcagacacctacgctcgcttgaatgaacctcaagtgtgtgtctcaacgacaaacaggaacttccccggtcggatgggacacaaagaagggcaaatttacttagcgtctccttacactgctgcagcctcggctttaaccggccgtgtcgctgacccaagggagttcttgcagtag

SEQ ID NO: 102970 - protein, 509 aa, Arabidopsis thaliana
MASVISSSPFLCKSSSKSDLGISSFPKSSQISIHRCQKKSISRKIVSVMAPQKDRSPGTTGSVKTGMTMTEKILARASEKSLVVPGDNIWVNVDVLMTHDVCGPGAFGIFKREFGEKAKVWDPEKIVVIPDHYIFTADKRANRNVDIMREHCREQNIKYFYDITDLGNFKANPDYKGVCHVALAQEGHCRPGEVLLGTDSHTCTAGAFGQFATGIGNTDAGFVLGTGKILLKVPPTMRFILDGEMPSYLQAKDLILQIIGEISVAGATYKTMEFSGTTIESLSMEERMTLCNMVVEAGGKNGVIPPDATTLNYVENRTSVPFEPVYSDGNASFVADYRFDVSKLEPVVAKPHSPDNRALARECKDVKIDRVYIGSCTGGKTEDFMAAAKLFHAAGRKVKVPTFLVPATQKVWMDVYALPVPGAGGKTCAQIFEEAGCDTPASPSCGACLGGPADTYARLNEPQVCVSTTNRNFPGRMGHKEGQIYLASPYTAAASALTGRVADPREFLQ

SEQ ID NO: 102971 - DNA, 1926 bp, Thermoanaerobacter tengcongensis MB4; identical to SEQ ID NO: 66834
  CDS (1)..(1926): transl_table=11

SEQ ID NO: 102972 - protein, 641 aa, Thermoanaerobacter tengcongensis MB4; identical to SEQ ID NO: 66835

SEQ ID NO: 102973 - DNA, 1296 bp, Chlorobium tepidum TLS
  CDS (1)..(1296): transl_table=11
atggcacaaacgataacccagaaaattttcgccagggctgcgaaccgcaaattcgtcgatcccggccagagcgtatggctcaatgtcgatgttctcttgacgcacgacgtctgcggcccgccgaccttcgatatcttcaagcaggagttcggcccgaacgccaaggtgtgggatccgtcgaaagtggtggtgcttcccgaccactacatcttcacggccaacgagcacgcgcaccgcaatatcgacctcttgcgccagttcgccgccgagcagggcttgccgaactactatgatgtaggcaccgaccgctaccgcggcgtctgccacgtcgcgctggccgaagagggctttaacctccccggcaccgtgctgttcggcaccgactcgcacacctgcacctcgggcgcattcggcatgttcggctccggcatcggcaacaccgacgcagccttcatcctcggcaccggcaagctctgggagaaggtgcctgattcgatgaagttcacctttgaaggccagatgcccgagtacctgacggccaaagacctgatcctccagatcctcggcgacatcaccaccgacggcgcgacctaccgcgccatggagttcgatggcgaagcggtctattcgctgccgatcgacgagcgcatgacgctctgcaacatggccatcgaggcgggcggcatgaacggtatcatcgctgccgatgcggtcaccgaagccttcgtgaaggcgcgcaccagcaagccgtacgaaatcttcacgagcgatcccgacgcgcagtaccacagcatgtaccgctacaacgtcgaaaagatggagccgatcgtcgccaagccgcacagcccggacaaccgcgccaccgtgcacagcgtggccggaacgccgatcaccaaatcgtacatcggctcctgtaccggcggcaagctgaccgacttcaagctcgcagcgaagattctcaagggcaagaaggtggcggtcacaaccaacatcgtcccggcaaccgtgctcgtggcatcgcagctcgaaaccgagatgtacgatggccagacactgcgccatattttcgaggaagctggctgcaacatcgccctgccatcgtgcgcggcgtgtctcggcggcccttcggacacggtcgggcgctcggtggacaacgacgtcgtcgtttcgaccaccaaccgcaacttccctggccgcatgggcagcaagttcgcgagcgtctatctggcctcgccgctgactgcggcagcctctgccataacgggcaaactcaccgatccgagagatttcctctga

SEQ ID NO: 102974 - protein, 431 aa, Chlorobium tepidum TLS
MAQTITQKIFARAANRKFVDPGQSVWLNVDVLLTHDVCGPPTFDIFKQEFGPNAKVWDPSKVVVLPDHYIFTANEHAHRNIDLLRQFAAEQGLPNYYDVGTDRYRGVCHVALAEEGFNLPGTVLFGTDSHTCTSGAFGMFGSGIGNTDAAFILGTGKLWEKVPDSMKFTFEGQMPEYLTAKDLILQILGDITTDGATYRAMEFDGEAVYSLPIDERMTLCNMAIEAGGMNGIIAADAVTEAFVKARTSKPYEIFTSDPDAQYHSMYRYNVEKMEPIVAKPHSPDNRATVHSVAGTPITKSYIGSCTGGKLTDFKLAAKILKGKKVAVTTNIVPATVLVASQLETEMYDGQTLRHIFEEAGCNIALPSCAACLGGPSDTVGRSVDNDVVVSTTNRNFPGRMGSKFASVYLASPLTAAASAITGKLTDPRDFL

SEQ ID NO: 102975 - DNA, 1536 bp, Rhodopirellula baltica SH 1
  CDS (1)..(1536): transl_table=11
ttgcccctcagtgtcgacagtgtcgggttcccgggattgaaatcccagttttccccacccacgctcgtctcacgatccatgtctgacgcttcttcgaccgctcccagccaagcgggagccacttctcaatccaccggcagccgaacgttgctggacaaaatttgggaccagcatctggttcacgcccccgagtctgggcccgcgatcatctacattgatctgcacctggtccatgaagtgaccagcccccaggcgttcgagggattgcggatcaacaaccgccccgttcgtcgtcctgaacgcaccatcgcgacccccgatcacaacgttccaacgtccgatcgcagtttgccgatcgctgatccgatcagtcgcaaacagatcgaaacgctgcgtgagaactgcaaggagttcggtgttcagctgttcgacatcgatgacgtgcgtcagggaatcgtgcacgtgatcggccccgaaaacggttacacccaaccgggaatgaccatcgtttgtggcgactcccacaccgcgacgcacggtgcttttggttcgctggcgtttggcatcgggaccagcgaagttgagcacgtcttggcgacgcaaacgcttctgcagttcaaaccgaaaacgtttgaacttcgcgtcgatggcgaactggcccgcggagtgaccgcgaaggacatgatcctgtatctgattggccaaatcggaaccgcaggtggaactggctacgttctcgagttcaccggagacgccgttcgcaacctgacgatggaagagcgaatgacggtctgcaatatgtcgatcgaagctggtgctcgtgccggaatgatcgcgcccgatcaaacgacgttcgactacttgcgaggtcgtccagaatgccccgccgattttgatgccgcggtggaagcctggaagaaactgccatccgaccccggtgcgacttacgaccgaagcaacctctacaagggctcggacatccgacctcaggtgacttggggaaccaaccccggtcaggtgtgcagcgtcgattcggtggtgccatcaccgggcgacagcacggacgtcaacgtgcaaaagtcgaccgcttcggcgcttcagtacatggacctgaaggccggcactccgatcaccgagatcgaaatcaatcgagtgttcataggttcttgcaccaacgcccgcatcgaagatttgcgagcagcggcggctgtgatcaaagggcatcactgcagcgacaaagtcaatgcgatgatcgtgcccggtagtggcaaggtgaagttgcaagccgaggaagaaggtttacacaaagtcttcaccgacgctgggtttgattggcgagaagccggttgcagcatgtgtttggcgatgaaccccgacaaactggctccgggcgaacgttgtgccagcactagcaatcgcaacttcgaaggtcgccaaggtaaaggtggccgaacacacttggtcagccccgcgatggctgcagcagccgcgatcaaaggtcacttcgtcgatattcgcgattgggattatcgctga

SEQ ID NO: 102976 - protein, 511 aa, Rhodopirellula baltica SH 1
MPLSVDSVGFPGLKSQFSPPTLVSRSMSDASSTAPSQAGATSQSTGSRTLLDKIWDQHLVHAPESGPAIIYIDLHLVHEVTSPQAFEGLRINNRPVRRPERTIATPDHNVPTSDRSLPIADPISRKQIETLRENCKEFGVQLFDIDDVRQGIVHVIGPENGYTQPGMTIVCGDSHTATHGAFGSLAFGIGTSEVEHVLATQTLLQFKPKTFELRVDGELARGVTAKDMILYLIGQIGTAGGTGYVLEFTGDAVRNLTMEERMTVCNMSIEAGARAGMIAPDQTTFDYLRGRPECPADFDAAVEAWKKLPSDPGATYDRSNLYKGSDIRPQVTWGTNPGQVCSVDSVVPSPGDSTDVNVQKSTASALQYMDLKAGTPITEIEINRVFIGSCTNARIEDLRAAAAVIKGHHCSDKVNAMIVPGSGKVKLQAEEEGLHKVFTDAGFDWREAGCSMCLAMNPDKLAPGERCASTSNRNFEGRQGKGGRTHLVSPAMAAAAAIKGHFVDIRDWDYR

SEQ ID NO: 102977 - DNA, 1434 bp, Bordetella bronchiseptica RB50
  CDS (1)..(1434): transl_table=11
atgccggatgttcctctcaagagtgcttccatggcccaaacgctttacgacaaactctgggacgcccacgtcgtccaccaggaatccgacggaacctgtctgctctatatcgaccgccacctgctgcacgaagtgaccagcccgcaggcgttcgaggggctggcgctggccggacgccagccgtggcgcgtcggggccaacctggccgtggccgaccataacgttcccacgctcaaccgcgcccagggcatcgaagacccgatctcgcgcctgcaggtcgatacgctggacgacaactgcgccaagtacggcatcaccgaattccgcatgaatgacctgcgccagggcatcgtgcacgtcatcggcccggagcagggcgcgaccctgcccggcatgaccgtcgtctgcggcgactcgcataccagcacgcacggcgcgctgggcgcgctggccttcggcatcggcacttccgaggtcgagcacgtgctggccacgcagacgctgctcatgaagaaagccaagagcatgcagatcaacgtcgagggcgagttgccgttcggctgtaccgccaaggacgtggtgctgcacatcatcggcatcatcggcacggctggcggcaccggccacgccatcgaattctccggcagcacgatccgcggcctgtccgtcgagggccgcatgacggtgtgcaacatggccatcgaggccggcgcgcgctcgggcatggtggccgtcgacgacaagaccatcgattacttccgcggccgcccgttcgcgcccgtcggcgtgctgtgggaccaggcagtcggctattggcgcacgctgcactcggatgccggcgccaggttcgaccgcgtcatcaacgtcgatgcgcgcgacatcaagccgcaggtcacctggggcacttcgcccgaaatggtactgcccgtcgatggccgcgtgcccgatcccgatcgcgagaaggacgacgtgcgccgcagcggcatggaacgcgcgctcgagtacatgggcctcaagcccaatacaccgctggtcgatatccgcgtcgatcgcgtgttcatcggctcgtgcaccaactcgcgcatcgaagacctgcgcgcggccgcggtcgtggcgcgcggcaagcgcgtggccgccaacgtgcgccaggccatggtggtgccgggttccgggctggtcaagcaacaggccgagcgcgaggggctggacaagatcttcatcgaagccggcttcgagtggcgcgagccgggctgttcgatgtgcctggccatgaatgccgaccgcctcgaaccgggcgagcgctgcgcctcgacctccaaccgcaacttcgaaggccgccaggggcagggcgggcgcacgcacctggtcagcccggcgatggccgccgccgccgcggtggccggccatttcgtcgacgtccgctcgttccgttga

SEQ ID NO: 102978 - protein, 477 aa, Bordetella bronchiseptica RB50
MPDVPLKSASMAQTLYDKLWDAHVVHQESDGTCLLYIDRHLLHEVTSPQAFEGLALAGRQPWRVGANLAVADHNVPTLNRAQGIEDPISRLQVDTLDDNCAKYGITEFRMNDLRQGIVHVIGPEQGATLPGMTVVCGDSHTSTHGALGALAFGIGTSEVEHVLATQTLLMKKAKSMQINVEGELPFGCTAKDVVLHIIGIIGTAGGTGHAIEFSGSTIRGLSVEGRMTVCNMAIEAGARSGMVAVDDKTIDYFRGRPFAPVGVLWDQAVGYWRTLHSDAGARFDRVINVDARDIKPQVTWGTSPEMVLPVDGRVPDPDREKDDVRRSGMERALEYMGLKPNTPLVDIRVDRVFIGSCTNSRIEDLRAAAVVARGKRVAANVRQAMVVPGSGLVKQQAEREGLDKIFIEAGFEWREPGCSMCLAMNADRLEPGERCASTSNRNFEGRQGQGGRTHLVSPAMAAAAAVAGHFVDVRSFR

SEQ ID NO: 102979 - DNA, 1431 bp, Chromobacterium violaceum ATCC 12472
  CDS (1)..(1431): transl_table=11
gtgaccgcattgcaaaccccaccccaaacgctgtaccagaaactggtcgagacccacacggtggcgcgtctggattcgcagaacgtgctgctgtacgccgatctgcacatcatgaacgagtacaccagcccgcaagccttcgccgggctggcggaagccggccgcacagtcttgcagcccggccagaacgtatccgtggtcgaccacatcatcccgacccaccccgtggcgatccgcatcatcgaggagccgaattcggcattgcaggcctcgaacctgaagaagaattgcgagcgccacggcatcccgcttttcgacgccaacaaccgttttcaaggcatcgaacatgtcatcgcgccggaactgggcatgattcgtcccggcatggtcgtcctctgcggcgacagccacaccacgacctatggcgcgctgggggccttgggcttcggcatcggcacctccgaagtcgaacacgtattggcgacccagaccctggtgtatcgcctggcgccaaccatgcgcatccatgtagccggccgcttgccgctcggcaccaccgccaaggacctgatcctgctgatcatcaaccggatcggcgcgcacggcgcgcgcggctacgcggttgagttctgcggcgaagccattgaagcgttgacgatagaagcgcggatgaccttgtgcaatatggcggtcgaggccggcgcccgcggcgcgctcatcgcgccggatgcgctgacgctggaatacgtcgcccgtcattgtccggacttggccggcgcgacgctggacgccgcgaaggcggactggcgcgccctgcgcagcgacgacggcgccccattcgacctgaagcttgaattccaggccggcgacgtcgagccctatgtgacatggggcaccagccccgaccaatccattccgatcagcggccgcatccccgtcgccgcgtcagcgccggaggggcctgagcggctcaccatgcagcgggcgctgcgctacaccggcctggccgaaggcgcccaattggaaggcttgcccatccagcgcgtcttcatcggctcttgcaccaatgcccgcatcgaggacttgcgcgccgtcgcggacatcgtgcgcggacgaagcgtggcgccttcggtgcgcgccatgatcgtgccgggctcaggcgaggtgcgccgccaggccgaacaggaaggcctggctcagctcttcatcgaagccggctttgaatggcgtcaacctggctgttccctatgcctggccatgaatgacgacgtgctcaaccccggcgagcgatgcgcctccaccaccaaccgcaatttcgaaggccgccaaggccgggatgcgatcacccacctgatgagccccgccatggccgccgctgccgccgtcgccggctgcatcaccgacgttcgcaaactgggagtccgcgcatga

SEQ ID NO: 102980 - protein, 476 aa, Chromobacterium violaceum ATCC 12472
MTALQTPPQTLYQKLVETHTVARLDSQNVLLYADLHIMNEYTSPQAFAGLAEAGRTVLQPGQNVSVVDHIIPTHPVAIRIIEEPNSALQASNLKKNCERHGIPLFDANNRFQGIEHVIAPELGMIRPGMVVLCGDSHTTTYGALGALGFGIGTSEVEHVLATQTLVYRLAPTMRIHVAGRLPLGTTAKDLILLIINRIGAHGARGYAVEFCGEAIEALTIEARMTLCNMAVEAGARGALIAPDALTLEYVARHCPDLAGATLDAAKADWRALRSDDGAPFDLKLEFQAGDVEPYVTWGTSPDQSIPISGRIPVAASAPEGPERLTMQRALRYTGLAEGAQLEGLPIQRVFIGSCTNARIEDLRAVADIVRGRSVAPSVRAMIVPGSGEVRRQAEQEGLAQLFIEAGFEWRQPGCSLCLAMNDDVLNPGERCASTTNRNFEGRQGRDAITHLMSPAMAAAAAVAGCITDVRKLGVRA

SEQ ID NO: 102981 - DNA, 2259 bp, Bdellovibrio bacteriovorus HD100; identical to SEQ ID NO: 66888
  CDS (1)..(2259): transl_table=11

SEQ ID NO: 102982 - protein, 752 aa, Bdellovibrio bacteriovorus HD100; identical to SEQ ID NO: 66889

SEQ ID NO: 102983 - DNA, 2337 bp, Magnaporthe grisea 70-15
  CDS (1)..(2337)
atgcctggagcagaaagcactccgcagaccttgtacgacaaggttctgcaagcacacgtggtcgatgagaagctcgacggcacagtcctcttgtacatcgaccgccaccttgtacatgaggtcacatcacctcaagcattcgagggcctcaggaatgcaggccgtaaagtgcggagacccgactgcaccttggccaccacagaccataacgtccccacgacttcacggaaagctctcaaggacattgccagcttcatcaaagaggacgactcaaggacccaatgtgtgactctggaggaaaatgtcaaggagtttggcgtcacatattttggcctcagcgacaagcgccagggtattgtgcacgtcattggccctgagcaaggcttcacgctccccggaacaacggttgtgtgtggagacagtcacacgtctacccatggcgcctttggagcccttgcctttggtatcggtaccagcgaggttgagcacgtgctggccactcagtgcttgatcaccaagaggagcaagaacatgaggatacaagtcgacggcgagctggctcctggtgtcagctccaaggatgtcgtgcttcatgcaatcggtatcattggtaccgctggaggcaccggggctgtcatcgagttctgtggttccgtcatccgcagcctcagcatggaggcccgcatgtcaatctgcaacatgtccatcgagggaggtgccagggctggcatggtagcccctgacgagatcaccttcgaatacctcaagggccgcccgctcgctccgaagtacgactcgcccgagtggcacaaggctacccaatactggaagaaccttcagtccgacccaggtgccaaatacgatattgatgtctttattgacgccaaagacattgtaccaaccttgacatggggcacaagtcccgaggatgttgttccgatcaccggcgttgttcctgatcctgagacgtttgctaccgaagcgaagaaggcggacgggcgacgcatgctgcagtacatgggactgaaggcgggtactcccatggaggacattccggtcgacaaagtcttcatcggctcctgcaccaattccaggattgaggatctccgtgctgctgccgcggtcgtaaagggccggaaaaaagcacccaatgttaagagcgccatggtggtgccgggatcgggcttggtcaagactcaagctgaggaggaaggcctggacaagatttttgaggaggccggctttgaatggcgcgaggctggctgcagtatgtgccttggcatgaacccagatattctcgctccccaggagcgttgtgccagtaccagcaaccgcaacttcgagggtcgccagggtgcaggcggccgcactcatctcatgtccccagtcatggctgctgctgctggtatcgtcggtaagcttgcagatgtgagaaagttgaccgattacaaggccagccctcacattgcagcttaccagaaatcgacagtgacaaagccccatgtggatgagcggatcaaccaagatgcgcatgagaaagatatcattgctgatattcctgaggacaacaacggccctcacaccaacacctctgccagtgttggcacttcagcagggcttcccaagttcaccattctcaagggtatagcggctccgctggagaaggctaatgttgacaccgacgccatcattcccaaacaatttctcaagacaatcaagaggacaggccttggaaatgctctgttctatgagatgaggttcaatgaggacggcactgagaagagcgactttgttctcaacaaggagccgtaccggaaagccagtattctggtttgcacgggtgccaactttggatgtgggagctctcgtgagcatgcgccatgggctctcaacgattttggcatcaggagcgtcattgccccgtcgttcgcagatatattcttcaacaactccttcaagaacggcatgctgccgatccctatcaaggaccaggctcagatcgaggccatcgccgccgaagccagggcgggcaaggaaatcgaagttgacctcccaaaccagctgatcaagaacgcaaccggcgagacgatctgcactttcgaggtggaggagtttaggaagcactgcttggtcaatggtctcgatgatatcggcttgaccatgcagatggaagacaagatcgccgagttcgaggccaagatgaccagggagactccctggctcgacggaactggctacctcaagcgaaagggtcaaggtggtaagctcgcagccaaggctgtgcccgtgcctaccaccaacaggggcgaggagaagaaggagccgcttgagtggtga

SEQ ID NO: 102984 - protein, 778 aa, Magnaporthe grisea 70-15
MPGAESTPQTLYDKVLQAHVVDEKLDGTVLLYIDRHLVHEVTSPQAFEGLRNAGRKVRRPDCTLATTDHNVPTTSRKALKDIASFIKEDDSRTQCVTLEENVKEFGVTYFGLSDKRQGIVHVIGPEQGFTLPGTTVVCGDSHTSTHGAFGALAFGIGTSEVEHVLATQCLITKRSKNMRIQVDGELAPGVSSKDVVLHAIGIIGTAGGTGAVIEFCGSVIRSLSMEARMSICNMSIEGGARAGMVAPDEITFEYLKGRPLAPKYDSPEWHKATQYWKNLQSDPGAKYDIDVFIDAKDIVPTLTWGTSPEDVVPITGVVPDPETFATEAKKADGRRMLQYMGLKAGTPMEDIPVDKVFIGSCTNSRIEDLRAAAAVVKGRKKAPNVKSAMVVPGSGLVKTQAEEEGLDKIFEEAGFEWREAGCSMCLGMNPDILAPQERCASTSNRNFEGRQGAGGRTHLMSPVMAAAAGIVGKLADVRKLTDYKASPHIAAYQKSTVTKPHVDERINQDAHEKDIIADIPEDNNGPHTNTSASVGTSAGLPKFTILKGIAAPLEKANVDTDAIIPKQFLKTIKRTGLGNALFYEMRFNEDGTEKSDFVLNKEPYRKASILVCTGANFGCGSSREHAPWALNDFGIRSVIAPSFADIFFNNSFKNGMLPIPIKDQAQIEAIAAEARAGKEIEVDLPNQLIKNATGETICTFEVEEFRKHCLVNGLDDIGLTMQMEDKIAEFEAKMTRETPWLDGTGYLKRKGQGGKLAAKAVPVPTTNRGEEKKEPLEW

SEQ ID NO: 102985 - DNA, 2334 bp, Gibberella zeae PH-1
  CDS (1)..(2334)
atgcctgctcccgtgggaactcctcagactctttacgacaaggtcttttcagcacacattgtcgacgagaagctcgatggcacgattcttctttacattgaccgacacttggtccacgaagtgacatcaccacaagccttcgagggcctcgagaatgcaggccgaaaggtccgaagaccggattgtactttggctaccactgatcacaacgtccccacatcttcccgcaaagccctgaaggatattgcttcttttatcgaggaggacgattcgcgaacacaatgtgttaccttggaggagaatgtcaagaaattcggtatcacatacttcggcctcggcgacaagcgacagggtattgtccacatcattggccccgagcaaggcttcactcttcccggaaccaccgttgtttgcggtgacagccacacctcaacacatggcgccttcggtgctctggcctttggtatcggtaccagtgaggttgagcacgttcttgcaacccagtgcctgatcaccaagcgaagcaagaacatgagaatacaggtcgacggcgagctggcccccggtgtcagctcaaaggacattgttctccatgccatcggtcagattggtactgctggaggtactggtgctgttattgagttctgtggttctgttatccgcagcctgagcatggaggctcgcatgtccatctgcaacatgtccattgagggtggcgcccgtgctggtatggtcgctcccgatgagatcacctttgaatatctcaagggtcgccccctggcccccaagtatggctctgagacttggaacaacgctgttgcctactggaagtccctccagtcggatcccggtgccaagtatgatatcgatgtcttcattgatgctaaggatattgttcctactcttacctggggaaccagtcctgaagacgtcgtacccatcacgggctgcgttcctgaccccgaaacattcagcagcgagagcaagaaggctgctggtcgtcgcatgcttgagtacatgggcctgaccgctggaacccccatggaggatattcccgtcgacaaggttttcatcggatcctgcaccaacgcccgaattgaggatttgcgagctgctgccaatgttgtcaagggccgcaaggttgctgataacatcaagcgcgccatggtcgttcctggctctggtcttgtcaaggctcaggccgaggaggagggtctcgatcaaatcttcgtcgatgccggtttcgagtggagagaggctggttgcagtatgtgcctgggcatgaaccctgacattctagcccctaaggagcgatgtgccagtacatcgaaccgaaactttgagggtcgacagggtgccctcagccgaactcatctcatgtctcctgtcatggctgccgccgctgcccttgttggcaagctggccgatgtccgcaagctatctcactacacccaccagtccgccttcaaggcccgtgagctccccgccgaggagcctcatgtagacgagagaaccaaggacgactctgaggagcgcgaactgattggtgaccagccccaggactctgaacctcacaccaacaacctagtcagcgctgccggctccgcttctggcctgcccaaatttactatctggaagggcactgccgctgctttggaccgatccaacgtcgacaccgatgccatcattccaaagcagttcctcaagactatcaagcgaaccggtcttgggaccgctctcttttacgagcttcgatacaaggaggatggatctgaggaccccgacttcgtcttgaaccaggagcctttccgaaacaccaagaccttggttgttactggtcctaactttggatgcggtagttctcgagagcacgccccttgggctcttctcgactttggcattaagtgtatcattgctccctcttttgccgatatcttctttaacaacactttcaagaacggcatgcttcccatccgtattgacaacaaggatgacctggacgccattgccgctgaagctcgcgccaaccgagacattgaggttgatctacctagccagctgatcaagaacgctgctggcgagactatctgctcatttgacgtcgaggagttccgcaaacactgcctggtcaacggcctcgacgatatcggcctgactatgcagcaggaggaaaagatttctgagtttgagcgaagcatgacaaaaaacaccccttggctcgacggttcaggttacctgaagcgtcctggacagggtggtaagctggctgctaaggctgtgcccattcccaagacaaatcgtggtgaggagaagaaggaacctctcgagtggtaa

SEQ ID NO: 102986 - protein, 777 aa, Gibberella zeae PH-1
MPAPVGTPQTLYDKVFSAHIVDEKLDGTILLYIDRHLVHEVTSPQAFEGLENAGRKVRRPDCTLATTDHNVPTSSRKALKDIASFIEEDDSRTQCVTLEENVKKFGITYFGLGDKRQGIVHIIGPEQGFTLPGTTVVCGDSHTSTHGAFGALAFGIGTSEVEHVLATQCLITKRSKNMRIQVDGELAPGVSSKDIVLHAIGQIGTAGGTGAVIEFCGSVIRSLSMEARMSICNMSIEGGARAGMVAPDEITFEYLKGRPLAPKYGSETWNNAVAYWKSLQSDPGAKYDIDVFIDAKDIVPTLTWGTSPEDVVPITGCVPDPETFSSESKKAAGRRMLEYMGLTAGTPMEDIPVDKVFIGSCTNARIEDLRAAANVVKGRKVADNIKRAMVVPGSGLVKAQAEEEGLDQIFVDAGFEWREAGCSMCLGMNPDILAPKERCASTSNRNFEGRQGALSRTHLMSPVMAAAAALVGKLADVRKLSHYTHQSAFKARELPAEEPHVDERTKDDSEERELIGDQPQDSEPHTNNLVSAAGSASGLPKFTIWKGTAAALDRSNVDTDAIIPKQFLKTIKRTGLGTALFYELRYKEDGSEDPDFVLNQEPFRNTKTLVVTGPNFGCGSSREHAPWALLDFGIKCIIAPSFADIFFNNTFKNGMLPIRIDNKDDLDAIAAEARANRDIEVDLPSQLIKNAAGETICSFDVEEFRKHCLVNGLDDIGLTMQQEEKISEFERSMTKNTPWLDGSGYLKRPGQGGKLAAKAVPIPKTNRGEEKKEPLEW

SEQ ID NO: 102987 - DNA, 2355 bp, Candida glabrata CBS 138
  CDS (1)..(2355)
atggttactacagagactaaaggtcctaggaccctatatgataaagtatttgatgcgcatgtggtgcacaaggatgagaatggctcttacttgttgtacattgacagacatctagtgcacgaggttacttctccacaggcctttgaaggtttgactaatgcgaacagaccagtaagaagggtggattgtactttggccacagttgaccacaacatcccaaccgagtccagaaagagtttcaagaacttggactctttcattacacaaaccgactcccgcttacaagtgaagactttggaacagaacgtcaagcaatttggcgtaccatactttggtctaaccgagaagagacaaggtatcgtccatactattggtcctgagcaaggtttcaccttacctggtaccactgtggtgtgtggtgactcccacacttctactcacggtgcattcggtgcattggcattcggtatcggtacctccgaagtcgaacacgtcttggctacccaaactatcattcaaagtaaatccaagaatatgagaattagagtcgacggtaagttaagcccaggtattacatctaaggatttgattcttcatatcattggtgtgatcggtactgctggtggtactggttccgtcattgaatttgctggtgaagctatagagaacttatctatggaagctcgtatgtctatgtgtaatatgtccattgaggccggtgcaagagctggtatgatcaaaccagacaatgtcactttcgaatatttcaaaggaagaccattggccccaactggtgccgaatgggacaaggctgttgcttactggaagactttgcattctgatgagggcgccaaattcgatcacgaaatcgtcatcaaaggttcagaaattattccaactattacctggggtacttctccacaagatgcgctaccaatcagtgcatcagttccagatccagctaatgtagatgatccaatcaagaagtccggtatggagagagctctcgaatacatgggcttgaaaccaaacactccattgaagagtatctatgtcgacaaggtcttcattggttcatgtactaatggccgtattgaagatttgagaaatgccgctaaggtcttaaatggtcataagattgccccaaatatcaagagagctatggttgtcccaggatccggtttagtcaaggtacaagccgaagaagaagggcttgataaagttttcattgcagctggctttgaatggagagaagctggctgttctatgtgtctaggtatgaacccagatattttggacaagtacgaacgttgtgcttccacttccaacagaaactttgaaggtcgtcaaggtgccttatctcgtacacatttaatgtctccagccatggctgctgctacagctgttgcaggtcactttgtagacatcagagaatttaaatataataacgctgacgatgctaaagttactatatcttctgatgaagacgaagaacttgaagaagctgcgtatgagcacactgaaccacaacagcccggtgatgccccaactgatgttgagaatgatcagttgaaggacatcccagtcgaatccgaaacaaaaagattaaagacggacgatactaagccagttgctggtggtatggacccatttgtcgttttgaatggtttggctgctccacttgaaaaggctaacgttgatactgatgctattattccaaaacaattcttgaaaacaattaagagaaccggtttgagatcaggtctattttacgaatggagatttgtcaaggatgacagtggaaaagataaagaaacagattttgtgttgaatgtcaacccatggaggaaagctgaggtcctcgttgttactggtgacaactttggttgtggttcctctagagaacacgccccatgggctttgaaagattttggtatcaagtcaattattgctccatctttcggtgatattttctacaataacagtttcaagaatggtttgttaccaattagaattgatcaagataccatcgtaaacaagctagttcctgttgcaaaggctggtaagaatctcgttattaacttaccagatcaaaccatctctgattcggatggcaatgttttggttgaacattttgaagttgaagcattcagaaagcattgtctagtaaatggtctagatgacattggcatcacattgcagaaagaacaatacatcgaccaatacgaaaagattagaagagaaaagtactcattttatgaaggtggttctaagttgctacacttcccagccaagcagttcccaaaaaagagaactccattaacgacttatgacactgttcatcaagattggtaa

SEQ ID NO: 102988 - protein, 784 aa, Candida glabrata CBS 138
MVTTETKGPRTLYDKVFDAHVVHKDENGSYLLYIDRHLVHEVTSPQAFEGLTNANRPVRRVDCTLATVDHNIPTESRKSFKNLDSFITQTDSRLQVKTLEQNVKQFGVPYFGLTEKRQGIVHTIGPEQGFTLPGTTVVCGDSHTSTHGAFGALAFGIGTSEVEHVLATQTIIQSKSKNMRIRVDGKLSPGITSKDLILHIIGVIGTAGGTGSVIEFAGEAIENLSMEARMSMCNMSIEAGARAGMIKPDNVTFEYFKGRPLAPTGAEWDKAVAYWKTLHSDEGAKFDHEIVIKGSEIIPTITWGTSPQDALPISASVPDPANVDDPIKKSGMERALEYMGLKPNTPLKSIYVDKVFIGSCTNGRIEDLRNAAKVLNGHKIAPNIKRAMVVPGSGLVKVQAEEEGLDKVFIAAGFEWREAGCSMCLGMNPDILDKYERCASTSNRNFEGRQGALSRTHLMSPAMAAATAVAGHFVDIREFKYNNADDAKVTISSDEDEELEEAAYEHTEPQQPGDAPTDVENDQLKDIPVESETKRLKTDDTKPVAGGMDPFVVLNGLAAPLEKANVDTDAIIPKQFLKTIKRTGLRSGLFYEWRFVKDDSGKDKETDFVLNVNPWRKAEVLVVTGDNFGCGSSREHAPWALKDFGIKSIIAPSFGDIFYNNSFKNGLLPIRIDQDTIVNKLVPVAKAGKNLVINLPDQTISDSDGNVLVEHFEVEAFRKHCLVNGLDDIGITLQKEQYIDQYEKIRREKYSFYEGGSKLLHFPAKQFPKKRTPLTTYDTVHQDW

SEQ ID NO: 102989 - DNA, 2358 bp, Kluyveromyces lactis NRRL Y-1140
  CDS (1)..(2358)
atgactgctcctgctgctaccgaatcaaacggtccacaaaccttgtatgacaaggttttccaggaccatattgtccataaggatgaatctggatcatatttgttgtatattgatagacatttggttcatgaagttacttctccacaagcttttgaaggtttaaagaatgctggtagaaaagttagaagagttgattgtaccttggctacagtggatcacaacatccctactgaatccagaaagaattttgtcgatactgcatctttcattaagcaagccgattcccgtttgcaagttcaaactttggaacaaaacgttaaggattttggagtcacattttttggtatgactgatgctagacaaggtatcgtgcatattattggtccagaacaaggtttcacattgccaggcaccactgtggtgtgtggtgattcccatacttctactcacggtgcgtttggtgcacttgcatttggtattggtacctctgaagttgagcacgtcttggctacccaaaccattattcaggccaagtcgaagaacatgagaatttacgttgatggtccattgtccccatcagtgacttctaaggatttgatcttacacatcatcggtgtcattggtactgcgggtggtactggttgtgttatcgaattcgcaggtcaagcaattgaggaactgtctatggaagcccgtatgtccatgtgtaatatggccatcgaaggtggtgccagagccggtttgattcaaccagatcaaactactttcgattacatcaagggtagacctttggctccaaagggcgctgaatggaacaaggctgtcgcctactggaagactttacacaccgatgaaggtgctcagtttgattacgatatcactattaaatcaactgatgtcatcccaacaatcacttggggtacttctccacaagatgcattgccaatcactgcctctgttccagatccggcaaccatctctgatcctgctgtaaaggctactgtggaaagagctttgaaatacatgggcttgactccaaacgttccattgaaagaactttctatcgataaggtctttatcggttcttgtaccaatgctagaattgaggatttgagagctgctgctgccgtcgttaagggacataagaaagctgataatgttaaattggctatggttgttccaggttctggtttggtgaagaaacaagctgaatctgaaggcttagacaagatttttgaggaagctggtttcgaatggagagaagctggttgttctatgtgtctaggtatgaacccagatattttggaccctgaagaacgttgtgcttctacttccaacagaaactttgaaggccgtcaaggtgctctatctagaactcatttaatgtctccagcaatggctgctgctgctggtattgctggtcatttcgttgacattagagatcatgaatacagaaacagcgatgttccaaaggtttccattgagcaagaagctgaagacaaaatcttgcaaaatgctgtctatgaacacgaaaaagaaccaatcgaagagggcgagtcagtggatgaacaagtcgatgatcaacaattggatatcccaccttctgatcatgtaacaaaggaaacccctctcaaagatgctccaacatctgctccaaaaggtatggatcctttcctaaaattggacggtattgctgctccagttgacaaggcgaacgttgacactgatgccatcattccaaaacaatttttgaagactattaagagaacaggtttgaagagtggtttgttctatgaatggaggttcaccaaaggtcctgacggtaaggatgtagaaactgattgggtcttgaacgttgaaccttggagaaatgctgaaatcttggtcattactggtgataactttggttgtggttcttccagagaacacgcaccatgggccttgaaggatttcggtatcaagtgtatgattgccccatctttcggtgacattttctacaacaattccttcaaaaacggtttgcttccaatcagacttcctgaagatttaatcgtagaaaagctttcgccattggcagaagctggtgctaaattgatagtcgatttaccatcgcagaagatcatggatgctgaaggtaatgttcttgtggatcatttcgatgttgagcctttcagaaaacactgtttggttaacggtcttgatgatattggtatcacaatgcagaaagaagagtacattgctaagtatgaagccatgagaagagacaggttctctttcttagaaggtggttccaaactaataaaacctatcaagggtactaagaagagtccatttggtaacagggctcaagagtggtaa

SEQ ID NO: 102990 - protein, 785 aa, Kluyveromyces lactis NRRL Y-1140
MTAPAATESNGPQTLYDKVFQDHIVHKDESGSYLLYIDRHLVHEVTSPQAFEGLKNAGRKVRRVDCTLATVDHNIPTESRKNFVDTASFIKQADSRLQVQTLEQNVKDFGVTFFGMTDARQGIVHIIGPEQGFTLPGTTVVCGDSHTSTHGAFGALAFGIGTSEVEHVLATQTIIQAKSKNMRIYVDGPLSPSVTSKDLILHIIGVIGTAGGTGCVIEFAGQAIEELSMEARMSMCNMAIEGGARAGLIQPDQTTFDYIKGRPLAPKGAEWNKAVAYWKTLHTDEGAQFDYDITIKSTDVIPTITWGTSPQDALPITASVPDPATISDPAVKATVERALKYMGLTPNVPLKELSIDKVFIGSCTNARIEDLRAAAAVVKGHKKADNVKLAMVVPGSGLVKKQAESEGLDKIFEEAGFEWREAGCSMCLGMNPDILDPEERCASTSNRNFEGRQGALSRTHLMSPAMAAAAGIAGHFVDIRDHEYRNSDVPKVSIEQEAEDKILQNAVYEHEKEPIEEGESVDEQVDDQQLDIPPSDHVTKETPLKDAPTSAPKGMDPFLKLDGIAAPVDKANVDTDAIIPKQFLKTIKRTGLKSGLFYEWRFTKGPDGKDVETDWVLNVEPWRNAEILVITGDNFGCGSSREHAPWALKDFGIKCMIAPSFGDIFYNNSFKNGLLPIRLPEDLIVEKLSPLAEAGAKLIVDLPSQKIMDAEGNVLVDHFDVEPFRKHCLVNGLDDIGITMQKEEYIAKYEAMRRDRFSFLEGGSKLIKPIKGTKKSPFGNRAQEW

SEQ ID NO: 102991 - DNA, 2325 bp, Debaryomyces hansenii CBS767
  CDS (1)..(2325)
atgacagcacaaccaagaacattatatgataaggtgtttgaagatcacatagttcataaggacgaatcggggtcatatttaatttacatagatagacatcttgtgcacgaagttacgtcgccacaagcattcgaaggattgagcaatgcgggtagaacggtcagaagaaccgactgtacattagctacggttgatcacaacattcctaccagctccagagctaatttcaaggacattgatacatttatcgagcaagacgactcgaggttacaggtgaagacattggaacagaatgtgaaggattttgacgtcacatacttcggtatgagcgacgaaagacaaggtattgtgcatattgttggtccggaacaaggatttacgttaccaggtaccactgtggtgtgtggtgactcgcatacttctacacacggtgcgtttggttcattggcatttggtattggtacttcggaggtcgagcacgtcttggccacgcagactatcatccaggccaagtctaagaacatgagaattcaggttaacggtgacttagctccgggtataacctcgaaggatttggttttacacgtcatcggtgtaattggtactgctggtggtaccggttgtgtccttgagtttgctggtaaggccattgaaggtttatctatggaagctagaatgtccatctgtaatatggcaattgaagctggtgcccgtgctggtatgattaagccagacgaaatcactttcaattacatcaagggcagacctttagctccaaagggtgaacaatgggacaaggctgtttcgtactggaaaaccttacattcagacgaaaatgctaagtttgactatgatattcaaatcgaggctgctgatatcgtcccaactatcacctggggtaactctcctcaagatgctttacctatcaccgctaaggttcctgatccatccacagtctctgacccaattgtgaaatctggtatggaaagagcattaaaataccaaggtttaactccaaataccccattaaaggatattaagatcgataaggcattcattggttcttgtaccaacgcacgtattgaagatttaagagcagccgctaaagttgctaagggacataaaaaggccgataacgtcaaattagtattagtcgttccaggttccggtttgattaagactcaagctgagaaagaaggtttacacaaaatctttgaacaagcaggattttcttggagagaagccggttgttcgatgtgtttaggtatgaatccagatatcttagatccagaagaaagatgtgcatctacttcgaacagaaattttgaaggtcgtcaaggtgccgcttctagaactcacttaatgtctccagctatggcagcagcagctgctatcaagggccacttcactgatattcgtgaattcgactacgataacaccgatgagccatctgtttctattggatcagacgaagaccaagcattacaagacgctgtttacgaacacgaaaagcaatctaccgatgattccgcttctattatggatgagcaactaaacgatattccaagagaaccacaagctaagaaatcgaaggtcgggaataccatctctacagttggtggtatggacaaatttaatgttcttaccagtatcactgctcctttagataaggccaatgtcgacaccgatgctattattccaaagcaatttttgaagacaattaaacgtactggtttaaagaatggtttattctacgaagctaggtatgtcaaagacccaataactggaaaagacgtcgaaactgactttgtattaaacactgatccataccgtagtgccgaaattttattagtcactggtgataacttcggttgcggttcctcaagagaacacgctccttgggcattaaaggacttcggtatcaagtgtatgattgctccatcattcggtgatattttctacaataactcgttcaagaacggtttattaccaattagaattcctcaagatgttatcatgtctaagttataccctatggccactgctggaaagaaattgactgtcgatttaccaaatcaacaaatcaagaacagcgaaactggagaagttttagtcgataactttgatattgaagaattcagaaaacattgtttaataaatgggttagatgatattggattaactttacaaaaggaagaattcattactaaatatgaggctattagaagagataaattttcattcttagagggaggctcgaaattaatcaaaccagtcaagggcgctaagaagtccgtctatgggcttaaaacacaagaatggtaa

SEQ ID NO: 102992 - protein, 774 aa, Debaryomyces hansenii CBS767
MTAQPRTLYDKVFEDHIVHKDESGSYLIYIDRHLVHEVTSPQAFEGLSNAGRTVRRTDCTLATVDHNIPTSSRANFKDIDTFIEQDDSRLQVKTLEQNVKDFDVTYFGMSDERQGIVHIVGPEQGFTLPGTTVVCGDSHTSTHGAFGSLAFGIGTSEVEHVLATQTIIQAKSKNMRIQVNGDLAPGITSKDLVLHVIGVIGTAGGTGCVLEFAGKAIEGLSMEARMSICNMAIEAGARAGMIKPDEITFNYIKGRPLAPKGEQWDKAVSYWKTLHSDENAKFDYDIQIEAADIVPTITWGNSPQDALPITAKVPDPSTVSDPIVKSGMERALKYQGLTPNTPLKDIKIDKAFIGSCTNARIEDLRAAAKVAKGHKKADNVKLVLVVPGSGLIKTQAEKEGLHKIFEQAGFSWREAGCSMCLGMNPDILDPEERCASTSNRNFEGRQGAASRTHLMSPAMAAAAAIKGHFTDIREFDYDNTDEPSVSIGSDEDQALQDAVYEHEKQSTDDSASIMDEQLNDIPREPQAKKSKVGNTISTVGGMDKFNVLTSITAPLDKANVDTDAIIPKQFLKTIKRTGLKNGLFYEARYVKDPITGKDVETDFVLNTDPYRSAEILLVTGDNFGCGSSREHAPWALKDFGIKCMIAPSFGDIFYNNSFKNGLLPIRIPQDVIMSKLYPMATAGKKLTVDLPNQQIKNSETGEVLVDNFDIEEFRKHCLINGLDDIGLTLQKEEFITKYEAIRRDKFSFLEGGSKLIKPVKGAKKSVYGLKTQEW

SEQ ID NO: 102993 - DNA, 2292 bp, Yarrowia lipolytica CLIB122
  CDS (1)..(2292)
atgggacaaacactctacgacaaggtctttgcggaccacgttgtccacgaggacaatggcacttaccttctgttcattgaccggcaccttgtgcacgaggtcacatctccgcaggcgtttgagggtctcaagaacgccggacgacaggtgcgacgtaaggactgcactctggccacggtcgaccacaacattcccaccacgacgcgaaaggacttcaagtcgatcggcacatttatcaaggaggaagactcgcggttgcagtgcacgactctggagcagaacgtcaaggactttggcgtgcggtactttggcatggacgacaagcgacagggaattgtgcacgttgtgggtcctgagcaaggcttcactctgcccggaaccaccgtggtttgcggcgactcgcacacctctacccatggtgcgttcggagctctggcgtttggaatcggaacctccgaggtcgagcacgtgctggcgacccagaccatcatccaggccaagtccaagaacatgcggatcaacgtctccggcaaactgcagccgggcatcacctccaaggatctgattctgcacattatcggcgtcattggcactgctggaggaactggaaccgtcatcgagttctgcggcgaggcgatccgagacctctccatggaggctcgaatgtccatgtgcaacatggcgattgagggaggagctcgagccggcatgatcgctcccgacgagaccaccttccggtacatccggggccgacctctggctcccgagggcgccgagtgggagaaggccgtcacctactggaagactctgcattcggactcggacgcggagttcgatattgacgtcaacatcaagggcgaggacattatccccaccgtcacctggggtacctctcctcaggacgctctgcccatcacgggctccgttcccgacccctccaaggagaccgatcccatcaagcgggccggaatcgagcgtgcgctggagtacatgggtctggaggccaacactcccctcaacgagattgctgtggacaaggtcttcattggatcctgtaccaactcgcgaatcgaggatctgcgggccgccgctgccattgttcggggaaaaaagaaggccgactccgtggtgcgagccatggttgtgccgggctccggtctggtcaagcgaaaggccgaagccgagggtctggacaaggtctttgaggctgcgggcttcgaatggcgagaggctggctgttccatgtgtctgggtatgaaccctgacattctcaacccccgcgagcgatgtgcttccacctccaaccgtaactttgagggtcgacagggtgctctttcgcgcacccatctggtttcgcccgccatggcggctctggctggaatcaccggcaagctgactgacgtgcgggactacctgcccaaggacgaggccaagattgtgattggcgaggacgaggagatggctgaggccaagtatgacgaggagaaacagcccgccgtcaagaaaatgaagaccgccaccgtgacccaggcggaccctgtcgatgagcagaccgacgccgtggccgaggaaaacatcacctcgtcagccaccggcatccccaagttcctggaggtatctggaatcgccgcgcctctgcccaaggccaacgtggacaccgacgccatcatccccaagcagttcctcaagaccatcaagcgaactggactgtcctcgggtctctttttcgagtggcgattcaaggaggtggacggcaagcaggagaagaccgactttatgctcaacgtggctccctgggataaggcttcgattctggttgtttccggcgacaactttggctgtggctcttcccgagaacacgctccctgggctctggccgactttggcatccggtgcatcattgctccttcttttggcgacattttctacaacaactcgttcaagaacggcctgctgcccatccgggtcgacgccgacgtcatcaagtccaagctcatgcccgtggccgacaagggcggctctctgaccgtggatctgcccaaccagaaggtgctgcatggcgacgaggtgctggtggaccactttgaggtcgaggacttccgaaagcactgtctggtcaacggtctggacgatatcggactcaccatgcagaaggaggagttcatcaaggcctacgaggccaagcgatctgataagttctccttccttgagtccaacaccgactctctcattgtcaaccccgtcaagggtaccaagaagtctgctcttggagtcactgcccaggagtggtag

SEQ ID NO: 102994 - protein, 763 aa, Yarrowia lipolytica CLIB122
MGQTLYDKVFADHVVHEDNGTYLLFIDRHLVHEVTSPQAFEGLKNAGRQVRRKDCTLATVDHNIPTTTRKDFKSIGTFIKEEDSRLQCTTLEQNVKDFGVRYFGMDDKRQGIVHVVGPEQGFTLPGTTVVCGDSHTSTHGAFGALAFGIGTSEVEHVLATQTIIQAKSKNMRINVSGKLQPGITSKDLILHIIGVIGTAGGTGTVIEFCGEAIRDLSMEARMSMCNMAIEGGARAGMIAPDETTFRYIRGRPLAPEGAEWEKAVTYWKTLHSDSDAEFDIDVNIKGEDIIPTVTWGTSPQDALPITGSVPDPSKETDPIKRAGIERALEYMGLEANTPLNEIAVDKVFIGSCTNSRIEDLRAAAAIVRGKKKADSVVRAMVVPGSGLVKRKAEAEGLDKVFEAAGFEWREAGCSMCLGMNPDILNPRERCASTSNRNFEGRQGALSRTHLVSPAMAALAGITGKLTDVRDYLPKDEAKIVIGEDEEMAEAKYDEEKQPAVKKMKTATVTQADPVDEQTDAVAEENITSSATGIPKFLEVSGIAAPLPKANVDTDAIIPKQFLKTIKRTGLSSGLFFEWRFKEVDGKQEKTDFMLNVAPWDKASILVVSGDNFGCGSSREHAPWALADFGIRCIIAPSFGDIFYNNSFKNGLLPIRVDADVIKSKLMPVADKGGSLTVDLPNQKVLHGDEVLVDHFEVEDFRKHCLVNGLDDIGLTMQKEEFIKAYEAKRSDKFSFLESNTDSLIVNPVKGTKKSALGVTAQEW

SEQ ID NO: 102995 - DNA, 2319 bp, Aspergillus nidulans FGSC A4
  CDS (1)..(2319)
atgcctggcgctgacaggaagcccaagactttgtatgacaaggtctttgatcaccacatcgtgaacgagcaggaggatggcaccgtcttgatctatatcgacagacacctggtccacgaagtgacttctccacaagcctttgaaggtcttaagaatgcgaaccgcaaagtccgccggccggactgcacgcttgttaccgtcgaccacaacatccctacctcgtcacgaaaaaacttcaaaaacgtcgaacagttcattgaagagaacgactcccgcctgcaatgctccaccctcgaagagaacgtcaaggacttcggtttgacatactttgggatggacgacaagcgacagggtatcgtccatgttatcggtcccgagcagggcttcactctccccggcacaactgttgtctgcggtgacagtcacacttccacccacggtgcctttggcgctctcgccttcggtatcggtactagtgaggttgagcacgtccttgccacccagaccctcatcaccagacgcagcaagaacatgcgcgtccaggttgacggtgagcttcctgctggggtcacgtcgaaggacgtcgttctgcacatcatcggtcttatcggcaccgctggtggtacgggatgcgtaattgagttctgcggttctgtcatccgcgggctgagcatggaggctcggatgtctatgtgcaacatgtccatcgagggcggtgcgcgtgctggcatggtcgcaccagacgagactacctttgagtacctcaagggccgccctcttgctcccaagtacgacagcgccgaatggaagaaggctgtcagctactggtctagcttggcctctgacgaggatgccgtttacgacaagaccattctgatcgacgccaaggacattgttcccacaatctcctggggtacctctcctcaggatgttgttcccattacaggcgttgtccccggccccgacgacttcgaggatgaggctcgcaaggccgcctgcaagcgcgccctcgagtacatgggcctgaccgccggaacgcccatgaaggacgtcaccgtcgacaaggtcttcattggctcctgtacgaactctcgcattgaggacttgcgcgccgctgccaatgttgtgcgaggtaagaaggtcgcctccaacatcaagcgtgccatggtcgttcccggctccggtctcgtcaagcagcaggccgaagccgagggtctcgacaagatcttcattgacgccggctttgaatggcgcgaggctggctgctccatgtgccttggcatgaaccccgacatcctctctcctcaggaacgctgcgcttctacctctaaccgcaactttgagggtcgccagggtgccggcggccgcacacacctcatgtcccccgccatggccgccgccgccgccatcgtcggcaagctcgccgatgtccgtgagcacatcgctgagagcccccgccttggaaaggttcagcccaaggtcgacgtcaagcctgaagccgaagacgttgacaccgaggaagaactagaccacatccttgaccagcccgccgacaatgaaccccatacaaacacgcacacccctgccaccacctccgccggtctccccaagttcacaaccctcaagggcatcgcggcccctatggaccgcagcaacgtcgacacagatgccatcatcccgaagcagtttctgaagaccatcaagcgcaccggtcttggctctgctctcttctacgaactccgctacaaggacggacaggaagacccctccttcatcctgaaccagggaatctaccgcaactccaagatcctcgtcgtcacaggacccaatttcggctgtggctcctcccgcgaacacgccccatgggctctcctcgatttcggcatcaagtgtgtcatcgccccctcctttgcagacattttcttcaacaacaccttcaagaacggcatgctccccgtcgtgattcccgaccaggccgtccttgagaagattgccgacgaggcccgcgccggccgcgaagtcgaagtcgacctcgttaaccaggagatcaaggatgaggccgggaacaagcttgcctcctttgatgttgatgccttccgcaagcactgccttatcaatggactcgatgatatcggtttgacgctgcagatggaggataagattgccaagtttgaggcgaagcgtacgctcgacacgccttggctggatggcaaggcttatctgaagcgtggtcgcactggtggttccaatatggttaaggctgcgcccgtgccgaagaccaacagaggagatgtgaagggggagcctctggaatggtag

SEQ ID NO: 102996 - protein, 772 aa, Aspergillus nidulans FGSC A4
MPGADRKPKTLYDKVFDHHIVNEQEDGTVLIYIDRHLVHEVTSPQAFEGLKNANRKVRRPDCTLVTVDHNIPTSSRKNFKNVEQFIEENDSRLQCSTLEENVKDFGLTYFGMDDKRQGIVHVIGPEQGFTLPGTTVVCGDSHTSTHGAFGALAFGIGTSEVEHVLATQTLITRRSKNMRVQVDGELPAGVTSKDVVLHIIGLIGTAGGTGCVIEFCGSVIRGLSMEARMSMCNMSIEGGARAGMVAPDETTFEYLKGRPLAPKYDSAEWKKAVSYWSSLASDEDAVYDKTILIDAKDIVPTISWGTSPQDVVPITGVVPGPDDFEDEARKAACKRALEYMGLTAGTPMKDVTVDKVFIGSCTNSRIEDLRAAANVVRGKKVASNIKRAMVVPGSGLVKQQAEAEGLDKIFIDAGFEWREAGCSMCLGMNPDILSPQERCASTSNRNFEGRQGAGGRTHLMSPAMAAAAAIVGKLADVREHIAESPRLGKVQPKVDVKPEAEDVDTEEELDHILDQPADNEPHTNTHTPATTSAGLPKFTTLKGIAAPMDRSNVDTDAIIPKQFLKTIKRTGLGSALFYELRYKDGQEDPSFILNQGIYRNSKILVVTGPNFGCGSSREHAPWALLDFGIKCVIAPSFADIFFNNTFKNGMLPVVIPDQAVLEKIADEARAGREVEVDLVNQEIKDEAGNKLASFDVDAFRKHCLINGLDDIGLTLQMEDKIAKFEAKRTLDTPWLDGKAYLKRGRTGGSNMVKAAPVPKTNRGDVKGEPLEW

SEQ ID NO: 102997 - DNA, 2331 bp, Candida albicans SC5314
  CDS (1)..(2331): transl_table=12
atggctcctaaaacattatacgacaaggtctttgaagaccatatagttcataaagacgattctggttcatatttattatacattgatagacatttagtccatgaggttacttccccacaagcatttgaagggttaaagaatgctggtcgttcagtcagaagaaccgattgtacattagccacagttgatcataatatcccaactatttcaagagcaaatttcaagaatgtcgattcattcatagagcaagatgattctagattgcaagttaagactttagaacaaaacgtcaaggattttgatgttacttattttggtatgacagacgacagacaaggtattgtccatgttgttggtccagaacaaggtttcactttaccaggtaccactgttgtttgtggtgactcccatacttctactcatggtgcctttggttcattggcttttggtattggtacttctgaagtggaacatgttttagctacgcaaactattattcaagccaaatcgaaaaacatgagaattactattgatggtgatttgtctgaaggtatcacttcgaaagatttggttttgcatgtcattggtgttattggtactgctggtggtactggttgtgttattgaatttgctggtaaagccattgagaatttgtcaatggaagcaagaatgtcgatatgtaatatggccattgaagccggtgccagagctggtatgatcaaaccagatgatactacattcaattacatcaaaggtagaccattggctccaaagggacaagaatgggaaaaggccatgaaatattggaaaactttacatactgatgaaggagctaagtttgattacgatattaaaattgctgcttccgatattgttccaactatcacttggggtaactcaccacaagatgcgttaccaataactgctagtgtcccagacccagcaactgtgaccgatccaattaagaaatcgggtatggaaagagcattgaaatatcaaggtttaactccaaacacacctttcaaagaaatcaaaattgataaagcattcattggttcatgtaccaactctcgtattgaagatttaagagcagctgctaaagttgccaaaggtcacaaaaaagccgacaatgtgaaattggtcttggtggtgccgggttctggtttaattaaaaagcaagctgaaaaagaaggtttggataagatttttgaagccgctggattttcatggagagaagccggatgttcaatgtgtcttggtatgaacccagatattttggatcctgaagaaagatgtgcttctacttccaacagaaatttcgaaggtcgtcaaggtgctctttcaagaacccatttgatgtcaccagccatggctgctgctgctgctattaaaggtcatttcactgatattagagaatttgactatgccacacaagatgaacctcaaatacaaattgctcatgaaattgaagacaaagaattacaagaagctgtttatgagcacgaaaaggaatacattgaagataccccagaaactcaagcagaaagacttgaagacattccaaaagatgaaccagaatttaaaagggccagaaccgagatcgacaactctgctgctggtactcctagtattgataacagtttcaaagttttaactggtattactgctccattatacaaagccaatgttgatactgatgccattattccaaaacaatttttgaaaacaatcaagagaaccggattaaaagatggtttgttttatgaattgagatttgttaaaggtgaaaatggtaaagatgtggaaactgattttgtattgaatactgaaccatatagaaaggcagaaattttattggtgacaggagacaattttggttgtggatcaagtcgtgagcatgctccttgggctttgaaagattttggtatcaaaagtataattgccccatcatttggtgatatcttttataataattcttttaaaaatttccttttgccaatcagaataccgcaagaaatcattgaatctaaattggttcccgttgttacatcaggtcatagattgacgatagatttgccaaaccagcaaatcagagacggtgaaaccgacgaagtcttgattgaacatttcgatgtggaagagtttagaaaacattgtttggtcaatggattagatgatattggtttgactttacaaaaagaagaatatattaaagaatatgaagctaaaagaagaatcaagttttctttcttggaaggaggttctaaattaatcaaacctataaaaggtactaaaaagagtatttacggtaacagagcacaagaatggtaa

SEQ ID NO: 102998 - protein, 776 aa, Candida albicans SC5314
MAPKTLYDKVFEDHIVHKDDSGSYLLYIDRHLVHEVTSPQAFEGLKNAGRSVRRTDCTLATVDHNIPTISRANFKNVDSFIEQDDSRLQVKTLEQNVKDFDVTYFGMTDDRQGIVHVVGPEQGFTLPGTTVVCGDSHTSTHGAFGSLAFGIGTSEVEHVLATQTIIQAKSKNMRITIDGDLSEGITSKDLVLHVIGVIGTAGGTGCVIEFAGKAIENLSMEARMSICNMAIEAGARAGMIKPDDTTFNYIKGRPLAPKGQEWEKAMKYWKTLHTDEGAKFDYDIKIAASDIVPTITWGNSPQDALPITASVPDPATVTDPIKKSGMERALKYQGLTPNTPFKEIKIDKAFIGSCTNSRIEDLRAAAKVAKGHKKADNVKLVLVVPGSGLIKKQAEKEGLDKIFEAAGFSWREAGCSMCLGMNPDILDPEERCASTSNRNFEGRQGALSRTHLMSPAMAAAAAIKGHFTDIREFDYATQDEPQIQIAHEIEDKELQEAVYEHEKEYIEDTPETQAERLEDIPKDEPEFKRARTEIDNSAAGTPSIDNSFKVLTGITAPLYKANVDTDAIIPKQFLKTIKRTGLKDGLFYELRFVKGENGKDVETDFVLNTEPYRKAEILLVTGDNFGCGSSREHAPWALKDFGIKSIIAPSFGDIFYNNSFKNFLLPIRIPQEIIESKLVPVVTSGHRLTIDLPNQQIRDGETDEVLIEHFDVEEFRKHCLVNGLDDIGLTLQKEEYIKEYEAKRRIKFSFLEGGSKLIKPIKGTKKSIYGNRAQEW

SEQ ID NO: 102999 - DNA, 2289 bp, Cryptococcus neoformans var. neoformans B-3501A
  CDS (1)..(2289)
atgcctgctccgataaccactcctaggactctttatgacaaagtctttgacgatcacgtcgtacactccggggaaggcgatacccttatctacatcgaccgccatcttgttcacgaagttacttctcctcaagcttttgaaggtttgagaaatgctggacgaaaagttcgcagaccggactgtacacttgtcactgtcgaccacaacattcctaccatttctcgtaagaatttcaagaacgtcaacactttcattggtgaggcggacagtcgggcgcaggttgccgccctcgaagacaatgtgaaggagtttggcctcacatacttcggtatgaacgacaagcgacaaggcattgttcacatcatcggtccagagcaaggattcactcttcccggtacaactgtttgctgcggtgattcccacacttccacccacggtgcttttggtgcccttgctttcggtatcggcacttctgaagtggaacacatccttgctacccaaactctcccccaagccaagtctaagaacatgcgcatcaatgttgagggtactcttgccgagggtgtgtcctctaaagacattgttcttcatatcattggtgtgattggtactgctggtggtactggttgtgtcattgagttctctgggtcaacaatccgagcgctcagtatggaggcaagaatgtccatctgtaacatggctattgaaggaggtgctagggccggcatgatcgcccctgatgagattactttcgaatacctcaagggacgtcctctcagccctagagaaggtgaggaatgggataaggcagtagagtactggaaaaccctgaagacggatcccggagccaagtacgatatcgaggttgagatcaaggctgaagacatcgtgcctaccctcacctggggtacttctcctcaggatgttgtacctatcactggtgtcgttcctaaccccgacgatttccccgaagctcagcgaggtaatattgttcgggctctcgaatacatggggcttacctccggtacccctatggagaaggtcaagattgacaaggctttcttcggctcttgtaccaacggtcgtatcgaagacatgcgctctgctgctcgtgttatccttgcttcccagaaaaatggtgggccttccaaggtcgcggatggtgtctacgctatgatcgttcctggttccggtttagtcaagcaacaagcggaagccgaaggtcttgacgtcattttcaagaaggcgggctttgactggcgagaggctggttgctccatgtgtcttggtatgaacccggaccagctcaagcccggagagcgatgcgccagtacttcgaacagaaacttcgaaggtcgacaaggcgccggtggccgaactcatctcatgtcccctgcaatggtagcggccgcttcccttactggttatctcaccgatgttcgtacactcatgggctcccacgctaatgatgatggactcaaaatcacatcatatttcgactatctcacacctgtcgaagtgccggctcaacccactgagcctactgaggagaccgaagagggtaagactccggtcaaggccgctgctgctggctctgccggcttgcctaaatttaacgtccttcgaggcatcgctgcccccatgtgggaggccaacatcgacaccgacaaaatcatccctaagcagttcttgaagactcttcttcgtactggtctcggcaaggctctcttctggccccttcgatacgatgtcgagaccaatgaagagattcctgatttcgtgctcaacaaagagccttataggcatgccagtatcattgtctgcactggtcctaacttcggttgtggttcttctcgtgaacatgctccttgggctcttaacgatttcggtattcgatgtgtgatggcgccatcttttggtgacatcttcaaaaccaactgcttcaagaacggtatgcttcctcttcagcttccccaagccgacctcgataccctctatgaagatgcttcagctggtctagagattacggtagatcttgagaaccaagtgatcgtccgacccaacggcaagccatccattcctttctctgttgaccccttccgacgacattgccttattaatggtctcgatgatattggtcttacacttgtccaccgagacgaaattgagaagtttgaagggaagaggaccgcggtctggccttggcttgacggtgttggatatgccaagaagggacagaaggtcatcgctgtgcccgttaggaagggcgccaggaagacggactggtaa

SEQ ID NO: 103000 - protein, 762 aa, Cryptococcus neoformans var. neoformans B-3501A
MPAPITTPRTLYDKVFDDHVVHSGEGDTLIYIDRHLVHEVTSPQAFEGLRNAGRKVRRPDCTLVTVDHNIPTISRKNFKNVNTFIGEADSRAQVAALEDNVKEFGLTYFGMNDKRQGIVHIIGPEQGFTLPGTTVCCGDSHTSTHGAFGALAFGIGTSEVEHILATQTLPQAKSKNMRINVEGTLAEGVSSKDIVLHIIGVIGTAGGTGCVIEFSGSTIRALSMEARMSICNMAIEGGARAGMIAPDEITFEYLKGRPLSPREGEEWDKAVEYWKTLKTDPGAKYDIEVEIKAEDIVPTLTWGTSPQDVVPITGVVPNPDDFPEAQRGNIVRALEYMGLTSGTPMEKVKIDKAFFGSCTNGRIEDMRSAARVILASQKNGGPSKVADGVYAMIVPGSGLVKQQAEAEGLDVIFKKAGFDWREAGCSMCLGMNPDQLKPGERCASTSNRNFEGRQGAGGRTHLMSPAMVAAASLTGYLTDVRTLMGSHANDDGLKITSYFDYLTPVEVPAQPTEPTEETEEGKTPVKAAAAGSAGLPKFNVLRGIAAPMWEANIDTDKIIPKQFLKTLLRTGLGKALFWPLRYDVETNEEIPDFVLNKEPYRHASIIVCTGPNFGCGSSREHAPWALNDFGIRCVMAPSFGDIFKTNCFKNGMLPLQLPQADLDTLYEDASAGLEITVDLENQVIVRPNGKPSIPFSVDPFRRHCLINGLDDIGLTLVHRDEIEKFEGKRTAVWPWLDGVGYAKKGQKVIAVPVRKGARKTDW

SEQ ID NO: 103001 - DNA, 1260 bp, Clostridium thermocellum ATCC 27405
  CDS (1)..(1260): transl_table=11
atgggaatgactatgacacagaaaatacttgcagatcacgcaggtcttgacaaggtttcaccgggtcagctcataaaagcaaaacttgacatggttttgggaaatgatataacaacacctgtggctgtgaaggaatttagaaaaattggcgtgaacaaggtgttcgatgtaaataaaatagcaattgttcctgaccattttacacccaacaaagacatcaagtccgcggagcaggtcaagtttatcagagaatttgcaagggaaatgggaatagtaaacttctttgaagtcggacaaatgggtgttgagcatgccctgcttccggaaaagggccttgtagttccgggagacgtggtaataggtgccgactcgcatacatgtacttatggagctttgggagctttctcaacgggaataggaagtaccgacatggctgccggaatggcaaccggagaagcatggtttaaagtgcccgaggccatgaaattcgtattgaagggaaaacccggaaaatgggtgagcggcaaggacataatccttcatataattggaatgataggggtggacggagctttgtaccgctccatggaattcacgggagacggtgtggcccacctttcaatggatgacaggtttgcaatggcgaacatggccattgaggcaggagcaaagaacggaatctttgaagttgacgaaaagacaattgagtatgtaaaagaacattccacaaggcagtacaaggtatacaaggcggatgaagacgcagaatatgtggccacttacgaaattgacctttcacaggtaaaacccacggttgcgttcccgcatcttccgtccaatacaagaaccattgacaatgtgggcaatatcaaaatcgaccaggttgtaataggatcatgtacaaacggaagaattgaggatttgagggtggccgcggaagtcctcaagggaagaaaagtgcacaaggacgtaagatgtataatcatccctgcaactcagaagatatggaaacaggcaatgaatgaaggtctgtttgacatatttattgatgcgggagctgcggtaagtactcccacctgcggaccgtgtcttggaggtcatatgggtattctggcaaaaggagaaagagctgtggcaaccaccaacagaaactttgtgggaagaatgggacatcccgaaagcgagatttacctcgcaagtccggctgtagctgcggcatcggctgttttgggaagaataggttcaccggatgaactttaa

SEQ ID NO: 103002 - protein, 419 aa, Clostridium thermocellum ATCC 27405
MGMTMTQKILADHAGLDKVSPGQLIKAKLDMVLGNDITTPVAVKEFRKIGVNKVFDVNKIAIVPDHFTPNKDIKSAEQVKFIREFAREMGIVNFFEVGQMGVEHALLPEKGLVVPGDVVIGADSHTCTYGALGAFSTGIGSTDMAAGMATGEAWFKVPEAMKFVLKGKPGKWVSGKDIILHIIGMIGVDGALYRSMEFTGDGVAHLSMDDRFAMANMAIEAGAKNGIFEVDEKTIEYVKEHSTRQYKVYKADEDAEYVATYEIDLSQVKPTVAFPHLPSNTRTIDNVGNIKIDQVVIGSCTNGRIEDLRVAAEVLKGRKVHKDVRCIIIPATQKIWKQAMNEGLFDIFIDAGAAVSTPTCGPCLGGHMGILAKGERAVATTNRNFVGRMGHPESEIYLASPAVAAASAVLGRIGSPDEL

SEQ ID NO: 103003 - DNA, 1401 bp, Herminiimonas arsenicoxydans
  CDS (1)..(1401): transl_table=11
atggctcaaacgctctacgataaactctggcaatcgcacgttgtcgataccggcgacgatggcacaaccgtgctttacatcgatcgccacctgttgcatgaagtcaccagcccgcaggcttttgaaggcttgaagctggctggacgtcgtccatggcgcgtctccgccaatctgatggtggcggatcacaatgtgccgactaccgaccgctcggaagggattgcagatccgacatcgcgcctgcaggttgaaacgctggatcacaacgcacatgaatacggtttgacctatttcagcatgcgcgacaagcgtcagggcatcgttcatgtcatcggacctgagcagggcgcaaccctgcctggcatgacggttgtctgtggcgattcgcatacatccacgcatggtgcgttcggtgcattggcacacggcataggcacctcagaagtcgaacatgtacttgcgacgcaaaccctgctggcgcaaaaatccaaagccatgctggtgcaggtcgatggcgcattgccggtcggcgtgactgccaaggacatcgtgttggccattatcggaaaaatcggcactgccggcggtaccggttatgcgattgaatttgccggttcgaccatacgttcgctgtcgatggaaggccgcatgaccatctgcaacatggcgatcgaagcgggtgcacgcgccggcatggttgccgtggatgagaccactatcaattacgtcaagggacgtcccttgtcgcctgtcggtccgcactgggatcgtgcagtcgaatactggcgtaccttgcattccgacgtcggcgcgaaattcgacttggtcgtgacattgaatgctgctgaagttaagccgcaagtcagctggggtacatcgccagagatggtggtgtccgtggatggtcgcgtgccagatccggataaggaaaaagatgcaaccaagcgtgacggtatggaaaaagctctggtctatatgggactgaagccgaatacgccgattaccgatattcgtatcgacaaggtgtttatcggttcctgcaccaactcacgcatacaagatttgcgtgcagcggctgccgtagtgcgcggcaagcatcgtgcctctaacgtgaaactggcgatggtggtgccaggctccggcctggtcaaagagcaggccgagcgtgaaggcctggacaagattttcaaggatgccggttttgaatggcgtgagccgggttgttcgatgtgtctggcgatgaatgccgatcgtctggagccgggtgaacgttgtgcgtcgacttcgaatcgcaatttcgaaggacgtcagggggcgggcggtcgcacccatctggtgagccctgcaatggcagcggctgcaggtatcgaaggtcatttcgttgatgtacgtgcgctgtaa

SEQ ID NO: 103004 - protein, 466 aa, Herminiimonas arsenicoxydans
MAQTLYDKLWQSHVVDTGDDGTTVLYIDRHLLHEVTSPQAFEGLKLAGRRPWRVSANLMVADHNVPTTDRSEGIADPTSRLQVETLDHNAHEYGLTYFSMRDKRQGIVHVIGPEQGATLPGMTVVCGDSHTSTHGAFGALAHGIGTSEVEHVLATQTLLAQKSKAMLVQVDGALPVGVTAKDIVLAIIGKIGTAGGTGYAIEFAGSTIRSLSMEGRMTICNMAIEAGARAGMVAVDETTINYVKGRPLSPVGPHWDRAVEYWRTLHSDVGAKFDLVVTLNAAEVKPQVSWGTSPEMVVSVDGRVPDPDKEKDATKRDGMEKALVYMGLKPNTPITDIRIDKVFIGSCTNSRIQDLRAAAAVVRGKHRASNVKLAMVVPGSGLVKEQAEREGLDKIFKDAGFEWREPGCSMCLAMNADRLEPGERCASTSNRNFEGRQGAGGRTHLVSPAMAAAAGIEGHFVDVRAL

SEQ ID NO: 103005 - DNA, 1410 bp, Burkholderia vietnamiensis G4
  CDS (1)..(1410): transl_table=11
atggcacagactctctacgacaaactgtggaatacccacgtcgtccacaccgaagacgacggcacggcattgctctacatcgaccgtcaactgctgcacgaagtcacgagcccgcaggcgttcgaagggctgaacgtcgcgcaccgcccggtgtggcgcatcagcgcgaacctggccgtgtcggaccacaacgttccgaccaccgatcgcagccacggcatcgccgatccggtctcgaagctgcaggtcgacacgctcgacgcgaactgcgacgccttcggcatcacgcagttcaagatgaacgacctgcgtcagggcatcgtgcacatcatcgggccggagcagggcgcgacgctgccgggcatgacgatcgtctgcggcgattcgcacacgtcgacgcacggcgcgttcggcgcgctcgcgcacggcatcggcacgtcggaagtcgaacacgtactcgcgacgcagacgctgctgcagaaaaagagcaagaacatgctcgtgaaggtcgaaggcacgctgccgcgcggttgtaccgcgaaggacatcgtgctcgcgatcatcggcaagatcggcaccgcgggcggcaccggctacgcgatcgaattcggcggctcgacgatccgcgcgctgacgatggaaggccggatgaccgtgtgcaacatggcgatcgaagccggcgcccgcgccggcatggttgccgtcgacgacacgacgatcgactacctgaaaggccgtccgttcgtgccgaccggcgcggaatgggatcaggcggtcgaatactggcgcgaattcaagtccgacgaaggcgcgcagttcgaccgcgtggtcgagctgaacgcagccgagatcgtcccgcaggtcacgtggggcacgtcgccggaaatggtcacgtcgatcgacgcgcgcgtacccgatcccgagcgcgagaaggatccggtcaagcgcgaagcgatggagcgcgcgctcgcctacatggcgctcgagccgaacacgccgatggagtcgatcaacgtcgacaagatcttcatcggttcatgcacgaacgcgcgcatcgaggacatccgcgcggccgcgtacgtcgtgaagaagctgaaccgccgcatcgcaccgaacgtgcgcctcgcgatggtcgtgccgggctcgggcctcgtgaaggcgcaggccgagcgcgaagggctcgacaaggtgttcaccgacgcgggcttcgaatggcgcgagcccggctgctcgatgtgcctcgcgatgaacgccgaccggctcgagccgggcgagcgctgcgcgtcgacgtcgaaccgcaacttcgaaggccggcagggcgcgggcggccgcacgcacctcgtgagccccgcgatggcggcggcggcggcgatcgaaggccatttcgtcgacattcgcaagctggggtaa

SEQ ID NO: 103006 - protein, 469 aa, Burkholderia vietnamiensis G4
MAQTLYDKLWNTHVVHTEDDGTALLYIDRQLLHEVTSPQAFEGLNVAHRPVWRISANLAVSDHNVPTTDRSHGIADPVSKLQVDTLDANCDAFGITQFKMNDLRQGIVHIIGPEQGATLPGMTIVCGDSHTSTHGAFGALAHGIGTSEVEHVLATQTLLQKKSKNMLVKVEGTLPRGCTAKDIVLAIIGKIGTAGGTGYAIEFGGSTIRALTMEGRMTVCNMAIEAGARAGMVAVDDTTIDYLKGRPFVPTGAEWDQAVEYWREFKSDEGAQFDRVVELNAAEIVPQVTWGTSPEMVTSIDARVPDPEREKDPVKREAMERALAYMALEPNTPMESINVDKIFIGSCTNARIEDIRAAAYVVKKLNRRIAPNVRLAMVVPGSGLVKAQAEREGLDKVFTDAGFEWREPGCSMCLAMNADRLEPGERCASTSNRNFEGRQGAGGRTHLVSPAMAAAAAIEGHFVDIRKLG

SEQ ID NO: 103007 - DNA, 1407 bp, Bradyrhizobium sp. ORS278
  CDS (1)..(1407): transl_table=11
atgtcgaagccgactaccctgtacgacaagatctggaacgaccatctggtacacgaagccgaggacggcacctgcctgctctacatcgaccgccatctggtccacgaggtcacctcgccccaggcgttcgagggcctgcgcatgaccggccgcaaagtgcatgcgccggagaagactctggccgtcgtcgatcacaacgtgccgaccaccgaccgctccaagccgaacccggatccggagagcatcgagcagatcaagacgctggccgagaacgccaaggacttcggcatcgagtactacaacgagttcgaccgccgccagggcatcgtccacgtcatcggcccggagcagggttttacgctgcccggcaccacgatcgtctgcggtgacagccacacctcgacgcatggcgcgttcggcgcgctggcgcacggcatcggcacctccgaggtcgagcatgtgctggcgacgcagacgctgatccagaagaaggcgaagaacatgcgcgtcaccgtcgacggcaagctgccggacggcgtgacgggcaaggacatcatcctcgccatcatcggcgagatcggcaccgcgggcggcaccggctacgtgctggaatatgccggcgaagcgatccgcgcgctgtcgatggaaggccgcatgaccgtctgcaacatgtcgatcgagggcggcgcacgcgccggcctggtcgcgccggacgagaaggcctacgacttcctacgcggccgccccaaggcgccgcagggcgcggcctgggatgcggcgatgcgctactgggagaccttgcgttccgatgagggcgcgcatttcgaccacgagctgcggctcgatgccgccaagctgccgccgatcgtgacctggggcacctcgcccgaggacgtgatctcggtgaccggcatggtgccggatcccgacaagatcgcggatgaggccaagcgcatctccaagcatcgcgcgctgaaatacatgggcctgaccgcgggcacgaagatcaccgacatcaagctcgaccgcgtcttcatcggctcctgcaccaatggccgcatcgaggacctgcgcgccgccgccaagatcgccgagggcaagaccgtctctagccacgtcaacgcgatggtcgtgccgggctcgggcatcgtcaaggagcaggccgaggccgagggtctggacaagatcttcatcaaggccggcttcgaatggcgcgagccgggctgctccatgtgtctcgcgatgaacccggataagctggcgccggaagagcgctgcgcctcgacctcgaaccgcaacttcgagggccgtcagggcttcaagggccgtacccatctggtgtcgcccgcgatggccgcggccgccgcgatcgccggtcacttcgtcgacgtgcgcgactggcgctga

SEQ ID NO: 103008 - protein, 468 aa, Bradyrhizobium sp. ORS278
MSKPTTLYDKIWNDHLVHEAEDGTCLLYIDRHLVHEVTSPQAFEGLRMTGRKVHAPEKTLAVVDHNVPTTDRSKPNPDPESIEQIKTLAENAKDFGIEYYNEFDRRQGIVHVIGPEQGFTLPGTTIVCGDSHTSTHGAFGALAHGIGTSEVEHVLATQTLIQKKAKNMRVTVDGKLPDGVTGKDIILAIIGEIGTAGGTGYVLEYAGEAIRALSMEGRMTVCNMSIEGGARAGLVAPDEKAYDFLRGRPKAPQGAAWDAAMRYWETLRSDEGAHFDHELRLDAAKLPPIVTWGTSPEDVISVTGMVPDPDKIADEAKRISKHRALKYMGLTAGTKITDIKLDRVFIGSCTNGRIEDLRAAAKIAEGKTVSSHVNAMVVPGSGIVKEQAEAEGLDKIFIKAGFEWREPGCSMCLAMNPDKLAPEERCASTSNRNFEGRQGFKGRTHLVSPAMAAAAAIAGHFVDVRDWR

SEQ ID NO: 103009 - DNA, 1260 bp, Desulfovibrio vulgaris subsp. vulgaris str. Hildenborough
  CDS (1)..(1260): transl_table=11
atggctcacacgcttgcacagaagatactgcaaaggcacaccgacgaagccatcaccgatgccgggcagatcgtacgctgccgcgtctcgatggtgctggccaacgacatcacggccccgctggccatcaaatccttccgggccatgggtgcgaagcgcgtcttcgacaaggaccgcgtggcactggtcatggaccacttcaccccgcagaaggacatcgaggcggcacagcaggtgaagctcacccgcgaattcgcccgcgagatgggcgtgacccactactacgaaggcggcgactgcggcgtggaacacgcgctcttgcctgaactcggtctcgtggggccgggcgacgtggtggtgggggccgacagccacacctgcacctacggcggcctcggggcgttcgccacgggtctcggttccaccgacgtggcaggtgccatggccctcggcgagacgtggttcaaggtgccgcccaccatccgtgccaccttcacgggcacgctgcccgcctatgtgggagccaaggacctcatcctcacgctcatcggtgccatcggcgtcgacggtgcgctgtaccgcgcactggagttcgacggtgcggccatcgaagccctcgacgtggaaggtcgcatgaccatggcgaacatggccatcgaagctggcggcaaggccggactcttcgccgccgacgccaagacgctcacgtactgcaccaccgccggacgcacgggtgatacggcgttcagcgccgacgccggggcggtgtacgagcgcgaactctccttcgacgtgacgggcatgaccccggtggtcgcctgcccgcacctgcccgacaacgtgaagcccgtctccgaggtgaaggacgtgaccgtgcagcaggtggtcatcgggtcgtgcaccaacgggcgcatcggcgacctgcgcgaagcggctgccgtcctgcgcgggcgcaaggtgtcgcgtgacgtgcgctgcatcgtcctgcccgccacccccggcatctggcgtcaggcactgcgcgagggactcatcgagaccttcatggaagcgggctgcatcgtcggccccgccacctgcggcccctgccttggcggacacatgggcatcctcgccgacggcgagcgcgccatcgccaccaccaaccgcaacttcaaggggcgcatgggcagtctcgagtcggaggtctacctctccgggcctgccacggctgccgcctccgccgtcaccggcgtcatcaccgacccctcaaccctctag

SEQ ID NO: 103010 - protein, 419 aa, Desulfovibrio vulgaris subsp. vulgaris str. Hildenborough
MAHTLAQKILQRHTDEAITDAGQIVRCRVSMVLANDITAPLAIKSFRAMGAKRVFDKDRVALVMDHFTPQKDIEAAQQVKLTREFAREMGVTHYYEGGDCGVEHALLPELGLVGPGDVVVGADSHTCTYGGLGAFATGLGSTDVAGAMALGETWFKVPPTIRATFTGTLPAYVGAKDLILTLIGAIGVDGALYRALEFDGAAIEALDVEGRMTMANMAIEAGGKAGLFAADAKTLTYCTTAGRTGDTAFSADAGAVYERELSFDVTGMTPVVACPHLPDNVKPVSEVKDVTVQQVVIGSCTNGRIGDLREAAAVLRGRKVSRDVRCIVLPATPGIWRQALREGLIETFMEAGCIVGPATCGPCLGGHMGILADGERAIATTNRNFKGRMGSLESEVYLSGPATAAASAVTGVITDPSTL

SEQ ID NO: 103011 - DNA, 1284 bp, Desulfotalea psychrophila LSv54
  CDS (1)..(1284): transl_table=11
atgggaaaaactatagctgaaaaaatttttgatgcccatctgcgtgataaaccatcaccagataacatggttcttaatctggatgccgtactttgtcacgagattaccacccctattgccatcatggatcttgtagaaaaggggatggatcaggtcttcgataatactaaaatcaaggccgtcatcgatcatgtcacccctgctaaagactctaagactgccctgcagggaaaaatcatgcgtgactgggcaaaacgtcatgctattaaagatttttttgatattggcgccaatggtgtttgccatgccctctttcctgaaaagggttttatccgtcccggttacactgttatcatgggtgattctcacacctgtactcacggagcctttggcgcctttgccgcaggtgttggcacaacggatcttgaggtgggtatctataagggtgtctgctcattcagaaccccaaaatctttgaagatagagctgagcggtgagctgcaacatggcgttactgccaaagatgttatccttgctgtaattaaaagactcaccgtaaatggtggtaccgataagattatagaatttgtcggcccggtaatcgatgctttcaatatggcagagcgtatgaccctctgtaatatggccattgaggcgggtgcaacctgtggtatttgcctgcctgatctggtaacagctgaatatctttgggagttcataaaggatgactacagtgatattgctgcggccgttgcagatttcagtaagtggcactccgatagtgatgccctctatgtggaagagatcaaaatagatgtctctcccctcacccctcaggttacctttgatttcaaacctgatcaggtgaaagatatcactgatatggccggtaccaaggttgatcaaatttatatcggctcctgtaccaatggccgtatagaagatctgcgcgcggctgcctctatccttaagggcagaaccctggccaccggggtacgtggtattgtgactccggctaccccaaagatttacagcatggcccttgaagagggtatcatcaagatctttatggatgccggcttctgtgtactcaaccccacctgtggggcatgtcttggtatgagctcaggagtgctggccgaaggtgaggtctgtgcttccaccaccaatcgtaactttaacggtcggatgggtaaggggggaatggtacatttgatgagtccatactccgcaaccgtaggggctgtaaccggtacaataaccgatccgcgtcagtttctgtag

SEQ ID NO: 103012 - protein, 427 aa, Desulfotalea psychrophila LSv54
MGKTIAEKIFDAHLRDKPSPDNMVLNLDAVLCHEITTPIAIMDLVEKGMDQVFDNTKIKAVIDHVTPAKDSKTALQGKIMRDWAKRHAIKDFFDIGANGVCHALFPEKGFIRPGYTVIMGDSHTCTHGAFGAFAAGVGTTDLEVGIYKGVCSFRTPKSLKIELSGELQHGVTAKDVILAVIKRLTVNGGTDKIIEFVGPVIDAFNMAERMTLCNMAIEAGATCGICLPDLVTAEYLWEFIKDDYSDIAAAVADFSKWHSDSDALYVEEIKIDVSPLTPQVTFDFKPDQVKDITDMAGTKVDQIYIGSCTNGRIEDLRAAASILKGRTLATGVRGIVTPATPKIYSMALEEGIIKIFMDAGFCVLNPTCGACLGMSSGVLAEGEVCASTTNRNFNGRMGKGGMVHLMSPYSATVGAVTGTITDPRQFL

SEQ ID NO: 103013 - DNA, 1251 bp, Dehalococcoides ethenogenes 195
  CDS (1)..(1251): transl_table=11
atgaacttagttgaaaaaatactggccgcccacagcggcaaaactcaggtcagcccgggtgattttataaacgccaaggtagacctggtgctggctaatgacattaccgcacctatagccgtaaaagagtttaagaagattggggtcagcaaagtatttgaccccaaaaagatagtttttgtgcctgaccattttgtacccaacaaggacattgcatctgccgaacaggtaaaaatggtgcgtgagtttgcccgtgagcagggtatactcttttttgaatgcggtaaaatgggtgttgagcatgtaatcctgcacgagcagggtctggtactgccgggggatattgtggtaggcgctgactcccatacctgcacttacggggcactgggcgcttttactaccggcatgggctcaaccgatatagccgccgccatggccaccggtgaggtttggatgaaagtcccccccaccatcaaatttaactattcgggtaagctgcccaaatggattggcggtaaagaccttattttgtttaccataggtcagataggggtagacggggctttgtactctgccatgtatttctgcggagaggctattgatgccctttccatggaaaaccgctttaccatgtccaatatggccatagaggccggcggcaaggcaggtcttttcagggttgacgaaaagactctggaatatgtgacccccagagccaaacgccagtatacggtttatgataatgatgctgatgcgtcttatgccaaaacatataactttgatatttccaagcttgagccgcaggtatcactgccgcattcaccggcaaatgcccgccccatcagccagattggtaaaataaaggttgaccaggttatcatcggctcatgcaccaacggcaggctggaagacctggccatatctgccaaactgcttgaagggaataaagtcagccctgatttgaggactattgttatacccggttcgcagcaggtctatctggatgccctgaaagccggctatattgaaacctttatcaatgccggggttgcggtttccactcccacctgcggtccttgcctcggcgggcatatgggtattttggccgccggtgaacgctgtctggcaactaccaaccgcaatttcgtagggcgtatgggcagccccaagagcgaagtatacctggccgggccggccgttgccgccgctaccgccatcaagggatatattgcccatcccgatgaaatttaa

SEQ ID NO: 103014 - protein, 416 aa, Dehalococcoides ethenogenes 195
MNLVEKILAAHSGKTQVSPGDFINAKVDLVLANDITAPIAVKEFKKIGVSKVFDPKKIVFVPDHFVPNKDIASAEQVKMVREFAREQGILFFECGKMGVEHVILHEQGLVLPGDIVVGADSHTCTYGALGAFTTGMGSTDIAAAMATGEVWMKVPPTIKFNYSGKLPKWIGGKDLILFTIGQIGVDGALYSAMYFCGEAIDALSMENRFTMSNMAIEAGGKAGLFRVDEKTLEYVTPRAKRQYTVYDNDADASYAKTYNFDISKLEPQVSLPHSPANARPISQIGKIKVDQVIIGSCTNGRLEDLAISAKLLEGNKVSPDLRTIVIPGSQQVYLDALKAGYIETFINAGVAVSTPTCGPCLGGHMGILAAGERCLATTNRNFVGRMGSPKSEVYLAGPAVAAATAIKGYIAHPDEI

SEQ ID NO: 103015 - DNA, 1251 bp, Dehalococcoides sp. CBDB1
  CDS (1)..(1251): transl_table=11
atgaacttagttgaaaaaatactggccgcccactgcggcaaaacccaggtcagcccgggtgactttataaatgccaaagtagacctggtactggctaatgacattaccgcacctatagccattaaagaatttaaaaaggttggaatcagcaaggtatttgactccaaaaagatagtctttgtgcctgaccattttgtacccaacaaggatattgcatccgccgaacaggttaaaatggtgcgtgagtttgcccgtgaacaagggatactcttttttgaatgcgggaaaatgggcgttgaacatgtaatcctgcatgagcagggtttggtattgccgggtgatattgtggtaggtgccgactcccatacctgcacttacggtgcactgggcgctttcactaccggcatgggctcaaccgatatagccgccgctatggctaccggtgaagtctggatgaaagttccccaaactattaaatttaactattcgggcaaactgccgaaatggattggcggcaaagaccttatcctgtacaccatagggcagacgggtgtggacggggctttgtactctgccatgtttttctgtggtgaggctattgaagcgctctctatggaaaaccgctttaccatgtccaatatggctattgaagcaggcggcaaggccgggctgttccgggttgatgaaaaaactctggaatatgtaacccccagagccaaacgccagtacacagtttatgacaatgatgctgatgcgtcatatgctaaaacatacaattttgatatttccaagattgagccacaggtatcactgccgcattcaccggcaaatgcccgccctgtcagccagattggtaaaattaaggttgaccaggttatcatcggttcctgtaccaacgggagactggaagacctggccgtgtctgccaaactgctaaaaggaaatgtggttcaccctgacctgcggactattgttattcccggctcacagcaggtatatctggatgccctgaaggcaggctatattgaaacctttatcaatgccggagttgcggtttccacacccacctgcggcccttgtctgggtggacatatgggtattttggcggccggtgaacgatgcttagcaaccaccaaccgcaattttgtagggcgcatgggcagtcccaagagcgaagtatatctggcaggtccggcggttgccgctgccaccgccattaaaggatacattgcccaccctgatgaaatttag

SEQ ID NO: 103016 - protein, 416 aa, Dehalococcoides sp. CBDB1
MNLVEKILAAHCGKTQVSPGDFINAKVDLVLANDITAPIAIKEFKKVGISKVFDSKKIVFVPDHFVPNKDIASAEQVKMVREFAREQGILFFECGKMGVEHVILHEQGLVLPGDIVVGADSHTCTYGALGAFTTGMGSTDIAAAMATGEVWMKVPQTIKFNYSGKLPKWIGGKDLILYTIGQTGVDGALYSAMFFCGEAIEALSMENRFTMSNMAIEAGGKAGLFRVDEKTLEYVTPRAKRQYTVYDNDADASYAKTYNFDISKIEPQVSLPHSPANARPVSQIGKIKVDQVIIGSCTNGRLEDLAVSAKLLKGNVVHPDLRTIVIPGSQQVYLDALKAGYIETFINAGVAVSTPTCGPCLGGHMGILAAGERCLATTNRNFVGRMGSPKSEVYLAGPAVAAATAIKGYIAHPDEI

SEQ ID NO: 103017 - DNA, 1404 bp, Anabaena variabilis ATCC 29413
  CDS (1)..(1404): transl_table=11
atgagcaaaggcaccctgtttgataaagtttgggacttacacactgttggtacacttccttcagggctaacacagctatttattggcctgcacctagtccatgaagttactagtccacaagcctttgctatgttacgggaacgaggtttaaaggtactatttcctgagcggactgtggctactgtggatcacatcgtgcctacagagaatcaggcgcgtccttttgtcgatcgcttggctgaggaaatgatccaagccctagagcagaattgtcaagaaaataacattactttttataacattggttccggcaatcaaggtatagttcatgtgattgcgccagaactgggactgacacagccgggaatgacgatcgcctgtggtgatagccacacttcaagtcatggggcgtttggggcgatcgcttttggtattggtactagccaagtgcgggacgttctcgcctcccaaaccttatccctatccaaactcaaagtccgtaaaattgaagttaacggcacactcaaccctggggtttatgccaaagatgtcatcctgcatatcatccgtaccctgggagtgaaaggtggtgtaggttacgcctacgaatacgcgggtacgacttttgagcaaatgaatatggaagaacggatgactgtctgcaacatggccattgagggtggcgctagatgcggttatgtcaatcctgatcaagttacctatgattatctccaaggtagagactttgccccccaaggcgctgattgggaaaaagccgtggcttggtgggaatcaatcaagagtgatgctgatgctgaatacgatgatgtaatagtattcaacgctgcggatattccccccactgttacctggggaattacccccggtcaaggtattggtgtgaatcagttgattccccagccagaagaactcctagaagaagaccgctttgtagctgaagaagcttaccgttacatggatttatatcctggtcaaccgattaagggaacgaaaattgacgtttgctttatcggtagctgcactaacggtagacttagtgacctgcaagaagccgcgaaaattgccaaaggtcgccacgtagcggaaggagtcaaggcttttgtggttcccggttccgaacgagtgaaaaaagctgccgaagctgaaggtttagataaaatctttgaagcagcaggctttgaatggcgcgaacctggatgttctatgtgtctagccatgaaccccgacaagctggaaggtagacaaattagtgcttcctcctccaaccgcaactttaaaggacgacaaggatcagcttccggtcgcactttgttaatgagtccggcgatggtcgctactgcggcgattcagggtgaagttgcggatgtgcgggagttgttgtag

SEQ ID NO: 103018 - protein, 467 aa, Anabaena variabilis ATCC 29413
MSKGTLFDKVWDLHTVGTLPSGLTQLFIGLHLVHEVTSPQAFAMLRERGLKVLFPERTVATVDHIVPTENQARPFVDRLAEEMIQALEQNCQENNITFYNIGSGNQGIVHVIAPELGLTQPGMTIACGDSHTSSHGAFGAIAFGIGTSQVRDVLASQTLSLSKLKVRKIEVNGTLNPGVYAKDVILHIIRTLGVKGGVGYAYEYAGTTFEQMNMEERMTVCNMAIEGGARCGYVNPDQVTYDYLQGRDFAPQGADWEKAVAWWESIKSDADAEYDDVIVFNAADIPPTVTWGITPGQGIGVNQLIPQPEELLEEDRFVAEEAYRYMDLYPGQPIKGTKIDVCFIGSCTNGRLSDLQEAAKIAKGRHVAEGVKAFVVPGSERVKKAAEAEGLDKIFEAAGFEWREPGCSMCLAMNPDKLEGRQISASSSNRNFKGRQGSASGRTLLMSPAMVATAAIQGEVADVRELL

SEQ ID NO: 103019 - DNA, 1419 bp, Pseudomonas fluorescens PfO-1
  CDS (1)..(1419): transl_table=11
atggccggcaaaacgctctacgacaagctctgggattcgcatttggtcaagcagcgcgacgatggctcggcgctgatctatatcgatcgtcatatcattcacgaagtgacctcgccgcaagcctttgaaggcctgcgtctggccggacgcaagccgtggcgcatcgatgccaacatcgccaccccggaccacaacgtaccgaccactccggagcgcaagggcggcatcgaagccattgccgaccaggtctcgcgtttgcaggttcagaccctcgatgacaactgcgatgaatacggcatcgtcgagttcaagatgaacgacgtgcgccaaggcatcgttcacgtgatcagcccggagcagggcgcgaccttgccgggcatgaccgtggtctgcggcgactcgcacacctcgacccacggcgcgttcggcgccttggcccacgggatcggcacttccgaggtcgagcacgtgctcgccacccagtgcctggtcgccaagaaaatgaagaacatgctggtgcgcgtcgaaggtcagttgccgttcggcgtgaccgccaaggacatcgtcctcgcggtgatcggcaagatcggcaccgctggcggtaacggccatgcgatcgagttcgccggcagcgcgatccgcgatctgtccatcgaaggccgcatgaccatctgcaacatgtccatcgaagccggcgcccgcgtgggtctggtggcggcggaccagaagactgtggattacgtcaagggtcgtcctttcgcaccgaaaggtgccgagtgggatctggcggtcgagtcctggaaagacctggtgtccgacgccgatgcgcatttcgacaccgtggtcgagctcgacgccacgcagatcaagccgcaggtcagctggggcacttcgccggaaatggtcttggccgttgatcagaacgtgccggacccggctaaagagatggatctggtcaaacgcgactcgatcgtccgcgccttgaaatacatgggtttgaccgccaatcaggcgatcactgacattcagctcgaccgcgtgttcatcggctcctgcaccaactcgcgcatcgaagacttgcgcgctgcggcggtgatcgccaagggtcgcaaggttgcgtcgaccatcaagcaggccatcgtcgtgccgggctcgggtctggtgaaggcgcaggccgaggccgaaggtctggacaagattttcctcgaagccggtttcgaatggcgcgagccgggttgctcgatgtgcctggcgatgaacccggaccgtctggagtccggcgagcattgcgcctcgacctccaaccgtaacttcgaaggccgtcagggcgccggtggccgtacccacctcgtcagcccggccatggccgctgcggcggcggtgaacggtcgtttcatcgacgttcgtgaattgatctaa

SEQ ID NO: 103020 - protein, 472 aa, Pseudomonas fluorescens PfO-1
MAGKTLYDKLWDSHLVKQRDDGSALIYIDRHIIHEVTSPQAFEGLRLAGRKPWRIDANIATPDHNVPTTPERKGGIEAIADQVSRLQVQTLDDNCDEYGIVEFKMNDVRQGIVHVISPEQGATLPGMTVVCGDSHTSTHGAFGALAHGIGTSEVEHVLATQCLVAKKMKNMLVRVEGQLPFGVTAKDIVLAVIGKIGTAGGNGHAIEFAGSAIRDLSIEGRMTICNMSIEAGARVGLVAADQKTVDYVKGRPFAPKGAEWDLAVESWKDLVSDADAHFDTVVELDATQIKPQVSWGTSPEMVLAVDQNVPDPAKEMDLVKRDSIVRALKYMGLTANQAITDIQLDRVFIGSCTNSRIEDLRAAAVIAKGRKVASTIKQAIVVPGSGLVKAQAEAEGLDKIFLEAGFEWREPGCSMCLAMNPDRLESGEHCASTSNRNFEGRQGAGGRTHLVSPAMAAAAAVNGRFIDVRELI

SEQ ID NO: 103021 - DNA, 1428 bp, Rhodobacter sphaeroides 2.4.1
  CDS (1)..(1428): transl_table=11
atgaccgctccgagaacgctctatgacaagatctgggacgaccatgtcgtccaccagtccgaagacggcacctgcctgctctacatcgaccgccatctcgtccacgaggtgacgagcccgcaggccttcgaaggcctgcgcatgacgggccgcaaggtgcgcgcccccgagaagaccatcgccgtgccggaccacaacgtccccacgacggaaggccgcgacacgaagatcgacaacgaggagtcgcgcatccaggtcgaggcgctcgacaagaatgcccgcgacttcgggatcaactactatcccgtgtcggacatccggcaggggatcgtccatatcgtcgggcccgagcagggctggacgctgccgggcatgacggtggtctgcggcgacagccacacggccacccacggcgccttcggcgcgctggcccacggcatcggcacctccgaggtcgagcatgtgctggccacgcagacgctgatccagaagaaatcgaagaacatgaaggtggagatcaccgggagcctgcgccccggtgtcaccgccaaggacatcacgctgtcggtcatcggcctcaccggcaccgcgggcggcaccggctatgtcatcgaatattgcgggcaggcgatccgcgaactgtcgatggaaggccggatgaccgtctgcaacatggcgatcgagggcggcgcgcgcgcgggcctgatcgcgccggacgagaagaccttcgcctatgtgatgggccgtccacatgcgccgaagggcgcagcctgggaggcggcgctcgcctactggaagacgctcttcaccgatgagggcgcgcagttcgacaaggtcgtgacgatccgcggcgaggacatcgccccggtcgtgacctggggcacctcgcccgaggatgtgctgccgatcaccgcgaccgtccccgccccggaggatttcaccggcggcaaggtcgaggccgcacgccgcagcctcgaatacatgggcctgaccccgggccagaagctgaccgacatcaagatcgacacggtcttcatcggctcctgcaccaatggccggatcgaggatctgcgggccgcggccgagatcctgaagggcaagaaggtggcgccgggaatgcgggccatggtcgtgccgggctcgggcctcgtgcgcgcgcaggccgaggaagaggggctggcgcagatcttcatcgacgcgggcttcgaatggcgcctcgcgggctgctcgatgtgcctcgcgatgaaccccgaccagctctccccgggggaacgctgcgcctcgacctcgaaccggaacttcgagggccgtcagggccgcaacggccgcacccatctcgtcagccccggaatggccgccgctgcggcgatcaccggtcacctgaccgacgtgcgcgacctgatgatggcgccggccgagccggcgtga

SEQ ID NO: 103022 - protein, 475 aa, Rhodobacter sphaeroides 2.4.1
MTAPRTLYDKIWDDHVVHQSEDGTCLLYIDRHLVHEVTSPQAFEGLRMTGRKVRAPEKTIAVPDHNVPTTEGRDTKIDNEESRIQVEALDKNARDFGINYYPVSDIRQGIVHIVGPEQGWTLPGMTVVCGDSHTATHGAFGALAHGIGTSEVEHVLATQTLIQKKSKNMKVEITGSLRPGVTAKDITLSVIGLTGTAGGTGYVIEYCGQAIRELSMEGRMTVCNMAIEGGARAGLIAPDEKTFAYVMGRPHAPKGAAWEAALAYWKTLFTDEGAQFDKVVTIRGEDIAPVVTWGTSPEDVLPITATVPAPEDFTGGKVEAARRSLEYMGLTPGQKLTDIKIDTVFIGSCTNGRIEDLRAAAEILKGKKVAPGMRAMVVPGSGLVRAQAEEEGLAQIFIDAGFEWRLAGCSMCLAMNPDQLSPGERCASTSNRNFEGRQGRNGRTHLVSPGMAAAAAITGHLTDVRDLMMAPAEPA

SEQ ID NO: 103023 - DNA, 1266 bp, Carboxydothermus hydrogenoformans Z-2901
  CDS (1)..(1266): transl_table=11
atggggatgacgatgaccgagaaaattcttgcctatcatgccggaaaagagcttgttgaaccgggagaattaatttcctgcaaggtagatgcggttttagccaacgacataaccggaccggtagcgataagcgagtttaaaaaaattggagtggactcggtttttgaccgggacagggtttatttggtgcccgaccattttacccccaataaagacattaaaagtgccgaacaggccaaaattttgcgggattttgctaaagagcaaaacctaacctattattttgaagtgggtaaaatgggaattgagcatgtgcttctgccggaagaagggttggtattgccgggagaggtgattatcggtgccgattcccatacctgtacttacggggggctgggggcttttgctaccggggtaggttcaactgaccttgcggcggcgatggccctcggggaaacctggtttaaagttccggaaagcattaagttttacctttacggggaaaagcttttaccttacgtttccgccaaagatatcattctgtttataatcgggcagattggtgttgacggggcgttatataaagcgatggagttcgccggttcggctttaaagcttatttcggttgaaggacggttaaccatggccaatatggctatagaagcgggagcaaaaaacggcatctttccggtggatgagcttaccctggaatatgtaaaaggccgggcaaaacgggagtttaaggtttttgccagcgatcccgatgccagatacgaagcggtttacgaaattaacgtggaagaaatcgaaccgcaggtagctcttccccatcttccggaaaatgccgtgccggtaaaggaggtatccggcaaggacattgatcaggtggtaattggttcgtgcaccaacggccgaattgaggatttacgggtggcggcggcgatcttaaaaggtaaaaaagtaaaggattatgtgcggtgcattattattcccggatcccagtcggtttaccggcaggcccttaaggaaggacttatagatattttccttgaagcgggggcggcggtttccactcctacctgtggcccctgcctgggcggccacatggggattttagccaagggagagagagcggttgctactaccaaccgcaattttgtgggcaggatggggcatgtagaatcggaagtttacctggcgggaccggcggtagcagcagcttcagccattgccggaaaaatcgttcatcccgaggaggtgcggtaa

SEQ ID NO: 103024 - protein, 421 aa, Carboxydothermus hydrogenoformans Z-2901
MGMTMTEKILAYHAGKELVEPGELISCKVDAVLANDITGPVAISEFKKIGVDSVFDRDRVYLVPDHFTPNKDIKSAEQAKILRDFAKEQNLTYYFEVGKMGIEHVLLPEEGLVLPGEVIIGADSHTCTYGGLGAFATGVGSTDLAAAMALGETWFKVPESIKFYLYGEKLLPYVSAKDIILFIIGQIGVDGALYKAMEFAGSALKLISVEGRLTMANMAIEAGAKNGIFPVDELTLEYVKGRAKREFKVFASDPDARYEAVYEINVEEIEPQVALPHLPENAVPVKEVSGKDIDQVVIGSCTNGRIEDLRVAAAILKGKKVKDYVRCIIIPGSQSVYRQALKEGLIDIFLEAGAAVSTPTCGPCLGGHMGILAKGERAVATTNRNFVGRMGHVESEVYLAGPAVAAASAIAGKIVHPEEVR

SEQ ID NO: 103025 - DNA, 1410 bp, Burkholderia sp. 383
  CDS (1)..(1410): transl_table=11
atggcacagactctctacgacaaactgtggaacacccacgtggtccacaccgaggaagacggcacgaccctgctctacatcgaccgtcagctgctgcatgaagtcacgagcccgcaggcattcgaagggctgaagatcgcgcagcgtccggtgtggcgcatcagcgcgaacctggccgtgtcggaccacaacgtgccgaccaccgatcgcagccacggcatcgccgatcccgtctcgaagcttcaggtcgacacgctcgacgcgaactgcgatgcgttcggcatcacgcagttcaagatgaacgacgtgcgccagggcatcgtccacatcatcgggccggagcagggcgcgacgctgccgggcatgacgattgtgtgcggcgattcgcatacgtcgacgcacggcgcattcggcgcgctcgcacacggcatcggcacgtcggaagtcgagcacgtgctcgcgacgcaaaccctgctgcagaagaagagcaagaacatgctcgtgaaggtcgaaggcacgctgccgcgcggttgtaccgcgaaggacatcgtgctcgcgatcatcggcaagatcggcacggccggcggcacgggctacgcgatcgaattcggcggctcgacgattcgcgcgctgacgatggaaggccgcatgaccgtctgcaacatggcgatcgaagccggtgcgcgcgccggcatggttgccgtcgacgacacgacgatcgattacctgaaaggccgcccgttcgtgccgaccggtgcggaatggaaccaggccgtcgaatactggcgccagttcaagtcggacgacggcgcgcagttcgatcgcgtggtcgagctgaacgcagccgaaatcgtcccgcaggtcacgtggggcacgtcgccggaaatggtcacgtcgatcgacggtcgcgtgcccgatcccgagcgcgagaaggatccggtcaagcgcgatgcgatggagcgtgcgctggcctacatggcgctcgagccgaacacgccgatcgaatcgatcaaggtcgacaagatcttcatcggctcgtgcacgaacgcgcgaatcgaagacatccgcgcagccgcctatgtcgtgaagaaactgaaccgtcgcgtcgcgtcgaacgtgcggctcgcgatggtcgtgccgggctcgggcctcgtgaaggcacaggccgagcgcgaagggctcgacaaggtgttcacggacgcgggcttcgaatggcgcgagccgggctgctcgatgtgcctcgcgatgaacgccgaccggctcgatccgggcgaacgctgcgcgtcgacgtcgaaccgcaacttcgaaggccggcagggcgcgggcggtcgcacgcacctcgtgagccccgcgatggcggcagccgcggcgatcgaaggccacttcgtcgacattcgccagctggggtaa

SEQ ID NO: 103026 - protein, 469 aa, Burkholderia sp. 383
MAQTLYDKLWNTHVVHTEEDGTTLLYIDRQLLHEVTSPQAFEGLKIAQRPVWRISANLAVSDHNVPTTDRSHGIADPVSKLQVDTLDANCDAFGITQFKMNDVRQGIVHIIGPEQGATLPGMTIVCGDSHTSTHGAFGALAHGIGTSEVEHVLATQTLLQKKSKNMLVKVEGTLPRGCTAKDIVLAIIGKIGTAGGTGYAIEFGGSTIRALTMEGRMTVCNMAIEAGARAGMVAVDDTTIDYLKGRPFVPTGAEWNQAVEYWRQFKSDDGAQFDRVVELNAAEIVPQVTWGTSPEMVTSIDGRVPDPEREKDPVKRDAMERALAYMALEPNTPIESIKVDKIFIGSCTNARIEDIRAAAYVVKKLNRRVASNVRLAMVVPGSGLVKAQAEREGLDKVFTDAGFEWREPGCSMCLAMNADRLDPGERCASTSNRNFEGRQGAGGRTHLVSPAMAAAAAIEGHFVDIRQLG

SEQ ID NO: 103027 - DNA, 1419 bp, Synechococcus sp. CC9605
  CDS (1)..(1419): transl_table=11
ttgagttccggcaccctctacgacaaggtgtgggatctgcatcgggtggcggagctccccggcggttccacccaactgtttgttggtctgcatctgatccatgaggtcaccagtcctcaggccttctcggctttgaaggacaagggcctgttggtgcgttgtcctgagcgcacggtggcaacggtggaccacatcgtgccgacgacctctcagcagcggccgttcgccgacccgttggcggaggagatgctcagcaccttggagcggaactgccaggagtacggcatccctctgaacaacatcggcagtggccggcagggcatcgttcatgtgattgccccggagctgggcctgacccagccaggcatgacggtggcttgcggtgattcccacacctccacccatggcgccttcggggcgatcgcctttgggatcggcacgagtcaggtgcgcgatgtgttggccagtcagagcctggccatgaacaagctcaaggtgcgccggattcaggtgaatggcctgctgccagagggcgtgtcggcgaaggatctgatcctgcatgtgattcgccaccttggtgtgaagggtggcgttggctatgcctacgagttcgcaggctctgccatcgaggcgttgtcgatggaagagcggatgaccctctgcaacatggcaatcgagggaggagcccgatgcggttacgtcaatcccgatcaggtcacttttgagtatctgaaaggtcgcccccatgctcccgaaggtgacgcctggacccgcgctgtcgcctggtggagttccctggccactgatgccaacgcaacggtcgacgacgaggtggtgtttgacgccgctgcgattccacccacggtgacctggggcattacccctggccagggactgggcatcgatgaaaccgttcccagccttgatcaactggatccaggtgagcgtccgattgcggaggaggcttatcgctatatggatctccagccgggaacggccatcgccggggtgcctgtggatgtctgtttcatcggcagctgcaccaatggtcgtctcagcgatctgcgtgcggctgccgatgtggcccgtgggcgtcaggtggctgaaggcatcaaggcgtttgtggttcccggctcggagcaggtggcgaaggctgctgaagcggaagggctggatgctgtgttccgtgccgcaggctttgagtggcgtgagcccggctgctcgatgtgtctggctatgaatccggatcggctggaggggcgtcagatcagcgccagctccagcaaccgcaatttcaagggtcggcagggatcggccagtggtcggaccttgttgatgagtccagccatggtggccgccgctgccgttaacggtcgtgtgaccgatgttcgtactttgatttctccgtccgcatcgtga

SEQ ID NO: 103028 - protein, 472 aa, Synechococcus sp. CC9605
MSSGTLYDKVWDLHRVAELPGGSTQLFVGLHLIHEVTSPQAFSALKDKGLLVRCPERTVATVDHIVPTTSQQRPFADPLAEEMLSTLERNCQEYGIPLNNIGSGRQGIVHVIAPELGLTQPGMTVACGDSHTSTHGAFGAIAFGIGTSQVRDVLASQSLAMNKLKVRRIQVNGLLPEGVSAKDLILHVIRHLGVKGGVGYAYEFAGSAIEALSMEERMTLCNMAIEGGARCGYVNPDQVTFEYLKGRPHAPEGDAWTRAVAWWSSLATDANATVDDEVVFDAAAIPPTVTWGITPGQGLGIDETVPSLDQLDPGERPIAEEAYRYMDLQPGTAIAGVPVDVCFIGSCTNGRLSDLRAAADVARGRQVAEGIKAFVVPGSEQVAKAAEAEGLDAVFRAAGFEWREPGCSMCLAMNPDRLEGRQISASSSNRNFKGRQGSASGRTLLMSPAMVAAAAVNGRVTDVRTLISPSAS

SEQ ID NO: 103029 - DNA, 1284 bp, Geobacter metallireducens GS-15
  CDS (1)..(1284): transl_table=11
atggggaagactacagcggaaaaaatttttgcaagccacctggtcgatgagccgttttccggcaccaaggtgctccggctcgacgtggtgatgtgccacgaaattaccactcccatagccattgccgacctgatggcgcgaggtaaagaccgggtttttgaccccacgaagatcaaggcggtgattgatcacgtcacgccgagcaaggactcgaagaccgccacccaggcgaaaatgttgcgcgactgggcacggcgacacgccatcaaggacttcttcgatgtggggcataacggcgtgtgtcacgcactcttccccgagaaggggtacatccgccccggttacacagtcatcatgggcgattcccatacctgcacccatggcgccttcggtgcctttgccgccggtgtcggcactaccgacctggaggtcggtattctcaaaggggtctgcgctttccgtgagcccaagagcatccggatcaacctgaacggcacccttcccaagggcgtttatgcaaaggatgtcatcctctacgtcatcggccagctcggcgtcaacggcgctactgaccgggtcatggagttccggggaccggtggtggacgccatgaccatggagtcgcggatgacactttgcaacatggccatcgaggcgggaggcacctccggcatctgcatgcccgacatggtgacggtggaatacctctggcccttcattgagaacgagtacccgtccaaagaggctgccctcgccgagttcagcacatggcgctccgacgacgacgctgtctacgagcgggtgctcgactttgacgtttctgtcctcgagccgatcgtcaccttcggctacaagcccgatcaggtgaagccgatcagcgaaattgccggttctcctgttgatcaagtctatctgggctcctgcactaacggccgccttgaagatctgcggattgctgcccggattctcaaagggaaaaagattgccccgtcggtgcgagggattctctccccggccacgccgaagatttacaaggacgccatggccgaggggcttatcgacattttcatggaggcgggtttctgcgtcacgaatcccacctgcggtgcctgccttggcatgagcaacggcgtcttggctgaaggggaggtctgtgcatccaccacgaaccgcaacttcatggggcggatggggaagggggggatggtccacctcatgtccccggccacgagcgcagcaacggccatcgaaggggtgatcgccgatccccggaagtacctgtaa

SEQ ID NO: 103030 - protein, 427 aa, Geobacter metallireducens GS-15
MGKTTAEKIFASHLVDEPFSGTKVLRLDVVMCHEITTPIAIADLMARGKDRVFDPTKIKAVIDHVTPSKDSKTATQAKMLRDWARRHAIKDFFDVGHNGVCHALFPEKGYIRPGYTVIMGDSHTCTHGAFGAFAAGVGTTDLEVGILKGVCAFREPKSIRINLNGTLPKGVYAKDVILYVIGQLGVNGATDRVMEFRGPVVDAMTMESRMTLCNMAIEAGGTSGICMPDMVTVEYLWPFIENEYPSKEAALAEFSTWRSDDDAVYERVLDFDVSVLEPIVTFGYKPDQVKPISEIAGSPVDQVYLGSCTNGRLEDLRIAARILKGKKIAPSVRGILSPATPKIYKDAMAEGLIDIFMEAGFCVTNPTCGACLGMSNGVLAEGEVCASTTNRNFMGRMGKGGMVHLMSPATSAATAIEGVIADPRKYL

SEQ ID NO: 103031 - DNA, 1257 bp, Desulfovibrio desulfuricans G20
  CDS (1)..(1257): transl_table=11
atggctcatacgcttgcgcagaagatactgcagaagcacacagaccagcaggtgggcgaagcagggcagatagtgcgctgccgcgtttccatggcgctggccaacgacatcaccgctccgctggccatcaagtccttcagggcaatgggtgccggcaaggtgtttgacaaagacagagtggcccttgtcatggaccacttcaccccgcagaaagatatcgattcggccattcaggtaaaaaacacgcgcgaatttgccgcgcagatgggcataacccattattacgaaggcggcgaggccggtgtggaacatgccctgctgcccgaactcggccttgtgggtccgggcgatattgtggtgggcgcagacagccacacctgcacttacggcgggctgggcgcatttgccaccggtctcggctccaccgacgtggccggagccatggcgctgggcgaaacctggttcaaggtgccgccgagcatacgcgtttcctaccgcggcaccatgcctgcccacgtgggagcaaaagaccttgtgttgcagctcatcgggcatatcggcgttgacggagcgctgtacaaggcgctggaatttgacggccccgtggtggatgccatgagcgtggaaggccgtatgaccattgccaatatggccattgaagccggcggcaaatgcggtctgtttccctccgatgacctgacgctggcctacaccgccgccagaggccgcaacgacgaaaagctgagcgccgatcaggacgccgtatacgaacgcagtctgtcattcgacgtttcagaccttgcaccgcagatagcctgccctcacctgcccgaaaatgttcgcccggttaccgaagtgcagggcgtgcagatacatcaggctgtcatcggctcgtgcaccaacggccgcataagcgacctgcgcgaggcggcagccgtgctgcgcgggcgcaaggtgcacaaaagcgtacgctgcatcgtgctgcctgccaccccgggcatctggaagcaggccctgcgcgaagggcttatcgaaaccttcatggatgcaggctgcatagtgggccccgccacctgcggcccctgtctgggcgggcacatggggattcttgccgacggagaacgcgccatagccaccaccaaccgcaacttccgcggccgcatgggcagcctcgaatcagaggtgtatctttccaacccgtccgtggccgcggcttccgccgtggcaggcgaaatagccgacccgcgcggcctgtag

SEQ ID NO: 103032 - protein, 418 aa, Desulfovibrio desulfuricans G20
MAHTLAQKILQKHTDQQVGEAGQIVRCRVSMALANDITAPLAIKSFRAMGAGKVFDKDRVALVMDHFTPQKDIDSAIQVKNTREFAAQMGITHYYEGGEAGVEHALLPELGLVGPGDIVVGADSHTCTYGGLGAFATGLGSTDVAGAMALGETWFKVPPSIRVSYRGTMPAHVGAKDLVLQLIGHIGVDGALYKALEFDGPVVDAMSVEGRMTIANMAIEAGGKCGLFPSDDLTLAYTAARGRNDEKLSADQDAVYERSLSFDVSDLAPQIACPHLPENVRPVTEVQGVQIHQAVIGSCTNGRISDLREAAAVLRGRKVHKSVRCIVLPATPGIWKQALREGLIETFMDAGCIVGPATCGPCLGGHMGILADGERAIATTNRNFRGRMGSLESEVYLSNPSVAAASAVAGEIADPRGL

SEQ ID NO: 103033 - DNA, 1419 bp, Rhodospirillum rubrum ATCC 11170
  CDS (1)..(1419): transl_table=11
atgggtaagcccaaaaccctgttcaacaagatctggcaaagccatctcgtggacgtgcaggatgatgggacctgcctgatttacatcgatcgccatctggttcacgaagtgaccagcccccaggctttcgaaggcctgcggatgaccggacgcaaggtgcgccggcccgagcagaccctggcggtggccgatcataacgtgcccaccaccgatcgctccaagggcatcgccgacgaggaaagccgcatccaggtcgaggctttgggcagcaataccgccgaattcggcgtgccctatctggaaatggacgatatccgccagggcatcgttcatatcgtcggtcccgaacagggctttaccctgccgggggcgaccatcgtctgcggcgattcccatacctcgacccatggcgccttcggcgctttggccttcgggatcggcaccagcgaggtcgaacacgttctggccacccagacgctgctgcagaagccggccaaggacatgctggtgcgcatcgacggggccttgcgcccgggcgtgagcgccaaggacatcgtgctcgccgtgatcggccgcatcggcaccgccggcggcaccggccatgtgatcgaattcgccggcgaggcgatccgcggcctgtcgatggaaggccggatgacggtctgcaatatgaccatcgaaggcggcgcccgcgccgggttgatcgcccctgacgaggtgaccttcgagtatctgaaggggcggcccttcgcccccaagggcgcggcctgggaagcggcgatttcctattggaagacgctgaagaccgacgagggcgcggtctatgacacggttatcgagatggatgccggcgcgatcgagccgcaggtgacctgggggaccagcccggagaacgtggtggcgctgtcgggccgggtgcccgatcccgccgccgaggccgatcctggccgccgcgccgccattgagcgcgccctggcctatatggatctcaagcccggcatgccgatgaccgaggtcgccatcgacaaggtgttcatcggctcgtgcaccaatggccgcatcgaagacctgcgcgccgccgccgccatcgccaagggccgcaaggtggccgccaccgtcaacgccatcgtcgttccgggatcgggtctggtcaaggaacaggccgaatccgaaggtctggaccagatcttcctggaggccggctttgaatggcgcgagccgggctgctcgatgtgtctggcgatgaacgccgacaagttggcgccgggcgagcgctgtgcctcgacctcgaaccgcaatttcgaaggccgccagggcaagggggggcggacccatctggtcagtccggccgtcgctgtcgcctcggcgatcaccggcaagctgaccgacgcccaatccctggccccctcgctggggtga

SEQ ID NO: 103034 - protein, 472 aa, Rhodospirillum rubrum ATCC 11170
MGKPKTLFNKIWQSHLVDVQDDGTCLIYIDRHLVHEVTSPQAFEGLRMTGRKVRRPEQTLAVADHNVPTTDRSKGIADEESRIQVEALGSNTAEFGVPYLEMDDIRQGIVHIVGPEQGFTLPGATIVCGDSHTSTHGAFGALAFGIGTSEVEHVLATQTLLQKPAKDMLVRIDGALRPGVSAKDIVLAVIGRIGTAGGTGHVIEFAGEAIRGLSMEGRMTVCNMTIEGGARAGLIAPDEVTFEYLKGRPFAPKGAAWEAAISYWKTLKTDEGAVYDTVIEMDAGAIEPQVTWGTSPENVVALSGRVPDPAAEADPGRRAAIERALAYMDLKPGMPMTEVAIDKVFIGSCTNGRIEDLRAAAAIAKGRKVAATVNAIVVPGSGLVKEQAESEGLDQIFLEAGFEWREPGCSMCLAMNADKLAPGERCASTSNRNFEGRQGKGGRTHLVSPAVAVASAITGKLTDAQSLAPSLG

SEQ ID NO: 103035 - DNA, 1266 bp, Moorella thermoacetica ATCC 39073
  CDS (1)..(1266): transl_table=11
atgggcatgaccatcaccgaaaagatcctggccgcccacgccggattaaaggcggtagagcctggccagctcatcaacgctaaagtagacctggccctggggaacgatatcaccgcccccctggccatccaggagttcaaaaagctcggagtgaaaaaagtcttcgacccggagcgggtcgtcctggtaccggaccacttcaccccggccaaggacattaagtccgccgagcaggcgaaaatcttgcgcgatttcgcccgggagcagggcttgacccactactttgaaatcggccgtatgggcatcgagcactgcctgctgccggaggcgggcctggtcggtcccggagacctggtcatcggtgccgactcccatacctgcacctacggggccctcggggccttcgccaccggcgtcggctccacggacctcgccgccgccatggccaccggcgagctatggtttaaagtacccgagaccattctcttccgttaccacgggaagcttaagccctgggtaggcggcaaagacctcatcctctacaccatcggccggatcggcgtcgacggcgcccgctatatggccatggaattcaccggcgaagccattaccaacctctccatggaaggccgcttcaccatggccaacatggccatcgaagccggcggcaagaacggcatcttcccggtggacgaaaagaccgtagaatacatccggggccggctgcaaagggactaccgcatctaccagagcgaccccgacgcccgttacaatcaggagatagacatcgacgccagtaagatcgaaccccaggtagccctgccccacctgcccgaaaacgcccggagtgtaaaagaaataggagagatcaaaatcgaccaggtagtcatcggcagctgcaccaacggccgcctggaggacctgcgggtggcggcgcaaatcctaaaggggcaaaaggtccatcccgaagtaagactcattgtcatccccggcacccagcagatctacgccgcagccctggccgaagggttgatagcaacctttatcgaagccggggcggccgtatccacccccacctgcggcccctgcctgggcgggcatatggggatcctggctaaaggggagcgggccctggccaccaccaaccgcaacttcgtcggccgcatgggccatcccgagagcgaagtctatctcgccggcccggcggtagccgccgccagcgccgttaaagggcgcatcgccgccccagaggaggtagtaaaatga

SEQ ID NO: 103036 - protein, 421 aa, Moorella thermoacetica ATCC 39073
MGMTITEKILAAHAGLKAVEPGQLINAKVDLALGNDITAPLAIQEFKKLGVKKVFDPERVVLVPDHFTPAKDIKSAEQAKILRDFAREQGLTHYFEIGRMGIEHCLLPEAGLVGPGDLVIGADSHTCTYGALGAFATGVGSTDLAAAMATGELWFKVPETILFRYHGKLKPWVGGKDLILYTIGRIGVDGARYMAMEFTGEAITNLSMEGRFTMANMAIEAGGKNGIFPVDEKTVEYIRGRLQRDYRIYQSDPDARYNQEIDIDASKIEPQVALPHLPENARSVKEIGEIKIDQVVIGSCTNGRLEDLRVAAQILKGQKVHPEVRLIVIPGTQQIYAAALAEGLIATFIEAGAAVSTPTCGPCLGGHMGILAKGERALATTNRNFVGRMGHPESEVYLAGPAVAAASAVKGRIAAPEEVVK

SEQ ID NO: 103037 - DNA, 1932 bp, Syntrophus aciditrophicus SB; identical to SEQ ID NO: 67022
  CDS (1)..(1932): transl_table=11

SEQ ID NO: 103038 - protein, 643 aa, Syntrophus aciditrophicus SB; identical to SEQ ID NO: 67023

SEQ ID NO: 103039 - DNA, 1263 bp, Syntrophus aciditrophicus SB
  CDS (1)..(1263): transl_table=11
atgggaatgaccattacggaaaagatcctttgccggcataccgacctcgacgaagtccgtcccggaatgctgatcaacgcgaaggtggatatcgccctgggaaacgacgtcacggctccgctggctattgacgaattccgcaaggcgggaggaaagaaggtcttcgaccgggacaaggtggtcctcattccggaccattttacccccaacaaggacatcaattccgccgcgcagtgcaagatcatgcgcgactttgcccgggagcaggagatcacccattactacgaagtcggggaagtgggtgtggaacacgccctcctgccggaaaaaggcatcgtcctgccgggcgacctggtgatcggggcggacagccacacctgcacctacggggccctgggggccttcgcgacaggtgtgggcagtacggacctggcggcggccatgctgaccggcgaagtctggttcaaggttccggaatccatcaggttcgtcctctccggaacgctcaatccgtgggtctcgggcaaggatcttatcctttacatcatcggtaagatcggcgtggacggcgccctttacaaggccatggaatttacgggcgacacgatcgcctccctgaccatggcggaccgctttaccatcgccaacatggccatcgaagcgggaggcaagaacggcatcttcacccccgatgaaattacggaagcttatgtgaagccccgggcaaaacgcccctacaccttttacgcctccgaccccgatgccgcctacgcccaggtcatcgagatcgatgtgaaccggatagaaccccaggtcgccttccctcatctgccctccaacacgaaggggatcagcgaggtgggccaggtcccgctcgatcaggtcgtcatcggctcctgcaccaacggacggatcgaggatctgcgggcagcggccgccgtgctgaaaggacgcaaggccgatccccgggtccggctgatcgtcatcccggcaactcaggaaatctatcgaatggccatgaaggaaggactcttcgacatcttccttgacgccaacgcggccatcagcactccgacctgcggcccctgcctgggcgggcatatgggaatcctcgccgccggcgaacgggccctggcgacgaccaaccggaatttcgtcggccggatggggcacccccgcagcgaggtgtatctgagcaatcccgccgtagccgccgcttccgccgtcctgggaagaattgccggccctgatgaactgaaatga

SEQ ID NO: 103040 - protein, 420 aa, Syntrophus aciditrophicus SB
MGMTITEKILCRHTDLDEVRPGMLINAKVDIALGNDVTAPLAIDEFRKAGGKKVFDRDKVVLIPDHFTPNKDINSAAQCKIMRDFAREQEITHYYEVGEVGVEHALLPEKGIVLPGDLVIGADSHTCTYGALGAFATGVGSTDLAAAMLTGEVWFKVPESIRFVLSGTLNPWVSGKDLILYIIGKIGVDGALYKAMEFTGDTIASLTMADRFTIANMAIEAGGKNGIFTPDEITEAYVKPRAKRPYTFYASDPDAAYAQVIEIDVNRIEPQVAFPHLPSNTKGISEVGQVPLDQVVIGSCTNGRIEDLRAAAAVLKGRKADPRVRLIVIPATQEIYRMAMKEGLFDIFLDANAAISTPTCGPCLGGHMGILAAGERALATTNRNFVGRMGHPRSEVYLSNPAVAAASAVLGRIAGPDELK

SEQ ID NO: 103041 - DNA, 1398 bp, Frankia sp. CcI3
  CDS (1)..(1398): transl_table=11
atggggcgcacacttgcggaaaaggtctgggacgcccacgtggtgcggcgcgccgacggtgaaccggatctgctgtacatcgatctgcacctggttcacgaggtcacctcgccgcaggcgttcgaggccctgcggctggccgggcggcccgtgcggcgtccggagctgaccctcgctaccgaggatcacaacgtccccaccaccgacacgctggcgccgatcgccgatccgatctcggcggcccaggtggaggcgctgcggaagaactgcgccgagttcggcgtgcggctgtacccgatgaacgacccgggccagggcatcgtgcacgtcgtcggcccccagctcgggctgtcccagcccggcatgacgatcgtctgcggtgacagccacacctccacccatggcgcgttcggggcgctggccttcgggatcggcaccagccaggtcgagcacgtcctcgcgacccagacgctgccgcagcgcaggccgaagacgatggcgatcaccgtggcgggcgacctgcccgtcggggtcagcgcgaaggatctcatcctggcgatcattgcgcggatcggtaccggcggtggtgccggccacgtcatcgagtaccgcggtgcggcgatccgggccctgtcgatggagggccggatgacggtctgcaacatgtccatcgaggccggcgcgcgcgccgggatgattgcgcccgacgacgtcacgttcgagtatctcgccgggcggccgcgtgtcgccaccggtgctgcctgggaggaagcggtggcctactggcgcaccctcgcctccgactccgacgcggtcttcgaccgggaggtcgtgatcgatgccgcgagcctcacgccctacgtcacctggggaaccaacccgggccaggccgcaccgctcggatcgctggttcccgcgcccgccgactacccggacgcggccgcgcgggcctcggtcgaacgagcgctgacctacatgggcctcacccccggcaccccgttgtccgacgtcaccgtcgacacggtgttcatcggatcgtgcaccaacgggcgcctgagtgacctgcgcgccgccgccgacgtgctgcgcggccggcgggtgagcgagggggtccgggtcctgatcgttcccggctccatggcggtgaaggcgcaggccgaggcggaggggctcgacgaggtcttccgagcggcgggagcgcagtggcgcagcgccggctgttcgatgtgcctcggcatgaaccccgacacgcttcggcccggcgagcgcagtgcctcgacgtcgaaccgcaacttcgagggccggcaggggccgggtgggcgcacccatctcgtctcgcccgcggtcgccgcggccaccgccgtgaccggtcggctgaccgctccggcggatctgtag

SEQ ID NO: 103042 - protein, 465 aa, Frankia sp. CcI3
MGRTLAEKVWDAHVVRRADGEPDLLYIDLHLVHEVTSPQAFEALRLAGRPVRRPELTLATEDHNVPTTDTLAPIADPISAAQVEALRKNCAEFGVRLYPMNDPGQGIVHVVGPQLGLSQPGMTIVCGDSHTSTHGAFGALAFGIGTSQVEHVLATQTLPQRRPKTMAITVAGDLPVGVSAKDLILAIIARIGTGGGAGHVIEYRGAAIRALSMEGRMTVCNMSIEAGARAGMIAPDDVTFEYLAGRPRVATGAAWEEAVAYWRTLASDSDAVFDREVVIDAASLTPYVTWGTNPGQAAPLGSLVPAPADYPDAAARASVERALTYMGLTPGTPLSDVTVDTVFIGSCTNGRLSDLRAAADVLRGRRVSEGVRVLIVPGSMAVKAQAEAEGLDEVFRAAGAQWRSAGCSMCLGMNPDTLRPGERSASTSNRNFEGRQGPGGRTHLVSPAVAAATAVTGRLTAPADL

SEQ ID NO: 103043 - DNA, 1437 bp, Novosphingobium aromaticivorans DSM 12444
  CDS (1)..(1437): transl_table=11
atgtccagcaccgcaccccgcacgctctaccagaagatctgggacgcccacgtcgtcgaacgccgtgatgatggcacctgcctcatctacatcgaccgtcacctcgtccacgaagtgaccagcccgcaggccttcgaggcgcttcgcgccgccggccgcaaggtgcgccgtcccgatctcacgcttgcggtgccagaccacaacctgccgaccaccgcgcgccgtaccgccgatggccggcgcgtgcccatcgccgatcccgaatcggcccagcagctcgaggcgctggagcgcaacgcccccgaattcggcatccgctatatcggcgatgccgatgacgagcagggcatcgtccacgtcgtcggcccggaacagggcttctcgctccccggcgcgacgatcgtctgcggcgacagccacaccgcctgccacggcggcctgggtgcgctggccttcggcatcggcacgagcgaggtcgagcacgtcctcgccacgcagaccctgctgctcaagcagtcgaagacgatggaagtgcgcgtcgagggcgaactgaccccgggcgtcacggccaaggatgtcgtcctgcacatcaccggcgtgctcggcgcggctggcggcaccggctcggtcatcgagtacaccggctccgtcatccgcgacctgtcgatcgagggtcgcctgaccatctccaacatggcgatcgagcacggcgcgcgcgcgggcctttgcgctccggacgaaaagaccttcgcctatctcaagggccgtccctacgcgcccaggggcgaggactgggacaaggccgtcgcgtggtggaagagcctcgcgacagatcccggcgcgacctatgacaaggtcgtcgtgatcgacgcgaaggacatcgctccttccgtcacctggggcaccagcccggaagacgtgctgccgatctccggcctcgtccccgcgcctgaatccttcgcagatccctccaagcaggaagccgcccgcgcgagcctcgaatacatgggcctcgttcccggccagcgcatggaggacgtcgaggtgcagaacatcttcatcggctcgtgcaccaacagccgcatcgaggacatgcgcgccgctgccgcgatcctgaagggccgcaagaaggcggacaacgtgaagtgggccatcgtggtgcccggctcggggctggtgaagaagcaggcggaagaggaaggcctcgaccgcgtgttcatcgaagccggcttcgaatggcgcgagcccggatgttcggcctgtctcggcatgaacccggacaaggtgccagcgggcgaacgctgcgcttcgacctccaaccgcaacttcgtcggccgccagggccccggcgcgcgcacgcacctcgtcagcccggcgatggcggcggccgctgccgttaccggcaggctgacggacgtgcgcaagctgatggcctga

SEQ ID NO: 103044 - protein, 478 aa, Novosphingobium aromaticivorans DSM 12444
MSSTAPRTLYQKIWDAHVVERRDDGTCLIYIDRHLVHEVTSPQAFEALRAAGRKVRRPDLTLAVPDHNLPTTARRTADGRRVPIADPESAQQLEALERNAPEFGIRYIGDADDEQGIVHVVGPEQGFSLPGATIVCGDSHTACHGGLGALAFGIGTSEVEHVLATQTLLLKQSKTMEVRVEGELTPGVTAKDVVLHITGVLGAAGGTGSVIEYTGSVIRDLSIEGRLTISNMAIEHGARAGLCAPDEKTFAYLKGRPYAPRGEDWDKAVAWWKSLATDPGATYDKVVVIDAKDIAPSVTWGTSPEDVLPISGLVPAPESFADPSKQEAARASLEYMGLVPGQRMEDVEVQNIFIGSCTNSRIEDMRAAAAILKGRKKADNVKWAIVVPGSGLVKKQAEEEGLDRVFIEAGFEWREPGCSACLGMNPDKVPAGERCASTSNRNFVGRQGPGARTHLVSPAMAAAAAVTGRLTDVRKLMA

SEQ ID NO: 103045 - DNA, 1404 bp, Francisella tularensis subsp. holarctica
  CDS (1)..(1404): transl_table=11
atggtaagaaatattatcgataaaatctgggatgctcatgttgtaaaacaaatacctaattttccagatattttatatatagatagaatactaatgcatgaggtaacttctgcacaagctttcgatagagaactaaatattccaataaataatccaaaatcgatcattgcaactgttgatcatagtatctcgacatcacctatcaatcgtctggaaatgaaagataaagttgctcaagctcaagtagaaaaattacgtagtaatgttaaagaatttggtattgatttttatgactttgaaagccagcatcaaggaattgtccatgttataggtcctgagcttggcttcacactacctggtacaactcttgtatatggcgactcgcatacatctacgcatggtgcatttggagctttagcattcggtgttggaacatctgaagttggacatgtacttgctactaactgtattttgcaatacagaccaaagacaatgaaagtagagtttgttgggaagccttcaaagtcagctacggctaaagatattatcatgaagctaatagctaatattggtattggtggtactggtggttatgtcatcgaatatgttggtcaagcaatcaaagatatgactatggaagagagtatgacgctatgtaatatgtcgatagaatgtggtgcaagagctggcttggtttctccagatgagaaaacttttagttacctaaaaggtaaaaaatatgcgcctcaaggtaatgattttgacaagtctgtagaatattggaatagcttcataagtgatgaaaatgctcactatgacaaaactatcaaagtcgatattgaaggacttgagccaatggttacatggggaataaaccctcaacatgctatcagtatctcagctaagattcccagcctaaaagatatacctactcatcaacacaagctagctcaacaagcttatgattatactaaatttaatgctgatgaaaatatcctaggtaaagaaattcaatgggcatttgttggtagctgtactaacggtcgtattgaagatatgcgcgctgtggcagatgttctaaaaggtagaaaaatcgctaaaaatgtaactatgtatatagttcctgggtcagagcaagtgcgaaatatcgctatagctgaggggttagataagatctttgctgatgctggagctgaatttagaatgcctggttgctcaatgtgcttagcaatgaatgatgataaagttccagaaggtcaaagatgtattagtacttcaaatagaaacttcatcggtcgtcaaggtaaaggaagtataacccatcttgcttcaccacaaacagttgctgctagtgctgttatgggtaagatttgtagtgttgataaattagataaggagttataa

SEQ ID NO: 103046 - protein, 467 aa, Francisella tularensis subsp. holarctica
MVRNIIDKIWDAHVVKQIPNFPDILYIDRILMHEVTSAQAFDRELNIPINNPKSIIATVDHSISTSPINRLEMKDKVAQAQVEKLRSNVKEFGIDFYDFESQHQGIVHVIGPELGFTLPGTTLVYGDSHTSTHGAFGALAFGVGTSEVGHVLATNCILQYRPKTMKVEFVGKPSKSATAKDIIMKLIANIGIGGTGGYVIEYVGQAIKDMTMEESMTLCNMSIECGARAGLVSPDEKTFSYLKGKKYAPQGNDFDKSVEYWNSFISDENAHYDKTIKVDIEGLEPMVTWGINPQHAISISAKIPSLKDIPTHQHKLAQQAYDYTKFNADENILGKEIQWAFVGSCTNGRIEDMRAVADVLKGRKIAKNVTMYIVPGSEQVRNIAIAEGLDKIFADAGAEFRMPGCSMCLAMNDDKVPEGQRCISTSNRNFIGRQGKGSITHLASPQTVAASAVMGKICSVDKLDKEL

SEQ ID NO: 103047 - DNA, 1275 bp, Desulfitobacterium hafniense Y51
  CDS (1)..(1275): transl_table=11
atgagagatatggcaatgaccatcactgagaaaattcttgccgagcatgccggtctggataaggtggtacccggtcaattgattactgcccagctggatctggccttggccaatgatataaccggcccggtctccattcgggaatttgagaagttcggtgtggaaaccgtttgggataagaccaaggtcgccttggttcccgaccactttacccccaacaaagacatcgcttctgcagaattaagcaaagctttaagagaatttgcaaaaaaacaagggattgttcattattgggagcagggaagagtgggtgttgagcactgtcttcttcctgagcaaggcgtgaccctgcccggtgatgtgatcatcggtgccgattcccatacctgcacctacggcgctttgggtgcttttgcaacaggagtgggcagcacagatttagccgccggcatggctaccggggaagcctggttcagaattccggaatccataaaattcatatttaaaggaacgaacttccagccctgggtcagcggtaaagatttgattctttacaccatcggcaaaatcggggtggacggcgcccgctatcggtctatggaattcactggggaaggtatcgccgccttgtccatggacggccgtttaaccatgtgcaatatggctgtggaagcgggagccaagaacgggattatcccgcccgatgaaaagaccctggcttatgtgaatgaacgggccaaacgcccctataaagtctatcacagcgatcccgatgctcagtatgtggaagtctatgaatgggatgtggcagatattcctttgcaagtggcttttcctcatctgccggagaacgccaaacccgtcagtgaagggaaaggaattaaaatcgatcaagtggtcatcggttcctgtactaatggccgtctggaagatatgcaagtggcggcacagatcctcaagggccaaaaagtccatggggatgtacgcttaattgtcatacctggaactcaggatatttataagcaagccatgcaggaaggactgatcgatatctttatcgatgcgggggctgtggtcagcactcctacctgcggaccttgcttgggcggatatatgggaattctggccaaaggggagcgggcgctttccaccaccaaccggaactttgtcggacggatgggacatccggaaagtgaggtctacctgtccggaccggctgtggcggcagcatcggcagtaaccggggaaatctcacatccagaggaggtattataa

SEQ ID NO: 103048 - protein, 424 aa, Desulfitobacterium hafniense Y51
MRDMAMTITEKILAEHAGLDKVVPGQLITAQLDLALANDITGPVSIREFEKFGVETVWDKTKVALVPDHFTPNKDIASAELSKALREFAKKQGIVHYWEQGRVGVEHCLLPEQGVTLPGDVIIGADSHTCTYGALGAFATGVGSTDLAAGMATGEAWFRIPESIKFIFKGTNFQPWVSGKDLILYTIGKIGVDGARYRSMEFTGEGIAALSMDGRLTMCNMAVEAGAKNGIIPPDEKTLAYVNERAKRPYKVYHSDPDAQYVEVYEWDVADIPLQVAFPHLPENAKPVSEGKGIKIDQVVIGSCTNGRLEDMQVAAQILKGQKVHGDVRLIVIPGTQDIYKQAMQEGLIDIFIDAGAVVSTPTCGPCLGGYMGILAKGERALSTTNRNFVGRMGHPESEVYLSGPAVAAASAVTGEISHPEEVL

SEQ ID NO: 103049 - DNA, 1419 bp, Saccharophagus degradans 2-40
  CDS (1)..(1419): transl_table=11
atgggcggtaaaaccctatacgacaagctttgggatgaccatctagttcagcagcgcgatgacggctccgcgttactgtacatagataggcacattgttcacgaagtaacttctccgcaggcttttgaagggttgcggttagcaaagcgcaagccgtggcgtgtagattctgtggttgccacgccagatcataacgtacctacaacgcaaaaagagcgcgcttctggggtagagggtatcgaagaccctacctcccgtattcaggtgcaaacgttagattccaactgcgatgagcttggcattctagagtttaaaattaatgatgcacgccaaggtattgtgcacgtggttggccctgaaaccggcgcatgcctgcctggaatgaccattgtatgtggtgactcccatacctctaccaacggcgccctaggtgcgttagcaatgggtattggtaccagtgaagtggagcacgtacttgctacccagtgtttagttgctaaaaaaatgaaaagcatgctggttaaggtggatggcaagcttggtgcaggtgttacaccgaaagacgttgtgttggccattattggcaaaataggcactgctggtggtacaggttatgccatcgagtttggcggtgaagttatgcgatctatgtcgatggaaggtcgtttaactgtgtgtaacatggctattgaggctggtgctcgcgccggtatggtcgctgtagacgatatcactatcgattatgtaaaaggccgctcatttgcacccaagggtgaacattgggagcaagctgttgcagcatggcgcgatctaaaaagcgatgacgacgcggtgtttgatgcggttgttgagcttcgtggggaagagattctgccgcaagttagttggggtacatcaccagagatggtgttgcccgttgatgcgtctattccagaccctgagctagaaaccgatgcagttaagcaaaacggcatgcgtcgcgcgttgcaatacatggggcttaaagcagggcaggcgataaaagatatatatgtcgatcgtgtttttattggttcgtgtactaactcacgcatagaagatatacgtgccgctgctgaagtggtgaaagggcgtactaaagctgccagcgtaaaagaagctattgtggtgcccggctctggagcagttaaggcgcaagccgaagcagaaggcttagataaaatctttgttgaggctggtttagagtggcgcgagccaggttgctctatgtgcttagcaatgaacgcagataagttgggtgacggagagcattgcgcttccacctcaaatcgcaactttgaggggcgccaaggttacggtggtcgaacgcatttggttagccctgcgatggcggcagcagctgccatagctggccattttgttgatgttcgcgagttttag

SEQ ID NO: 103050 - protein, 472 aa, Saccharophagus degradans 2-40
MGGKTLYDKLWDDHLVQQRDDGSALLYIDRHIVHEVTSPQAFEGLRLAKRKPWRVDSVVATPDHNVPTTQKERASGVEGIEDPTSRIQVQTLDSNCDELGILEFKINDARQGIVHVVGPETGACLPGMTIVCGDSHTSTNGALGALAMGIGTSEVEHVLATQCLVAKKMKSMLVKVDGKLGAGVTPKDVVLAIIGKIGTAGGTGYAIEFGGEVMRSMSMEGRLTVCNMAIEAGARAGMVAVDDITIDYVKGRSFAPKGEHWEQAVAAWRDLKSDDDAVFDAVVELRGEEILPQVSWGTSPEMVLPVDASIPDPELETDAVKQNGMRRALQYMGLKAGQAIKDIYVDRVFIGSCTNSRIEDIRAAAEVVKGRTKAASVKEAIVVPGSGAVKAQAEAEGLDKIFVEAGLEWREPGCSMCLAMNADKLGDGEHCASTSNRNFEGRQGYGGRTHLVSPAMAAAAAIAGHFVDVREF

SEQ ID NO: 103051 - DNA, 1407 bp, Methylobacillus flagellatus KT
  CDS (1)..(1407): transl_table=11
atgtcagccaaaacactttacgacaaattgtttgattcccacgtggtgcgcgaggaaaacggcgccgctttgatttatatcgaccgtcatctggtgcatgaggtgaccagccctcaggccttcgaaggcctgaaaatggcgggacgcaagctatggcgcgtcaattccgtgctggcagtgccggatcataatgtgcccaccaccgaccgcagtcatggcattgccgatccaatctcgcgcttgcaggtggaaaccttggatcagaactgtcgcgattttggcgtgactgaattcaggatgggcgatgtgcgccaaggtattgttcatgtgatgggccctgaacagggtgcgaccttgccgggcatgacggtagtctgtggcgactcccataccagcactcacggtgcgtttggtgcgctggcgcacggcatcggcacctcagaagtcgaacacgtgatggcgacgcaatgcctggtccagaagaaatccaaggccatgcagatacgtgtagaagggcagctgggtcccggcgttactgccaaggatgtcgctttggcgattattggcaagatcggcacggcgggtggcaccggctatgccattgagtttgcaggctcggcgattcgcagcttgagcatggaaggacgcatgacattgtgcaatatggcgatcgaggcgggtgcccgtgccggcatggtggccgtcgatgacgtcacgatcaattatgtcaagggccggccatatgctcccaagcctgagcaatgggacgcagcggttgcttactggcgcaccttgcacagtgacgaaggcgcgaagtttgacgccgtggtggagatcaaggccgaagatatcgagccgcaggtcacttggggcacttctcctgaaatggtgaccgctatcaatagcatcgtgcccgaccccagcaaggaaagtgatcctaccaagcgcagtggcatggagcgtgccttgcagtacatgggcttgcaacccaatacgccgatctccgacatcccgatcgacaaggtattcatcggttcctgtacgaattcccgcattgaggatttgcgtgccgccgctgccgtcgccaagggaaaacatgtcgcgcccaatgtcaagttggcgatggtggtgcctggctccggtctggtgaaggcgcaggcggaacaggaaggtctggacaagattttcaaggaagctggcttcgagtggcgtgagcccggctgctccatgtgtctggcgatgaatgccgaccgtctggagccgggcgagcgttgtgcctccacttcaaaccgcaacttcgaagggcggcagggcgcgggtggccgcacgcatctcgtcagcccagggatggcggcggcggcagcagtggcagggcattttatcgatgtgcgtcaattgctgaattga

SEQ ID NO: 103052 - protein, 468 aa, Methylobacillus flagellatus KT
MSAKTLYDKLFDSHVVREENGAALIYIDRHLVHEVTSPQAFEGLKMAGRKLWRVNSVLAVPDHNVPTTDRSHGIADPISRLQVETLDQNCRDFGVTEFRMGDVRQGIVHVMGPEQGATLPGMTVVCGDSHTSTHGAFGALAHGIGTSEVEHVMATQCLVQKKSKAMQIRVEGQLGPGVTAKDVALAIIGKIGTAGGTGYAIEFAGSAIRSLSMEGRMTLCNMAIEAGARAGMVAVDDVTINYVKGRPYAPKPEQWDAAVAYWRTLHSDEGAKFDAVVEIKAEDIEPQVTWGTSPEMVTAINSIVPDPSKESDPTKRSGMERALQYMGLQPNTPISDIPIDKVFIGSCTNSRIEDLRAAAAVAKGKHVAPNVKLAMVVPGSGLVKAQAEQEGLDKIFKEAGFEWREPGCSMCLAMNADRLEPGERCASTSNRNFEGRQGAGGRTHLVSPGMAAAAAVAGHFIDVRQLLN

SEQ ID NO: 103053 - DNA, 1410 bp, Burkholderia xenovorans LB400
  CDS (1)..(1410): transl_table=11
atggcacagactctctacgacaaattgtggaacacacacgtggtccacacggaagaagacggcacgacgattctctacatcgaccgtcacctgctgcacgaagtgaccagccctcaggcgttcgaaggcctgaagctggctgagcggccggtgtggcgcatcagcgcgaacctcgcggtgtcggaccataacgtgccgaccacggaccgcagccacggcattgccgatcccatctcccggctgcaagtcgacacgctcgattccaactgcgacgcctacggcatcacccagttcaagatgaacgatctgcggcagggcatcgtgcacatcatcgggccggagcagggcgcgacgctgccgggcatgacgatcgtctgcggcgactcgcacacgtccacgcacggcgcgttcggcgcgctggcgcacggcatcggcacgtcggaagtcgagcacgtgctggccacgcaaacgctcctgcagaagaagagcaagaacatgctggtgaaggtggaaggcgcgctgccgcgcggctgcaccgcgaaagacatcgtgctcgccatcatcggcaagatcggcacggcgggcggcacgggctatgcaatcgaattcggcggctcgaccatccgcgcgctttccatggaaggccgcatgacggtctgcaacatggcgatcgaggcgggcgcgcgcgccggcatggtcgcggtcgacgacaccaccatcgaatacctgaagggccgcccgttctcgccggaaggtgtggagtggaaccacgcggtcgagtactggaaacagttcaaatcggacgacggtgcgcaattcgaccgcgtggtcgagctgaacgccgccgagatcgtgccgcaagtcacgtggggcacgtcgccggaaatggtcacggccgtagacggccgcgtgccggatccggatcgcgagaaggacccggtcaagcgcgacgccttggagcgcgcgctgaaatacatggcgctcgaaccgaatgcgccgatcgaatcgatcaagccggataaaatcttcatcgggtcgtgcacgaacgcgcgtattgaagacattcgcgccgcggcttacgtcgtgaagaaactgggccgccgcgtggcgccgaacattcgtctggcgatggtcgtgccgggttcggggctcgtgaaggcgcaggcggaacgtgaaggcctcgacaaggtctttaccgacgccgggttcgaatggcgtgaaccaggttgctcgatgtgtcttgccatgaacgccgaccggctggagccgggcgagcgttgcgcatccacgtcgaatcgtaatttcgaaggtcgtcagggcgccggtggccgtacccacctcgtgagccccgcgatggctgcggctgcggctatcgaagggcatttcgtcgatattcgcaagcttggataa

SEQ ID NO: 103054 - protein, 469 aa, Burkholderia xenovorans LB400
MAQTLYDKLWNTHVVHTEEDGTTILYIDRHLLHEVTSPQAFEGLKLAERPVWRISANLAVSDHNVPTTDRSHGIADPISRLQVDTLDSNCDAYGITQFKMNDLRQGIVHIIGPEQGATLPGMTIVCGDSHTSTHGAFGALAHGIGTSEVEHVLATQTLLQKKSKNMLVKVEGALPRGCTAKDIVLAIIGKIGTAGGTGYAIEFGGSTIRALSMEGRMTVCNMAIEAGARAGMVAVDDTTIEYLKGRPFSPEGVEWNHAVEYWKQFKSDDGAQFDRVVELNAAEIVPQVTWGTSPEMVTAVDGRVPDPDREKDPVKRDALERALKYMALEPNAPIESIKPDKIFIGSCTNARIEDIRAAAYVVKKLGRRVAPNIRLAMVVPGSGLVKAQAEREGLDKVFTDAGFEWREPGCSMCLAMNADRLEPGERCASTSNRNFEGRQGAGGRTHLVSPAMAAAAAIEGHFVDIRKLG

SEQ ID NO: 103055 - DNA, 1410 bp, Ralstonia metallidurans CH34
  CDS (1)..(1410): transl_table=11
atggccaagacgctctacgacaaactctgggatgaccacaccgtccacgtcgaggaagacggcaccacgctgctctacatcgatcgccacctgcttcacgaagtgaccagcccgcaggcgttcgaaggactaaagctggcggagcgtccggtctggcgcatcagcgccaacctggccgtgtcggatcacaacgtgccgaccaccgaccgctcgcaaggcatcgccgacccgatctcgaagctccaggtggacacgctcgacctgaactgcgatgcctatggcatcacccagttcaagatgaacgatcaccgccagggcatcgttcacgtgatcgggccggagcagggcgccacgctgcccggcatgaccgtggtctgcggtgactcgcacaccagcacgcacggcgcgttcggtgcgctggcccacggcatcggcacgtcggaagtggagcatgtgctggccacccagacgttgctgggcaagaaggccaagaacatgctgatcaaggtggaaggcaagctgccccgcggctgcaccgccaaggacatcgtgctggccgtcatcggcaagatcggcacggcgggcggcacgggctacacgatggagttcgccggctcggccattcgcgacctgacgatggaaggccgcatgaccgtctgcaacatggcaatcgaagccggcgcgcgtgccggcctggtggccgtggacgatgtcacgctcgaatacgtcaagaaccgtccattcgcgccgcaaggcgtggagtgggaccaggccgtggcgtactggcgcacgctgcattcggatgccggcgcccacttcgacaaggttgtggagctgcgtgccgaagaagtccgtccgcaggtgacctggggcacgtcgcccgaaatggtcatcagcatcgaggaccgcgttccggatccggagaaggaaaaggactcgaacaagcgcaacgcgatggagcgcgcgctcgagtacatgggcctgcagccgaacgtgccgatggagtcgatcaacatcgacaaggtgttcatcgggtcctgcaccaacagccgcatcgaagatatgcgtgccgccgcgtgggtcgttcagaagctgggccgcaaggtcgcgtcgaacgtgaagctggcgatggtggtgccgggatcgggtctggtgaaggaacaggccgagcgcgaaggcctggacaagatcttcaaggctgccggcttcgaatggcgcgagccggggtgctcgatgtgcctggcgatgaacgctgaccgcctggatccgggcgagcgctgcgcgtcgacgtcgaatcgcaacttcgaaggccgtcagggcgccggtggccgcacgcacctggtgagcccggcgatggctgccgcggccgcgatcgaggggcacttcgtcgatattcgcaagctcggttga

SEQ ID NO: 103056 - protein, 469 aa, Ralstonia metallidurans CH34
MAKTLYDKLWDDHTVHVEEDGTTLLYIDRHLLHEVTSPQAFEGLKLAERPVWRISANLAVSDHNVPTTDRSQGIADPISKLQVDTLDLNCDAYGITQFKMNDHRQGIVHVIGPEQGATLPGMTVVCGDSHTSTHGAFGALAHGIGTSEVEHVLATQTLLGKKAKNMLIKVEGKLPRGCTAKDIVLAVIGKIGTAGGTGYTMEFAGSAIRDLTMEGRMTVCNMAIEAGARAGLVAVDDVTLEYVKNRPFAPQGVEWDQAVAYWRTLHSDAGAHFDKVVELRAEEVRPQVTWGTSPEMVISIEDRVPDPEKEKDSNKRNAMERALEYMGLQPNVPMESINIDKVFIGSCTNSRIEDMRAAAWVVQKLGRKVASNVKLAMVVPGSGLVKEQAEREGLDKIFKAAGFEWREPGCSMCLAMNADRLDPGERCASTSNRNFEGRQGAGGRTHLVSPAMAAAAAIEGHFVDIRKLG

SEQ ID NO: 103057 - DNA, 1413 bp, Acidobacteria bacterium Ellin345
  CDS (1)..(1413): transl_table=11
atgtccggtcctcgtacgctcttcgaaaagatttggtccacgcacgtcgtgtgcgtgcctgacgatcagcccccgatcctctatatcgatcgtcattacgttcacgaagtcacctcaccgcaggcgttcgacggtctccgcgccgccggacgaaaagttcgtcgcaccgacctcacgttcgccacggtagaccacaacgttcccaccacgtcaccgcgcctggtgattaaagatgacgtcgccgccagacagatcgacgctctgcgcacgaattgcgccgcgttcggcgtgccgctcttcgatctcacctcggaagagcagggcattgtccacgttatcggccccgaacttgggctcacgttgccgggcatgacgatcgtttgtggtgacagccacaccagcactcacggcgcattcggcgcgttcgccttcggcatcggcacctcggaagtcgagcatgtactcgccacgcagtgcttgccgcagcgtaagcccaagaccatgaagattgaagtctccggtacgttgccggaaggcgtgactgcaaaggatctcgcgctcggcatcatcggcaaactcggtaccgacggcgccaccggccatgtcatcgagtactgtggcacagccattcgcgccctttcgatggaagcgcgcatgacgctttgcaatatgtcgatcgaaggcggagcgcgcgccgggctgattggcccggacgaaataacgtttgcgtatattcgcaaccgtcaatatgcgccgaagggcgccgagtgggataccggcgtggccgagtgggcggcgctcaacaccgacgaaggcgcgaagttcgatcgcgaaattcacatcaacgccgccgacctgcagccgcaagtcacctggggcacgaatccaggaatggtggtctccgtgggtgcaaatgtccccgatcccaaggccacttccgacgacgcgcagcgccagtcgtatgaacgggcgctcacatacatggatctcaagcccggtactcccgtcgcccagatcgcggttgaccgcgtcttcattggctcctgcaccaactcgcgcatcgaagatcttcgcgccgccgcgaaggtggttagcggctaccacgtcgctgcaactgttcacgcgatggtcgtgcccggctctcagcgcattaaggcgaaagcggaagaagagggactcgaccgcgtatttcgcgacgccggattcgaatggcgtgagtctggatgctcgatgtgtctcggcatgaatcccgacatactttcgccgggtcagcgctgcgcttccaccagcaatcgcaactttgaaggtcgccagggccgcggtggccgcacccacctcgtcagtcccgccatggccgcagcagccgccattactggccacttcaccgacatccgcgagtgggagtacaagtag

SEQ ID NO: 103058 - protein, 470 aa, Acidobacteria bacterium Ellin345
MSGPRTLFEKIWSTHVVCVPDDQPPILYIDRHYVHEVTSPQAFDGLRAAGRKVRRTDLTFATVDHNVPTTSPRLVIKDDVAARQIDALRTNCAAFGVPLFDLTSEEQGIVHVIGPELGLTLPGMTIVCGDSHTSTHGAFGAFAFGIGTSEVEHVLATQCLPQRKPKTMKIEVSGTLPEGVTAKDLALGIIGKLGTDGATGHVIEYCGTAIRALSMEARMTLCNMSIEGGARAGLIGPDEITFAYIRNRQYAPKGAEWDTGVAEWAALNTDEGAKFDREIHINAADLQPQVTWGTNPGMVVSVGANVPDPKATSDDAQRQSYERALTYMDLKPGTPVAQIAVDRVFIGSCTNSRIEDLRAAAKVVSGYHVAATVHAMVVPGSQRIKAKAEEEGLDRVFRDAGFEWRESGCSMCLGMNPDILSPGQRCASTSNRNFEGRQGRGGRTHLVSPAMAAAAAITGHFTDIREWEYK

SEQ ID NO: 103059 - DNA, 1410 bp, Rubrobacter xylanophilus DSM 9941
  CDS (1)..(1410): transl_table=11
atggagaagaagaaacccaggacgctcgtagagaagatatgggagcgacacgtggtgcggcgggccgagggggagcccgacctcctgtacgtggatctccacatggtccacgaggtcacgagcccccaggccttcgaggcgctgcggctcgccggcaggagggtcaggaggcccgacctcaccgtggccaccatggaccacaacgtcccgaccaccgacgtgcgcctcggggtcagggacagggtctcggcccggcagatggaggcgctcaggaaaaactgtgaggagttcgggatacagctgcacgagtggggctcgcccgggcagggcatcgtgcacgtcatcgggccggagatggggctcacccagccggggatggtcatcgtctgcggcgactcccacacctccacccacggcgccttcggggccctggccttcggcatcggcaccagcgaggtcgagcacgtgctcgccacccagaccatcccgcagcgcaggcccaagaccatggccataaccgtcgagggcgaggccccgcccgacgtgacggccaaggacatcatgctcggcatcctgcaccgcatcggcaccggcggcggggtcgggcacgccatcgagtaccggggcgaggcgatccgcaacctctccatggaggggcggatgaccatctgcaacatgaccatcgagggcggcggtcgcgccgggatggtcgcccccgacgagaagacctactcgtacatcgagggccgcccccacgccccgaagggcagggcctgggaggaggcgctcgagtactggcagagcctccccaccgacgagggcgcgaccttcgacaaagaggtcgtcatagacgccgccgagctcgtcccctatgtctcctggggcaccacccccgcgcagaccgtcccgctcgacggggaggtccccgagccccagaacgagggccacgagcgcgcgctcaggtacatgggcctcaggcccggcacccccataagggagatagaggtggacaccgtgttcatcgggtcgtgcaccaacgccaggatagaggacctgcgcgccgcggcccgcgtgctcgagggccacaaggtgaaggagggcatccgtgcgatggtcgtccccggctccatgcgcgtgaagaagcaggccgaggaggaggggctcgacgagatcttcaagaaggccggtttcgagtggcgcaacgccggctgctccatgtgcctcggtatgaacccggacatcctctcgcccggcgagcgctgcgcctccacctcgaaccgcaacttcgaggggcggcagggcaagggcggcaggacgcacctcgtgagcccggtggtcgcggcggcgacggcggtgatggggcgcttcgcctcgccctcggagctcggcgtccccgtggaggtgggctag

SEQ ID NO: 103060 - protein, 469 aa, Rubrobacter xylanophilus DSM 9941
MEKKKPRTLVEKIWERHVVRRAEGEPDLLYVDLHMVHEVTSPQAFEALRLAGRRVRRPDLTVATMDHNVPTTDVRLGVRDRVSARQMEALRKNCEEFGIQLHEWGSPGQGIVHVIGPEMGLTQPGMVIVCGDSHTSTHGAFGALAFGIGTSEVEHVLATQTIPQRRPKTMAITVEGEAPPDVTAKDIMLGILHRIGTGGGVGHAIEYRGEAIRNLSMEGRMTICNMTIEGGGRAGMVAPDEKTYSYIEGRPHAPKGRAWEEALEYWQSLPTDEGATFDKEVVIDAAELVPYVSWGTTPAQTVPLDGEVPEPQNEGHERALRYMGLRPGTPIREIEVDTVFIGSCTNARIEDLRAAARVLEGHKVKEGIRAMVVPGSMRVKKQAEEEGLDEIFKKAGFEWRNAGCSMCLGMNPDILSPGERCASTSNRNFEGRQGKGGRTHLVSPVVAAATAVMGRFASPSELGVPVEVG

SEQ ID NO: 103061 - DNA, 1410 bp, Mesorhizobium sp. BNC1
  CDS (1)..(1410): transl_table=11
atgaccgcaccacgcacgctctacgacaagattttcgatgaccatctggtcgatcgccaggacgacggaacctgtctcctctatatcgaccggcacttggtccatgaagtaaccagcccgcaggcattcgagggcctgcgcatggcgggacgcgccgtgcgccatcccgaaaaaacgcttgccgtcgttgaccataacgtgcccacctcgcccgaccgcaaattcggcatcaagaacgaggaaagccgtatccaggtcgaggcgctggccaaaaacgcggtcgatttcggcattgagtattacaacgaggccgaccgccggcagggcatcgtgcatatcgttggacccgagcagggcttcaccctgccgggaatgaccatcgtctgcggtgacagccatacctctacccacggtgctttcggagctcttgcgcacggcatcggcacgtccgaagtcgagcatgtgctggccacgcagacgctcatccagcgcaaggccaagaacatgcttgtccaggtggatggcaagctgccggatggcgtgacggccaaggacatcattcttgcgatcatcggcgagatcggcactgccggcggaacgggccacgtgatcgaatatgccggcgaggcgatccgctcgctatccatggaaggccgcatgacggtctgcaacatgtcgatcgaaggcggcgcgcgcgccggcatgatcgcgccggacgagacgacttacgcctatatcaaggaccggcctcgcgccccgaagggggcagcctgggagatggcgcgagcctattgggagaccctccacacggatgagggagcccatttcgaccgcgtggtgaagctcgatgcggcaaatctcccgccaatcgttacctggggctcctcgccggaagacgtggtgtcggtcacaggttacgtgcccaatgcggatgaaatccaggacgagacgaaacgcctttcgaagaagcgggcgctcgaatatatgggcctgaccgccggcaccaagatcaccgatattgcgctcgatcgcgtgttcatcggctcctgcaccaatggccgcattgaagacctgcgcgccgcggcgaaaatcgctgagggccgcaaggtgcatccgcggatcaacgcaatgatcgtgccgggctccggccttgtgaaggcgcaggcggaagcggaaggcctcgacaagatattcattgaagccggctttgattggcgcgagccgggatgctcgatgtgcctcgccatgaatgacgatcgcctgaagccaggcgagcgctgcgcctccacctcgaatcgcaatttcgagggccgccagggtttcaaggggcgcacgcacctggtctcgccagccatggctgccgccgctgcgatcgccgggcacttcgtcgatattcgagaatggaagtag

SEQ ID NO: 103062 - protein, 469 aa, Mesorhizobium sp. BNC1
MTAPRTLYDKIFDDHLVDRQDDGTCLLYIDRHLVHEVTSPQAFEGLRMAGRAVRHPEKTLAVVDHNVPTSPDRKFGIKNEESRIQVEALAKNAVDFGIEYYNEADRRQGIVHIVGPEQGFTLPGMTIVCGDSHTSTHGAFGALAHGIGTSEVEHVLATQTLIQRKAKNMLVQVDGKLPDGVTAKDIILAIIGEIGTAGGTGHVIEYAGEAIRSLSMEGRMTVCNMSIEGGARAGMIAPDETTYAYIKDRPRAPKGAAWEMARAYWETLHTDEGAHFDRVVKLDAANLPPIVTWGSSPEDVVSVTGYVPNADEIQDETKRLSKKRALEYMGLTAGTKITDIALDRVFIGSCTNGRIEDLRAAAKIAEGRKVHPRINAMIVPGSGLVKAQAEAEGLDKIFIEAGFDWREPGCSMCLAMNDDRLKPGERCASTSNRNFEGRQGFKGRTHLVSPAMAAAAAIAGHFVDIREWK

SEQ ID NO: 103063 - DNA, 1401 bp, Cytophaga hutchinsonii ATCC 33406
  CDS (1)..(1401): transl_table=11
atgggaaagaccttattcgaaaaagtttggaatgcacacgtagtaacagaggttaaagatggtccaagtattttgtacatcgacaaacaattgattcacgaagtaacaagcccgcaagcatttgcagggattgaaaaaagaggtattggtgttttccgtccggaaagaacattagccactccggatcataacgttcctactaagggacagaatttgccgattgttgaagatctgtcacgttttcaggttgataaattaacagagaactgcaacaaattcggtgttacactttatggcttagggcacgcatctcaaggtgttgtacacgtagtagggcctgaaacaggaactacacttccgggtatgacaatcgtttgtggtgattcacacacatctacacacggtgcatttggttcaatcgcattcggtatcggtacttctgaagttgagcaggtattggctacacagtgtctgatgcagacaaaagcaaaaacattaaaaattgagatcaacggtaaacttgcgaaaggtgtaaccgcgaaagatgttattctttatgtgatcgctcagatctctgcagcaggtggcacaggttatttcgttgaatactgtggttctgcaatcacgtcgctttctatggaagcacgtatgacgatctgcaacatgagtatcgaaatgggtgcacgcggcggcatgattgctccggatgaaacgacattcaactacatcaaaggacgtgagttcgctcctaaaggtgctaagtgggatgaagcagttgcatactggaaaacattgtattcagattcagatgctgtattcgataaaacattgaaatacgatgcagcggatatcggaccgatgatcacatacggaacgaatccgggtatgggtatcagtgtaaataaaaacattccttctcttgattctattgaagaaagcaataaagtaacattcaacaaagcacttgactacatgggcttccatgctggtgactcgttgattggcaaacaagtaaactgggtattcttaggcagctgtacaaacggtcgtatcgaagatttaagacagtttgctgaatttgtaaaaggcaaacaaaaagctgcaaacatcaatgcattgatcgtgccgggttccaagcaggttgaaaaacaagccatcgcggaaggtattgataaagtattggctgaagcaggttttgaattaagagagccgggctgttctgcctgtcttgcaatgaatgaagacaaagttcctaaaggtgaatattgtgtatctacatcaaaccgtaacttcgaaggccgtcagggtcccggagcccgtacgttgcttgtaagtccgttgactgcagcagcaatcgcggtaagcggcaaaattgttgatgtacgtgaaatgttgaactaa

SEQ ID NO: 103064 - protein, 466 aa, Cytophaga hutchinsonii ATCC 33406
MGKTLFEKVWNAHVVTEVKDGPSILYIDKQLIHEVTSPQAFAGIEKRGIGVFRPERTLATPDHNVPTKGQNLPIVEDLSRFQVDKLTENCNKFGVTLYGLGHASQGVVHVVGPETGTTLPGMTIVCGDSHTSTHGAFGSIAFGIGTSEVEQVLATQCLMQTKAKTLKIEINGKLAKGVTAKDVILYVIAQISAAGGTGYFVEYCGSAITSLSMEARMTICNMSIEMGARGGMIAPDETTFNYIKGREFAPKGAKWDEAVAYWKTLYSDSDAVFDKTLKYDAADIGPMITYGTNPGMGISVNKNIPSLDSIEESNKVTFNKALDYMGFHAGDSLIGKQVNWVFLGSCTNGRIEDLRQFAEFVKGKQKAANINALIVPGSKQVEKQAIAEGIDKVLAEAGFELREPGCSACLAMNEDKVPKGEYCVSTSNRNFEGRQGPGARTLLVSPLTAAAIAVSGKIVDVREMLN

SEQ ID NO: 103065 - DNA, 1503 bp, Rhodococcus sp. RHA1
  CDS (1)..(1503): transl_table=11
gtgcgtgtccgggaagagggtaacgacatcaagcgcacggcggaccggcccgaagcccgcggtgcgagaggacacacagaggtggagaagatggcggagaaagcacgcaccctggcagagaaggtgtgggacgaccacgtcgtggtccggggtgagggagacaaccccgacctcatctacatcgatctgcatctcgttcacgaagtgacgagtccgcaggcattcgacggacttcggctggcggggcgcccgctgcgccggcccgacctgacgattgccacggaggaccacaacgtccccaccgtcgacatcgacaagccgatcgccgaccccgtctccaagactcaggtggacacgctgcggcgcaactgtgaggaattcggtgtccggctgcacccgatgggaaacatcgaccagggcatcgtccacgtcgtcggaccccagctgggtctcacccagcccggcatgaccgtggtgtgcggtgacagccacacgtccacccacggcgccttcggcgcgctcgcgatgggcatcggcaccagtgaggtcgaacacgtcatggcgacgcagacgttgtcgttgcgtcctttccggacgatggcgatcaccgtggacggcgaattgcccgacggcgtgacgagtaaagatctcattttggccgtcatcgcgaagatcggaacgggcggaggccagggctacgtcctggagtaccgcggcgaagcgatccggaagatgtcgatggaagcgcggatgaccgtctgcaacatgtccatcgaggcgggtgcgcgggcaggcatgatcgcccccgacgagatcacctacgaattcatcaagggacgtccccacgcgccgaagggcgccgactgggacgccgcggtggaggcctgggagcagttgaagaccgacgagggtgcggttttcgacaacgaggtccacatcgacgcgagttccctgacgccgttcgtgacctggggcaccaacccggggcaggggctgccgctcggcgaggccgtgccgaatccggccgagatcgtggacgagagcgagcgtcacgccgcggagaaggcgttgacctacatgggtctcgaagccggaactccgttgcgtgaggtggcgatcgacacagttttcgtgggttcgtgcaccaacggtcggatcgaggatctgcgggccgtggccgacgtgttgcgtggccgccacgtcgccgacggggtccggatgctgatcgtgccgggctcgatgcgcgttcgtgcgcaggccgaaaaggagggtctcggcgagatcttcaccgccgcgggcgccgaatggcggcaggcggggtgctcgatgtgcctcgggatgaacccggatcagctcgcgcccggcgagcgttcggcctccacgtccaaccgcaatttcgaaggccgtcaaggcaagggcggccggactcacctggtttcgccgctggtcgccgccgcgaccgcagtccggggaacactgtccgcgccgacagatctggcctag

SEQ ID NO: 103066 - protein, 500 aa, Rhodococcus sp. RHA1
MRVREEGNDIKRTADRPEARGARGHTEVEKMAEKARTLAEKVWDDHVVVRGEGDNPDLIYIDLHLVHEVTSPQAFDGLRLAGRPLRRPDLTIATEDHNVPTVDIDKPIADPVSKTQVDTLRRNCEEFGVRLHPMGNIDQGIVHVVGPQLGLTQPGMTVVCGDSHTSTHGAFGALAMGIGTSEVEHVMATQTLSLRPFRTMAITVDGELPDGVTSKDLILAVIAKIGTGGGQGYVLEYRGEAIRKMSMEARMTVCNMSIEAGARAGMIAPDEITYEFIKGRPHAPKGADWDAAVEAWEQLKTDEGAVFDNEVHIDASSLTPFVTWGTNPGQGLPLGEAVPNPAEIVDESERHAAEKALTYMGLEAGTPLREVAIDTVFVGSCTNGRIEDLRAVADVLRGRHVADGVRMLIVPGSMRVRAQAEKEGLGEIFTAAGAEWRQAGCSMCLGMNPDQLAPGERSASTSNRNFEGRQGKGGRTHLVSPLVAAATAVRGTLSAPTDLA

SEQ ID NO: 103067 - DNA, 1410 bp, Haemophilus somnus 129PT
  CDS (1)..(1410): transl_table=11
atgaaaaaaacactctaccaaaaattatttgattctcatattgtacatgaagcaccaggagaagtaccgattttgtacattaatcgtcatttaattcatgaagtcacttcaccgcaagcctttgatggtttacgtgtagcaggtcgtcaggttcgtcaagtgaataaaactttcggcacaatggatcatagtatttctactcaagtgcgtgacgtaaacaaattaacagggcaagcgaaaattcaggttttagagctagataaaaattgtaaagcaacaggaatttctttgtttgatatgaacagtaaacagcaaggcattgtacatgttatggggccggaacaaggattaaccttaccgggcatgacgattgtttgcggtgattcccatacggcaactcatggggctttcggtgcattagcttttggtatcggtacatcggaagtggaacatgttcttgcaacgcaaacactaaaacaagccagagccaaaagtatgaaaattgaagtacgtggcgaagtcgcaaaaggcattactgccaaagatattattcttgccattatcggtaaaaccacaatggcagggggaaccggtcatgttgttgagttttgtggtgaagctattcgtgcattgtcaatggaaggacgaatgacagtttgcaatatggcaattgaaatgggggcaaaagccggactgattgcacctgatgaaaccacattcgcttatttgaaagatcgtccttatgcaccgaaaggaaaagactgggaaagtgcggtagaatattggaaaaccttaaaaaccgatgaaggtgcagagtttgatactgtggtgatattagacgcaaaagacattgctccacaagtaacatggggaaccaatccaggtcaggttatcggtattgatcagaaagtacctaatccggcagaaatgcaagatcccgtcaccaaagcctccgcagaaaaagccttagcttatattggtttatctccggaaactgatttaaaagatatttccgttgatcaagtatttatcggatcttgcaccaattcccgcattgaagatttgcgtgcggcagctacagtaatgaaaggtcgaaaaaaagcagataacgtaaaacgagtacttgttgttcccggctcaggattggtcaaagaacaagcagaaaaagaagggctagataaaatttttattgcggctggtgctgaatggcgtaatcccggttgttctatgtgtttgggtatgaatgatgatcgacttggtgaatgggagcgttgtgcttcgaccagtaatcgtaattttgaagggcgacaaggccgtaacggacgaacccatcttgtaagtccggcaatggcagcggcagcagctgtcttcggtaaatttgttgatattcgttatatggaattaaattaa

SEQ ID NO: 103068 - protein, 469 aa, Haemophilus somnus 129PT
MKKTLYQKLFDSHIVHEAPGEVPILYINRHLIHEVTSPQAFDGLRVAGRQVRQVNKTFGTMDHSISTQVRDVNKLTGQAKIQVLELDKNCKATGISLFDMNSKQQGIVHVMGPEQGLTLPGMTIVCGDSHTATHGAFGALAFGIGTSEVEHVLATQTLKQARAKSMKIEVRGEVAKGITAKDIILAIIGKTTMAGGTGHVVEFCGEAIRALSMEGRMTVCNMAIEMGAKAGLIAPDETTFAYLKDRPYAPKGKDWESAVEYWKTLKTDEGAEFDTVVILDAKDIAPQVTWGTNPGQVIGIDQKVPNPAEMQDPVTKASAEKALAYIGLSPETDLKDISVDQVFIGSCTNSRIEDLRAAATVMKGRKKADNVKRVLVVPGSGLVKEQAEKEGLDKIFIAAGAEWRNPGCSMCLGMNDDRLGEWERCASTSNRNFEGRQGRNGRTHLVSPAMAAAAAVFGKFVDIRYMELN

SEQ ID NO: 103069 - DNA, 1320 bp, Trichodesmium erythraeum IMS101
  CDS (1)..(1320): transl_table=11
atgacaatgaccatggtagaaaaaatcctggccaaagcatcaggaaaatctactgttaaccctggagaaaatatttgggtgaatgttgatgtattaatgacccatgatgtttgtggtcctggtaccattggcattttcaaacgagaatttggtgaaaatgccaaagtttgggacaaagaaaaaattgtcctgataccagaccactatatttttactgccgacgaacgggcaaaccgcaacgtagatattttgcgagactttgcccaagaacaaaacatcaaatatttctacgacattattgaacggtcaaacttcaaagccaacccagactacaaaggagtttgccatgtagccctggcccaagaaggtcatactcgtccgggagaagtcctatttggtactgactcccacacttgtaacgcaggagcttttggagaatttgctacaggtatcggtaatacagatgctgcctttattgcaggtacaggcaaactattggtcaaagtgccagcaactatgcgctttatcttgaatggggaaatgcccaattatttattagcaaaagatttgatacttcaaattattggagatatttctgtatcaggtgctacttatagaacaatggaatttgctggggaaactgttggacaaatgaccatggaagaacggatgaccctatgcaatatggttattgaagcggggggtaaaaatggagttattgctcccgatgagatgacctttgaatatttgcggggtagaaccgataaaccatttgagtcattttattctgataaaaatgccgaattttatagcgatcgctcctatgatgtcacaaaattagaacctgtagtagctaaaccccattctccagataataaggaacttgcccgtaactgtcaggatgttaaaattgaccgagtttatattggttcctgtactggaggaaaaacttctgactttcttcatgcagcgaaacttattaaagatcatcaagtgaaagttccgacttatttagtaccagcaactcagaaagtttatgaggatttatttattattaaacatgatggaaaaactctctcagaaatatttttagatgctggttgtattgaacctgcagctccatcttgtgccgcttgtttaggaggaccaaaagatacatttgggcgattaaatgaaccggaaatttgtgtgtctacaactaatcgtaattttcctggtcgaatgggaaataaacaggcacaagtctatttagcttctccctatacagcagcagcttcagctttaactggatatgttactgacccaagagaatttatgtaa

SEQ ID NO: 103070 - protein, 439 aa, Trichodesmium erythraeum IMS101
MTMTMVEKILAKASGKSTVNPGENIWVNVDVLMTHDVCGPGTIGIFKREFGENAKVWDKEKIVLIPDHYIFTADERANRNVDILRDFAQEQNIKYFYDIIERSNFKANPDYKGVCHVALAQEGHTRPGEVLFGTDSHTCNAGAFGEFATGIGNTDAAFIAGTGKLLVKVPATMRFILNGEMPNYLLAKDLILQIIGDISVSGATYRTMEFAGETVGQMTMEERMTLCNMVIEAGGKNGVIAPDEMTFEYLRGRTDKPFESFYSDKNAEFYSDRSYDVTKLEPVVAKPHSPDNKELARNCQDVKIDRVYIGSCTGGKTSDFLHAAKLIKDHQVKVPTYLVPATQKVYEDLFIIKHDGKTLSEIFLDAGCIEPAAPSCAACLGGPKDTFGRLNEPEICVSTTNRNFPGRMGNKQAQVYLASPYTAAASALTGYVTDPREFM

SEQ ID NO: 103071 - DNA, 1425 bp, Shewanella sp. MR-4
  CDS (1)..(1425): transl_table=11
atgacgactccttcaacatcaaccgctccgaaaaccctgtatcaaaaagtgtgggatgctcacgttgtggccacccctgagggcgaagcgccgatcatttatgtcgacagacatttggttcacgaagtgacatcaccccaagcctttagcggcttgaaagtggcggggcgtaagttacgcgccccagaaaaaaccttcgcgaccatggatcacaacacatcaacacgcagtgccagtctcgatgccttaagccctatggcacgcactcaggtcgagaccttggcacaaaactgtaaagacttcggcgtgcgcttatatgacattcatcatcctaatcaagggattgtgcatgtgatgggacctgagcttggcattaccttacccggcactgtcatagtgtgtggtgattcccatacggcgactcacggggcctttggcgccctggctttcggtatcggcacttccgaagtggaacatgtactggcgacgcaaaccctgcgccaattaaaagccaagaccatgaaaatcgaagttcgtggtcaggtcaccgatggtgtcaccgcgaaagatatcgtactggcgattatcggtaagatcggcatggatggcggcactggctatgtagttgagttttgtggtgaggccattgaagcactgtcgatggaagggcgcatgactgtctgcaatatggcgattgaaatgggcgctaaggcgggcatggttgcgccggatcaaaccactttcgattacctagaaggtcgtgagtttgcaccaaagggcgaagattgggcagaggccgtcgccgcctggaaggcgctgaaaaccgatgttggtgctgagtttgatgcctccgtcgtgttggatgcggccgatatcgcaccgcaattgacttggggcaccaaccctggacaagtggttgccatcgatgcgccagtgcctaatcctgccgatgaggcaaatccaacgattcgcgctagcatggaaaaagcgctggattatatcggcttgaccgcaggcacgccgatgacagacgtcgcgattaataaagtctttattggttcttgcactaactcgcggattgaagatttacgcagcgcggcgaaacaggccaaagggcgtaaagtggcgtcgggcgttacggcaatcgtagtaccgggctctggccaagtgaaggcgcaggccgaggccgaaggtttagataaaatctttatcgaggccggattcgaatggcgtttaccgggctgctctatgtgtttggcgatgaacgatgacaggttagaagcgggcgatcgctgcgcctcgaccagtaatcgtaacttcgaagggcgccaaggccgtggtagtcgtactcatttagtgagtccagcgatggcggctgcggcggcaattgcagggcattttgtcgatatccgtaaaccttactaa

SEQ ID NO: 103072 - protein, 474 aa, Shewanella sp. MR-4
MTTPSTSTAPKTLYQKVWDAHVVATPEGEAPIIYVDRHLVHEVTSPQAFSGLKVAGRKLRAPEKTFATMDHNTSTRSASLDALSPMARTQVETLAQNCKDFGVRLYDIHHPNQGIVHVMGPELGITLPGTVIVCGDSHTATHGAFGALAFGIGTSEVEHVLATQTLRQLKAKTMKIEVRGQVTDGVTAKDIVLAIIGKIGMDGGTGYVVEFCGEAIEALSMEGRMTVCNMAIEMGAKAGMVAPDQTTFDYLEGREFAPKGEDWAEAVAAWKALKTDVGAEFDASVVLDAADIAPQLTWGTNPGQVVAIDAPVPNPADEANPTIRASMEKALDYIGLTAGTPMTDVAINKVFIGSCTNSRIEDLRSAAKQAKGRKVASGVTAIVVPGSGQVKAQAEAEGLDKIFIEAGFEWRLPGCSMCLAMNDDRLEAGDRCASTSNRNFEGRQGRGSRTHLVSPAMAAAAAIAGHFVDIRKPY

SEQ ID NO: 103073 - DNA, 1410 bp, Alkalilimnicola ehrlichei MLHE-1
  CDS (1)..(1410): transl_table=11
atgtctggcaagaccctttacgacaagctctgggatgcgcatgtggtccgcgagaaccccgacggttccgcgctgctgtatgtggatcgccagctgttgcacgaagtgacctcgccgcaggccttcgaggggttgcgcctggccggccgccgcccctggcgcgtggaggccaacctggcggtcaccgaccacaacgtgccgaccaccaaccgcgcccaggggatcgccgatccggtctcgcgggtgcaggtgcagaccctagacaggaactgcgaggagttcgggatcaccgagtacggcatgctcgatcgccgccagggcattgtccacgtcgtggggccggagcagggggccacccagcccggcatgacagtggtctgcggcgactcccacacctccacccacggtgccctgggcgcgctggcattcggtatcggcacctccgaagtggaacatgcgttggccacccagacggtggtgcagaagaaggccaaacgcatgctggtgcgggtggatggccagttgggtcgcggcgtcaccgccaaggacgtggtgctggccattatcggccggatcggcaccgcaggggggaccggctatgccatcgagttcggcggcgaggctatccgctcgctctcggtcgagggccgcatgaccgtctgcaatatgtccatcgaggcgggcgcccgctgcggcatggtggcggtggacgacatgaccatcgactacgtgcgcggccgcccgtttgcgccgaagggcgagcactgggaccaggccgtcgcctactggaagaccctgcacagtgacccggatgccgagttcgatcaggtggtggtgctggacgccgctgagatcgagccgcaggtcacctgggggacctccccggagatggtggtgccggtgggcggctgcgtgcctaacccgttcgaggagcaggacgaggtcaagcgcagcagcatggggcgtgccctggactacatgggcctgcagcccggcacgcccatcaaggagatccggctggaccgcgtctttatcggctcctgcaccaactcgcgcatcgaggacctgcgcgccgccgccgaagtggtccgcggtcacaaggtggcggacagcctcacccaggcgctggtggtgccgggttccggggtggtcaaggagcaggccgaaaaggagggcctggaccgggtcttcatcgaggccggtttcgagtggcgggagccgggctgctccatgtgcctggccatgaacgccgatcgcctgcaatcgggcgagcgctgtgcctccacctcgaaccgtaatttcgagggccgccaggggcagggcgggcgtacccacctggtgaacccggcgatggccgccgccgccgccatcgccggccatttcgtggatgtgcgccactggcccgagtag

SEQ ID NO: 103074 - protein, 469 aa, Alkalilimnicola ehrlichei MLHE-1
MSGKTLYDKLWDAHVVRENPDGSALLYVDRQLLHEVTSPQAFEGLRLAGRRPWRVEANLAVTDHNVPTTNRAQGIADPVSRVQVQTLDRNCEEFGITEYGMLDRRQGIVHVVGPEQGATQPGMTVVCGDSHTSTHGALGALAFGIGTSEVEHALATQTVVQKKAKRMLVRVDGQLGRGVTAKDVVLAIIGRIGTAGGTGYAIEFGGEAIRSLSVEGRMTVCNMSIEAGARCGMVAVDDMTIDYVRGRPFAPKGEHWDQAVAYWKTLHSDPDAEFDQVVVLDAAEIEPQVTWGTSPEMVVPVGGCVPNPFEEQDEVKRSSMGRALDYMGLQPGTPIKEIRLDRVFIGSCTNSRIEDLRAAAEVVRGHKVADSLTQALVVPGSGVVKEQAEKEGLDRVFIEAGFEWREPGCSMCLAMNADRLQSGERCASTSNRNFEGRQGQGGRTHLVNPAMAAAAAIAGHFVDVRHWPE

SEQ ID NO: 103075 - DNA, 1398 bp, Hyphomonas neptunium ATCC 15444
  CDS (1)..(1398): transl_table=11
atgtccgcaaagacactctacgacaagatctgggattcccatgtcgttcacaccgatgcgcagtcaggtgagagccttctttatatcgatctccacctcattcatgaggtgacgacgcctcaggcttttgcgggcctgaaagccgcaggccgcaaggtgcgccggcctgaactgacgctcgcggtcgccgatcacaacacgccgacagaaaaccaggcgctcgggctggcgggcgtgaaggatgccgaggcgcgcaaccagctcgagacgctgacccgcaatgtcgccgagtacggcatcgagttcttccagatgggcgacatcaataacggtatcgtccatgtcgtcggcccggagcaggggcgcacccagccgggcatgacgatcgtatgcggcgacagccatacctcaacccacggcgcgttcggcgcgctggcgcatggcatcggcacctctgaagtcgagcatgtgctcgccacgcagacactgcgcgcgcgcaaaatgaagaatatggcggtggaagtgtccggccgtttgcgcgacggggtcaccgccaaggatctcgcgctgcatgtcatcgccatcaccgggaccgccggtggtacgggccatgtgatcgagtatcgcggcgaagcggtccgcgcgctctccatggaagggcgcatgacgctctgcaatctctcgatcgaaggcggggcccgcgcaggtcttgttgcgccagacgatgttacgttcgagtacatgaagggccgcccgtccacgcccaagggcggcgcctgggagctggccgagaaacactggcgcacgctgtattcagacgatgatgctgtcttcgatgaggtgctgcgcatcaagggcgaagacgttgagccgaccgtcacctggggcaccagcccggaacagggcatcgcgatttccggcatcattccgaaacccgaggatttctccgacccggtcaagcgcgccgcgtgcgagcgcgctttggactatatgggccttgagggcggcaagccgatcgcgggcacgcccgttcagcgcgttttcatcggctcgtgcaccaacagccggatcgaggatctgcgcgccgccgctgaagtggccaaaggcaacaaggtggcagacggcgtgcgggccatggttgtgccgggttccggcctcgttcgggcgcaagccgaagccgaaggcctcgatcttgttctcatggaagctggctttgaatggcgcgagccaggctgctccatgtgccttggcatgaacccggatattctttcgccaggcgaacggtgcgcctccacatcaaatcgcaatttcgagggtcggcagggcaggggtgggcgtacccatctgatgagccctgctctggccgcccgtgccgccatcaatggcgtgctcggataa

SEQ ID NO: 103076 - protein, 465 aa, Hyphomonas neptunium ATCC 15444
MSAKTLYDKIWDSHVVHTDAQSGESLLYIDLHLIHEVTTPQAFAGLKAAGRKVRRPELTLAVADHNTPTENQALGLAGVKDAEARNQLETLTRNVAEYGIEFFQMGDINNGIVHVVGPEQGRTQPGMTIVCGDSHTSTHGAFGALAHGIGTSEVEHVLATQTLRARKMKNMAVEVSGRLRDGVTAKDLALHVIAITGTAGGTGHVIEYRGEAVRALSMEGRMTLCNLSIEGGARAGLVAPDDVTFEYMKGRPSTPKGGAWELAEKHWRTLYSDDDAVFDEVLRIKGEDVEPTVTWGTSPEQGIAISGIIPKPEDFSDPVKRAACERALDYMGLEGGKPIAGTPVQRVFIGSCTNSRIEDLRAAAEVAKGNKVADGVRAMVVPGSGLVRAQAEAEGLDLVLMEAGFEWREPGCSMCLGMNPDILSPGERCASTSNRNFEGRQGRGGRTHLMSPALAARAAINGVLG

SEQ ID NO: 103077 - DNA, 1392 bp, Hyphomonas neptunium ATCC 15444
  CDS (1)..(1392): transl_table=11
gtggcgaccttatttgacaagctgtgggatatgcaccgggtgggtgatgcgggcgacggggacgacctgatcgccatcgaccggctgttgctgcatgagcgcacggggggggtggcgctgaaatctctggcggcggccgggcaccgcgtgcgcgacccggcgcgcgtattctcgatcatggatcatatcgtgtcgttccggcacggacgggggcgcgatgaggcgcgcagccctggcggggaagcgttcatcgtcgaaacccgcgagatggcgcagacagcgggcattcacctgattgatacggataacccggcgcaggggattgtgcatgtcgtggcgccggagctgggcattgcgttgccggggctgacgctggtgtgccctgacagccatacgtgcagcctgggggcgctgggcgcgctggcctggggcatcggctccagcgacgccgaacatgcgatggcgaccggcacgctgcgcgcggcaaagccaagacagatgctgatccgcgtggcgggcaggcttagccccggcgtttcggcaaaggatctggcgctttatatcattgcgcggtttggctcggatggcggcaagcgctgcgcgattgaatatgcgggcgaggcgatttccgatctgagcatcgaggggcgcctgacgctgtgcaatatggcggtggagtttgccgcgtttacggcgctgattgcgccggatgccaagacgctcgactatgtcagtgggcggccgttttcgccttcaggcgcgcaggtggaaaccgccctggcgcattggcagacgctgcgcacggatgaaggcgcggagtttgacgaggtgattgaggtagacgccggcaaggtggcgccgcaggtgagctggggaacgagcccggaggatagcctcgcgctgacagacgcgctgcccgcagacgcgagcgcgcgggcgctggcctatatggggctgacggccgggcaatcggtcaaaggtcttgcgattggcggggcgtttatcggctcgtgcaccaatgggcggctgagcgatctgaaggcggcggcggaaattctcaaaggacgccgggttgcgccgggagtgcgcgcggtgtgcgtgccgggctctcaagcggtgagccgggaagcagaagcgctgggcatcgaccggatattcaaggatgccgggtttgaatggggcgcgccgggatgtgcgatgtgtttctatgcgggcggcgaaacctttccgccggagacgcgcgtgatgtcgtccaccaaccgcaattttgagggccggcaggggccgggcgtgcgcacccatctggcaagcccggctgtggtggcggcgtctgccattgcggggcgtatttgtgcgccatctgacattcttgttgaaggaggcgttgcctga

SEQ ID NO: 103078 - protein, 463 aa, Hyphomonas neptunium ATCC 15444
MATLFDKLWDMHRVGDAGDGDDLIAIDRLLLHERTGGVALKSLAAAGHRVRDPARVFSIMDHIVSFRHGRGRDEARSPGGEAFIVETREMAQTAGIHLIDTDNPAQGIVHVVAPELGIALPGLTLVCPDSHTCSLGALGALAWGIGSSDAEHAMATGTLRAAKPRQMLIRVAGRLSPGVSAKDLALYIIARFGSDGGKRCAIEYAGEAISDLSIEGRLTLCNMAVEFAAFTALIAPDAKTLDYVSGRPFSPSGAQVETALAHWQTLRTDEGAEFDEVIEVDAGKVAPQVSWGTSPEDSLALTDALPADASARALAYMGLTAGQSVKGLAIGGAFIGSCTNGRLSDLKAAAEILKGRRVAPGVRAVCVPGSQAVSREAEALGIDRIFKDAGFEWGAPGCAMCFYAGGETFPPETRVMSSTNRNFEGRQGPGVRTHLASPAVVAASAIAGRICAPSDILVEGGVA

SEQ ID NO: 103079 - DNA, 1431 bp, Hyphomonas neptunium ATCC 15444
  CDS (1)..(1431): transl_table=11
atggcagcatacaggacattgtacgacaaactggtcgacagccacacggtgcgggcgctcgatgcaggtggcggcgaagtgctgctttatgtcgatcgcaccgtgctcaacgaatataccagcccgcaggcatttaccggactgcgggacgccgggcgcgccgtgttccggccgcaatctgcgctgggcgtcatcgaccatgtgaactccacgcggcccgaacggatcgccttaccgcgcgtgcaggccgatgatctgcagatgtcttatttcgtcagcaactgcaaagaattcggcatcgaactgttcgatctctatcatcgccagcagggcattgaacatgtggtgatgcccgagctgggcctggctctgcccggtctcgtgatcgcagcgggcgacagccatacgaccacctatggcgctttcggagcgctcggatttggcattggcacatccgacatcgaacacttcctggcgacgcagacgctggtttaccggcggctgcgcaatatggagattgcggtggccggtcacctgcctccgggcgtgacggcgaaggatctcatcatggcggttatccgcaggatcggcgcagatggcgcgcagggtcatgcggtggagtttacgggcccggcgatccgcaccctgtcgatcgaagggcgaatgacgatctgcaatatggcagttgaatgtggcgcgcgcggcgcgctgattgccccggacgacaagacctttgcctatctggaaggcaaaccgcgcgcccccaagggacatgcgctgatagcggccctggaagcctggcggatgctgcgcaccgatgacggcgctgtgtttgacgcccgcattgaaatctctgccggtgacattgaaccgatggtgacctggggcacgagcccggatcaggccgcgccgatttcagaggccgttcctgaccccgcccttgaaaccagccctgcccggcgccgggatgctgagcgcgcgctgggctatatgggattgtcgcccggaacgcgcctgacggacatccggattgatcatgccttcatcggctcctgtaccaatgcccggctggaagatctgcgcggcgccgcccgcatcgtgaaagggcgcagggccgctgcaggggtgagcgccattgtcgtgcccggatcccgcgaggtccggcgcctggctgaggccgaagggctcgaccggattttccgcgaggccggctttgaatggcgcgagccgggatgctcgatgtgccttgccatgaatgacgatatcattccgccgggcgaacgctgtgcctccagcaccaaccggaactttgaaggccgccagggcgcgggcagccgtacgcatctgatgagcccggcgatggtggcggcggcggcggtttccgggcatctgtgtgatgtgcgcaccctggaggtgtctgatgccgtctga

SEQ ID NO: 103080 - protein, 476 aa, Hyphomonas neptunium ATCC 15444
MAAYRTLYDKLVDSHTVRALDAGGGEVLLYVDRTVLNEYTSPQAFTGLRDAGRAVFRPQSALGVIDHVNSTRPERIALPRVQADDLQMSYFVSNCKEFGIELFDLYHRQQGIEHVVMPELGLALPGLVIAAGDSHTTTYGAFGALGFGIGTSDIEHFLATQTLVYRRLRNMEIAVAGHLPPGVTAKDLIMAVIRRIGADGAQGHAVEFTGPAIRTLSIEGRMTICNMAVECGARGALIAPDDKTFAYLEGKPRAPKGHALIAALEAWRMLRTDDGAVFDARIEISAGDIEPMVTWGTSPDQAAPISEAVPDPALETSPARRRDAERALGYMGLSPGTRLTDIRIDHAFIGSCTNARLEDLRGAARIVKGRRAAAGVSAIVVPGSREVRRLAEAEGLDRIFREAGFEWREPGCSMCLAMNDDIIPPGERCASSTNRNFEGRQGAGSRTHLMSPAMVAAAAVSGHLCDVRTLEVSDAV

SEQ ID NO: 103081 - DNA, 1410 bp, Rhizobium leguminosarum bv. viciae 3841
  CDS (1)..(1410): transl_table=11
atgagcgcaccgcgtaccctctacgacaagatctgggacgatcatctggtcgacgaacaggcagacggcacctgtcttctctacatcgaccgccacctggtccacgaagtgacctcgccgcaggctttcgaaggcctgcgcatgaccggccgcaaggttcgcgcgccggaaaagacgctcgccgtcgtcgaccataacgttccgacctcgcccgaccgccatctcggcatcaagaacgaggaaagccgcatccaggtggaagcgctggcgaccaatgccgccgaattcggcgtcgaatattattcggcaagcgacaagcgccagggcatcgtccacatcgtcggtccggaacagggcttcaccctgcccggcatgacaatcgtctgcggcgacagccacacctcgacgcatggcgccttcggcgcgctggcgcacggcatcggcacctccgaggtcgagcatgtgctggcgacccagacactgatccagaagaaggcaaagaacatgctggtgcgggtcgacggccagcttccgccgcacgtcaccgccaaggacatcatccttgccatcatcggcgagatcggcaccgccggcggcaccggccacgtcatcgaatttgccggcgaagcgatccgcgcgctgtcgatggaaggccgcatgaccgtctgcaacatgacgatcgaaggcggcgcccgcgccggcctgatcgcccctgacgaaaaaaccttcgaatacatcaagggcaagccgcgcgcgccgaagggcgaggcgctggaacaggcaatcgcctactggaagacgctgcagaccgacgagggcgctcattacgaccgtgtcgtcgtgctcgacgccgccagcctgccgccgatcgtttcctggggctcttcgcccgaggatgtcatctccgttcagggcatcgttccgaacccggatgacattccggacgaaaccaagcgcacctccaagtggcgcgcgcttgactatatgggcctgaagccgggcacgaagatgaccgacatcacgctggaccgcgtcttcatcggctcctgcaccaacggccgcatcgaggatctgcgcgaagtcgccaaggtcgtcgaaggcaagacggttgccccaaccgtcgacgcgatgatcgtgccgggttccggcctcgtcaaggaacaggcggaagccgaaggcctcgacaagatcttcaaggccgccggtttcgactggcgcgagccgggctgctccatgtgccttgcgatgaacgacgaccgtctgaagccgggcgaacgctgcgcttcgacctcgaaccgcaacttcgaaggccgccagggcttcaagggccgcacgcacctcgtctcgccggcaatggccgccgcagccgcgatcgccgggcacttcgtcgatatccgcgagtggaactga

SEQ ID NO: 103082 - protein, 469 aa, Rhizobium leguminosarum bv. viciae 3841
MSAPRTLYDKIWDDHLVDEQADGTCLLYIDRHLVHEVTSPQAFEGLRMTGRKVRAPEKTLAVVDHNVPTSPDRHLGIKNEESRIQVEALATNAAEFGVEYYSASDKRQGIVHIVGPEQGFTLPGMTIVCGDSHTSTHGAFGALAHGIGTSEVEHVLATQTLIQKKAKNMLVRVDGQLPPHVTAKDIILAIIGEIGTAGGTGHVIEFAGEAIRALSMEGRMTVCNMTIEGGARAGLIAPDEKTFEYIKGKPRAPKGEALEQAIAYWKTLQTDEGAHYDRVVVLDAASLPPIVSWGSSPEDVISVQGIVPNPDDIPDETKRTSKWRALDYMGLKPGTKMTDITLDRVFIGSCTNGRIEDLREVAKVVEGKTVAPTVDAMIVPGSGLVKEQAEAEGLDKIFKAAGFDWREPGCSMCLAMNDDRLKPGERCASTSNRNFEGRQGFKGRTHLVSPAMAAAAAIAGHFVDIREWN

SEQ ID NO: 103083 - DNA, 1374 bp, Oenococcus oeni PSU-1
  CDS (1)..(1374): transl_table=11
atgaaaaaaacaatgttcgacaagatctggcatcaacatgtaattaccggagaacccggcgaaccacaattgatttacgttgatctgcaactacttcacgaagtcacatcgccacaggcttttgaaggattgcgggaaaaaaatcgtcaggtcagacggccggatcgaaattttgccacaatggatcacaatgttcccacggtcgatattttcaatatcaaagatttaatttccaaaaaacaaattgaaaccttagctaaaaacacaaaagacttcggaattcgtttggctggaatgggatcaaaagaccaaggaattgttcacgttattggtccgcaactgggcctaacccaaccaggaatggtaattgtttgcggagattcacatacggccactcatggagcatttggttcgatcgcttttggaatcggaaccagtgaggtcgagcatgttctcgccacacaaacgatttggcaaacaaaaccaaaaacaatcggaatccatgtccacggaaagttgtcgataggagtttatgccaaagacattatcatgggtattattgctcgtgaaggtgtctcctttggaactggttacgcagttgaattttacggagatacaattcggaatatgaacatggaagagcgaatgactctttgcaacatggtcatcgaaggcggtgccaaaatgggaagtattcagccagaccaaacaacctttgattatatcgccgatcgaaaatatgcgccgggcaatatggaaaaagcagtttcttactggaaacagttttacacggacagtccggatgcttttgataaggtaatcgatttcagtgttaacgaattggcaccttttgtcagttggggaacaaacccagggatggctgtaccaatagatcagccttttccaaaaattaaaaacgaagaagacaaaaaagcttatgaatatgtcggtttgaaagctggcgaaaaagcaaaccaaataccaattaaatttgtcttttttggttcctgtaccaatggtcgcctttccgatttgattattgctgcaaaagttctaaaaaacaaacatatcaaaaacggaattactgcattagtcgttcctggatcacgaaaaattaaagaaaaagccgaaaaaatcggcttggacaaaatattcaaagaggctggttgtgagtggcgcgaacccggttgttcggcatgcctggggatgaatcccgatagagtaccagcaggaattcattgtgcttcgacatccaaccgtaattttgccggtcgccagggagccggttcaaggactcatttagcaagtccggcaatggttgccgctgcagcaatccacggtcgtttcattgatatcagaaaggagataatttga

SEQ ID NO: 103084 - protein, 457 aa, Oenococcus oeni PSU-1
MKKTMFDKIWHQHVITGEPGEPQLIYVDLQLLHEVTSPQAFEGLREKNRQVRRPDRNFATMDHNVPTVDIFNIKDLISKKQIETLAKNTKDFGIRLAGMGSKDQGIVHVIGPQLGLTQPGMVIVCGDSHTATHGAFGSIAFGIGTSEVEHVLATQTIWQTKPKTIGIHVHGKLSIGVYAKDIIMGIIAREGVSFGTGYAVEFYGDTIRNMNMEERMTLCNMVIEGGAKMGSIQPDQTTFDYIADRKYAPGNMEKAVSYWKQFYTDSPDAFDKVIDFSVNELAPFVSWGTNPGMAVPIDQPFPKIKNEEDKKAYEYVGLKAGEKANQIPIKFVFFGSCTNGRLSDLIIAAKVLKNKHIKNGITALVVPGSRKIKEKAEKIGLDKIFKEAGCEWREPGCSACLGMNPDRVPAGIHCASTSNRNFAGRQGAGSRTHLASPAMVAAAAIHGRFIDIRKEII

SEQ ID NO: 103085 - DNA, 1377 bp, Leuconostoc mesenteroides subsp. mesenteroides ATCC 8293
  CDS (1)..(1377): transl_table=11
atgagcaaaacactatttgataaaatttgggaaaaacacgtcattactggggaaattggtgaggctcaattgatttatgtggatttgcatttggtacatgaggtgacatcacctcaaccttttgatgggttgagaagtacgaaccgtcgcgttagacgaccagatttaacttttgcaaccatggatcataatgtgccaacgaaagatatatttaatgtgcaagatcaaatgtctcgattgcagatggatacattggtcaaaaacacgaaggaatttgacatcccattagcatcaattggtgatgacaagcagggaattgtgcatgttgtggggcctgaacggggtctgacacagcctgccaaagtaatcgtctgtggtgattcccacacagcaacacatggtgcgtttggagcaatcgcctttggcattggcacttccgaagttgagcatgtgctagcgacccaaacaatttggcaagttaaaccaaaaaccatggggattaaggttactggaaaactgcctaaaaatacatacgccaaagatattatcatgggcatcattgctaaatatggggtgtcgtttggagtcggttatgcgatcgaattttacggagaaactgttgagaacctttcaatggaggctcgtatgacgatgtgtaatatgtcgattgaagctggttcaagaactggtatggtgcaaccagatcaaacgacatttgactacattgaaggtcgtgaacaagcaccaaaagattttgaatccgctaaaaactattggtcacaattctacacagatgatgaaagtgattttgatgagacgttgacctttgatgtatcaaatttgaaaccgatggtgacatggggaacaaatccaggcatggccacacctgttgatcagtctttgccagcaatcaaagatgataatgatgccaatgcctatgaatatattggcttgcatcccaatatgaagccagttgacattaatttagattacattttcatcggatcatgcacgaatagtcgttatgaagatcttgaaattgctgcgaatatgatgaaggggcatcacttggcgcctaatgtcactgcctgggtggtgcctggcagtcgtgcgataagaaatcgtgcgattaaatcgggtattgctcaaatatttgaagaagctggttgtgaatggcgtgaaccaggatgttcggcatgcttggcgatgaatcccgataaaattccagcagggaaacatgttgcttcaacatcaaatagaaatttcattggacgccaaggtgcaggatcgagaacgcatttggcttctccagctatggttgctgcagcagggattgctggtcacttcgttgatattacgacagatgaatttgtatag

SEQ ID NO: 103086 - protein, 458 aa, Leuconostoc mesenteroides subsp. mesenteroides ATCC 8293
MSKTLFDKIWEKHVITGEIGEAQLIYVDLHLVHEVTSPQPFDGLRSTNRRVRRPDLTFATMDHNVPTKDIFNVQDQMSRLQMDTLVKNTKEFDIPLASIGDDKQGIVHVVGPERGLTQPAKVIVCGDSHTATHGAFGAIAFGIGTSEVEHVLATQTIWQVKPKTMGIKVTGKLPKNTYAKDIIMGIIAKYGVSFGVGYAIEFYGETVENLSMEARMTMCNMSIEAGSRTGMVQPDQTTFDYIEGREQAPKDFESAKNYWSQFYTDDESDFDETLTFDVSNLKPMVTWGTNPGMATPVDQSLPAIKDDNDANAYEYIGLHPNMKPVDINLDYIFIGSCTNSRYEDLEIAANMMKGHHLAPNVTAWVVPGSRAIRNRAIKSGIAQIFEEAGCEWREPGCSACLAMNPDKIPAGKHVASTSNRNFIGRQGAGSRTHLASPAMVAAAGIAGHFVDITTDEFV

SEQ ID NO: 103087 - DNA, 1401 bp, Solibacter usitatus Ellin6076
  CDS (1)..(1401): transl_table=11
atgccacgtacgatcatcgaaaagctttgggattcccacgtagttcacgagcgccccggcgcgcccacgctgctctttatcgacctccacctggtacacgaagtgacgtcgccgcaggccttccagggcttgcgcgagcgcggcttgaaagtgcgccgccccgatctcaccatcgccaccgcggaccacagcattccgactacggaccgctctctgccgatcgtagacgagatcgcggccaaacagctggcgcagctcgagaccaactgcaaggatttcggcattcgctgcctcggcgttcatagcagccagcagggcatcgtgcacgtgatcgggcccgagctaggcctgacccagcccggcatgaccgtggtctgcggcgatagccacacggccacccacggcgcgttcggggcactcgccttcggaataggcaccagcgaagtggaacaggtgctggccagccagtgcctgctgcagcgcaagtcgaagaccttccaggtgaaggtggatggcgcgctgaaagccggcgtgtcggccaaggatattattctcgcgctgatcgcccggatcggcatcggcggcggcaccggcagcgtcttcgaatataccggcagcgccatccgcgcgctctccgtggaagagcgcatgacggtctgcaacatgtcgatcgagggcggcgcgcgcgccggcctgattgcgcctgacgatgccacgttcgaatatctcgcgggtcgtccgcacgcgccgaaaggcgccgcctgggacgccgctatcccgcgctggaagcagctgcccaccgatgacggcgcgacctacgatcgcagcgtctcgatcgacgccgatacgctcgagccgatgatcacctatggcaccaatcccgggatgggcgtctcgatcaatgcggcgctcccagacccatcgcaagtcagcgacccgatggcgcgcgattccatcaccaaggcgctggcgtacatgggactcgaaggcggcaagccgctggtcggccaccccatcgacgtagtcttcatcggcagctgcaccaattcgcggatcagcgatctgcgtaccgccgccggcttgctgaagggccgcaaggtcagccccaaggttcgcgtgatggtggtgccgggctcgcaggaggtcaagcgccaggccatcgccgaggggctgcccgagattttccgcgccgccggctgcgattaccgcgagcccggctgcagcatgtgcatcgcgatgaatggtgaccagctcgcgcccggcgagtacagcgtttccaccagcaatcgcaacttcgaaggacggcagggcaagggcggccgcaccttcctggccagcccgctgaccgccgccgccagcgccatcaccggcgtcgtgaccgatgtgaggactctcctatga

SEQ ID NO: 103088 - protein, 466 aa, Solibacter usitatus Ellin6076
MPRTIIEKLWDSHVVHERPGAPTLLFIDLHLVHEVTSPQAFQGLRERGLKVRRPDLTIATADHSIPTTDRSLPIVDEIAAKQLAQLETNCKDFGIRCLGVHSSQQGIVHVIGPELGLTQPGMTVVCGDSHTATHGAFGALAFGIGTSEVEQVLASQCLLQRKSKTFQVKVDGALKAGVSAKDIILALIARIGIGGGTGSVFEYTGSAIRALSVEERMTVCNMSIEGGARAGLIAPDDATFEYLAGRPHAPKGAAWDAAIPRWKQLPTDDGATYDRSVSIDADTLEPMITYGTNPGMGVSINAALPDPSQVSDPMARDSITKALAYMGLEGGKPLVGHPIDVVFIGSCTNSRISDLRTAAGLLKGRKVSPKVRVMVVPGSQEVKRQAIAEGLPEIFRAAGCDYREPGCSMCIAMNGDQLAPGEYSVSTSNRNFEGRQGKGGRTFLASPLTAAASAITGVVTDVRTLL

SEQ ID NO: 103089 - DNA, 1404 bp, Magnetococcus sp. MC-1
  CDS (1)..(1404): transl_table=11
atgagcgcccaaactctgtttgaaaaaatctggaatgcccatcttattcgtaccgatgaggatggaaccagtctcatctatattgatcgccatttggtgcacgaagtgaccagcccccaggcttttgaagggctacgcctagctggtcgcaaggtgcggcatcctgaggccacctttgcggtacccgatcataatgtgcccaccaaggatctggcgggggggattaaagatcccgtctccaagttgcaggtggatactttggcaagcaattgtcaggcgtttggcattaccgagtttggggtgggggatctgcgccaaggggtggtccatgtgatggcacctgaacagggtatctcactaccgggctttaccatggtgtgcggggattcccacaccgccactcacggcgcttttggtgctttggcgttcggcattggtacctctgaggttgagcatgtgttggcaacccaaaccctgatgcaaaaaaagcccaaaaccatgttgatccaggtagagggtgaactgcctgcgggcagtaccgccaaggatattatcctttacattatcggtaacattggtaccgcaggcggtaccggttacgtgctggagtttggcggtagcgccattcaagcgctctccatggaggggcgcatgacggtctgtaatatggccattgaggcaggggcccgggcgggcatggtagcggttgacgaaaaaaccatcgcttatgtgcagggtcgcccctacgcccccaagggggaagcctgggagaaggcggtcgcccagtggcaaacgctgaaatccgatgagggtgcgccgtttgatgcggtggtcacgctggatgcccgtaacatcgccccccaggtcacttggggcacttcgcccgagttggtagcccctgtggatggttgtgtgcccaatccgactgatgaacccaatggggtcaaacgcggggcgatggaaaaggcattggcctatatggggctgcaagcgggcacccccatgacagagattgcggtggataaggtctttattggctcttgcaccaacagccgtattgaagatttacgggcggcggcggtggctgtggcgggtaaaaaggtggctgcaagcatcaagctggcattggtggtacccggtacggggttggtcaagcagcaggccgagcaagaggggctggacaagatttttatggaggcaggttttgagtggcgcgaacccggctgttccatgtgtttggccatgaacaatgacgtgctggagcctggggagcgttgtgcttcgacctccaaccgtaattttgaagggcgccagggtaaggacagtcgtacccatctggtcagtcccgccatggcggcggcggcggccattgctgggcactttgtggatatccgtaacggctaa

SEQ ID NO: 103090 - protein, 467 aa, Magnetococcus sp. MC-1
MSAQTLFEKIWNAHLIRTDEDGTSLIYIDRHLVHEVTSPQAFEGLRLAGRKVRHPEATFAVPDHNVPTKDLAGGIKDPVSKLQVDTLASNCQAFGITEFGVGDLRQGVVHVMAPEQGISLPGFTMVCGDSHTATHGAFGALAFGIGTSEVEHVLATQTLMQKKPKTMLIQVEGELPAGSTAKDIILYIIGNIGTAGGTGYVLEFGGSAIQALSMEGRMTVCNMAIEAGARAGMVAVDEKTIAYVQGRPYAPKGEAWEKAVAQWQTLKSDEGAPFDAVVTLDARNIAPQVTWGTSPELVAPVDGCVPNPTDEPNGVKRGAMEKALAYMGLQAGTPMTEIAVDKVFIGSCTNSRIEDLRAAAVAVAGKKVAASIKLALVVPGTGLVKQQAEQEGLDKIFMEAGFEWREPGCSMCLAMNNDVLEPGERCASTSNRNFEGRQGKDSRTHLVSPAMAAAAAIAGHFVDIRNG

SEQ ID NO: 103091 - DNA, 1431 bp, Mycobacterium avium 104
  CDS (1)..(1431): transl_table=11
atgggaatcgacgcggggacgacggccacgccgcgcacgctggccgaaaaagtctgggacgaccacgttgtggtgtccggcggggccaacgagccggacctgatctacatcgatctgcacctggtgcacgaggtcaccagcccgcaggcgttcgacggcctgcggctggccggccggccggtgcggcggcccgatctgacgctggccaccgaggaccacaacgtgcccaccatcgacatcgacaagccgatcgccgacccggtgtcgcgcacccaggtcgagacattgcgccgaaattgtgccgaattcggcgtccggctgtacccgatgggcgacgcggagcagggcatcgtgcatgtcgtcgggccgcagctgggcctgacccaaccgggaatgacggtggtgtgtggggatagtcacacctcgacgcacggcgcattcggcgcactggccatgggaattggcacctcggaggtcgagcacgtgctggccacccagacgttgccgctgcggccgttcaagacgatggcggtcaacgtcgacggcgagttgccggccggcgtgacggccaaggacatcattctggcgctgatcgccaagatcggcaccggcggcgggcaggggcacgtcatcgaataccgcggcagcgccatcgaatcgctgtcgatggaaggccggatgaccgtgtgcaacatgagcatcgaggccggtgcccgggcggggatgatcgctcccgacgacaccacctacgagttcctgcgggaccgcccgcacgcccccaagggcgcgcaatgggatgcggccatgcgctattggcagcagctgcgcaccgatcccggcgcggtgttcgacaccgaggtctatctggatgccgcgtcgctgagcccgttcgtgacgtggggcacgaacccgggtcagggcgtgccgttggccgccgcggtaccggatcccgaactgatgaccgatgatgccgagcgtcaggccgccgagaaagcgttggcatacatggaccttcgaccgggcacgccgatgcgcgacatcgcggtcgacgcggtgttcgtcggctcttgtaccaacggtcgtatcgaggatctgcgggtcgtcgccgacgtgctgcgcggccgcaaggtcgcgccgggggtgcggatgctcgtggtgcccggctcgatgcgggtgcgcgcgcaggccgaagccgaagggctgggcgaggttttcaccgccgcgggcgccgaatggcggcaggcgggctgctcgatgtgtttgggaatgaatcccgatcagctggcgccgggggagcggtgcgcggcgacctcgaaccgcaacttcgaagggcgccagggcaaaggcggccgcacgcatttggtgtctccggccgtcgccgcggccacggcggtgcgcggcacattgtccgctccggccgatttggactga

SEQ ID NO: 103092 - protein, 476 aa, Mycobacterium avium 104
MGIDAGTTATPRTLAEKVWDDHVVVSGGANEPDLIYIDLHLVHEVTSPQAFDGLRLAGRPVRRPDLTLATEDHNVPTIDIDKPIADPVSRTQVETLRRNCAEFGVRLYPMGDAEQGIVHVVGPQLGLTQPGMTVVCGDSHTSTHGAFGALAMGIGTSEVEHVLATQTLPLRPFKTMAVNVDGELPAGVTAKDIILALIAKIGTGGGQGHVIEYRGSAIESLSMEGRMTVCNMSIEAGARAGMIAPDDTTYEFLRDRPHAPKGAQWDAAMRYWQQLRTDPGAVFDTEVYLDAASLSPFVTWGTNPGQGVPLAAAVPDPELMTDDAERQAAEKALAYMDLRPGTPMRDIAVDAVFVGSCTNGRIEDLRVVADVLRGRKVAPGVRMLVVPGSMRVRAQAEAEGLGEVFTAAGAEWRQAGCSMCLGMNPDQLAPGERCAATSNRNFEGRQGKGGRTHLVSPAVAAATAVRGTLSAPADLD

SEQ ID NO: 103093 - DNA, 1455 bp, Mycobacterium smegmatis str. MC2 155
  CDS (1)..(1455): transl_table=11
atggatcaaccgacgcagacatccgtgaaaccgcgcaccctggccgaaaaggtctgggacgaccacgtcgtggcgcgtggcgagggagagggcaccgccaaagagcccgatctgatctacatcgacctccatctcgtccacgaggtcaccagcccgcaggccttcgacgggctgcggctggccggacgtcccgtgcggcggcccgatctgacgatcgccaccgaggaccacaacgtgccgaccatcgacatcgacaagccgatcgccgacccggtttcgcgcacccaggtcgagacattgcggcgcaactgcgaggaattcggcatccgcctgcatcccatgggcgacgccgaacagggcatcgttcacatcatcggcccgcagctgggcctcacccagcccgggatgaccgtggtgtgcggtgactcgcacacgtcgacccacggcgccttcggtgccatcgcgatgggcatcggcacctccgaggtcgagcacgtgatggccacgcagacgctgtcgctcaagcccttcaagaccatggcggtcaacgtcgacggcgaactgccgcccggcgtgagcgccaaggacatcatcctggcggtgatcgccaagatcggcaccggcggtgggcagggacacgtcatcgagtaccgcggcagcgccatccgctcgctgtccatggagggccggatgacgatctgcaacatgagcatcgaggccggcgcccgcgcgggcatggtcgcgcccgacgagaccacgttcgagttcctcaagggtcgtccgcacgcgcccaagggcgccgactgggacgccgccgtcgccgcgtggagccggttgcgcaccgacgagggcgccgaattcgacaccgaggtctacatcgacgcctccacgctgagcccgttcgtgacctggggcaccaaccccggccagggcgttccgctgtcggaggccgtgcccgaccccgagctgatcgtcgacgagggcgcccgtcaggccgcggaaaaggctttggcctacatggaccttcgcccgggtaccccgatgcgcgacatcgccgtggacacggtgttcgtgggctcgtgcaccaacggccggatcgaggatctgcgcgtggtggccgacgtgctgcgcggccggaaggttgccgacggcgtgcggatgctcatcgtcccgggttcgatgcgggtgcgcgcacaggccgaatcggaaggcctcgaccagatattcaccgcagccggggcccaatggcgccaggccgggtgctcgatgtgcctcgggatgaaccccgatcagctctccccgggggagcgctgcgcgtcgacgtccaaccgcaacttcgagggtcgccagggcaagggcggccgcacccacctggtgtcgcctgctgtcgccgcagccaccgccgtgcgcggaaagctcgcgtcccctgcagatctacccgccgcggcccgctag

SEQ ID NO: 103094 - protein, 484 aa, Mycobacterium smegmatis str. MC2 155
MDQPTQTSVKPRTLAEKVWDDHVVARGEGEGTAKEPDLIYIDLHLVHEVTSPQAFDGLRLAGRPVRRPDLTIATEDHNVPTIDIDKPIADPVSRTQVETLRRNCEEFGIRLHPMGDAEQGIVHIIGPQLGLTQPGMTVVCGDSHTSTHGAFGAIAMGIGTSEVEHVMATQTLSLKPFKTMAVNVDGELPPGVSAKDIILAVIAKIGTGGGQGHVIEYRGSAIRSLSMEGRMTICNMSIEAGARAGMVAPDETTFEFLKGRPHAPKGADWDAAVAAWSRLRTDEGAEFDTEVYIDASTLSPFVTWGTNPGQGVPLSEAVPDPELIVDEGARQAAEKALAYMDLRPGTPMRDIAVDTVFVGSCTNGRIEDLRVVADVLRGRKVADGVRMLIVPGSMRVRAQAESEGLDQIFTAAGAQWRQAGCSMCLGMNPDQLSPGERCASTSNRNFEGRQGKGGRTHLVSPAVAAATAVRGKLASPADLPAAAR

SEQ ID NO: 103095 - DNA, 1416 bp, Nocardioides sp. JS614
  CDS (1)..(1416): transl_table=11
atgggcaggaccttggccgagaaggtctgggacgagcatgtcgtccggtcgacaccgggggagccggacctcctctacatcgacctgcacctgatccacgaggtcacctccccgcaggccttcgacggcctccggctcgccggccgcaccgtgcgtcgcccggacctcacgctggccaccgaggaccacaacgtccccaccctcgactgggacaagcccatcgccgacccggtctcgaagacccaggtcgacacgctgcgccgcaacgccgcggagttcggagtccggctgcaccccctcggcgacgtcgagcagggcatcgtgcacgtcgtcggcccgcagctcgggctgacccagcccgggatgacgatcgtgtgcggcgacagccacaccagcacgcacggagcattcggcgcgatcgcgttcgggatcggcacctcggaggtcgagcacgtcctcgccacgcagacgctgccgcaggccaagccgaagacgatggccgtcacggtcgagggcagcctgcccgacggcgtgaccgcgaaggacctggtgctgaccctgatcgcccacacgggcaccggtggcgggcagggctacatcgtcgagtaccgcggcccggccatcgaggagctctcgatggagggccggatgaccgtctgcaacatgtccatcgagtggggggccaaggccggcctgatcgcccccgaccagacgacgttcgactacatcgagggccggccggaggcgccgaagggcgccgactgggacgccgccgttgcgcactggaagacgctggtcaccgacgcggacgcgacgttcgacaaggagatcgtgctcgacgcgagcacgatgacgccgttcgtcacctggggcaccaatcccggccagggcgtgccgctcgggggcagcgttccggacccggcgcagtacgacgacccctcggaccggatcgccgctgagaaggcatgcgagtacatgggcctcgaggccggcacgccgatgcgcgacatcaaggtcgacaccgtcttcatcggctcgtgcaccaacggccggatcgaggacctgcgcgcggccgcggagatcatcaagggccgccaggtcgacaagtccacccggctgctcgtcgtaccgggctcggtgcgcgtgcgtctccaggcccaggacgagggcctcgacgtgatcttcaaggaggccggcggcgagtggcgcggcgcgggctgctcgatgtgcctgggcatgaaccccgacaccctgcagcccggtgagcgcagcgcctcgacgtccaaccgcaacttcgagggccgccagggcaagggcggccgcacccacctcgtgtcggtgccggtcgccgccgcgaccgcgatccgcggcaccctgtcctcgcccgccgacctcgagcccgttgggagcaactga

SEQ ID NO: 103096 - protein, 471 aa, Nocardioides sp. JS614
MGRTLAEKVWDEHVVRSTPGEPDLLYIDLHLIHEVTSPQAFDGLRLAGRTVRRPDLTLATEDHNVPTLDWDKPIADPVSKTQVDTLRRNAAEFGVRLHPLGDVEQGIVHVVGPQLGLTQPGMTIVCGDSHTSTHGAFGAIAFGIGTSEVEHVLATQTLPQAKPKTMAVTVEGSLPDGVTAKDLVLTLIAHTGTGGGQGYIVEYRGPAIEELSMEGRMTVCNMSIEWGAKAGLIAPDQTTFDYIEGRPEAPKGADWDAAVAHWKTLVTDADATFDKEIVLDASTMTPFVTWGTNPGQGVPLGGSVPDPAQYDDPSDRIAAEKACEYMGLEAGTPMRDIKVDTVFIGSCTNGRIEDLRAAAEIIKGRQVDKSTRLLVVPGSVRVRLQAQDEGLDVIFKEAGGEWRGAGCSMCLGMNPDTLQPGERSASTSNRNFEGRQGKGGRTHLVSVPVAAATAIRGTLSSPADLEPVGSN

SEQ ID NO: 103097 - DNA, 1410 bp, Azoarcus sp. BH72
  CDS (1)..(1410): transl_table=11
atggaagcccaaacgctgtacgaaaagctctggtcgagtcatgtcgttcaccaggaggccgacggcacggcgctgatctacatcgatcgccacctcgtccacgaagtcaccagcccgcaggccttcgaagggctgaagctggccggccgcaagccgtggcgcatctcgtccatcgtcgccaccgccgaccacaacatccccactgaccactgggagatgggtatccaggacccggtgtcgcgccagcaggtcgaaaccctggacgccaacatccgtgaagtgggctcgctggcctatttcccgttcaaggaccagcggcagggcatcatccatgtgatcgggccggaaaacggcaccacgctgccgggcatgaccgtggtctgtggtgactcgcacacttcgacgcacggcgccttcgcctgtctggcgcacggcatcggcacctccgaggtcgagcacgtgatggcgacccagtgcctgctgcagaagaagtccaagaccatgctgatcaaggtcgaaggcacgctcggccgcggcgtcaccgccaaggacgtcgtgctcgccatcatcggccggatcggcaccgccggcggtaccggctacgccatcgagttcggcggcagcgcgatccgctcgctgtccatggaaggccgcatgacggtctgcaacatggcgatcgaggccggcgcgcgcgccggtctggtggcggtggacgaaaccaccatcgactacctcaaggacaagcctttcgcgcccaaggggccgcagtgggatgccgcggtggcgtactggcgcacgttgaagtccgacgacggcgccaccttcgacaccgtggtggaactggatgccacctcgatcctgccgcaggtcacctggggcacctcgcccgagatggtgaccacggtggacgggcgggtgccggatccggccgcgatcgccgatccggtcaagcgcgaaggcgtcgagcgcgcgctcaagtacatggggctggcgccgaatacgccgatcagcgagatcgcggtcgaccaggtcttcatcggttcgtgcaccaactcgcgcatcgaggacctgcgcgaggccgccgcggtcgtcaagggacgcagcaaggccgcttctgtgcgccgcgtgctggtggtgccggggtccggtctggtcaagcaccaggcggaagccgagggtctggacaaggtgttcatcgaggcgggtttcgaatggcgggagccgggctgttcgatgtgtctggcgatgaacgccgaccgcctcgagccgggcgagcgttgcgcgtccacctccaaccgcaatttcgaaggccgtcagggcgctggcgggcgcacccatctggtgagcccggcgatggctgcggccgcggccgtcaccggacatttcaccgacgtgcgcaccctgaactga

SEQ ID NO: 103098 - protein, 469 aa, Azoarcus sp. BH72
MEAQTLYEKLWSSHVVHQEADGTALIYIDRHLVHEVTSPQAFEGLKLAGRKPWRISSIVATADHNIPTDHWEMGIQDPVSRQQVETLDANIREVGSLAYFPFKDQRQGIIHVIGPENGTTLPGMTVVCGDSHTSTHGAFACLAHGIGTSEVEHVMATQCLLQKKSKTMLIKVEGTLGRGVTAKDVVLAIIGRIGTAGGTGYAIEFGGSAIRSLSMEGRMTVCNMAIEAGARAGLVAVDETTIDYLKDKPFAPKGPQWDAAVAYWRTLKSDDGATFDTVVELDATSILPQVTWGTSPEMVTTVDGRVPDPAAIADPVKREGVERALKYMGLAPNTPISEIAVDQVFIGSCTNSRIEDLREAAAVVKGRSKAASVRRVLVVPGSGLVKHQAEAEGLDKVFIEAGFEWREPGCSMCLAMNADRLEPGERCASTSNRNFEGRQGAGGRTHLVSPAMAAAAAVTGHFTDVRTLN

SEQ ID NO: 103099 - DNA, 1410 bp, Neisseria meningitidis FAM18
  CDS (1)..(1410): transl_table=11
atgacagcacaaaccctctacgacaaactttggaacagccacgtcgtccgcgaagaagaagacggcaccgtcctgctctacatcgaccgccatttggtgcacgaagttaccagccctcaggcatttgaaggcttgaaaatggcggggcgcaagctgtggcgcatcgacagcgtcgtctccaccgccgaccacaacaccccgaccggcgattgggacaaaggcatccaagacccgatttccaagctgcaagtcgatactttggacaaaaacattaaagagtttggcgcactcgcctattttccgtttatggacaaaggtcagggcatcgtacacgttatgggccccgaacaaggcgcgaccctgcccggtatgaccgtcgtctgcggcgactcgcacacttccacccacggcgcattcggcgcactggcgcacggcatcggcacttccgaagtcgagcacacgatggcgacccagtgcattaccgcgaaaaaatccaaatccatgctgattgccgttgacggcaaattaaaagcgggcgttaccgccaaagacgtggcactttacatcatcgggcaaatcggcacggcgggcggtacaggctacgccgtcgagtttggcggcgaagccatccgcagcctttctatggaaggccgcatgactttatgcaatatggcgatcgaagccggtgcgcgctcaggcatggttgccgtcgaccaaaccaccatcgactatgtaaaagataaacccttcgcacccgaaggcgaagcgtgggacaaagccgtcgagtactggcgcacgctggtgtctgacgaaggtgcggtattcgacaaagaataccgtttcaacgccgaagacatcgaaccgcaagtcacttggggtacctcgcctgaaatggttttagacatcagcagcaaagtgccgaatcctgccgaagaaaccgatccggtcaaacgcagcggtatggaacgggcccttgaatacatgggcttggaagccggtacgccattaaacgaaatccccgtcgacatcgtattcatcggctcttgcaccaacagccgcatcgaagacttgcgcgaagccgccgccatcgccaaagaccgcaaaaaagccgccaacgtacagcgcgtgttaatcgtccccggctccggtttggttaaagaacaagccgaaaaagaaggcttggacaaaattttcattgaagccggttttgaatggcgcgaaccgggctgttcaatgtgtctcgccatgaacgccgaccgcctgaccccggggcaacgctgcgcctccacctccaaccgcaattttgaaggccgtcaaggcaacggcggacgtacccacctcgtcagccccgctatggcagccgccgccgccgttaccggccgctttaccgacatccgcatgatggcgtaa

SEQ ID NO: 103100 - protein, 469 aa, Neisseria meningitidis FAM18
MTAQTLYDKLWNSHVVREEEDGTVLLYIDRHLVHEVTSPQAFEGLKMAGRKLWRIDSVVSTADHNTPTGDWDKGIQDPISKLQVDTLDKNIKEFGALAYFPFMDKGQGIVHVMGPEQGATLPGMTVVCGDSHTSTHGAFGALAHGIGTSEVEHTMATQCITAKKSKSMLIAVDGKLKAGVTAKDVALYIIGQIGTAGGTGYAVEFGGEAIRSLSMEGRMTLCNMAIEAGARSGMVAVDQTTIDYVKDKPFAPEGEAWDKAVEYWRTLVSDEGAVFDKEYRFNAEDIEPQVTWGTSPEMVLDISSKVPNPAEETDPVKRSGMERALEYMGLEAGTPLNEIPVDIVFIGSCTNSRIEDLREAAAIAKDRKKAANVQRVLIVPGSGLVKEQAEKEGLDKIFIEAGFEWREPGCSMCLAMNADRLTPGQRCASTSNRNFEGRQGNGGRTHLVSPAMAAAAAVTGRFTDIRMMA

SEQ ID NO: 103101 - DNA, 1422 bp, Acidovorax sp. JS42
  CDS (1)..(1422): transl_table=11
atgggacgcaccctgtacgacaagatcttcgacgagcacgtcgtccacacggaagaggacggcaccgccgtgctctacatcgaccgccacctggtgcatgaggtgaccagcccgcaggccttcgaaggcctgcgcgaggcgggccgcaaggtctggcgcgtgagctccatcgtggccacggccgaccacaacacccccaccaccgggtgggagcgcggctacgacggcattgccgacccgatcagcaaggagcagatcgtcacgctggacaagaacatccaggagtccggtgcggcggcgttcttcccgttcctgtccaagcgccagggcatcgtgcacgtgatcggccccgagaacggcgccaccctcccgggcatgaccgtggtctgcggcgacagccacaccagcacccacggcgcgttcggcgcgctggcccacggcatcggcaccagcgaggtggagcacgtgatggccacgcagaccctgctggccaagaaggccaagaacatgctggtcaaagtgaatggcaaggtcgcccctggcatcacggccaaggacatcgtgctggccatcatcggcaagatcggcaccgccggcggcacgggttacacgattgaatttgccggtgaagccatccgcgacctgagcatggaaggccgcatgaccgtgtgcaacatggccatcgaagccggcgcccgcgcgggcctggtggcagtggacgacaagacgatcaactacgtgaagggccgcccgctcgcacccacgggcgtggagtgggaccaggccgtggcgtactggaagacgctgcactcggacgcggacgccaagttcgacgcggtggtggagttgaacgccgccgagatcgtgccgcaggtcacctggggcaccagccccgagatggtgctgggcatcgacgccgtggtgcccgacccggacaaggagaaggacccgtccaagcgcggcgccatcgagcgtgcgctgacctacatgggtctgcagcccggcaagccgatggatgacatcttcgtggacaaggtgttcatcggctcgtgcaccaacagccgcatcgaggacatgcgcgaagccgccgccgtggtgaagaagctcggccagaaggtcgccaagaacatcaagctggccatggtggtacctggctcgggcctggtgaaggaacaggccgaacgcgaggggctggatgcgattttcaaggccgcgggctttgaatggcgcgagcccggttgctccatgtgcctggccatgaatgccgaccgcctggagcccggcgagcgctgcgcttccacgtccaaccgcaacttcgaaggccgccagggcgcgggcgggcgcacgcacctcgtgagccccgccatggccgcggccgccgccatccacggccacttcgtggacatccgccaattcgcctga

SEQ ID NO: 103102 - protein, 473 aa, Acidovorax sp. JS42
MGRTLYDKIFDEHVVHTEEDGTAVLYIDRHLVHEVTSPQAFEGLREAGRKVWRVSSIVATADHNTPTTGWERGYDGIADPISKEQIVTLDKNIQESGAAAFFPFLSKRQGIVHVIGPENGATLPGMTVVCGDSHTSTHGAFGALAHGIGTSEVEHVMATQTLLAKKAKNMLVKVNGKVAPGITAKDIVLAIIGKIGTAGGTGYTIEFAGEAIRDLSMEGRMTVCNMAIEAGARAGLVAVDDKTINYVKGRPLAPTGVEWDQAVAYWKTLHSDADAKFDAVVELNAAEIVPQVTWGTSPEMVLGIDAVVPDPDKEKDPSKRGAIERALTYMGLQPGKPMDDIFVDKVFIGSCTNSRIEDMREAAAVVKKLGQKVAKNIKLAMVVPGSGLVKEQAEREGLDAIFKAAGFEWREPGCSMCLAMNADRLEPGERCASTSNRNFEGRQGAGGRTHLVSPAMAAAAAIHGHFVDIRQFA

SEQ ID NO: 103103 - DNA, 1404 bp, Nostoc punctiforme PCC 73102
  CDS (1)..(1404): transl_table=11
atgagcaaaggtaccctgtttgataaagtttgggacttacacaccgttggtacacttccctctgggctgacgcaactatttattgggcttcacctaattcatgaagtcaccagtccccaggcctttgctatgttacgcgagaggggtctaaaagtactgtttccagagcggactgtcgccacagtcgatcatattgtgccgacagaaaaccaggcacgtccttttgttgatagtttggcagaagagatgattcaggcgctcgaaaataactgccaagaaaataacataactttttacaacatcggttctggtagtcagggtatagttcatgtcatcgctccagaactcggactgactcaaccaggaatgacgatcgcttgtggagatagccacacttcgagtcatggggcatttggtgcgatcgcatttggtatcggtactagccaagtgcgggatgttctcgcttcccaaactctcgccctttccaaactgaaagtccgcaaaattgaagttaacggcaacctgaacccaggagtttacgccaaagatgtcatcctgcatatcatccgcacccttggcgttaaaggtggtgtgggctatggctacgaatttgcaggtacgacatttgaacaaatgaatatggaagagaggatgactgtctgcaatatggcgatcgaaggcggtgctagatgcggctatgtcaatccagatcgagtcacctacgattacctcaaaggcagagattttgcgcccaaaggagcagattgggataaagcagtggcttggtgggattccatcaagagcgatgttgatgcccagtacgatgatgtagtcgtattcgacgctgcggaaatttctcctactgttacctgggggattactcccggtcaaggtatcggtgtcaaccagtcagtgcctcaaccagaagaactgcttgaagaagaccgatttattgccgaagaagcttaccgctacatggatttatatcctggtcaacccattaagggtaccaaaatagatgtctgctttattggtagttgcaccaacggcagaattagtgatttacgggaagcggcgaaaatcgccaaaggccgccatgttgcagagggaatcaaagcctttgttgtccctggttctgaaagggtgaagcaagaggcggaaactgaaggactggataaaatctttcaggaagctggatttgaatggcgtgaaccgggatgttctatgtgcctagctatgaaccccgataagctacaaggaagacaaatcagtgcctcctcgtctaaccgcaactttaaaggaaggcagggttcatcctccggtcgaacattgttaatgagtccggcaatggttgccactgctgcaattaaaggcgaagtctctgatgtgcgcgagttgctgtaa

SEQ ID NO: 103104 - protein, 467 aa, Nostoc punctiforme PCC 73102
MSKGTLFDKVWDLHTVGTLPSGLTQLFIGLHLIHEVTSPQAFAMLRERGLKVLFPERTVATVDHIVPTENQARPFVDSLAEEMIQALENNCQENNITFYNIGSGSQGIVHVIAPELGLTQPGMTIACGDSHTSSHGAFGAIAFGIGTSQVRDVLASQTLALSKLKVRKIEVNGNLNPGVYAKDVILHIIRTLGVKGGVGYGYEFAGTTFEQMNMEERMTVCNMAIEGGARCGYVNPDRVTYDYLKGRDFAPKGADWDKAVAWWDSIKSDVDAQYDDVVVFDAAEISPTVTWGITPGQGIGVNQSVPQPEELLEEDRFIAEEAYRYMDLYPGQPIKGTKIDVCFIGSCTNGRISDLREAAKIAKGRHVAEGIKAFVVPGSERVKQEAETEGLDKIFQEAGFEWREPGCSMCLAMNPDKLQGRQISASSSNRNFKGRQGSSSGRTLLMSPAMVATAAIKGEVSDVRELL

SEQ ID NO: 103105 - DNA, 1470 bp, Actinobacillus pleuropneumoniae serovar 1 str. 4074
  CDS (1)..(1470): transl_table=11
ttgcaaatttcaccgcctattatatgcattcacaatatcctttcagagttgaacaatattatggcaaaaacattatacgaaaaactatttgatgcccacgttgtatatgaagccgccggcgaaacgccgattctttatatcaaccgccatttaattcatgaagtgacaagcccgcaagcgtttgacggtttacgtgtcgccggtcgtcaagtacgccaaatcggtaaaacgttcggtacaatggatcacagcatctcaacccaagtgcgtgacgtcaataaattagaaggtcaggcgaaaatccaagttttagaattagcgaaaaactgtgaagcgaacgggatttcgttattcgatatgcaaaccaaagaacaaggtatcgtacacgttatggggccggagcaaggtttaaccctaccgggtatgacgattgtctgcggtgactcacacaccgcaacacacggtgctttcggtgcgcttgcgtttggtatcggtacatcggaagtggaacacgtgcttgcaacgcaaaccttaaaacaagcgcgtgcgaaaagtatgaaagtggaagttcgcggcaaagtgaacccgggcattaccgccaaagatatcgtgctggcaatcatcggtaaaacaactatggcgggcggtaccggtcatgtggtggaattctgcggtgaagcgattcgtaatttatcgatggaaggccgtatgacggtatgtaatatggcgatcgaattcggcgctaaagccggtttagtcgcaccggacgaaaccaccttcgcttacttaaaagatcgtccgcacgcaccgaaaggcaaagattgggacgatgcggtcgaatattggacaaccttaaaatcagacgatgatgcggtctttgattcagtcgttgtattagaagcgaaagatattgcgccgcaagtcacttggggaaccaatccgggacaagtcatcggtattgaccaagtggtaccgaatccacaagaaatggcggatccggtcactaaagcttcagcggaaaaagcgctcgcatatatcggcttagatgcgaataccgatatgaaaaacatccctgtggatcaagtatttatcggctcttgtactaactctcgtattgaagacttacgtgcggcggcggcagtaatgaaaggtcgtaaaaaagcggataacgtaaaacgtgtgctagttgtaccgggttcgggtttggtaaaagaacaggcggaaaaagaaggcttagataagatctttatcgaggctggcgcagaatggcgtaatccgggctgttcaatgtgtttaggtatgaatgatgaccgtttaggcgaatgggaacgttgtgcttcaacctctaaccgtaactttgaaggtcgccaaggtcgtaacgttcgtacccacttggttagcccggcaatggcggcagcggcggcaatgttcggtaaatttgtcgatattcgtcacgtggaattaaattaa

SEQ ID NO: 103106 - protein, 489 aa, Actinobacillus pleuropneumoniae serovar 1 str. 4074
MQISPPIICIHNILSELNNIMAKTLYEKLFDAHVVYEAAGETPILYINRHLIHEVTSPQAFDGLRVAGRQVRQIGKTFGTMDHSISTQVRDVNKLEGQAKIQVLELAKNCEANGISLFDMQTKEQGIVHVMGPEQGLTLPGMTIVCGDSHTATHGAFGALAFGIGTSEVEHVLATQTLKQARAKSMKVEVRGKVNPGITAKDIVLAIIGKTTMAGGTGHVVEFCGEAIRNLSMEGRMTVCNMAIEFGAKAGLVAPDETTFAYLKDRPHAPKGKDWDDAVEYWTTLKSDDDAVFDSVVVLEAKDIAPQVTWGTNPGQVIGIDQVVPNPQEMADPVTKASAEKALAYIGLDANTDMKNIPVDQVFIGSCTNSRIEDLRAAAAVMKGRKKADNVKRVLVVPGSGLVKEQAEKEGLDKIFIEAGAEWRNPGCSMCLGMNDDRLGEWERCASTSNRNFEGRQGRNVRTHLVSPAMAAAAAMFGKFVDIRHVELN

SEQ ID NO: 103107 - DNA, 1410 bp, Haemophilus influenzae R2846
  CDS (1)..(1410): transl_table=11
atggtaaaaacactttacgaaaaattatttgattcacacattgtgtatgaagcagagggcgaaacgccaattttgtatattaaccgtcatttgattcacgaagtaactagtccgcaggcttttgatgggttacgcgtcgcaaatcgccaagtacgccaagtaaacaaaacttttggcacaatggatcacagcatttctactcaagtacgagatgtcaataaacttgaaggtcaggctaaaattcaagtgttagaactggataaaaataccaaagcaacaggcattaaattatttgatataacaaccaaagagcaaggtattgtacacgttatggggccagaacaaggtttaaccttaccgggtatgacaattgtttgtggcgattcacacaccgcaacgcacggtgcatttggtgccttggcttttggtattggtacttctgaagtagagcacgtattagccactcaaactttaaaacaggctcgcgcaaaaagtatgaaaattgaagtgcgtggtaaagtcgcatcaggtattacggcaaaagatattattcttgccattatcggcaaaactacgatggcaggcggtacaggacacgttgtggaattttgtggcgaagcgatccaagacctttctatggaggggcgtatgaccgtctgtaatatggcaattgaaatgggtgcaaaagcaggcttgattgcgccagatgaaaccacatttgcatatttgaaagatcgtccacacgcgccgaaaggcaaagattgggatgatgccgtagcttattggaaaaccttaaaatctgacgatgatgcacaatttgacactgtggtaacgctagaagcaaaagacatcgcaccacaagtcacttgggggacaaacccagggcaggtaatttctgtgaatgaaactataccaaatccgcaagaaatggcagatcctgtacaacgtgcttcggcagaaaaagccttacattatattggcttggaagctggcactaatttaaaagaggttaaagttgatcaagtgtttattggatcttgcaccaactcacgtattgaagatttacgcgcagcagcggcagtgatgaaaggtcgtaaaaaagcggataacgtaaaacgtattttagtggtaccaggttctggcttagtgaaagaacaagcggaaaaagagggcttggataaaatctttattgccgcaggtgcagaatggcgtaatccaggttgttcaatgtgcttaggaatgaacgacgaccgtttaggcgaatgggaacgctgcgcttcaacgtcaaaccgtaactttgaggggcgtcaaggtcgtaatggacgtacccatttagtaagtcctgcaatggcagcggcggcaggaatgttcggtaaatttgttgatattcgtgaagtggcattaaattaa

SEQ ID NO: 103108 - protein, 469 aa, Haemophilus influenzae R2846
MVKTLYEKLFDSHIVYEAEGETPILYINRHLIHEVTSPQAFDGLRVANRQVRQVNKTFGTMDHSISTQVRDVNKLEGQAKIQVLELDKNTKATGIKLFDITTKEQGIVHVMGPEQGLTLPGMTIVCGDSHTATHGAFGALAFGIGTSEVEHVLATQTLKQARAKSMKIEVRGKVASGITAKDIILAIIGKTTMAGGTGHVVEFCGEAIQDLSMEGRMTVCNMAIEMGAKAGLIAPDETTFAYLKDRPHAPKGKDWDDAVAYWKTLKSDDDAQFDTVVTLEAKDIAPQVTWGTNPGQVISVNETIPNPQEMADPVQRASAEKALHYIGLEAGTNLKEVKVDQVFIGSCTNSRIEDLRAAAAVMKGRKKADNVKRILVVPGSGLVKEQAEKEGLDKIFIAAGAEWRNPGCSMCLGMNDDRLGEWERCASTSNRNFEGRQGRNGRTHLVSPAMAAAAGMFGKFVDIREVALN

SEQ ID NO: 103109 - DNA, 1395 bp, Bacillus cereus G9241
  CDS (1)..(1395): transl_table=11
atggggaaaaggttgctagataagctttgggaaaaacacgtagttgcgacaaatgaaaatggattagatttattatatatcgatctgcaccttgttcatgaagtaacgtcaccgcaagcctttgaaggcttgcggcttacaaatcgaaaggtacgcagaccagatctaacattcgcaacgatggatcataatattccaacaaaagatgtttggaatattactgatcgcattgcgaagcagcaactagatacacttcgggaaaattgtaaacaatttcaggtgccgttagcggatattggagatgaagagcaggggatcgttcatgttatagggccagaacttgggctcacgcagccaggaaaaacaattgtttgtggtgatagtcatacagcgacgcacggtgcgtttggtgcgctagcgtttggtattggtacgagtgaagtggaacatgtattggcaacgcaaacgctgtggcaaagaaaaccgaaagcgatgggaattgaactaaaaggaaaattacagaaaggtgtttacgcaaaagatattattttgcatctcctttcaaagtacggtgtagcagttggaactggatacgtaatggaattttacggagagacgattcaggctatggagatggaagagagaatgacgctttgtaatatggcgattgaaggaggagcaaaagcgggtattatcgcgccagatgaaaaaacagttgcttatgtaaaaggacgtaaatatgcaccgagagactatgaaactttcgagaagaaatggtctgaactttatacagatgcagatgcaatttatgatttacatatttcgatagatgttacagatttagcgccatacgttacgtggggaacaaatccgagtatgggagttcgtattgatgagaaattgccagaaaaacatgatgtaaatgacgaaagagcattttcttatatgggattaagccctggacaaagtacgtatgatattccagttcagcatgtcttcattggatcttgtacaaattccaggctctctgatttagaaattgctgcagctgttgtgaaagggagaaaggtaaaagaaggtgtgcgagcactcgttgtgcccggatcgaaaagagtaagggacgcggcgatgcaaaaaggactacatcacatatttgaagaagcgggatttgaatggagagaacctggatgttccatgtgtcttggaatgaatccagatcaagtacctgaaggagagcattgcgcttcaacttcaaatcgtaattttgaagggagacaaggaaaaggagcacgaacgcatttagttagcccagcaatggcggcagcagctgcgttatatggtcattttgttgatactagaaaggagagttatgatggagccatttcgtattcataa

SEQ ID NO: 103110 - protein, 464 aa, Bacillus cereus G9241
MGKRLLDKLWEKHVVATNENGLDLLYIDLHLVHEVTSPQAFEGLRLTNRKVRRPDLTFATMDHNIPTKDVWNITDRIAKQQLDTLRENCKQFQVPLADIGDEEQGIVHVIGPELGLTQPGKTIVCGDSHTATHGAFGALAFGIGTSEVEHVLATQTLWQRKPKAMGIELKGKLQKGVYAKDIILHLLSKYGVAVGTGYVMEFYGETIQAMEMEERMTLCNMAIEGGAKAGIIAPDEKTVAYVKGRKYAPRDYETFEKKWSELYTDADAIYDLHISIDVTDLAPYVTWGTNPSMGVRIDEKLPEKHDVNDERAFSYMGLSPGQSTYDIPVQHVFIGSCTNSRLSDLEIAAAVVKGRKVKEGVRALVVPGSKRVRDAAMQKGLHHIFEEAGFEWREPGCSMCLGMNPDQVPEGEHCASTSNRNFEGRQGKGARTHLVSPAMAAAAALYGHFVDTRKESYDGAISYS

SEQ ID NO: 103111 - DNA, 1404 bp, Crocosphaera watsonii WH 8501
  CDS (1)..(1404): transl_table=11
atgagcaaaggaacactcttcgataaagtttgggatacccataccgttcaaatattaccttcaggacaaacccaactcttcatcggactgcatttgatccatgaagtcaccagtccccaagcgtttgctatgttacgggaaagaggactcaaagtaatgtatcccgatcgcactgtggccacggtagatcatatcgtacccacggaaaaccaagcccgtccttttgttgataccctagcagaagagatgatacaagcactggaaaatagtaccaaagacaacggtattcgtttctataatatcggttcaggtagtcaaggggttgtccatgtcatcgccccggaacaaggactcacccaacccggaatgaccattgcttgcggtgactcccatacctccacccacggggcctttggggcgatcgcattcggcatcggaacctctcaagtaagggatgtattagcctcccaaacccttgccctatccaagctaaaagtgcgtaagatcgaagttaacggcaagttacaaccgggagtatatgccaaagatgtcgtccttcatatcatccgtaaactgggggttaaaggtggtgtgggttacgcctacgaatacgccggaaccacctttaccaatatgtctatggaagagaggatgacggtttgtaatatggccatcgaagggggggcaagatgtggctatattaaccccgatgatgtcacttttgactacttaaaaggacgagactttgcccccacaggagaaaaatgggaaaaagcagttagttggtggcgtggtatggcttctgatgccgatgcagaatacgatgatattgttaccttcgatgctgcggagatcgaaccaacggtaacttgggggatcacaccaggccaaggtattgggatcagcgaacccgtccccacccctgatagtttacccgaaggcgatcgcgccatcgctcaagaagcttacagttatatgcagttatctcctggaagtcccatcaaaggcacaaaagttgatgtctgtttcattggtagttgtaccaatggccgcatcagcgacttaagggaagctgctaagtttgcccaaggccatcatgtggctaatggagttaaagcgtttgtggttcctggatcggaacgggttaaagtccaagcagaaaccgaagggttagataaaatttttgtggaagccgggtttgaatggcgtgaggccggatgttctatgtgtttagccatgaaccccgataagttacaaggggatcaaattagtgcctcttcttctaatcgtaactttaaaggccgtcaaggatcatccacaggaagaactttgttgatgagtcccgctatggttgtcgctgctgcggtaaatggtcaagtttctgatgttcgagaactgagttaa

SEQ ID NO: 103112 - protein, 467 aa, Crocosphaera watsonii WH 8501
MSKGTLFDKVWDTHTVQILPSGQTQLFIGLHLIHEVTSPQAFAMLRERGLKVMYPDRTVATVDHIVPTENQARPFVDTLAEEMIQALENSTKDNGIRFYNIGSGSQGVVHVIAPEQGLTQPGMTIACGDSHTSTHGAFGAIAFGIGTSQVRDVLASQTLALSKLKVRKIEVNGKLQPGVYAKDVVLHIIRKLGVKGGVGYAYEYAGTTFTNMSMEERMTVCNMAIEGGARCGYINPDDVTFDYLKGRDFAPTGEKWEKAVSWWRGMASDADAEYDDIVTFDAAEIEPTVTWGITPGQGIGISEPVPTPDSLPEGDRAIAQEAYSYMQLSPGSPIKGTKVDVCFIGSCTNGRISDLREAAKFAQGHHVANGVKAFVVPGSERVKVQAETEGLDKIFVEAGFEWREAGCSMCLAMNPDKLQGDQISASSSNRNFKGRQGSSTGRTLLMSPAMVVAAAVNGQVSDVRELS

SEQ ID NO: 103113 - DNA, 1299 bp, Prosthecochloris aestuarii DSM 271
  CDS (1)..(1299): transl_table=11
atggcacaaacgataacgcagaagattctggccagagctgccaatcgaaaatttgttaacgcaggtgaaaatgtctggctcaacgtcgatattctccttacgcatgacgtatgcggacctccgaccttcgatattttcaaggaaaaattcggcccggacgccaaagtatgggatcctgaaaaagtcgttgtactacccgaccactacattttcacagaaaacgaacacgcacaccgtaatatcgatcttctgcgcactttcgctgcagaacagaacctccccaactattacgatgtcggtaccgatcgttacaaaggagtctgccatgttgcgcttgcacaggaaggcttcaaccttcccggcaccgtcctcttcgggaccgattcccatacctgtacatcgggtgcgttcggcatgttcgggaccggtatcggcaacaccgatgccgccttcatcctgggaacaggaaaactctgggaaaaagtccctgaatcaatgaaattcgtttttgacggtgccatgccggactatctcaccgccaaagaccttatccttcagatcctcggcgatatcggtaccgatggggcgacctaccgggccatggaatttgacggttcggcagtctatcagcttcctgtcgaagagcgtatgacccttaccaatatggcaatcgaagccggcggcatgaacggcatcattgctgctgatgaggtcacagaagcctatgtcaaagcacgaaccagcaaaccatatgaaatcttccatagcgacccggatgccatctatcacagcatctaccactataatgttgaagaactcgagcctgtcgtagcccagccgcacagcccggacaaccgcgcaactgtacgaagcgttcagggcacgagaatcaccaaatcctacatcggctcatgcaccggaggcaagctttccgatttcaaaatggctgcaaaaattctcaacggccagcaggtgtcgatacaaacaaatattgttcctgcaaccgttgaagttgccaaaagtctggaaacagaacagtatgaaggcaagtcaatccgcaaagtcctggaagatgcgggctgcactatcgcacagccatcctgtgcagcatgccttggcggcccggccgatacctttgggcgttcggaagacaacgacctggtcgtatcaacgacaaacagaaacttccccggccgtatgggcagcaaaaaagcaggggtctatcttgcttcgcccctgacggccgctgcatccgccattaccggaaggcttaccgacccgagagagtttctctcttaa

SEQ ID NO: 103114 - protein, 432 aa, Prosthecochloris aestuarii DSM 271
MAQTITQKILARAANRKFVNAGENVWLNVDILLTHDVCGPPTFDIFKEKFGPDAKVWDPEKVVVLPDHYIFTENEHAHRNIDLLRTFAAEQNLPNYYDVGTDRYKGVCHVALAQEGFNLPGTVLFGTDSHTCTSGAFGMFGTGIGNTDAAFILGTGKLWEKVPESMKFVFDGAMPDYLTAKDLILQILGDIGTDGATYRAMEFDGSAVYQLPVEERMTLTNMAIEAGGMNGIIAADEVTEAYVKARTSKPYEIFHSDPDAIYHSIYHYNVEELEPVVAQPHSPDNRATVRSVQGTRITKSYIGSCTGGKLSDFKMAAKILNGQQVSIQTNIVPATVEVAKSLETEQYEGKSIRKVLEDAGCTIAQPSCAACLGGPADTFGRSEDNDLVVSTTNRNFPGRMGSKKAGVYLASPLTAAASAITGRLTDPREFLS

SEQ ID NO: 103115 - DNA, 1425 bp, Xylella fastidiosa Ann-1
  CDS (1)..(1425): transl_table=11
atggccggtaagaccctgtatggcaaattgtgggacattcatgaggtggcccgtcgcgacgatgggtcttcgctcatttacattgatcgccatatacttcacgaagtgacttcaccacaggcttttgaaggattgcgtttagctggacggccgttgtggcgggtcaatgccaatattgcgactccggatcataatgtcccgacgaccaaggcggagcgtcaaggcagtttgctatcgattgccgatacggtttcgcgtttgcaggtacagacgttggatgaaaattgcgacgatttcggtatcttcgaattcaagatgaatgatgtgcgtcaagggatcgtccacgtgatcggtccagaacagggagccaccttgcctggtatgacagtagtgtgcggtgattcacacacctccacacacggtgcctttggtgcattggcgcatggcattggtacctctgaagttgagcacgtgttagccacgcagtgcttagtcacccagaagatgaaaaatatgcaagtgcgtgtggaaggcaccttgccatggggggtgacggccaaagatatcgtattggcgttgattgggaagataggcactgccggaggcaacggttatgcggtggagttttccgggagtaccatccgcgcgttgtcgatggaagggcgcatgaccatttgtaatatggctattgaggctggtgcgcgcgtgggtatggtggcggtggacgagaagaccatccagtatgtgcatggccgcccgtttgcacccaaaggatccgattgggatgctgctgttgcattctggcgtggtttggtttccgatccagatgcgcactttgatcgtgtggttgagttatctgctgaagagattaaacctcaggttacttggggaacctcgccagagatggtgtcggcagtggatcaatcggtgccagacccagagcgcgaaactgatccagtcaagaaggagtctttaattcgtgccctgaaatatatgggtttgcagccgaatgatccgatcccttcaataaagctggaccgtgtatttattggctcctgtacgaattcccgtattgaagacttacgtgctgctgcggaagttgttaaaggccgtaaagttgcttccacggtgaagcaggcgatggtggtgcctggctcgggattggtaaaggcacaggctgaagttgagggcttggacaagatattcattgaggctggtttcgagtggcgtgaacctggatgttcgatgtgtttggcgatgaatcccgataaattgggcagtggcgagcattgcgcatctacttctaatcgtaacttcgaggggcgccagggcatcggtggtcgtacccatttagtcagccctgcgatggcagccgctgcggccgtggctggtcactttgtcgatgtccgcgaaatgatgcggtga

SEQ ID NO: 103116 - protein, 474 aa, Xylella fastidiosa Ann-1
MAGKTLYGKLWDIHEVARRDDGSSLIYIDRHILHEVTSPQAFEGLRLAGRPLWRVNANIATPDHNVPTTKAERQGSLLSIADTVSRLQVQTLDENCDDFGIFEFKMNDVRQGIVHVIGPEQGATLPGMTVVCGDSHTSTHGAFGALAHGIGTSEVEHVLATQCLVTQKMKNMQVRVEGTLPWGVTAKDIVLALIGKIGTAGGNGYAVEFSGSTIRALSMEGRMTICNMAIEAGARVGMVAVDEKTIQYVHGRPFAPKGSDWDAAVAFWRGLVSDPDAHFDRVVELSAEEIKPQVTWGTSPEMVSAVDQSVPDPERETDPVKKESLIRALKYMGLQPNDPIPSIKLDRVFIGSCTNSRIEDLRAAAEVVKGRKVASTVKQAMVVPGSGLVKAQAEVEGLDKIFIEAGFEWREPGCSMCLAMNPDKLGSGEHCASTSNRNFEGRQGIGGRTHLVSPAMAAAAAVAGHFVDVREMMR

SEQ ID NO: 103117 - DNA, 1425 bp, Xylella fastidiosa Ann-1
  CDS (1)..(1425): transl_table=11
atggccggtaagaccctgtatggcaaattgtgggacattcatgaggtggcccgtcgcgacgatgggtcttcgctcatttacattgatcgccatatacttcacgaagtgacttcaccacaggcttttgaaggattgcgtttagctggacggccgttgtggcgagtcaatgccaatattgcgactccggatcataatgtcccgacgaccaaggcggagcgtcaaggcagtttgctatcgattgccgatacggtttcgcgtttgcaggtacagacgttggatgaaaattgcgacgatttcggtatcttcgaattcaagatgaatgatgtgcgtcaagggatcgtccacgtgatcggtccagaacagggagccaccttgcctggtatgacagtagtgtgcggtgattcacacacctccacacacggtgcctttggtgcattggcgcatggcattggtacctctgaagttgagcacgtgttagccacgcagtgcttagtcacccagaagatgaaaaatatgcaagtgcgtgtggaaggcaccttgtcatggggggtgacggccaaagatatcgtattggcgttgattgggaagataggcactgccggaggcaacggttatgcggtggagttttccgggagtaccatccgcgcgttgtcgatggaagggcgcatgaccatttgtaatatggctattgaggctggtgcgcgcgtgggtatggtggcggtggacgagaagaccatacagtatgtgcatggccgcccgtttgcacccaaaggatccgattgggatgctgctgttgcattctggcgtggtttggtttccgatccagatgcgcactttgatcgtgtggttgagttatctgctgaagagattaaacctcaggtcacttggggaacctcgccagagatggtgtcggcagtggatcaatcggtgccagacccagagcgcgaaactgatccagtcaagaaggagtctttgattcgtgccctgaaatatatgggtttgcagcctaatgatccgatcacttcaataaagctggaccgtgtatttattggctcctgtacgaattcccgtattgaagacttacgtgctgctgcggaagttgttaaaggccgtaaagttgcttccacggtgaagcaggcgatggtggtgcctggctcgggattggtaaaggcacaggctgaagttgagggcttggacaagatattcattgaggctggtttcgagtggcgtgaacctggatgttcgatgtgtttggcgatgaatcccgataaattgggcagtggcgagcattgcgcatctacttctaatcgtaacttcgaggggcgccagggcatcggtggtcgtacccatttagtcagccctgcgatggcagccgctgcggccgtggctggtcactttgtcgatgtccgcgaaatgatgcggtga

SEQ ID NO: 103118 - protein, 474 aa, Xylella fastidiosa Ann-1
MAGKTLYGKLWDIHEVARRDDGSSLIYIDRHILHEVTSPQAFEGLRLAGRPLWRVNANIATPDHNVPTTKAERQGSLLSIADTVSRLQVQTLDENCDDFGIFEFKMNDVRQGIVHVIGPEQGATLPGMTVVCGDSHTSTHGAFGALAHGIGTSEVEHVLATQCLVTQKMKNMQVRVEGTLSWGVTAKDIVLALIGKIGTAGGNGYAVEFSGSTIRALSMEGRMTICNMAIEAGARVGMVAVDEKTIQYVHGRPFAPKGSDWDAAVAFWRGLVSDPDAHFDRVVELSAEEIKPQVTWGTSPEMVSAVDQSVPDPERETDPVKKESLIRALKYMGLQPNDPITSIKLDRVFIGSCTNSRIEDLRAAAEVVKGRKVASTVKQAMVVPGSGLVKAQAEVEGLDKIFIEAGFEWREPGCSMCLAMNPDKLGSGEHCASTSNRNFEGRQGIGGRTHLVSPAMAAAAAVAGHFVDVREMMR

SEQ ID NO: 103119 - DNA, 1392 bp, Streptococcus suis 89/1591
  CDS (1)..(1392): transl_table=11
atgagtggcaaatccattttcgataagctctgggatcgccatgtgattacagggcaggaaggtcagccccagctcctctatgtggaccagcactatattcatgaggtgaccagtccccaggcttttgatggtctgcgagaggcaggacgtcaggtccgtcggccagaattgacctttgcgacttttgaccacaacgtaccaaccgttgatattcacaatatccgtgatgtcatttccaaggctcagatggatgccttggctaagaatatagaagatttcggcattccccacgcagcccacggttcggaacatcaggggattgtccacatggttggaccagaaacaggcaggacccagccaggtaagttcattgtctgcggagatagccatacagcgactcacggagcatttggagctattgcctttgggattggtacttctgaagtggagcacgttctcgctacccagaccatttggcaggtcaaacctaagcgactcttagtagagtttgtcggtcaggtgcaaagaggtgtctatgccaaggactttatcctggctctgattgcccgctacggcgtggattgtggtttgggtcatgtggtcgagttcgcaggacccgtcatcgaccgactcagcatggaagagcggatgactatctgcaatatgtccattgagttcggctctaagatgggcattatggctccagaccagaccacctttgactacctgcgaggtcgggagtgtgcaccagcggacttcgatgcggcggtggcagactggaaggagctctactcggatgcggacaccgtctatgacaagcacctggtccttgatgtgtcagacttggcacccatggtcacttggggaacgacgcctgctatgggggttagctttgacgaaatcttcccagccatccgtgaccacaacgacgagcgggcctatgcttacatggacttggctcctgggcaaaaggctgcggacattcctgttggctatgtcttcctaggctcctgtaccaatgctcgcctcagcgatttgcagctggcagctaggattgttaaggggcggaaaatagcagagcaggttacggctattgtcgtaccaggcagtcgccctgtcaagcgtgctgcagaaaagttaggtctagacaagattttcatggaggctggttttgagtggcgggatcccggttgctccatgtgtctgggtatgaatccagacaaggtccctgcgggtgtccactgcgcctctacaagtaatcgaaactttgaagaccgacagggctttggggccaagacccacttgtgtagtcctgctatggctgccgcagctgcgctttatggacgatttgttgacaccagacagctagacattctcaaggagggagtctaa

SEQ ID NO: 103120 - protein, 463 aa, Streptococcus suis 89/1591
MSGKSIFDKLWDRHVITGQEGQPQLLYVDQHYIHEVTSPQAFDGLREAGRQVRRPELTFATFDHNVPTVDIHNIRDVISKAQMDALAKNIEDFGIPHAAHGSEHQGIVHMVGPETGRTQPGKFIVCGDSHTATHGAFGAIAFGIGTSEVEHVLATQTIWQVKPKRLLVEFVGQVQRGVYAKDFILALIARYGVDCGLGHVVEFAGPVIDRLSMEERMTICNMSIEFGSKMGIMAPDQTTFDYLRGRECAPADFDAAVADWKELYSDADTVYDKHLVLDVSDLAPMVTWGTTPAMGVSFDEIFPAIRDHNDERAYAYMDLAPGQKAADIPVGYVFLGSCTNARLSDLQLAARIVKGRKIAEQVTAIVVPGSRPVKRAAEKLGLDKIFMEAGFEWRDPGCSMCLGMNPDKVPAGVHCASTSNRNFEDRQGFGAKTHLCSPAMAAAAALYGRFVDTRQLDILKEGV

SEQ ID NO: 103121 - DNA, 1410 bp, Sulfitobacter sp. EE-36
  CDS (1)..(1410): transl_table=11
atgtcccccaaaacgctctatgataaaatctgggatgcccatgtcgcgcacgaggccgacgatggcacctgccttctgtacatcgaccgtcacctcgtccacgaagtgaccagcccgcaagcctttgaagggctgcggatgacgggccgcaccgtgcgccgccctgaccagaccatcgctgtgcccgatcacaacgtgccgaccacgctggaccgcgccaacgccgcgacgatgaccgaagacagccgcgttcaggtggccgcccttgatacaaacgccaaggaattcggcctgcactactaccccgtgtccgacgtgcgtcagggcatcgtgcatatcgtcggccccgagcagggctggaccctgcccggcatgaccgttgtctgcggtgacagccacaccgcgacacatggggccttcgggtcgctggcccacgggatcggcacctcggaggtggaacacgtgctggcgacgcaaacgctgatccagaagaaatccaagaacatgaaggtcgagatcaccggcaaacttgcccctggtgtgacggccaaggacatcaccatgaccgtgatcggtgaaaccggcacggcgggcggcaccggctatgtcatcgaatattgcggcgaggcgatccgtgacctgtcgatggaaggccgcatgaccgtctgcaacatggccatcgagggcggcgcgcgcgctggcctgatcgcgccggacgacaagacgttcgaatattgcaaaggccgcccccacgcgcccaagggtgcccagtgggaagccgcgatggattggtggaaaactctgtattccgatgacgacgcccattgggacaaggtgatcacgatcaagggcgaagacatcgcgccagccgtcacctggggcacctcgcccgaagatgttctgcccatcaccgccaaagtgcccgcggcatcggactttaccggcggcaaggtcgacgcggcgaaacgcgcgatcgaatacatgggcctgaccgaaggcatggcgctgacggatatcgagatcgacaccgtgttcatcgggtcttgcaccaacggccgcatcgaagacctgcgcgctgcggcggcggttctgaaaggcaagaagatcaaggacgggatgcgcgccatgatcgtcccgggctccggccttgtgcgggcgcaggccgaggaagaagggcttgccgacatcttcaaggaagccggtttcgaatggcgccttgcggggtgttccatgtgtttggcgatgaaccccgaccaactggcaccgggcgaacgctgcgcatcgacatcgaaccgcaacttcgaaggccgtcagggctttaaggggcgcacccatttgatgtcccccgcgatggctgccgctgccgctcttaccggacgtttgaccgatatccgcaagctcgacgcgtaa

SEQ ID NO: 103122 - protein, 469 aa, Sulfitobacter sp. EE-36
MSPKTLYDKIWDAHVAHEADDGTCLLYIDRHLVHEVTSPQAFEGLRMTGRTVRRPDQTIAVPDHNVPTTLDRANAATMTEDSRVQVAALDTNAKEFGLHYYPVSDVRQGIVHIVGPEQGWTLPGMTVVCGDSHTATHGAFGSLAHGIGTSEVEHVLATQTLIQKKSKNMKVEITGKLAPGVTAKDITMTVIGETGTAGGTGYVIEYCGEAIRDLSMEGRMTVCNMAIEGGARAGLIAPDDKTFEYCKGRPHAPKGAQWEAAMDWWKTLYSDDDAHWDKVITIKGEDIAPAVTWGTSPEDVLPITAKVPAASDFTGGKVDAAKRAIEYMGLTEGMALTDIEIDTVFIGSCTNGRIEDLRAAAAVLKGKKIKDGMRAMIVPGSGLVRAQAEEEGLADIFKEAGFEWRLAGCSMCLAMNPDQLAPGERCASTSNRNFEGRQGFKGRTHLMSPAMAAAAALTGRLTDIRKLDA

SEQ ID NO: 103123 - DNA, 1407 bp, Roseovarius nubinhibens ISM
  CDS (1)..(1407): transl_table=11
atgtcccccaaaacgctctacgacaaaatctgggatgcccatgtggcgcatgaagccgatgatggcacctgccttctttatatcgaccgccatctcgttcacgaggtgacgagcccgcaggcctttgaagggctgcgcatggcgggccgcagcgtgcgcgcaccggacaagaccattgccgtgccggatcacaacgtgccgaccacgcttgaccgcgccaatgcggccaccatgaccgaggacagccgcattcaggtcgaggctctcgacaagaacgccaaggatttcggcatccactactatccggtcagcgacatccgtcagggtatcgtgcatatcgtcggccccgagcagggctggaccctgccgggcatgaccgtggtttgtggtgacagccacaccgcgacccatggcgcctttggtgcgctggcccatggcatcggcacctcggaggtcgagcatgtgctcgccacccagacgctgatccagaagaaatccaagaatatgaaggtcgagatcaccggcaagctgcgccccggtgtgaccgccaaggacatcaccctgtcggtgatcggcgaaaccggcaccgccggcggcaccggctatgtcatcgaatattgcggcgaagcgatccgcgatttgtcgatggaaggtcgcatgaccgtctgcaacatggcgatcgaaggtggtgcgcgcgccggtctcatcgcgccggatgaaaagacttatgagtatgtcatgggtcgcccccatgcgccgaaaggggctgcctgggaggcggcgctggcctggtggaagacgctctattccgacgatgacgcccattgggacaaggtcgtgaccatcaagggcgaagacatcgcgccggtcgtcacctggggcacctcgcctgaggatgtgctgccgatcaccgccaatgtgccgagcgccagcgatttcaccggcggcaaggtcggtgctgcgcagcggtcgctcgattacatggggctgaccccgggcatgccgctcagcgaggtcgagatcgacaccgtctttatcggctcttgcaccaatggccggatcgaggatctgcgcgccgccgccgccgtgctcaagggacgcaagatcaaggaaggtctgcgcgccatggtggtgccgggttcgggcctcgtacgggcacaggccgaggaagagggacttgcagatatcttcaaggaggccgggtttgaatggcggcttgcgggctgttccatgtgtcttgccatgaaccccgatcagctcagcgagggcgagcgctgtgcctcgacctcgaaccggaatttcgaagggcggcagggctataagggtcggacccacctgatgagcccggcgatggccgccgccgccgcggtgaccggcaagctgaccgatgtgcgggagatgatgtaa

SEQ ID NO: 103124 - protein, 468 aa, Roseovarius nubinhibens ISM
MSPKTLYDKIWDAHVAHEADDGTCLLYIDRHLVHEVTSPQAFEGLRMAGRSVRAPDKTIAVPDHNVPTTLDRANAATMTEDSRIQVEALDKNAKDFGIHYYPVSDIRQGIVHIVGPEQGWTLPGMTVVCGDSHTATHGAFGALAHGIGTSEVEHVLATQTLIQKKSKNMKVEITGKLRPGVTAKDITLSVIGETGTAGGTGYVIEYCGEAIRDLSMEGRMTVCNMAIEGGARAGLIAPDEKTYEYVMGRPHAPKGAAWEAALAWWKTLYSDDDAHWDKVVTIKGEDIAPVVTWGTSPEDVLPITANVPSASDFTGGKVGAAQRSLDYMGLTPGMPLSEVEIDTVFIGSCTNGRIEDLRAAAAVLKGRKIKEGLRAMVVPGSGLVRAQAEEEGLADIFKEAGFEWRLAGCSMCLAMNPDQLSEGERCASTSNRNFEGRQGYKGRTHLMSPAMAAAAAVTGKLTDVREMM

SEQ ID NO: 103125 - DNA, 1404 bp, Oceanicola batsensis HTCC2597
  CDS (1)..(1404): transl_table=11
atgtcccccaagacgctctacgacaagatctgggatgcccatgtggcccatgaggccgaagacggcacctgcctgctctatatcgaccgccacctcgtgcacgaggtgacctcgccccaggccttcgaggggctgcgcatggcgaaccgcaccgttcgcgcgcccgacaagacgatcgccgttccggatcacaacgtcccgacgaccggcgaccgcaacgccgtgatcgagaacgaggaaagccgcatccaggtcgaggcgctggaccggaacgcgaaggacttcggcctgatctactatccggtgaacgacgtccgccagggcatcgtccatatcgtcggcccggaacagggctggacactgcccggcatgaccgtggtctgcggcgacagccacaccgccacccacggtgccttcggggcgctggcccatggtatcggcacatccgaggtcgagcacgtgctggccacgcaaacgctgatccagaagaaatcgaagaacatgaaggtcgagatcaccggcaagctgcgccccggtgtgaccgccaaggacatcaccctctcggtgatcggcgcgaccggcaccgccggcggcaccggctatgtcatcgaatactgcggcgaggcgatccgcgacctgtcgatggaaggccggatgaccgtctgcaacatggcgatcgagggcggtgcccgcgcgggtctcatcgcgccggacgaaacgacctttgactatgtcaagggccgcgcccatgcgccgaagggtgcgcagtgggaagcggcgatggactggtggaagacgctctattccgacgatgatgcgcagtgggacaaggtcatcaccatcaagggcgaggatatcgcgccggtggtgacctggggcacctcgcccgaggacgtcctgccgatcgacgcggtggtccccgcccccgagaccttcaacggcggcaaggccgaagccgcccgccgcgccatcgagtacatgggcctgacccccggccagaagctgtccgacatcgagatcgacacggtcttcatcggctcctgcaccaacggccggatcgaggatctgcgcgcagcggccgcgatcctcaagggcaagaagatcaaggacgggctgcgcgccatggtcgttcccggctcgggcctcgtccgcgcccaggccgaggaagagggcctggcccggatcttccaggacgctggcttcgaatggcgtctggcggggtgctccatgtgccttgcgatgaaccccgaccagctttcggaaggcgaacgctgcgcctcgacctccaaccggaacttcgaggggcggcagggctacaagggccgcacgcacctcgtttctccggcaatggcggcggcggcggccgtgaccggccgtctgaccgacgtgcgcgagatgatgtga

SEQ ID NO: 103126 - protein, 467 aa, Oceanicola batsensis HTCC2597
MSPKTLYDKIWDAHVAHEAEDGTCLLYIDRHLVHEVTSPQAFEGLRMANRTVRAPDKTIAVPDHNVPTTGDRNAVIENEESRIQVEALDRNAKDFGLIYYPVNDVRQGIVHIVGPEQGWTLPGMTVVCGDSHTATHGAFGALAHGIGTSEVEHVLATQTLIQKKSKNMKVEITGKLRPGVTAKDITLSVIGATGTAGGTGYVIEYCGEAIRDLSMEGRMTVCNMAIEGGARAGLIAPDETTFDYVKGRAHAPKGAQWEAAMDWWKTLYSDDDAQWDKVITIKGEDIAPVVTWGTSPEDVLPIDAVVPAPETFNGGKAEAARRAIEYMGLTPGQKLSDIEIDTVFIGSCTNGRIEDLRAAAAILKGKKIKDGLRAMVVPGSGLVRAQAEEEGLARIFQDAGFEWRLAGCSMCLAMNPDQLSEGERCASTSNRNFEGRQGYKGRTHLVSPAMAAAAAVTGRLTDVREMM

SEQ ID NO: 103127 - DNA, 1434 bp, Erythrobacter sp. NAP1
  CDS (1)..(1434): transl_table=11
atggccagcaaaccgcgcactctctacgacaagatctgggacgaccatgtggtcgagacccgcgatgacgggaccgcgatcatctatatcgaccgccatctcgtgcacgaagtaaccagcccgcaagctttcgaggcactgcggcttgcagggcgctcagttcgtcggcccgaactcacccttgctgtgcccgatcacaatctgccgacgacggcgcggcgcgatgcggcaggcagcaaggtgccaatcgaggacccgcagagcgcagcgcaactcgcagcgcttgaacgcaacgctcccgatttcggcatccgttatatcggcgatgccgatgccgagcaggggatcgtccacgtcgtcggcccggaacagggcttctcgctccccggcaccacgatcgtatgcggcgattcgcacacggcgagccatggcggcctcggcgcgttggccttcgggatcgggacgagcgaggtcgagcatgtgctcgcgacgcaaacgctgctgctccagcgctccaagtcgatggaggtgcgtgtcgacggcgaactgggccccggtgtgaccgccaaggacctgatcctgcacatcatcggcgtgatcggtgcagccggtggcacaggccacgtgatcgaatatcgtggccgtgtctttgaagagatgagcgtcgaacagcgtctgaccgtgtgcaacatgagcatcgaagcgggcgcgcgcgccggattgatcgcgcccgatgaaaccgtgttccgctacctcaagggtcgcccgatgtcgcccaagggcgccgcctgggatcatgcggtcgcatactggaacacgcttcgcaccgacgagggcgcccagttcgacaaatcggttacgatcgacgccgccgatgtcgcgccaaccgtcacatggggcacaagccctgaagacgtgctcccaatcactggcacagtcccatcacctgacagcttcgctgatccatccaagcaagccgcggcggccaagagcctcgattacatgggcctcacccccggcacgccgatgacggagatcgcgatcgaaaacgtcttcatcggcagctgcaccaatagccgcatcgaagacctgcgcgacgcggcaaaggttctgaagggccgcaagaaggccgacaacgtgcgctgggcgatcgtcgtgcccggatcgggccttgtgaagcgccaggcggaggaggaagggctcgatcgtatcttcaccgatgcaggtttcgaatggcgcgagccgggctgctcggcctgcctcggcatgaaccccgacaaggtgcccgcaggcgagcgctgcgcctcgaccagcaatcgcaacttcgtaggccgccagggccccggcgctcgcacgcacctcgtttcgcctgcaatggccgctgcggccgccgtcgccggcaagcttacggacgtgagggaactgaccgaatga

SEQ ID NO: 103128 - protein, 477 aa, Erythrobacter sp. NAP1
MASKPRTLYDKIWDDHVVETRDDGTAIIYIDRHLVHEVTSPQAFEALRLAGRSVRRPELTLAVPDHNLPTTARRDAAGSKVPIEDPQSAAQLAALERNAPDFGIRYIGDADAEQGIVHVVGPEQGFSLPGTTIVCGDSHTASHGGLGALAFGIGTSEVEHVLATQTLLLQRSKSMEVRVDGELGPGVTAKDLILHIIGVIGAAGGTGHVIEYRGRVFEEMSVEQRLTVCNMSIEAGARAGLIAPDETVFRYLKGRPMSPKGAAWDHAVAYWNTLRTDEGAQFDKSVTIDAADVAPTVTWGTSPEDVLPITGTVPSPDSFADPSKQAAAAKSLDYMGLTPGTPMTEIAIENVFIGSCTNSRIEDLRDAAKVLKGRKKADNVRWAIVVPGSGLVKRQAEEEGLDRIFTDAGFEWREPGCSACLGMNPDKVPAGERCASTSNRNFVGRQGPGARTHLVSPAMAAAAAVAGKLTDVRELTE

SEQ ID NO: 103129 - DNA, 1422 bp, Synechococcus sp. WH 7805
  CDS (1)..(1422): transl_table=11
atgagcagcgggaccctttacgacaaggtttgggatctgcatcgcgttgctgatcttcctggtggatccacccagttgttcatcggcctgcacctgattcatgaggtgaccagtcctcaggcttttgcggccctcgaagacaagggacttgcggtgcgctgcccgcagcgcaccgtggccacggtggatcacattgttccaaccaccagtcaggccaggccgtttgcggatccactcgcagaggagatgctgagcacattggagcgcaactgttccaatcacggcatcaccctgcatggtctcggcagtggtcgccagggaatcgtgcacgtgattgcgccggagctcggtctcacgcagcccggaatgacggtggcctgtggtgactcgcacacgtccacgcatggggccttcggggccatcgccttcgggatcgggaccagtcaggtgcgcgatgtcctcgccagccagagcctggcgatgaacaagctcaaggtgcgtcggatctgggtggaaaacaagctcagcccaggggtgttcgccaaggatttgatcctgcacgtgattcgctcactgggcgtgaaagcaggggtgggacatgcctatgaatttgccggtccagctatcgaggcgctgtcgatggaagagcgcatgaccctctgcaacatggcgattgaaggaggtgcgcgctgcgggtacgtgaaccctgatcagaccaccttcgactacctccatggtcgtgctgaggcgcctacggcagaggcctgggaccgtgcgctgacctggtggcgatctctggcctccggtgctgatgcccgcttcgatgatgaggtgcgctttgacgccgccaccatcgctcccacggtgacctggggcatcacacccggtcagggaatcggtgttgatgagacggtgcccacgcctgagcagctggacccggccgatcgccccatcgcggaggaggcttatcgctatatggatctggcgcccggtcaggcgatcgcaggggtgcctgtggatgtgtgcttcatcggcagttgcaccaatggacggctcagtgatctgcaggctgcggctgcggtggctaagggacgtcatgtggcctcgggtattcgggcttttgttgtccctggatcggaacaagtggcccgggctgcggaggctgagggtcttgatgccgtgttccgcgaggccggatttgaatggcgcgaacctggctgttccatgtgtctggccatgaatcctgatcgtctggaggggcgccagatcagcgccagctcaagcaatcgcaatttcaagggccggcagggttcggccagtggccgaaccctgctgatgagtcccgcgatggttgctgccgccgccatcactggtcaggttcgtgatgtgcggcagctgaactgcatgacttccgatgactga

SEQ ID NO: 103130 - protein, 473 aa, Synechococcus sp. WH 7805
MSSGTLYDKVWDLHRVADLPGGSTQLFIGLHLIHEVTSPQAFAALEDKGLAVRCPQRTVATVDHIVPTTSQARPFADPLAEEMLSTLERNCSNHGITLHGLGSGRQGIVHVIAPELGLTQPGMTVACGDSHTSTHGAFGAIAFGIGTSQVRDVLASQSLAMNKLKVRRIWVENKLSPGVFAKDLILHVIRSLGVKAGVGHAYEFAGPAIEALSMEERMTLCNMAIEGGARCGYVNPDQTTFDYLHGRAEAPTAEAWDRALTWWRSLASGADARFDDEVRFDAATIAPTVTWGITPGQGIGVDETVPTPEQLDPADRPIAEEAYRYMDLAPGQAIAGVPVDVCFIGSCTNGRLSDLQAAAAVAKGRHVASGIRAFVVPGSEQVARAAEAEGLDAVFREAGFEWREPGCSMCLAMNPDRLEGRQISASSSNRNFKGRQGSASGRTLLMSPAMVAAAAITGQVRDVRQLNCMTSDD

SEQ ID NO: 103131 - DNA, 1401 bp, Pseudoalteromonas tunicata D2
  CDS (1)..(1401): transl_table=11
gtggctcaaaccttatatgacaaaatttggcaggcgcataaaatcactgctattaacgaacaaaccgatttattgtatgtagaccgtcacttagtccatgaagtgacgtcgccccaagcatttgcagggttaagagaaaaaaatcgtaaagtacgtcgtccagataaaacctttgcgaccatggaccataatatttcaactaaagagcgctcacttgcagcagccagtaaggttgcacaaaatcaacttaatgctttaaccgaaaactgcaaagagtttggtgtacctctatatgatttaagttctattaatcaaggtatagttcatgtaatgggcccagagcaaggcattactttacccggcacaacaattgtctgtggcgatagccatacttctacgcacggtgcctttggtgcacttgcccatggtattggtacctctgaagttgaacatgtactggcgacacaaacattgcagcaaaaaaaagcacgctcattaaaaattcaaatcaatggttcacttaaacccacggttacagcaaaagatttgattatggcggtgattgggcgccttggcacagcgggcggcaatggttatgtagctgaattttgtggtcaagccattcgtgagctttcgatggaagcacgcatgacattgtgtaacatgagtattgagatgggggctaaagcaggcttaattgcaccagaccaaacaacctatgattatttggaggggcgcccatttgcaccaaaaggtatagattggcatcaagctgttgcttattggcaaacgctacaatcggatgatgacgctgtatttgactatgttgtagaatttgatgcgacagacattcaacctcaaataacttggggtactagccctgagcaagtgataggtgttgatgggatcattccagatccagataaagagcctgatttgattaaagccgatgcaattcgcagggcacttgtatacatggatttaaccccagggcaaaaaatatctgatgttaaagtggatactgttttcattggttcatgtactaacagccgcatagaagatttacgcgctgcagctgctattgtgcaaggaaaacaagtcgttaatggtattgaggcgctaatcgtgccaggttctggtttagtgaagaaacaagccgaagacgaaggattagccgatattttcaaagcagcaggctttgaatggcgtgagcctggttgttcaatgtgtttagcgatgaacgatgatagattagaggccggaaaacgttgtgcttctacttcaaaccgtaactttgaaggtcgccaaggtcgcggggggcgtactcatttagtgagcccagccatggctgcagctgcggcagtatatggtcactttgttgatattagaggagaggcgtaa

SEQ ID NO: 103132 - protein, 466 aa, Pseudoalteromonas tunicata D2
MAQTLYDKIWQAHKITAINEQTDLLYVDRHLVHEVTSPQAFAGLREKNRKVRRPDKTFATMDHNISTKERSLAAASKVAQNQLNALTENCKEFGVPLYDLSSINQGIVHVMGPEQGITLPGTTIVCGDSHTSTHGAFGALAHGIGTSEVEHVLATQTLQQKKARSLKIQINGSLKPTVTAKDLIMAVIGRLGTAGGNGYVAEFCGQAIRELSMEARMTLCNMSIEMGAKAGLIAPDQTTYDYLEGRPFAPKGIDWHQAVAYWQTLQSDDDAVFDYVVEFDATDIQPQITWGTSPEQVIGVDGIIPDPDKEPDLIKADAIRRALVYMDLTPGQKISDVKVDTVFIGSCTNSRIEDLRAAAAIVQGKQVVNGIEALIVPGSGLVKKQAEDEGLADIFKAAGFEWREPGCSMCLAMNDDRLEAGKRCASTSNRNFEGRQGRGGRTHLVSPAMAAAAAVYGHFVDIRGEA

SEQ ID NO: 103133 - DNA, 1419 bp, Oceanospirillum sp. MED92
  CDS (1)..(1419): transl_table=11
atggctggtaaaacgttatacgataaattgttcgaatcgcatttggttcgtaccaatgatgacggcagttctttaatttatatcgaccgtcaggttctgcatgaagtaacttccccgcaagcgtttgagggtctgcgtatggcgggtcgtcagccatggcgtatcgatgcgaatatcgcgacacctgatcataacgtgcccactactgagcgttctggtggtgttgacgagattgttgaccctgtttctaaaattcaggtgaaaactctggacagtaactgtgatgagtttggcatcttagaatttaaaatgaacgaccagcgtcagggtatcgtgcacgttatggcgccagagcaaggtgcgatccttccaggcgtcaccgctgtttgtggtgattcccacacagcaacactaggtgctttaggggcgctggctcatggtgtaggtacatcagaagttgagcatgtattggcaactcagtgtctgatcactaaaaaaatgaagaacatgctggttcgtgttgatggtgagctaggcatcggtgtgacaccaaaagatgttgtgttgcacgtgattggcgtgatcggtaccgcgggtggtacaggttatgcgattgagtttggcggtgatgtcttccgtaacatgtctatggaaggtcgtatgaccgtctgtaacatggcgattgaagcgggcgcgcgtgttggtttggtttctgttgaccagatcacgctggattatgttgaaggtcgaccgtttgccccgaaaggcgagcagtgggatatggctgtcgcggcgtggaaagatcttgtttctgacaatgatgctgagtttgatgaagtcgttgaaatcaacggcgctgatattgagccacaggttacctggggaacatctccagagatggtggttggtgtttctgcgcaggtgcctaacccagctaacgaaacggatcaggttaagattgatggtatcaatcgtgcccttgaatacatgggtttgaatgctgatcagaatattactgatatcaagcttgatcgtgtattcatcggctcttgcacaaactctcgtattgaagacctgcgtgacgctgcaaaagtagttgagggtcgtaaagtggctggcaacatcattcaggctttggttgtaccgggttctggcttggtaaaagagcaggcagagaaagaaggtttggataaggtctttactgcagcaggtctggagtggcgtgagcctggttgttcaatgtgtttggcaatgaacccggataaattgggtaatggtgaacactgtgcatctacttctaaccgtaacttcgaaggccgtcagggcttcggtggacgtactcatctggttagtcctgctatggcagcagctgcagcagtgacaggtcacttcatcgatgtacgtgagttgattaagtaa

SEQ ID NO: 103134 - protein, 472 aa, Oceanospirillum sp. MED92
MAGKTLYDKLFESHLVRTNDDGSSLIYIDRQVLHEVTSPQAFEGLRMAGRQPWRIDANIATPDHNVPTTERSGGVDEIVDPVSKIQVKTLDSNCDEFGILEFKMNDQRQGIVHVMAPEQGAILPGVTAVCGDSHTATLGALGALAHGVGTSEVEHVLATQCLITKKMKNMLVRVDGELGIGVTPKDVVLHVIGVIGTAGGTGYAIEFGGDVFRNMSMEGRMTVCNMAIEAGARVGLVSVDQITLDYVEGRPFAPKGEQWDMAVAAWKDLVSDNDAEFDEVVEINGADIEPQVTWGTSPEMVVGVSAQVPNPANETDQVKIDGINRALEYMGLNADQNITDIKLDRVFIGSCTNSRIEDLRDAAKVVEGRKVAGNIIQALVVPGSGLVKEQAEKEGLDKVFTAAGLEWREPGCSMCLAMNPDKLGNGEHCASTSNRNFEGRQGFGGRTHLVSPAMAAAAAVTGHFIDVRELIK

SEQ ID NO: 103135 - DNA, 1287 bp, delta proteobacterium MLMS-1
  CDS (1)..(1287): transl_table=11
atggggcaaaccatcgttgagaaaatatttgccgcccaccggcgcgataatccgaccccggagaataccattttggatcttgatgtggtgatgtgccatgagatcaccacccccatcgcgatcaccgatctggaagcgcgggggatggatcgggtttttgatcccgacaagatcaaggtggtgattgaccatgtgactccggccaaggattccaagaccgccacccagggtaaaatcctgcgggactgggcccggcgccaccagctccgggatttctttgatatcggtcacaacggggtctgccatgccctgtttcccgagaagggctttatccggcccggctacacggtgatcatgggggactcccatacctgcacccacggcgccttcggggcctttgccgccggggtggggaccaccgacctggaggttggtatcttaaaaggggtctgttccttccggctgcccaagaccatccgggtggagatcaccggcaccctggccgccggggtctacgccaaggacgtgattttaaaaatcatcaaggagttgacggtcaacggcgccaccgaccgggtgctggagttcaccggcccggtggtggcggcgatgagcatggagtcccggatgaccctgtgcaatatggccgtggaggccggggccacctgcggggtctgcctgccggatcggaccaccgccgaatatctctggccctttatccaggatcaatatgaatcaattgaggcggcggtgaccgggtttacccgctggcattccgaccccgacgcgctctacgagcagcagttgcattttgacatctccgggctcaccccccaggcgacctacggcttcaaacccgacgaggtcaaggatattgccgccatggagggcaccccggtggatcagatctacatcggctcctgcaccaacggccgcatcgaggatttgcgggaggcggcccggattctcaaggggcgtaagatctccgagcaggtgcggggtattctggccccggccacccccaaggtggccgcccaggccctggaggaagggattttgaaaatcttcatggaggccggtttctgtgtcaccaatcccacctgcggggcctgcctggggatgagcaacggggtgctggcggaaggtgagatttgcgcttccaccaccaaccgcaatttcaacggccggatgggcaagggcggcattgtccacctgatgagcccattgtcggcggcggccgccgccgtggccgggcatatcaccgacccccggcctttgctggcgtaa

SEQ ID NO: 103136 - protein, 428 aa, delta proteobacterium MLMS-1
MGQTIVEKIFAAHRRDNPTPENTILDLDVVMCHEITTPIAITDLEARGMDRVFDPDKIKVVIDHVTPAKDSKTATQGKILRDWARRHQLRDFFDIGHNGVCHALFPEKGFIRPGYTVIMGDSHTCTHGAFGAFAAGVGTTDLEVGILKGVCSFRLPKTIRVEITGTLAAGVYAKDVILKIIKELTVNGATDRVLEFTGPVVAAMSMESRMTLCNMAVEAGATCGVCLPDRTTAEYLWPFIQDQYESIEAAVTGFTRWHSDPDALYEQQLHFDISGLTPQATYGFKPDEVKDIAAMEGTPVDQIYIGSCTNGRIEDLREAARILKGRKISEQVRGILAPATPKVAAQALEEGILKIFMEAGFCVTNPTCGACLGMSNGVLAEGEICASTTNRNFNGRMGKGGIVHLMSPLSAAAAAVAGHITDPRPLLA

SEQ ID NO: 103137 - DNA, 1929 bp, Rickettsiella grylli
  CDS (1)..(1929): transl_table=11
atgtcacaaaatgtaacacaaaaactaattaacttacataaagtcgaaggtgaattacaatctggggcagaaattgccctcaaaatagatcaaaccttatgccaagatgccaccggaacaatggtcatgctcgaatgtgaagcaatgggtattcaccaaacaaaggcggaggtttctgtacaatacattgaccacaacttattacaaacagattttaaaaatgcagatgatcatttatttttattgagtgcctgtaaaaaatttggtctttatttcagtggcccgggtaacggtgttagccatcctgtacacatggaacgttttggaaaacctggaaaaaccttattaggctcagatagccatacctgtgcggccggatcactttgcatgttagccattggcgcagggggattagaagttgccatggccattgcgggatatccttttcatgtgactatgcccaaggtttggggagttaagctaacccattcaccaccggattgggtcagcgctaaagatgtcatcttggaattattgcgtcggcatgacgtcgacgggggaatcggcaaaattattgagtattacgggcctgggttacgttatttatcggcaatggatcgtcatgttattgccaatatgggcgcagaactgggtgcaacaacgagtgtatttccatccgatgcaacgacacgcgaatttttgaaattacaacaacgtgaatcggattggcaagagattattgctgataaaaatgcttcttatgatgaacatgatgaaattaatctttccaaactggaacctttaattgcattaccttctagtccagggaaagtggtctctattcaagaggttgttggacgacctatttatcaagccatgattggttcatccgcaaaccctggtttaagagatttcgcaattgcagcagaaatagttgccgggcaacaagtagcaccggggatttcatttgatatcaaccctacatcacgccaaattttagagaatatggttgaattaggcattttagatcaattaattcgtgcaggtgggcgtattcatcaagcgggatgcaatggatgtatcggcatgggccaagcgcctgcatcaggaaaaatcagtttacgcactgtaccccgaaattttccaggccgatctggaacgaaggccgatcaagtgtatctctgcagcccagaaattgccgccgcctctgcgctaacgggtgttattacggaccctcgttctctcaataaagtttatttgcgttttaaagagcccgaaaaaattagtattaacatcagtatgctagtgcctcctccaaaaaattctaaggacgtcaaattagccaaaggacctaacattcaaccgctacctattttccctcctctcgcggataacattgaaggacctgtcttaatgaaagtcggtgataacatttctaccgataccattcttcctgcgggcgctaaagtacttcctttccggagcaatattataggaatcagtcaatttgtttttgatcaaattgactcatcgtatccaaaaagagcattagactatcagaaaacaggctcgattattgttggtggcgaaaattatggacaaggttccagccgagaacacgctgccatcgcacctcgttatttaggtgtacaagccgtgctggtgaagcaatttgcacgtattcatcgacaaaatctcgttaattttggaatcttaccgctcattttcaacaccgctagcgattatgacaccattgaccaagaggatattttattcatacaaaacgttcgtgaaaccattcaaaactcaaaggttattaccattcataataaaactaaaaataaaagctatctggctgctcacacgctaagtccacgagaattaaacgtattattagcaggtggccttatcaattggataaaacaataa

SEQ ID NO: 103138 - protein, 642 aa, Rickettsiella grylli
MSQNVTQKLINLHKVEGELQSGAEIALKIDQTLCQDATGTMVMLECEAMGIHQTKAEVSVQYIDHNLLQTDFKNADDHLFLLSACKKFGLYFSGPGNGVSHPVHMERFGKPGKTLLGSDSHTCAAGSLCMLAIGAGGLEVAMAIAGYPFHVTMPKVWGVKLTHSPPDWVSAKDVILELLRRHDVDGGIGKIIEYYGPGLRYLSAMDRHVIANMGAELGATTSVFPSDATTREFLKLQQRESDWQEIIADKNASYDEHDEINLSKLEPLIALPSSPGKVVSIQEVVGRPIYQAMIGSSANPGLRDFAIAAEIVAGQQVAPGISFDINPTSRQILENMVELGILDQLIRAGGRIHQAGCNGCIGMGQAPASGKISLRTVPRNFPGRSGTKADQVYLCSPEIAAASALTGVITDPRSLNKVYLRFKEPEKISINISMLVPPPKNSKDVKLAKGPNIQPLPIFPPLADNIEGPVLMKVGDNISTDTILPAGAKVLPFRSNIIGISQFVFDQIDSSYPKRALDYQKTGSIIVGGENYGQGSSREHAAIAPRYLGVQAVLVKQFARIHRQNLVNFGILPLIFNTASDYDTIDQEDILFIQNVRETIQNSKVITIHNKTKNKSYLAAHTLSPRELNVLLAGGLINWIKQ

SEQ ID NO: 103139 - DNA, 1428 bp, Oceanobacter sp. RED65
  CDS (1)..(1428): transl_table=11
atgggtaaaaccttatacgacaagttgtgggatcagcatttggtgaaagagcgtgaggacggcactgcgcttatctatattgatcgtcaattgctgcacgaagtgacatctcctcaggcatttgaaggtctgcgtttggcgagtcgtaagccatggcgtattgatgccaacatcgcgacgccggatcacaatgttccgacaacggcaaaagagcgcttgtcgggtatcgaaggtattcaagatcctgtatcgaaaatccaggtaaagacgttggatgataactgcgatgagttcaatattcttgaatttaaaatgcaggataagcgtcaaggtatcgtgcatgtggttggtccagagcagggcgccacgttgccgggtatgaccgtagtgtgtggtgatagccatacatccactcatggtgcgtttgcagcattagcccatggtatcggcacatctgaggttgaacacgtattggcaactcaatgtttgattcagcgcaaaatgaaaaacctattgatcaagattgatggcaaattgggtgcgggtattacaggtaaagatgttgtattgcatgtgattggtgtaatcggtacggctggtggtactggctatgcgatggaatttggtggctcagccatgaaagagctaagcatggaagcccgcatgaccatgtgcaacatggcaattgaggctggcgctcgtgcaggtatggtggcatttgatcagatcactgcagactatgttaagggtcgcgcgtatgcccctaaaggtgatcagtgggaacaagcgttagcagcatggaaagatctaaagtctgacgatgacgcgcagttcgataaagtagttgaaataaaagctgaagacatcaagccacaggtgacttggggtacttctcctgagatggtgaccacagtagacggctttgtgccgactcctgaagatgctaaagatgacgtggagcgctctgcgtttgcccgtgcgtatgagtacatgggtctagaagcgggccaagccatcactgatatccagttggatcgagtgtttattggctcttgtactaatagtcgtattgaagatttacgtgccgctgcagcggtagcgaaaggcaataaagtggcgccgtctttgaagcaggcgcttgttgttcctggttctggtttagtgaaagaacaagccgagcaagaaggtttggataaaattttcgtggaagccggttttgaatggcgtgagccaggttgttcaatgtgtcttgccatgaacgcggataagttaggtagcggtgagcactgtgcgtcgacgtcaaaccgtaacttcgaaggtcgtcaagggtacggtggtcgtacgcatttggtgagtcctgcgatggcggctgcagcggcgatcgctggtcattttgttgatgttcgtgaatttaacctagacgcttaa

SEQ ID NO: 103140 - protein, 475 aa, Oceanobacter sp. RED65
MGKTLYDKLWDQHLVKEREDGTALIYIDRQLLHEVTSPQAFEGLRLASRKPWRIDANIATPDHNVPTTAKERLSGIEGIQDPVSKIQVKTLDDNCDEFNILEFKMQDKRQGIVHVVGPEQGATLPGMTVVCGDSHTSTHGAFAALAHGIGTSEVEHVLATQCLIQRKMKNLLIKIDGKLGAGITGKDVVLHVIGVIGTAGGTGYAMEFGGSAMKELSMEARMTMCNMAIEAGARAGMVAFDQITADYVKGRAYAPKGDQWEQALAAWKDLKSDDDAQFDKVVEIKAEDIKPQVTWGTSPEMVTTVDGFVPTPEDAKDDVERSAFARAYEYMGLEAGQAITDIQLDRVFIGSCTNSRIEDLRAAAAVAKGNKVAPSLKQALVVPGSGLVKEQAEQEGLDKIFVEAGFEWREPGCSMCLAMNADKLGSGEHCASTSNRNFEGRQGYGGRTHLVSPAMAAAAAIAGHFVDVREFNLDA

SEQ ID NO: 103141 - DNA, 1401 bp, Alteromonadales bacterium TW-7
  CDS (1)..(1401): transl_table=11
gtggcccaaacgttatacgacaaaatttggcaagcacataccgttgccagcataaacgagcaaactgatttactttatattgaccgtcatttagttcacgaggtgacatcaccacaggcttttgctggcctacgtgaaaaaaaccgtacggtacgctgcccagaaaaaacctttgcaacaatggatcataacgtatcgactaaaagccgatcacttgatgccgcaagcgaagtgtctaaaaaccagttaatggcactagatgcgaactgtaaagagtttggcattgtactttacgatttaaactcaattaaccaaggtattgtgcatgtaatgggcccagagcaaggtattacactgcctggcactaccattgtatgtggtgatagccatacttctacgcatggtgcgtttggcgcattagcacatggtattggtacctctgaggttgagcatgtattagcaacgcaaacgctacagcaaaaaaaggcaaaatcgttaaaaattcaaattaacggtgtgcttcgcccaacagtaacctctaaagatttaattatggcggttattggtaagttaggtacagctggtggtacaggttatgtagcagagttttgtggtgaaggcattgaagcactttcaatggaagcccgtatgacactatgtaacatgagcatagaaatgggtgcaaaagcaggattaatagcaccagataaaattacgtatgattacttaaaaggtcgtccatttgcacctaaaggcgctgactttgacgccgcagttgaatattgggaaaccttaaaaacagacgaatgcgctgagtttgacctgagtgttgagcttgaagctgacgacattcagccacaaattacctggggtacaagcccagagcaagtaattggtgttgatgaatgcataccagatccagaccaagaaccagatttgattaaagccgatgctatacgcagcgcacttagatacatggacttaaaagccggcgataaattatcaagcgcgaaagtagatacggtctttattggctcttgtactaatagccgtattgaagatttacgtgccgcagcaaatattgttgaaggcaagcaggtagtcgcaggcattgaagcacttattgtaccgggctctggtcttgttaaaaagcaagccgaagacgaaggcttagccgatatttttatagcggcaggttttgagtggcgcgagccgggctgttcaatgtgtttagcaatgaacgacgaccgcttagaggcgggcaaacgctgtgcatctacgtctaaccgtaactttgaaggtcgccaaggtcgtggcggacgtacacatttagtaagccctgcaatggcggcagccgctgcaatacatggtcactttgttgatataagaggagaagcctaa

SEQ ID NO: 103142 - protein, 466 aa, Alteromonadales bacterium TW-7
MAQTLYDKIWQAHTVASINEQTDLLYIDRHLVHEVTSPQAFAGLREKNRTVRCPEKTFATMDHNVSTKSRSLDAASEVSKNQLMALDANCKEFGIVLYDLNSINQGIVHVMGPEQGITLPGTTIVCGDSHTSTHGAFGALAHGIGTSEVEHVLATQTLQQKKAKSLKIQINGVLRPTVTSKDLIMAVIGKLGTAGGTGYVAEFCGEGIEALSMEARMTLCNMSIEMGAKAGLIAPDKITYDYLKGRPFAPKGADFDAAVEYWETLKTDECAEFDLSVELEADDIQPQITWGTSPEQVIGVDECIPDPDQEPDLIKADAIRSALRYMDLKAGDKLSSAKVDTVFIGSCTNSRIEDLRAAANIVEGKQVVAGIEALIVPGSGLVKKQAEDEGLADIFIAAGFEWREPGCSMCLAMNDDRLEAGKRCASTSNRNFEGRQGRGGRTHLVSPAMAAAAAIHGHFVDIRGEA

SEQ ID NO: 103143 - DNA, 1428 bp, marine gamma proteobacterium HTCC2143
  CDS (1)..(1428): transl_table=11
atggctggtaagactttgtatgacaagttgtgggatgcccatgtggtcaagcagcgcaaggatggtacagcgctgatttatatcgaccgacagttggtgcatgaagtgacatcacctcaggcttttgaaggcttgcgtattgccggccgaaaactgtggcgggccgacgccaatctggcgacaccggatcacaatgtcccgtctctaaaatcagagcgcgacggtggtgtggctggaatcgtggaggatgtttcccgtattcaagtggaaaccttggacgacaactgcgatgaatttggggttaccgagtttgaaattaacgatattcgacaaggcattgtgcatgtcgttggtccggaacagggcgcaactttgccgggcatgaccgtggtgtgtggtgactcccatacggcaacgcacggcgcgcttggcgcgttggctcatggtattggaacgtctgaagttgaacatgcgatggcaacccagtgtttaattcagaagaaaatgaaaaatatgctgatccgagttgatggcacattacggcccgggattacgcccaaagatgtcattttggcgattattggcaaaattggtacagcgggtggtactgggcatgcaatagagtttggcggtagcgtctttcgtgatatgtcgattgagggccgtatgacagtctgcaacatggcgattgaggccggtgcgctcgttggtatggtcgcggtggatcagaccacgctagattatgtcgagggtcggccctatgcaccgaaagcggaactctgggcgcaggcagtgaattattggcgcacgttgcgcagcgatgatgatgccagctttgatacgattgtggaggtggatgcagagacgattgtcccgcaggtcacctggggtaattctccggagatggtagcggccattgacggcgtagtgccatcgcctgagactacgagtgatccggcgaaaagagcggccatcgaacgggcgctggaatatatgggattgaccggaggaatggcgataaccgatattcaattggactgtgtcttcattggttcgtgtactaactctaggatagaggatctgcgagctgcagccgccgtggttaaaggtaaaactaaagcggcaagtgttaagcgggcactggttgtccctggctcagggttggtgaaagctcaagcggaaagggaaggtttggacaagatttttgttgacgcgggccttgagtggcgagagccgagctgttcaatgtgtttggccatgaattctgacaaattgggtgacggagagcactgtgcctcaacatcgaatcgcaattttgaagggcggcaaggcttcggtggtcgaactcatctggtaagtccagagatggccgcagcggcggctatcgccggacattttgtcgatgtgcgtgatgttatgggcttatag

SEQ ID NO: 103144 - protein, 475 aa, marine gamma proteobacterium HTCC2143
MAGKTLYDKLWDAHVVKQRKDGTALIYIDRQLVHEVTSPQAFEGLRIAGRKLWRADANLATPDHNVPSLKSERDGGVAGIVEDVSRIQVETLDDNCDEFGVTEFEINDIRQGIVHVVGPEQGATLPGMTVVCGDSHTATHGALGALAHGIGTSEVEHAMATQCLIQKKMKNMLIRVDGTLRPGITPKDVILAIIGKIGTAGGTGHAIEFGGSVFRDMSIEGRMTVCNMAIEAGALVGMVAVDQTTLDYVEGRPYAPKAELWAQAVNYWRTLRSDDDASFDTIVEVDAETIVPQVTWGNSPEMVAAIDGVVPSPETTSDPAKRAAIERALEYMGLTGGMAITDIQLDCVFIGSCTNSRIEDLRAAAAVVKGKTKAASVKRALVVPGSGLVKAQAEREGLDKIFVDAGLEWREPSCSMCLAMNSDKLGDGEHCASTSNRNFEGRQGFGGRTHLVSPEMAAAAAIAGHFVDVRDVMGL

SEQ ID NO: 103145 - DNA, 1473 bp, marine gamma proteobacterium HTCC2080
  CDS (1)..(1473): transl_table=11
atggaggcgctttaccaacaaaactggtcccggagacgacttatgggcaaaaccttatatgacaaattgtgggaaagtcatttggtagaggcccgcgatgacggcaccgcgttgatctatattgaccgacaactactgcatgaggttacatcgcctcaggcctttgagggtttgagacttgcagggcgccagccctggcgaatcagcgccaatatcgcagtgcccgatcacaatgtgtcaactaaggccaaagagcgtgctcagggtttagcaggggttaaagaccaagtttcccgtatccaactgcagactctggacgacaattgtgcggaatatcagattcctgaaatcccgcttaacgatgtgcgtcagggaattgtgcacgttatgggtccagaacagggcgcaactttaccggggatgacaattgtctgcggggattctcacacgtccactcatggcgctatggccgctttggctcacggtatcggtacctccgaagtcgagcatgtattggccaccggttgcttgatacagcgcaaaatgaagaactttcgtgtgagcgtggagggcgaactacctgttggtgtcactggaaaggatattgcgctagcaatcgtcggcgaaatcgggactgctggggggactggctgtgctatagagtttgccggctcggccgttcgtggtcttaccatggaggggcggatgacgctgtgcaacatggcaattgaggctggagctcgtgcgggcttggttgctgttgacgaccaaacgcttcgatatgtgtcgcaaacaccctttgcgccgcgggacgctcagtgggatcaagcagagacttattggcgtacgttgcatagcgacgctgacgcagtttttgatcgcgaggttgttctcgatgccgccgcgattcagcctcaggttacttggggaacttcgcctgaaatggtcactgctatatctggacgagttcccaggcccgaggatatggagacagacaccgcccgacaggggcttgaacgtgcgctgtcttatatgggcctcgaacccggaatgctcattactgacataaggccggatgttattttcataggctcttgtactaactctcgtattgaggatatgcgtgcggcggctgcagtgctcaaggggaagcgagttgctgcgaatattacacaggccttagtggtgccgggctctggtttggttaaaaaacaagccgaagcagaggggcttgatcaggttttcaaggatgcgggtatggaatggcgcgagcctgggtgttcgatgtgtctcgctatgaatgctgacaagttggagccgggccaaagatgtgcgagcacatcaaatcgaaattttgaggggcggcagggatttggtggaagaacccaccttgtgagtccggccatggcggcggcagcggcggtggcagggcatttcaccgatgtgcgagatgtcatggaggctacatcatga

SEQ ID NO: 103146 - protein, 490 aa, marine gamma proteobacterium HTCC2080
MEALYQQNWSRRRLMGKTLYDKLWESHLVEARDDGTALIYIDRQLLHEVTSPQAFEGLRLAGRQPWRISANIAVPDHNVSTKAKERAQGLAGVKDQVSRIQLQTLDDNCAEYQIPEIPLNDVRQGIVHVMGPEQGATLPGMTIVCGDSHTSTHGAMAALAHGIGTSEVEHVLATGCLIQRKMKNFRVSVEGELPVGVTGKDIALAIVGEIGTAGGTGCAIEFAGSAVRGLTMEGRMTLCNMAIEAGARAGLVAVDDQTLRYVSQTPFAPRDAQWDQAETYWRTLHSDADAVFDREVVLDAAAIQPQVTWGTSPEMVTAISGRVPRPEDMETDTARQGLERALSYMGLEPGMLITDIRPDVIFIGSCTNSRIEDMRAAAAVLKGKRVAANITQALVVPGSGLVKKQAEAEGLDQVFKDAGMEWREPGCSMCLAMNADKLEPGQRCASTSNRNFEGRQGFGGRTHLVSPAMAAAAAVAGHFTDVRDVMEATS

SEQ ID NO: 103147 - DNA, 1296 bp, Candidatus Desulfococcus oleovorans Hxd3
  CDS (1)..(1296): transl_table=11
atgggaaaaacgattgcacagaaaatttttgacgcgcatagtgtggaccagccctttggagaggttcatgtgataaggcttgacggtgtgttctgtcatgagatcaccacacccacagccatctgcgacctgatggaaaaaaataaggaccgggtctttgatccgtcaaagatcaaggcggtgatcgaccacgtgaccccggccaaggactccaagaccgcggcccagggaaagatcctgcggcagtgggcccggcgtcacggcatcgacgggtttttcgatatcggccgcaacggcgtgtgccacgcgctttttcctgagcaggggtttgtgcggcccggccacaccattatcatgggagactcccacacctgcacctacggcgcttttggcgcctttgccgcgggcgtgggcaccaccgacctggaggtgggtattttaaagggcgtctgcgccttaaactatccgtccaccatcaaggtggtgttaaacgggaagctttcccccggcgtttatgccaaggacgtgatcctggcggtgattgccgagctgggggtcaacggcgccaccaaccgggtgattgagtttaccggcccctgcgtggacgctatgagcatggaggcccgcatgaccctgtgcaacatggccatcgaggccgggggcacctgcggcatctgctatccggacaagaccaccgtggcctacctgtgggagttcatcaagggcgaatacccttcccggcaggcggctctcaaggcgttcaagaaactggtatccgacccggacgcggattacgaccgggtactggaaatggatatcagcgacctgtcgccccgggtgacctacggctacaagccggactgtgtcaaacccgtggccgagatggagggcacccccatcgaccaggtctatatcggctcgtgcaccaacggccggctggaggacctgcgggtggccgcaaaagtactgaaaggcaaaaaggtgcatccgtcggtgcggggcattgtctctccggccacgcccacggtgtttcaggccgcgcttgaggagggactgatcgcgacgttcatggccgcgggtttctgtgtcaccaaccccacctgcggggcctgcctgggcatgagcaacggcgtgctggccccgggcgaggtgtgcctgtccaccaccaaccggaatttcaacggccgcatgggcaagggcggcatggttcacctggccagcccggccacggccgcggccggcgccattgccggttgcatcaccaactcgaaactgtataaaaaacgcgcggagtag

SEQ ID NO: 103148 - protein, 431 aa, Candidatus Desulfococcus oleovorans Hxd3
MGKTIAQKIFDAHSVDQPFGEVHVIRLDGVFCHEITTPTAICDLMEKNKDRVFDPSKIKAVIDHVTPAKDSKTAAQGKILRQWARRHGIDGFFDIGRNGVCHALFPEQGFVRPGHTIIMGDSHTCTYGAFGAFAAGVGTTDLEVGILKGVCALNYPSTIKVVLNGKLSPGVYAKDVILAVIAELGVNGATNRVIEFTGPCVDAMSMEARMTLCNMAIEAGGTCGICYPDKTTVAYLWEFIKGEYPSRQAALKAFKKLVSDPDADYDRVLEMDISDLSPRVTYGYKPDCVKPVAEMEGTPIDQVYIGSCTNGRLEDLRVAAKVLKGKKVHPSVRGIVSPATPTVFQAALEEGLIATFMAAGFCVTNPTCGACLGMSNGVLAPGEVCLSTTNRNFNGRMGKGGMVHLASPATAAAGAIAGCITNSKLYKKRAE

SEQ ID NO: 103149 - DNA, 1434 bp, Pseudomonas putida GB-1
  CDS (1)..(1434): transl_table=11
atggctggcaaaacgctctacgacaaactctgggaagcccatgaggtcaagcgccgtgatgacggctcgtccttgatctacatcgaccgccacatcatccacgaagtgacgtcgccccaggccttcgaaggcctgcgcctggccaaccgcaaaccgtggcgcatcgacaccaacatcgccacgcccgaccataacgtgccgaccacgccagagcgcaagggcggtatcgaggccatcgtcgaccaggtgtcgcgcctgcaggtgcagaccctcgacgagaactgtgacgaatacggcatcgtcgaattcaagatgaatgacgagcgccaaggtattgtccatgtcatcagcccggagcagggtgccaccttgccgggcatgaccgtggtctgcggtgactcgcacacttccacccacggcgccttcggtgccttggcccatggcatcggcacctccgaggtcgagcacgtgctcgccacccagtgcctggtcgccaagaagatgaagaacatgctggtgcgcgtggaaggccaattgccagccggcgttaccgccaaggacatcgtgctggccgtgatcggcaagatcggcacggccggtggcaacggccacgccatggagttcgctggcagcgccatccgcgaactgtcgatggaaggccgcatgaccatctgcaacatgtccatcgaagccggtgcccgtgtgggcctggtggcgaccgacgccactaccgttgcctacgtcgaaggccgcccgtacgcgccgaaaggcgagcaatggaagcaagcggtcgaatcgtggaaagacctggtgtcggatgaagacgccgtgttcgacaccgtggtcgagctggatgccagccagatcaagccacaggtcagctggggcacttcgcccgagatggtcctggccgtcgaccagcgcgtaccggacccggctgccgaagccgacctggtcaagcgtggttcgatcgagcgtgcgttgaagtacatgggcctgaccgccaaccaggcgatcaccgatatcaaactggaccgcgtgttcatcggctcgtgcaccaattcgcgtatcgaagacctgcgcgccgcggcggaaatcgccaagggccgcaaggtggccgccagcgtcaagcaagccatcgtcgtaccgggctcgggcctggtcaaagcccaggccgagcgtgaaggcctggacaagatcttcctcgaagccggtttcgaatggcgtgaaccaggctgctcgatgtgcctggcgatgaacccggaccgcctggagagcggcgagcattgcgcgtccacctccaaccgcaacttcgaaggccgccagggcgccggtggtcgtacccacctggtcagcccggccatggccgccgctgctgcggtagccggccatttcatcgatgtccgcgagttgatccaagggagcgcagcatga

SEQ ID NO: 103150 - protein, 477 aa, Pseudomonas putida GB-1
MAGKTLYDKLWEAHEVKRRDDGSSLIYIDRHIIHEVTSPQAFEGLRLANRKPWRIDTNIATPDHNVPTTPERKGGIEAIVDQVSRLQVQTLDENCDEYGIVEFKMNDERQGIVHVISPEQGATLPGMTVVCGDSHTSTHGAFGALAHGIGTSEVEHVLATQCLVAKKMKNMLVRVEGQLPAGVTAKDIVLAVIGKIGTAGGNGHAMEFAGSAIRELSMEGRMTICNMSIEAGARVGLVATDATTVAYVEGRPYAPKGEQWKQAVESWKDLVSDEDAVFDTVVELDASQIKPQVSWGTSPEMVLAVDQRVPDPAAEADLVKRGSIERALKYMGLTANQAITDIKLDRVFIGSCTNSRIEDLRAAAEIAKGRKVAASVKQAIVVPGSGLVKAQAEREGLDKIFLEAGFEWREPGCSMCLAMNPDRLESGEHCASTSNRNFEGRQGAGGRTHLVSPAMAAAAAVAGHFIDVRELIQGSAA

SEQ ID NO: 103151 - DNA, 1419 bp, Marinobacter sp. ELB17
  CDS (1)..(1419): transl_table=11
atggcgggtaaaaccttgtacgacaaattgtgggacgatcatctggtaaaacagcgtgatgacggctctgcgcttatttacattgaccgccacctgctgcacgaagtgacgtcgccgcaggcgtttgaaggtctgcgcctggccaaccgaaagccttggcggattgatgccaatctggcaacgcccgaccataacgtgcctaccactgaccgcgccatgggaatcaacggcattgtagacccggtatcgcgcattcaggtagaaaccctggacagcaactgcgacgagttcggcattcttgaattcaagattaaagaccaacgccagggcatagtgcacgtgatcggccccgagcagggtgcaaccttgcccggtatgaccattgtctgcggtgattcccatacctcgacccacggcgcttttggctgcctggcccacggtattggtacctcggaagtggaacacgtgctggctacccagtgcctggtgcagcagaaaatgaaaaacatgctggtgaaagtgaagggccagttgggtaaaggcgtaaccgccaaagacgtagtgctggcgattattggcaaaatcggtaccgctggcggttccgggcatgctatcgagtttggcggcgacgccatacaaggcctgagtatggaaggccggatgacggtgtgtaatatggcgattgaagccggcgcccgcgttggcatggtggcggtagacggcaccactattgattacgtcaagggtcggccgttttcacccgaaggtgaagcctgggatgcagccgttgctcattggcgcaccttgcacagtgacctgagcgccgaattcgacaaagtggttgagcttgaaggggcggatattcagcctcaggtaagctggggcacctccccggaaatggtggcgaatgtggccggccgggtgccagatccggcgcaagaaaccgatttgataaaacgtgaagggcttgaacgtgcgctgaaatacatgggcctgctgcccaatcagttgatcaccgacatcaagctggaccggatatttattggttcctgtaccaacagccggattgaagacctgcgcgaggcggcgctggtagttaaaggccgcaaggtggcgggtagtttgaagcaggctatggtagtgccgggctcgggtttggttaaattgcaggccgaagccgaagggctggacaagattttcctggaagcgggcctggaatggcgcgaccccggttgctctatgtgcctggccatgaacgccgataagttgggccagggcgagcattgtgcgtctacctctaaccgcaactttgagggccgtcagggttttggcgggcgtacccacctggttagcccagctatggcagcggcggcagcgattgccggccattttgttgacgttcgtgaaatgctgaactga

SEQ ID NO: 103152 - protein, 472 aa, Marinobacter sp. ELB17
MAGKTLYDKLWDDHLVKQRDDGSALIYIDRHLLHEVTSPQAFEGLRLANRKPWRIDANLATPDHNVPTTDRAMGINGIVDPVSRIQVETLDSNCDEFGILEFKIKDQRQGIVHVIGPEQGATLPGMTIVCGDSHTSTHGAFGCLAHGIGTSEVEHVLATQCLVQQKMKNMLVKVKGQLGKGVTAKDVVLAIIGKIGTAGGSGHAIEFGGDAIQGLSMEGRMTVCNMAIEAGARVGMVAVDGTTIDYVKGRPFSPEGEAWDAAVAHWRTLHSDLSAEFDKVVELEGADIQPQVSWGTSPEMVANVAGRVPDPAQETDLIKREGLERALKYMGLLPNQLITDIKLDRIFIGSCTNSRIEDLREAALVVKGRKVAGSLKQAMVVPGSGLVKLQAEAEGLDKIFLEAGLEWRDPGCSMCLAMNADKLGQGEHCASTSNRNFEGRQGFGGRTHLVSPAMAAAAAIAGHFVDVREMLN

SEQ ID NO: 103153 - DNA, 1404 bp, Magnetospirillum gryphiswaldense
  CDS (1)..(1404): transl_table=11
atgtccaagccgcgcacgttgttcgacaagatctgggacgcccatctggtggacgttcaagacgacggcacctgcctgatctatatcgatcgccacatggtgcatgaagtcaccagcccgcaggcgttcgaaggtctgcgtctggccggccgcaaggtccgccacccggaactgaccctggcggtggccgatcacaacgtgccgaccaccgaccggtccaagggcatcgagaacgaggaaagccgcatccaggtggaaaccctggaagccaacgcccgtgatttcgccgtcgaatatctgcgcatggacgacatccgccagggcgtcgtccacatcgtcggccccgaacagggcttcaccctgcccggcaccaccatcgtctgcggcgacagccataccgccacccatggcgccttcggctcgctcgccttcggcatcggcacctcggaggtcgagcacgtgctggccacccagaccctggtgcagaagccggccaagaacatgcgcatcaccgtcaacggcaccgctccggctggcgtcaccgccaaggacatcgtgctggccatcatcggcaagatcggcaccgctggcggcaccggttatgtggtggaattcgccggcccggccatcaccagcctgtccatggaaggccgcatgacggtctgcaacatgaccatcgaagccggtgcccgcgccggcctgatcgcccctgaccagaccacctttgactacatcatgggcaagccgcgcgcccccaaggccgccgccttcgaagccgccgtgtcgtactggaagaccctgttcaccgatgcgggcgccaagttcgacgctgaaatcgaactggacgccagcaccctggtgccgcagatcacctggggcaccagcccggaagacgttatcgccatcaccggcaccgtgcccaaccccgccgatatcgccgatgaaaacaagcgccgcgccgtcgagcgttcgcttgaatacatgggcctgaccgcaggcatgaaggccaccgacatcgccgtcgacgttgtcttcatcggttcgtgcaccaatggccgcatcgaggatttccgcgctgccgccgaagtgttcaagggccgcaaggtcgccgccggcgtccaggcgctgatcgtgccgggctcgggtctggtcaaggaacaggcggaagccgagggcctggacaaggtgttcatcgaagccggcgccgagtggcgcgaacccggttgctccatgtgtctggccatgaacgccgaccagttgaagccgggccagcgttcggcctcgacctcgaaccgcaatttcgagggccgccagggccgcggcggtcgcacccatctggtcagcccagccatggccgccgccgccgccatcaccggcaagctgaccgacgtgcggtcgctgtaa

SEQ ID NO: 103154 - protein, 467 aa, Magnetospirillum gryphiswaldense
MSKPRTLFDKIWDAHLVDVQDDGTCLIYIDRHMVHEVTSPQAFEGLRLAGRKVRHPELTLAVADHNVPTTDRSKGIENEESRIQVETLEANARDFAVEYLRMDDIRQGVVHIVGPEQGFTLPGTTIVCGDSHTATHGAFGSLAFGIGTSEVEHVLATQTLVQKPAKNMRITVNGTAPAGVTAKDIVLAIIGKIGTAGGTGYVVEFAGPAITSLSMEGRMTVCNMTIEAGARAGLIAPDQTTFDYIMGKPRAPKAAAFEAAVSYWKTLFTDAGAKFDAEIELDASTLVPQITWGTSPEDVIAITGTVPNPADIADENKRRAVERSLEYMGLTAGMKATDIAVDVVFIGSCTNGRIEDFRAAAEVFKGRKVAAGVQALIVPGSGLVKEQAEAEGLDKVFIEAGAEWREPGCSMCLAMNADQLKPGQRSASTSNRNFEGRQGRGGRTHLVSPAMAAAAAITGKLTDVRSL

SEQ ID NO: 103155 - DNA, 2658 bp, Vitis vinifera
  CDS (1)..(2658)
  misc_feature (13)..(13): w is a or t
  misc_feature (62)..(62): s is g or c
  misc_feature (328)..(328): r is g or a
  misc_feature (339)..(339): y is t or c
  misc_feature (360)..(360): w is a or t
  misc_feature (363)..(363): k is g or t
  misc_feature (915)..(915): w is a or t
  misc_feature (1752)..(1752): m is a or c
atgcgtgtttcawcgtcatcgaatccttttgcgagcatactgaagacacttgagaagcctgsaggcggcgaattcggaaagtactacagcctgccggcgctcggcgatccaagaatcgataggcttccgtattctattaggattcttcttgaatcagcgattcggaattgtgacgagtttcaagttaaggctaaggatgttgagaagatcattgattgggagaattcttctcccaaacaggttgagattccgtttaagcctgctagagtgcttctacaggtgcctgttgatctagtcattgatcactcagtccaggttgatgttgccrgatcagaaaaygcagtgcaggcaaatatggawctkgagttccaacgaaacaaagaaagatttggttttctcaaatgggggtcaaatgcattccataacatgcttgttgttcctccaggatctgggatagtccaccaggtgaacctggaataccttggcagagttgtgtttaacacagagggcatcctttaccctgatagtgttgttggaacagattcacacactactatgatagatggattaggcgttgctggctggggagttggtggtattgaagcagaagctgcaatgcttggccagcccatgagcatggttctacctggtgtggttgggtttaaattatcaggaaaattgagagatggtgtgactgccactgatttggttttgacagtaactcaaatgctgaggaagcatggtgttgttggcaagtttgtggagttctatggtgaaggcatgcgtgaactgtcattagcagatcgtgccacaattgccaatatgtcccctgagtatggtgctaccatgggtttctttcctgtggatcatgtcactctgcaatatttgaaattgactggcagaagggatgaaacwccccaggttgagaaggtgtactcttcgtacctagaattgaatcttgaggatgtggaaccctgtgtatcagggcccaagaggccacatgatcgggttcctttgaaagaaatgaaagcggattggcattcttgcttagacaataaagttggatttaaggggtttgctataccaaaggaatctcaaagcaaggttgtggagttctcataccatgggactccagcacaacttaggcatggggatgttgttatagctgcaatcactagttgcacaaatacctcaaatcctagtgtaatgctgggagctgctttggttgcaaagaaagcttgtgaattaggattagaggtgaagccatggattaagacaagtcttgctcctgggtctggggttgtaaccaaatatttagagaagagtggcttgcaaaagtatttgaatcagctaggttttcatattgttggttatggatgcaccacatgcattgggaattctggagacattaatgaatcagtggcatcagctattagtgaaaacgacatggtagccgcagctgtgttatctggaaataggaattttgagggccgtgtgcatcctttaacaagggcaaattaccttgcttctcctccccttgtggttgcttatgctcttgctggcacagttgatattgattttgagaaggaacccattggggttgggaaagatggaaagcagatatttttcagggatatttggccatccactgaagaagtagcaaatgttgtacaatcaagtgtgttgcctgccatgtttaaggctacatatgaagcaatcacccaaggaaatcccatgtggaatcaattgtcmgtaccttccagcaccctctacacctgggacccgaaatcaacctatatacatgacccaccctactttaaaagcatgactatgtcccctccaggtcctcatggagttaaggatgcttattgcttgctcaattttggagacagtattacaactgaccacatctcgcctgctggtagcatccataaggacagtcctgcagccagatacctcatggaacgaggtgttgataggagagatttcaattcttatggaagtcgtcgtggtaatgatgagatcatggcaaggggtacttttgctaacattcgcattgtcaacaaactattgaaaggagaagttggacccaaaacacttcacattcccagtggcgagaaactctctgtttttgatgccgccatgaggtacaagagtgagggccaggataccattattctggctggtgccgagtatggtagtggaagctctcgtgaattgggctgccaagggtccaatgctgctggtataatccttgctaacgtcctattccttttagtttccatggggcatatacaattttgtctttgcattggcatgttaattttaaaatatacccagggtgtgaaagcagtgatagcaaagagctttgagcgaattcaccgcagtaatctggtgggtatgggtatcattcccctgtgctttaagcctgggcaggatgctgagactcttgggttgactggccatgaacgctacacgatcgaccttcctagctcagttagtgaaataaaaccaggtcaagatatcaccgtagtgacagacaatgggaaatcatttacttgtaccatgagattcgatacagaggtagaactggcttattttgatcatggaggcattctgcagtacgccatcaggaacttgatcggtgggagaagttaa

SEQ ID NO: 103156 - protein, 885 aa, Vitis vinifera
  misc_feature (5)..(5): The Xaa at location 5 stands for Ser, or Thr.
  misc_feature (21)..(21): The Xaa at location 21 stands for Ala, or Gly.
  misc_feature (110)..(110): The Xaa at location 110 stands for Arg, or Gly.
  misc_feature (120)..(120): The Xaa at location 120 stands for Asp, or Glu.
MRVSXSSNPFASILKTLEKPXGGEFGKYYSLPALGDPRIDRLPYSIRILLESAIRNCDEFQVKAKDVEKIIDWENSSPKQVEIPFKPARVLLQVPVDLVIDHSVQVDVAXSENAVQANMXLEFQRNKERFGFLKWGSNAFHNMLVVPPGSGIVHQVNLEYLGRVVFNTEGILYPDSVVGTDSHTTMIDGLGVAGWGVGGIEAEAAMLGQPMSMVLPGVVGFKLSGKLRDGVTATDLVLTVTQMLRKHGVVGKFVEFYGEGMRELSLADRATIANMSPEYGATMGFFPVDHVTLQYLKLTGRRDETPQVEKVYSSYLELNLEDVEPCVSGPKRPHDRVPLKEMKADWHSCLDNKVGFKGFAIPKESQSKVVEFSYHGTPAQLRHGDVVIAAITSCTNTSNPSVMLGAALVAKKACELGLEVKPWIKTSLAPGSGVVTKYLEKSGLQKYLNQLGFHIVGYGCTTCIGNSGDINESVASAISENDMVAAAVLSGNRNFEGRVHPLTRANYLASPPLVVAYALAGTVDIDFEKEPIGVGKDGKQIFFRDIWPSTEEVANVVQSSVLPAMFKATYEAITQGNPMWNQLSVPSSTLYTWDPKSTYIHDPPYFKSMTMSPPGPHGVKDAYCLLNFGDSITTDHISPAGSIHKDSPAARYLMERGVDRRDFNSYGSRRGNDEIMARGTFANIRIVNKLLKGEVGPKTLHIPSGEKLSVFDAAMRYKSEGQDTIILAGAEYGSGSSRELGCQGSNAAGIILANVLFLLVSMGHIQFCLCIGMLILKYTQGVKAVIAKSFERIHRSNLVGMGIIPLCFKPGQDAETLGLTGHERYTIDLPSSVSEIKPGQDITVVTDNGKSFTCTMRFDTEVELAYFDHGGILQYAIRNLIGGRS

SEQ ID NO: 103157 - DNA, 2337 bp, Aspergillus terreus; identical to SEQ ID NO: 67106
  CDS (1)..(2337)

SEQ ID NO: 103158 - protein, 778 aa, Aspergillus terreus; identical to SEQ ID NO: 67107

SEQ ID NO: 103159 - DNA, 1263 bp, Eubacterium barkeri
  CDS (1)..(1263): transl_table=11
atgggaatgacaatgacccagaagatcctggctgcccacgccagtctggatagcgtgaaagctggcgatctcattatggccgacctggatatggtcttagccaatgatatcaccggtccggtggccatcaacgtgtttgggaccatcgacaaggaaaaagtctttgataaggataagatcgccctggtgccggaccacttcgcgccggccaaggatattaaatccgctcagcagtgcaagcaggtccgctgcttcgcctgtgaccaggagattaccaattactttgaaatcggggaaatgggcatcgaacatgccctcctgccggaaaagggcttagtcgccgccggcgatgtggtcatcggtgcggactcccacacctgtacctacggtgccttaggcgccttctccactggtgtgggctccacggatatggccgtggggatggccacgggtaaggcttggtttaaggtccctgccgccctgcgctttaacctcaccggcacccttaataaaaacgtctctgggaaggacctcatcctccacatcatcgggatgatcggcgtggacggtgccctgtaccgctccatggaattcacgggaccaggggtggcctgcctgagcatggatgaccggttcaccatttccaacatggccattgaggccggtgggaagaacggtatcttcccggtggacgatcagaccatctcctatatggaagaacatggctccggggattataaagtttatgctgccgacgcggatgccgtttatgaaaagaccttcgacatcgatttaagtcagctgaaatccaccgtggcgttcccgcacctgccggaaaacacgaagaccgtggatgccatcgaagaaccggtaaccattgaccaggtggtcattggctcctgcaccaacggccgttttgaggatctcaagcgcgcggcagatattctccggggcaagcatgtgaagaagggtgtccggatgttagtcatccccgccacccataagatttatttagatgccatggaagcgggttatctccgtgagttcatcgaagccggggccaccatctcgacgcctacctgcgggccctgcctgggtggttacatggggattctggctgaaggagaacgctgtgtctccaccaccaaccggaacttcgtcggacgtatgggccatgtggattccgaggtctatctggccagcccggaagtcgctgcggcatctgccatcctgggacgtattgcgaccccagacgaattataa

SEQ ID NO: 103160 - protein, 420 aa, Eubacterium barkeri
MGMTMTQKILAAHASLDSVKAGDLIMADLDMVLANDITGPVAINVFGTIDKEKVFDKDKIALVPDHFAPAKDIKSAQQCKQVRCFACDQEITNYFEIGEMGIEHALLPEKGLVAAGDVVIGADSHTCTYGALGAFSTGVGSTDMAVGMATGKAWFKVPAALRFNLTGTLNKNVSGKDLILHIIGMIGVDGALYRSMEFTGPGVACLSMDDRFTISNMAIEAGGKNGIFPVDDQTISYMEEHGSGDYKVYAADADAVYEKTFDIDLSQLKSTVAFPHLPENTKTVDAIEEPVTIDQVVIGSCTNGRFEDLKRAADILRGKHVKKGVRMLVIPATHKIYLDAMEAGYLREFIEAGATISTPTCGPCLGGYMGILAEGERCVSTTNRNFVGRMGHVDSEVYLASPEVAAASAILGRIATPDEL

SEQ ID NO: 103161 - DNA, 1590 bp, Medicago truncatula
  CDS (1)..(1590)
atggcttcctctcttgttccttccacctccttcttccacaccaagaaggatctgtctctctctgctttctcatcaccatcttctcaacgatgtcacaaacatgcttcaaagagaatcacttgttctgttgctgcacctcaacagacacagcgtcaaccttcttcaactggatcagtgaagacagctatgactatgactgagaagataatggcgaaagcttctgagaaggggcatgttacacctggggataatatttgggttgatgttgatgttttgatgactcatgatgtttgtggtcctggttctattgggatttttaagaaggagtttggtcaggatgctaaggtttgggatcgtgaaaaggttgtaataatacctgaccactatatattcacaagcgatgaacgtgcgaatcgcaatgttgacatactcagagatttctgccatgagcaagatatcaagtacttttatgatattaaagatcttagtaatttcaaggtgaatccagattacaaaggtgtttgtcacattgctcttgctcaggaaggtcattgcaggccaggagaggttctcttgggcactgattctcacacttgtactgctggagcatttggtcaatttgcaacagggattggtaatactgatgctggttttgtgttgggtgcagggaagcttttgcttaaggtgcctccaactttgagatttgtaatggatggagaaatgccgaattatttgcttgccaaagatttgattctgcaaattattggtgaaataagtgtggctggtgcaacttacaaatcaatggagttcgttggctcaactgttgaaagcctaaacatggaagaacgaatgacattgtgcaacatggttgttgaagctggaggaaagaatggtgttattcctcctgatagcattacatataaatatcttgagggcaagacatctgtgccatatgaaccagtatatagtgaccagcaagcaagatttctttctgagtatagatttgatgtttctaaattggagccactggttgccaagcctcattcaccagataaccgtgctttggcaagagagtgcaaggatgtgaaaattaacagagtatacataggatcttgtacaggtggaaaaacagaagatttcatggctgctgcaaaagtttttctagcatcaggtaaaaaggtcaaagttcccacatttcttgtccctgcaacacagaaggtttggatggacgtgtatagtcttcctgtccctggatccggtggtaagacttgctcgcagatatttgaagaagctggttgtgacacacctgctagtcctagttgtggtgcttgtttgggtggcccgaaagatacttatgcccgcatgaatgaacctcaggcaagttccctgcttctttcccagcatcttttaatatatttttggtgtgctgttggcttttttgtggttgtggtttgtgtttcaaccacaaatagaaactttccagggcgaatgggacacagggaaggtgaaatatatttggcttctccgtatacagctgcagcatctgcattgaccggttatgttactgatccaagagagttcttgcagtaa

SEQ ID NO: 103162 - protein, 529 aa, Medicago truncatula
MASSLVPSTSFFHTKKDLSLSAFSSPSSQRCHKHASKRITCSVAAPQQTQRQPSSTGSVKTAMTMTEKIMAKASEKGHVTPGDNIWVDVDVLMTHDVCGPGSIGIFKKEFGQDAKVWDREKVVIIPDHYIFTSDERANRNVDILRDFCHEQDIKYFYDIKDLSNFKVNPDYKGVCHIALAQEGHCRPGEVLLGTDSHTCTAGAFGQFATGIGNTDAGFVLGAGKLLLKVPPTLRFVMDGEMPNYLLAKDLILQIIGEISVAGATYKSMEFVGSTVESLNMEERMTLCNMVVEAGGKNGVIPPDSITYKYLEGKTSVPYEPVYSDQQARFLSEYRFDVSKLEPLVAKPHSPDNRALARECKDVKINRVYIGSCTGGKTEDFMAAAKVFLASGKKVKVPTFLVPATQKVWMDVYSLPVPGSGGKTCSQIFEEAGCDTPASPSCGACLGGPKDTYARMNEPQASSLLLSQHLLIYFWCAVGFFVVVVCVSTTNRNFPGRMGHREGEIYLASPYTAAASALTGYVTDPREFLQ

SEQ ID NO: 103163 - DNA, 2310 bp, Aspergillus oryzae
  CDS (1)..(2310)
atgcctgctgccgataagaaacccaggaccttgtacgacaaggtcttggatgcgcacattgttaatgagcaagaagatggcactctcttgctgtatatcgatagacatcttgtccacgaagtgacttcaccacaagcctttgagggcctcaagaatgctggtcggaaagtccgccggcctgactgcactcttgtcacagttgatcacaacatcccgacatctactcgcaagaacttcaagaatgtcgaagaattcatcgaagagaccgactcccgtttgcaatgtaccacactggaagagaacgtaaaggacttcgggctcacatatttcggcatgggagataagcgtcagggtattgttcatatcattggtccagagcagggtttcactcttcctggaacgacggtcgtttgtggtgacagccatacctcgacacacggtgcctttggttccctcgctttcggtatcggtacaagtgaagtcgaacacgtcctcgccacccagacccttatctctcgcagaagcaagaacatgcgtatccaagtcgatggggagctccccgcaggtgtcaccagtaaggatgttgtcctccacatcattggtgttatcggaactgctggaggtactggtgccgttatcgaattctgcggctctgttattcgcggcttgagcatggaggctcgtatgtcgatgtgcaacatgtctattgaggctggtgctcgtgctggcatgatcgcacccgaccagatcacgttcgactacctcaagggtcgtcctctcgccccgaagtacgacagtgctgagtggaagaaggctgtcaactactggtccagtctggcttctgatgaagacgccgtctacgacaagacaatcgtgcttgatggcaaggacatcatcccaaccgtctcttggggtacttctcctcaggatgttgttcctatcaatggtgttgttccagggccggatgattttgaggatgagaaccgcaaacttgcctgcaagcgcgcacttgagtacatgggtctcgtggctggtactcctatgaaggaggtccagattgacaaggtcttcatcggctcttgcacgaacgctcgtattgaagatctgcgggcagctgccaaggttgttaggggtaagaagatcgcccctaatgtcaagcgcgcgatggtcgtccctggttctggtctcgtgaaggaacaggctgaagccgaaggtctcgacaagatcttcactgatgctggctttgagtggagagaagctggttgctccatgtgcctgggtatgaaccccgatattctctcgcccaaggagcgctgtgctagtacttcgaaccgtaatttcgaaggtcgccagggtgctcagggtcgtacccacctgatgtcccctgccatggctgcggcagctggtatcgtcggaaagcttgcggatgttcgtgagcatgttgtcactagccccgttctgggtaaggtgcaacccagggttgatgtccagccagaggcggaagatgtcgacactgaggaagaactcgaccgcatcttggaccagcccgcagacaacgaaccccacaccaacacctctggcggctcgagcgctggcttgcccaagttcaccacccttaagggcattgccgcccccatgaaccgctccaacgtcgacactgacgccatcattcccaagcagttcctgaagaccatcaagcgtactggtctcggcagcgcgctcttctacgaactgcgctacaaggatggccaggaagaccccgaattcatcctgaaccagggtgtctaccgcaactccaagatcctggttgtcaccggccccaacttcggctgcggtagctctcgtgaacacgcaccctgggccctcctcgacttcggcatcaagtgtgtcatcgctccctccttcgctgacatcttcttcaacaacaccttcaagaacggcatgctccccatcccgatctccgacgaagctgctctgcagaagatcgccgcggaggccagcgcaggtcgcgagatcgaaatcgaccttgtcaaccaggaaatcaaggatgcccagggcaacaagctttccggattcgatgttgacgctttccgcaagcactgcctggtcaatggcctggacgacatcggcctcactctgcagatggaagacaagatccgcgcattcgagaccaagcgcactctcgaaaccccctggctcgatggaagtgggtacctgaagcgtggcaaccgtggcgctaccatggttcaggctgcccctgtccctaagactaaccggggagatgtcaagaccgaacctttggaatggtaa

SEQ ID NO: 103164 - protein, 769 aa, Aspergillus oryzae
MPAADKKPRTLYDKVLDAHIVNEQEDGTLLLYIDRHLVHEVTSPQAFEGLKNAGRKVRRPDCTLVTVDHNIPTSTRKNFKNVEEFIEETDSRLQCTTLEENVKDFGLTYFGMGDKRQGIVHIIGPEQGFTLPGTTVVCGDSHTSTHGAFGSLAFGIGTSEVEHVLATQTLISRRSKNMRIQVDGELPAGVTSKDVVLHIIGVIGTAGGTGAVIEFCGSVIRGLSMEARMSMCNMSIEAGARAGMIAPDQITFDYLKGRPLAPKYDSAEWKKAVNYWSSLASDEDAVYDKTIVLDGKDIIPTVSWGTSPQDVVPINGVVPGPDDFEDENRKLACKRALEYMGLVAGTPMKEVQIDKVFIGSCTNARIEDLRAAAKVVRGKKIAPNVKRAMVVPGSGLVKEQAEAEGLDKIFTDAGFEWREAGCSMCLGMNPDILSPKERCASTSNRNFEGRQGAQGRTHLMSPAMAAAAGIVGKLADVREHVVTSPVLGKVQPRVDVQPEAEDVDTEEELDRILDQPADNEPHTNTSGGSSAGLPKFTTLKGIAAPMNRSNVDTDAIIPKQFLKTIKRTGLGSALFYELRYKDGQEDPEFILNQGVYRNSKILVVTGPNFGCGSSREHAPWALLDFGIKCVIAPSFADIFFNNTFKNGMLPIPISDEAALQKIAAEASAGREIEIDLVNQEIKDAQGNKLSGFDVDAFRKHCLVNGLDDIGLTLQMEDKIRAFETKRTLETPWLDGSGYLKRGNRGATMVQAAPVPKTNRGDVKTEPLEW

SEQ ID NO: 103165 - DNA, 2340 bp, Aspergillus oryzae; identical to SEQ ID NO: 67114
  CDS (1)..(2340)

SEQ ID NO: 103166 - protein, 779 aa, Aspergillus oryzae; identical to SEQ ID NO: 67115

SEQ ID NO: 103167 - DNA, 2412 bp, Aspergillus oryzae
  CDS (1)..(2412)
atggtgaggcagcttgtttggcagcgggccaccgcctctcgtaggctggctccgaagtgccttcccccacaaggactgttcaaccgccgcggtctggccacggaggcttcctcggtgtcctctcgcatgcccccctaccccaaaatcctgcgcaacttggaggaagtccgtcgtgtcttgggttcgtctcgggctctcaccctagcggagaagatcctctacgcccatctggcgaaccccgaggagtcattgctgtccggcacggacaatggacgtgatattcgcggcaaggcgaacctgaagttgaagccggaccgtgtggccatgcaagatgcctcggcacagatggctctattgcagttcatgtcgtgcggtctcccgtcgaccgcagtgcccgctagtattcactgcgaccatatgattgtgggtgagcgtggtgccgacaccgatttacctgcatcgatcaagggtaatagtgaagtgttcgatttcctggagagtgccgccaaacgctacggtattgaattctgggctcccggtgctggtatcattcaccagagcgtcctggagaactacgccgcccctggcttgatgatgctgggtactgacagccacaccccgaatgcgggtggtctcggcgctattgccattggtgtcggtggtgctgatgccgtggatgcgttggttgatgctccttgggagttgaaggcacctcgcgttctgggtgtgcgactggagggtaaactcaacggctgggctgctcccaaagacattatcctgcacttggcaggcaagctcaccgtccgtggaggaactggcttcatcattgagtatcacggaccgggtgtggaaaccttgagctgcactggccaggctaccatctgtaacatgggtgctgaggtgggtgctaccacttcggtgttcccattctctcccagcatgatcccgtatttgcaggccacgcaccgtggagatgtcgctaaggcggccgccgagattgccgcttcgggccccaagaaccttctgcgtgccgacaacggtgccgagtatgaccaggtgattactattgacctgtcgacactggagccacacatcaacggaccgttcacgccggatctgtctgttcccctttccgcctttgccgatactgttcgcgagaagaactggcccgaaaccttcggagctggactgattggtagctgcacgaacagctcctacgaagacatgactcgtgccgaggatctggtcaagcaggcctccgctgcgggcctcaagcccaaggcggatttctttatcaccccaggtagtgagcagatccgggcgaccctcgaccgcgaccagacgctctccacctttgcctctgcaggcggcactgtcctggccaatgcatgcgggccatgcattggtcagtggaagcggactgatggcgtggctaagggcgaggataacgctatcttcacttcgtacaaccgtaacttccccggccgtaacgacggcaaccgtcggacaatgaacttcctggcctccccagagcttgtcacagcgctggcgtattccggccgtactaccttcaaccctatgaccgacagcttgaccaccccgagtggtgaggagttccggttccagcccccaactggctctgcgctgcccgctgatggcttcgaagacggtaaccccgacttcaagcccaccgcggcggcccccgacgcgagctgcgaggtggttgtgtcgcccacttccgatcgattggctctgctggagccatttgctccctttcccaagggaaacctgtctggtctgaaggtgctgtacaaggtcaagggccagtgcaccacggacaccatctccgctgccggcccatggctcaagtacaagggccacctgcccaatatctccgccaacaccctgatcggcgccgtcaacgcagcaactggcgagaccaacgtcgcctacgacgaagccggcaagcagtattccatccccgacctggccgctcaatggaaggccgagggaatcgaatggctggtggtcgccgaggacaactacggtgagggtagcgctcgtgagcacgccgcgttgcagcctcgctacttgggcggacgcatcattctctctaagagcttcgcccgtattcacgagaccaacctcaagaagcagggtgtcgtgcctttgactttcgagaaccccgccgactacgaccgcattgacgcatgtgacaaggtcgacacagtcggactgtacgaaaccctgcaggcaggcggacagggctcgatcaagctgcaggtgaccaagcagaatggcgaggcatttgagattccagtgaagcacacgctgagcccggatcagtctgcattcatcctggcaggaagtgcattgaacttgttggcgcaaaaggcgggaaagtctaattag

SEQ ID NO: 103168 - protein, 803 aa, Aspergillus oryzae
MVRQLVWQRATASRRLAPKCLPPQGLFNRRGLATEASSVSSRMPPYPKILRNLEEVRRVLGSSRALTLAEKILYAHLANPEESLLSGTDNGRDIRGKANLKLKPDRVAMQDASAQMALLQFMSCGLPSTAVPASIHCDHMIVGERGADTDLPASIKGNSEVFDFLESAAKRYGIEFWAPGAGIIHQSVLENYAAPGLMMLGTDSHTPNAGGLGAIAIGVGGADAVDALVDAPWELKAPRVLGVRLEGKLNGWAAPKDIILHLAGKLTVRGGTGFIIEYHGPGVETLSCTGQATICNMGAEVGATTSVFPFSPSMIPYLQATHRGDVAKAAAEIAASGPKNLLRADNGAEYDQVITIDLSTLEPHINGPFTPDLSVPLSAFADTVREKNWPETFGAGLIGSCTNSSYEDMTRAEDLVKQASAAGLKPKADFFITPGSEQIRATLDRDQTLSTFASAGGTVLANACGPCIGQWKRTDGVAKGEDNAIFTSYNRNFPGRNDGNRRTMNFLASPELVTALAYSGRTTFNPMTDSLTTPSGEEFRFQPPTGSALPADGFEDGNPDFKPTAAAPDASCEVVVSPTSDRLALLEPFAPFPKGNLSGLKVLYKVKGQCTTDTISAAGPWLKYKGHLPNISANTLIGAVNAATGETNVAYDEAGKQYSIPDLAAQWKAEGIEWLVVAEDNYGEGSAREHAALQPRYLGGRIILSKSFARIHETNLKKQGVVPLTFENPADYDRIDACDKVDTVGLYETLQAGGQGSIKLQVTKQNGEAFEIPVKHTLSPDQSAFILAGSALNLLAQKAGKSN

SEQ ID NO: 103169 - DNA, 2421 bp, Aspergillus oryzae; identical to SEQ ID NO: 67118
  CDS (1)..(2421)

SEQ ID NO: 103170 - protein, 806 aa, Aspergillus oryzae; identical to SEQ ID NO: 67119

SEQ ID NO: 103171 - DNA, 1938 bp, Thiobacillus thiooxidans; identical to SEQ ID NO: 67122
  CDS (1)..(1938): transl_table=11

SEQ ID NO: 103172 - protein, 645 aa, Thiobacillus thiooxidans; identical to SEQ ID NO: 67123

SEQ ID NO: 103173 - DNA, 2367 bp, Antheraea yamamai; identical to SEQ ID NO: 67126
  CDS (1)..(2367)

SEQ ID NO: 103174 - protein, 788 aa, Antheraea yamamai; identical to SEQ ID NO: 67127

SEQ ID NO: 103175 - DNA, 2244 bp, Mucor circinelloides f
  CDS (1)..(2244)
atgtctcgcactctctatgataaagtctgggatgatcatgtcattgatcaacaagaagatggtacttgtttgatctatatcgacagacatctcgtgcatgaagttactagtcctcaagctttcgaaggtcttcgtaacgccaatcgtccagtacgtcgccctgattgtacactcgctactgtcgatcacaacattcctactacaacaagaaagaatttcaaaaatatcaccacttttatcaaggaagctgattcaagaactcaatgtgagacgcttgagcaaaacattgaagcctttggtcttacttatttcggcatggaggatagccgccaaggtattgtgcatgttattggccctgagcaaggtttcactctccccgcaaccactgttgtgtgcggcgattcacacacatccacacacggtgcctttggtgctctcgcttttggtattggtacatccgaagtagaacatgtacttgctactcaaaccctcttacaaaagaagtcaaagaacatgcgtattcgcgttcaaggtaaggctctccctggcgtcacatccaaggatatcgtccttcacatcattggtgtcattggtactgctggtggtactggttgtgttattgagttctgtggtgataccattgctgctctctccatgaagtcaagaatgtccatctgtaacatgtccattgaagctggtgctcgtgctggtatggtggctcctgatgaggtgacctttgaataccttcgtgataaacctctcgctcccaagggcgctgattgggatcgtgctgtcaaatactggaagtctctcagctctgatgccgatgccaaatacgatatcaacgtcgaaatcaacgctgctgatattgctcctactcttacctggggtaccagccctcaagatgtagtccccatcactggctccactcctgatcctgccaagattgaggatcccattcgtcgctctgctgtccaacgtgctctcgactacattggtattgctcccaacacccctatggaaggcgtcaaggtggataaggtattcattggtagttgtacaaactctcgtattgaggatctccgtgctgctgctgctgtggtaaagggtaagcgtgctgctgagtgggtggatgccatggtggtgcctggctctggtttagtcaagcgtcaagctgagcgtgaaggtttggacaagatctttactgacgctggtttcgattggagagaggctggttgttccatgtgtctcggtatgaaccctgatcaattgaagcctggagagcgttgtgcatctacatccaaccgtaatttcgagggtcgtcaaggtgctggtggtcgtactcatcttgtcagtcctgctatggctgctgctgctggcatcaagggctgtctcacagatgttcgtaacatggaagtctctgagatccctggcactcccaagcaaagccctcgtcaagaagtggttgctgaattcgagtctgaggaagacgatgttgattccagctctgttgattctgcccctgtcgctacacctcctagcacaggcgactctgctggtatgcccaagtttactactctcaagggttatgctgctcctcttgatatctccaatgtcgatactgatatgattattcccaagcaattcctcaagaccatcaagcgtactggtctcggtagtgctcttttctatgctcttcgtttcgaccctgctactggtgccgagaaccctgactttgtcctcaaccaagagccttaccgtcaagcacgtaccttggtctgcacaggtcctaactttggctgtggtagttctcgtgaacatgctccttgggcctttaacgattttggtattcgttgtatccttgcacccagttttgctgatatcttttacaacaactgcttcaagaacggtatgctccccattgtccttcctcaagatcaattagaggccattgctgccgaggccaagaagggctctgaagtggaagtggacttgatcaaccaagtggttcgttttgctggtcatgaagtgccctttgaggtagaagctttccgcaagcactgtctcgtcaatggcttcgatgacattgggttgaccatgcaaaaggctgacaagattgctgatttcgaggtgaagcgtactgaaacatggccttggttaaacggaaagggttataagggaaaggctactaaaatctctatcaacggtggaggtgaaaagaagaagaccaagctcgattggtaa

SEQ ID NO: 103176 - protein, 747 aa, Mucor circinelloides f
MSRTLYDKVWDDHVIDQQEDGTCLIYIDRHLVHEVTSPQAFEGLRNANRPVRRPDCTLATVDHNIPTTTRKNFKNITTFIKEADSRTQCETLEQNIEAFGLTYFGMEDSRQGIVHVIGPEQGFTLPATTVVCGDSHTSTHGAFGALAFGIGTSEVEHVLATQTLLQKKSKNMRIRVQGKALPGVTSKDIVLHIIGVIGTAGGTGCVIEFCGDTIAALSMKSRMSICNMSIEAGARAGMVAPDEVTFEYLRDKPLAPKGADWDRAVKYWKSLSSDADAKYDINVEINAADIAPTLTWGTSPQDVVPITGSTPDPAKIEDPIRRSAVQRALDYIGIAPNTPMEGVKVDKVFIGSCTNSRIEDLRAAAAVVKGKRAAEWVDAMVVPGSGLVKRQAEREGLDKIFTDAGFDWREAGCSMCLGMNPDQLKPGERCASTSNRNFEGRQGAGGRTHLVSPAMAAAAGIKGCLTDVRNMEVSEIPGTPKQSPRQEVVAEFESEEDDVDSSSVDSAPVATPPSTGDSAGMPKFTTLKGYAAPLDISNVDTDMIIPKQFLKTIKRTGLGSALFYALRFDPATGAENPDFVLNQEPYRQARTLVCTGPNFGCGSSREHAPWAFNDFGIRCILAPSFADIFYNNCFKNGMLPIVLPQDQLEAIAAEAKKGSEVEVDLINQVVRFAGHEVPFEVEAFRKHCLVNGFDDIGLTMQKADKIADFEVKRTETWPWLNGKGYKGKATKISINGGGEKKKTKLDW

SEQ ID NO: 103177 - DNA, 2244 bp, Mucor circinelloides f
  CDS (1)..(2244)
atgtctcgcactctctatgataaagtctgggatgatcatgtcattgatcaacaagaagatggtacttgtttgatctatatcgacagacatctcgtgcatgaagttactagtcctcaagctttcgaaggtcttcgtaatgccaatcgtccagtacgtcgccctgattgtacactcgctactgtcgatcacaacattcctactacaacaagaaagaatttcaaaaatatcaccacttttatcaaggaagctgattcaagaactcaatgtgagacgcttgagcaaaacattgaagcctttggtcttacttatttcggcatggaggatagccgccaaggtattgttcatgttattggccctgagcaaggtttcactctccccgcaaccactgttgtgtgcggcgattcacacacatccacacacggtgcctttggtgctctcgcttttggtattggtacatccgaagtagagcatgtacttgctactcaaaccctcttacaaaagaagtcaaagaacatgcgtattcgcgttcaaggtaaggctctccctggcgtcacatccaaggatatcgtccttcacatcattggtgtcattggtactgctggtggtaccggttgtgttattgagttctgtggtgataccattgctgctctctccatggagtcaagaatgtccatctgtaacatgtccattgaagctggtgctcgtgctggtatggtggctcctgatgaggtgacctttgaatacctccgtgataaacctctcgctcccaagggcgctgattgggatcgtgctgtcaaatactggaagtccctcagctctgatgccgatgccaaatacgatatcaatgtcgaaatcaacgctgctgatattgctcctactcttacctggggtaccagccctcaagatgtagttcccatcactggatccactcctgatcctgccaagattgaggatcccattcgtcgctctgctgtccaacgtgctcttgattacattggtattgctcccaacacccctatggaaggtgtcaaggtggataaggtattcattggtagttgtacaaactctcgtattgaggatctccgtgctgctgctgctgtggtaaagggtaagcgtgctgctgagtgggtggatgccatggtggtgcctggctctggtttagtcaagcgtcaagctgagcgtgaaggtttggacaagatctttactgacgctggtttcgattggagagaggctggttgttccatgtgtctcggtatgaaccctgatcaattgaagcctggagagcgttgtgcatctacatccaaccgtaatttcgaaggtcgtcaaggtgctggtggtcgtactcatcttgtcagtcctgccatggctgctgctgctggcatcaagggctgtctcacagatgttcgtaacatggaagtctctgagatccctggtactcccaagcaaagccctcgtcaagaagtggttgctgaattcgagtctgaggaagacgatgttgattccagctctgttgattctgcccctgtcgctacacctcctagcacaggcgattctgctggtatgcccaagtttactactctcaagggttatgctgctcctcttgatatctccaatgtcgatactgatatgattattcccaagcaattcctcaagaccatcaagcgtactggtctcggtagtgctcttttctatgctcttcgtttcgaccctgctactggtgccgagaaccctgactttgtcctcaaccaagagccttaccgtcaagcacgtaccttggtctgcacaggtcctaactttggctgtggtagttctcgtgaacatgctccttgggcctttaacgattttggtattcgttgtatccttgcacccagttttgctgatatcttttacaacaactgcttcaagaacggtatgctccccattgtccttcctcaagatcaattagaggccattgctgccgaggccaagaagggctctgaagtggaagtggacttgatcaaccaagtggttcgttttgctggtcatgaagtgccctttgaggtagaggctttccgcaagcactgtctcgtcaatggcttcgatgacattgggttgaccatgcaaaaggctgacaagattgctgatttcgaggtgaagcgtactgaaacatggccttggttaaacggaaagggttataagggaaaggctactaaaatctctatcaacggtggaggtgaaaagaagaagaccaagctcgattggtaa

SEQ ID NO: 103178 - protein, 747 aa, Mucor circinelloides f
MSRTLYDKVWDDHVIDQQEDGTCLIYIDRHLVHEVTSPQAFEGLRNANRPVRRPDCTLATVDHNIPTTTRKNFKNITTFIKEADSRTQCETLEQNIEAFGLTYFGMEDSRQGIVHVIGPEQGFTLPATTVVCGDSHTSTHGAFGALAFGIGTSEVEHVLATQTLLQKKSKNMRIRVQGKALPGVTSKDIVLHIIGVIGTAGGTGCVIEFCGDTIAALSMESRMSICNMSIEAGARAGMVAPDEVTFEYLRDKPLAPKGADWDRAVKYWKSLSSDADAKYDINVEINAADIAPTLTWGTSPQDVVPITGSTPDPAKIEDPIRRSAVQRALDYIGIAPNTPMEGVKVDKVFIGSCTNSRIEDLRAAAAVVKGKRAAEWVDAMVVPGSGLVKRQAEREGLDKIFTDAGFDWREAGCSMCLGMNPDQLKPGERCASTSNRNFEGRQGAGGRTHLVSPAMAAAAGIKGCLTDVRNMEVSEIPGTPKQSPRQEVVAEFESEEDDVDSSSVDSAPVATPPSTGDSAGMPKFTTLKGYAAPLDISNVDTDMIIPKQFLKTIKRTGLGSALFYALRFDPATGAENPDFVLNQEPYRQARTLVCTGPNFGCGSSREHAPWAFNDFGIRCILAPSFADIFYNNCFKNGMLPIVLPQDQLEAIAAEAKKGSEVEVDLINQVVRFAGHEVPFEVEAFRKHCLVNGFDDIGLTMQKADKIADFEVKRTETWPWLNGKGYKGKATKISINGGGEKKKTKLDW

SEQ ID NO: 103179 - DNA, 2244 bp, Bacteroides fragilis; identical to SEQ ID NO: 67130
  CDS (1)..(2244): transl_table=11

SEQ ID NO: 103180 - protein, 747 aa, Bacteroides fragilis; identical to SEQ ID NO: 67131

SEQ ID NO: 103181 - DNA, 1530 bp, Arabidopsis thaliana
  CDS (1)..(1530)
atggcttctgttatctcttcctctccttttctatgcaaatcatcctccaagagtgatttggggatttcttcgtttcctaaatcttctcagatttcgattcatcgatgtcagaagaaatcgatctcacggaagattgtttccgttatggctcctcaaaaggatcggtctcctggaactacaggatcggtgaaaactgggatgacaatgacggagaagattctagctagagcttcggagaagtcattagtggttcctggtgataacatttgggttaatgttgatgttcttatgactcatgatgtttgtggtcctggtgcttttggtatcttcaagagagagtttggtgaaaaagccaaggtttgggatccggagaagattgttgtgattccggatcattatattttcactgctgataagcgtgcaaaccggaatgttgacatcatgagggagcattgcagggaacagaatattaagtatttctatgatatcactgaccttggaaattttaaggctaatcctgactacaaaggtgtttgccatgttgcacttgcacaagaaggtcattgcaggccaggagaggttttgttaggaacagactcacacacttgtactgctggagcatttggtcaatttgctacagggattggaaacactgatgcaggttttgtgttaggcactggaaaaatcctccttaaggttccaccaacgatgaggtttatcttggatggtgagatgcctagttatttgcaagcaaaggatctgattttacaaattattggtgaaatatctgttgctggtgcaacttacaagacgatggagttcagtggtacaactatcgaaagtctgagtatggaagaaagaatgacattgtgcaacatggttgtggaagctgggggaaagaatggtgtcatccctcctgatgcgacgacattaaattatgttgaggcatgtatactgtcttgttttcttccagtatatagtgatggaaatgcaagctttgtcgcagattatagatttgacgtgtcaaagctggagcctgtggtggctaagcctcattctcctgacaaccgagctctagctagagaatgcaaagacgtgaaaattgacagagtatacatcggttcttgtactggtgggaagacagaggattttatggctgcagctaaacttttccacgcagcaggaagaaaggtcaaagttccaactttccttgtcccggctactcagaaggtgtggatggatgtgtatgctctcccggtacctggagcaggtggaaagacatgtgcgcagatctttgaagaagctggctgtgacacaccagccagccctagctgtggtgcttgccttggtggcccagcagacacctacgctcgcttgaatgaacctcaagtgtgtgtctcaacgacaaacaggaacttccccggtcggatgggacacaaagaagggcaaatttacttagcgtctccttacactgctgcagcctcggctttaaccggccgtgtcgctgacccaagggagttcttgcagtag

SEQ ID NO: 103182 - protein, 509 aa, Arabidopsis thaliana
MASVISSSPFLCKSSSKSDLGISSFPKSSQISIHRCQKKSISRKIVSVMAPQKDRSPGTTGSVKTGMTMTEKILARASEKSLVVPGDNIWVNVDVLMTHDVCGPGAFGIFKREFGEKAKVWDPEKIVVIPDHYIFTADKRANRNVDIMREHCREQNIKYFYDITDLGNFKANPDYKGVCHVALAQEGHCRPGEVLLGTDSHTCTAGAFGQFATGIGNTDAGFVLGTGKILLKVPPTMRFILDGEMPSYLQAKDLILQIIGEISVAGATYKTMEFSGTTIESLSMEERMTLCNMVVEAGGKNGVIPPDATTLNYVEACILSCFLPVYSDGNASFVADYRFDVSKLEPVVAKPHSPDNRALARECKDVKIDRVYIGSCTGGKTEDFMAAAKLFHAAGRKVKVPTFLVPATQKVWMDVYALPVPGAGGKTCAQIFEEAGCDTPASPSCGACLGGPADTYARLNEPQVCVSTTNRNFPGRMGHKEGQIYLASPYTAAASALTGRVADPREFLQ

SEQ ID NO: 103183 - DNA, 2370 bp, Saccharomyces cerevisiae; identical to SEQ ID NO: 67150
  CDS (1)..(2370)

SEQ ID NO: 103184 - protein, 789 aa, Saccharomyces cerevisiae; identical to SEQ ID NO: 67151

SEQ ID NO: 103185 - DNA, 1302 bp, Archaeoglobus fulgidus
  CDS (46)..(1302): transl_table=11
gtgcctaccagcaaagtttttatcacccccaattttggctttaacatggctcagacactggtagaaaagatattttcaaaggcgagcggtaaggaagtgaaagcaggagaattcgtaatggcaaacatcgacctcgccatgattcatgatataaccgctcctctcgcgattaaagctttcagggaaattctcggcagtgatgcaaaggtctgggacaaaagcaaggtgattatggccttcgaccatcaggtgccggcggacagcgtgcatgctgcagaaaaccacaagatgctgaggaagtttgctgaggagcaggggattctgaactacgatgttaaagggggaattgcccaccagataatggttgaaaaccacgttgagcccggaatgctgattgttggggccgacagccacacgtgcatgtatggggctttgggagctttcgccacaggtataggctcaacagacatgggcttcgttttggcgatgggaaagctgtggttcaaggttccagagtcaatcagattcaacgtccacggtaagctggaaaagcacgtttacggcaaggacatagtgctcaagctcatcggaatggttggggctgatggagcgaactacaaggcctgcatctacagcggagaggttgtggaaaagcttggaatgtctgataggctgaccatgtgcaacatggccattgaaatgggaggcaaggctggaattgtggagcccgacaaaacaacgcttgaatatttgaaggcaatgggcaggccctatgagggagagctgctgaaaagcgatgaggatgctgaatttcaggaagttgagcttgatgtgactggaatggagcctcaggtcgctgccccgcacagagttgacaacgtggttggaatatcggaggttgaggggacgagggttgatcaggttttcatcggctcctgcaccaacggcagatacgaggatttgaagattgcggctgagatactaaagggagagaaggttgcgtcaaatgtcagattaatagtcattcctgcaagccacagggagtacaggagggccttgaaggaagggctgattgagatattcgttgacgctggagcgctggttgaggccccgtgctgcgggccgtgcatgggaggaagctttggtttgattgcaagcggagaggttagtgtgtcaacctccaacaggaacttcatcggcaggcagggaagtcctgagggcaaaatctaccttgtgaatcctgcagtagcggcagcaacggcaatctacggagaaattaccgacccgagaaaaataaagtaa

SEQ ID NO: 103186 - protein, 418 aa, Archaeoglobus fulgidus
MAQTLVEKIFSKASGKEVKAGEFVMANIDLAMIHDITAPLAIKAFREILGSDAKVWDKSKVIMAFDHQVPADSVHAAENHKMLRKFAEEQGILNYDVKGGIAHQIMVENHVEPGMLIVGADSHTCMYGALGAFATGIGSTDMGFVLAMGKLWFKVPESIRFNVHGKLEKHVYGKDIVLKLIGMVGADGANYKACIYSGEVVEKLGMSDRLTMCNMAIEMGGKAGIVEPDKTTLEYLKAMGRPYEGELLKSDEDAEFQEVELDVTGMEPQVAAPHRVDNVVGISEVEGTRVDQVFIGSCTNGRYEDLKIAAEILKGEKVASNVRLIVIPASHREYRRALKEGLIEIFVDAGALVEAPCCGPCMGGSFGLIASGEVSVSTSNRNFIGRQGSPEGKIYLVNPAVAAATAIYGEITDPRKIK

SEQ ID NO: 103187 - DNA, 1539 bp, Bradyrhizobium japonicum
  CDS (106)..(1539): transl_table=11
atggcaccctgccaaaccgtcactgcacatttgcgggacgcgcttctatcctgcttcccaggattgccctcggtcggcatgatcggcggcactacggcacgtcagatgccgatcaggggaggacggatcgtggacacgcgtggtcgcacgctgctggccaaaatctgggaccagcatgtcatcgcccatgtcagcgatgacaccgatctgcttcatgtggatcgtcatctgctgcacgatctcggcggctcccgcgggctgatcgacctcaagagccgcaacctcccggtccacaatcccgagctgacttttgccacgcccgatcatgcgatttccacggcgtccgggcgcgccggcacgatcacgaccgggcaggagctgctggcggcgttgcggaccgagacatccgccagcggcatccggctgttcgacatcgaccagccggggcagggcatcgtccatgtcatcgggccggagctcggtctcagcctgcccggctgcctgatcgtctgcggcgacagccacacctgcacccatggcgggctcggcgcgcttgccttcggcatcggctccagcgagctcacgcatgtgctggcgacccagactatcatccagcgccggccgaaaaccatgcgcgtgacgttcgacggccgcatgccgttcggtgtcacggcgaaagatctcatcctcgctttgatcggccatgtcggcgccgccggcggcaccggttatgcggtcgagtacgccggcagcgcgatcaggggcatgccgatcgaagggcggctcaccatctgcaatctgtcggtcgaactcggtgccaagatggggctgatcgcgccggaccagacgacgttcgattatgtccggggacgtccctacgcgccgcaaggtgagatgtgggagcgggccgtcacggcgtggcggacgcttcggagcgacagcgacgcaatgttcgatcgcgaggtgacgatcgatgtcggcaccatcatcccccagatcacctggggcaccagtccggagcatgtcctcggtgtcgatggccgcgtcccggatccccgagacattgccgatcccgcgcgccgcggcgcgatcgagatcgcgctcgactatatgggcctgaagcccggcgcgccgatcgccggcacgaaggtcgattgggtcttcatcggctcctgcaccaacagccgtctcagcgatctgcgcgccgcggccgaggtcgcgcgcggccgcaaggtcgcgcccggcgtgcgcgcctgggtcgtgccgggttcggagaccgtcaagcgcgatgcggtggccgaggggctcgacaagatcttcatcgacgcgggcttcgaatggcgcgagcccggatgctcgatgtgcctcgccgcgaacggcgaaaccgtgccgcccggccagcgctcggtctcgacgtcgaaccggaatttcatcggccggcaagggccgcgtgcccgcacccatctggcgagcccggccatggccgcggcggcggcggtctccggcgccatcgccgatgtccgaaccatggagcgctag

SEQ ID NO: 103188 - protein, 477 aa, Bradyrhizobium japonicum
MPIRGGRIVDTRGRTLLAKIWDQHVIAHVSDDTDLLHVDRHLLHDLGGSRGLIDLKSRNLPVHNPELTFATPDHAISTASGRAGTITTGQELLAALRTETSASGIRLFDIDQPGQGIVHVIGPELGLSLPGCLIVCGDSHTCTHGGLGALAFGIGSSELTHVLATQTIIQRRPKTMRVTFDGRMPFGVTAKDLILALIGHVGAAGGTGYAVEYAGSAIRGMPIEGRLTICNLSVELGAKMGLIAPDQTTFDYVRGRPYAPQGEMWERAVTAWRTLRSDSDAMFDREVTIDVGTIIPQITWGTSPEHVLGVDGRVPDPRDIADPARRGAIEIALDYMGLKPGAPIAGTKVDWVFIGSCTNSRLSDLRAAAEVARGRKVAPGVRAWVVPGSETVKRDAVAEGLDKIFIDAGFEWREPGCSMCLAANGETVPPGQRSVSTSNRNFIGRQGPRARTHLASPAMAAAAAVSGAIADVRTMER

SEQ ID NO: 103189 - DNA, 1257 bp, Methanopyrus kandleri
  CDS (1)..(1257): transl_table=11
gtggggaagacgatggccgagaagatactgtctcgagcgtccggagaagacgctgaggcgggggatatcgtcgtcgccaacatcgacgtggcgatggtccacgatatcacgggcccgatcacggttcagcggctcgaggagatgggagtcgagcgcgtgtgggacccgtccaagatcgtcgtgctgttcgaccatcaggtgcccgcggactccgtggaagccgcggagaaccacaaaataatgcgggagttcgtcgaagaacagggtatcgagcacttctacgacgttcgggagggtgtctgtcaccaggtcctccccgagaagggtcacgtgcgtcccggggacgtgatcgtgggggccgactctcacacctgcacccacggagcgctcggagccttcgccaccgggatcggttccaccgacatggcggcggtctttgcgaccggtaagctgtggttccgcgtcccggaaacttaccgcgtagagatcacgggagagcttccggaaggtgtgtacgcgaaggatgtcgtgctcaaggtgacgggagaaatcggtgccgacggtgcgacgtacatggcgatcgagtaccacggcgaggtcgtccgagagatgtccgtatcggaccgtatgtgcctgtgcaacatggcgatcgagatgggagcgaagacgggaatggttccacccgacgagaagacgctcgagtacgtcaagaagcgtgcgggtacggaagggcgcccggttgagccggacccggacgcccggtacgaggccgagctgaccttggacgtgagcgacctcgagccgcaggtcgcgaagccgttctctccggacaacgtggtgcccgtgggggaggtcgaaggtatcgcgatcgaccaagtcttcatcggttcctgtaccaacggtcggtacgaggacctgaaggttgcggcggaggtacttgaaggcgaggaggtccacgacgacgtccggctgatcgtcatcccggcgtcgagggaagtttaccaccggacgctcaaggacggcgtgctcgaagtactccacgaggcgggggcactgatctgcccgccgaactgcggtccgtgcctgggtggccatatgggagtgctagcggaaggcgagcgatgcgtagcgacgtccaacaggaactttccgggtaggatgggacaccgcgagtcggaagtgtatctagccagtccggcgacggccgccgccagcgctatcgagggtgagatcaccgaccctcgtccctacctctaa

SEQ ID NO: 103190 - protein, 418 aa, Methanopyrus kandleri
MGKTMAEKILSRASGEDAEAGDIVVANIDVAMVHDITGPITVQRLEEMGVERVWDPSKIVVLFDHQVPADSVEAAENHKIMREFVEEQGIEHFYDVREGVCHQVLPEKGHVRPGDVIVGADSHTCTHGALGAFATGIGSTDMAAVFATGKLWFRVPETYRVEITGELPEGVYAKDVVLKVTGEIGADGATYMAIEYHGEVVREMSVSDRMCLCNMAIEMGAKTGMVPPDEKTLEYVKKRAGTEGRPVEPDPDARYEAELTLDVSDLEPQVAKPFSPDNVVPVGEVEGIAIDQVFIGSCTNGRYEDLKVAAEVLEGEEVHDDVRLIVIPASREVYHRTLKDGVLEVLHEAGALICPPNCGPCLGGHMGVLAEGERCVATSNRNFPGRMGHRESEVYLASPATAAASAIEGEITDPRPYL

SEQ ID NO: 103191 - DNA, 1272 bp, Pyrococcus abyssi
  CDS (1)..(1272): transl_table=11
atgggaatgacgatagctgagaagattttagcagatcactccgaaagggaggaggttaaacctggagaaatagtcatggccaagttggatttcgtgtttggaaacgatgtaacgatgcctctagctataaagaagtttagggaacttggagttaagagggttttcgatagggaaaggatagcgatagttctagatcacttcacgccaaacaaggatataaagagcgccgagcagtgcaaatcttcaagggagttcgccaaagagatgggaataaaatggtttttcgaaggaggaagtgtcggagttgaacactgcttacttccagagctaggtcttgttcttcctggagacttaattatcggtgcagattcgcacacatgcacgtatggtgctctcggtgccttcgcaacaggagttgggagtactgatttagccgtcgcgatggctactggggaagcctggttcagggttcccgaaaccatgaaattcatctacgagggagagctccaaccttatgtaactggtaaggatttgatccttcacacaatcggagatataggagtaaatggagccctatacaaggtcatggaattcagtggaagcgtaatagaggagctctcggtggaacagaggatgaccatgagtaatatggctatagaagctggagcaaagactgggataatagaaccggataagaaaaccctagattacgttaaggagagagcaaaaaggaagtttaaggtttacaaaagcgacgaggatgctaagtactacaaagttatcgagtacgacgttaccaactgggaacctgtagttgcctttccccatttaccggagaacacggttccaataagtaaggctgcaaagatgaacataaagatagatcaggtcttcataggttcttgcacaaatgggagaatagaagatctaagaatggcggctgaaattttagaagggcaaaaagtcgccaagtgggttaggttaatcgtcattccgtgctctccaacggtttactggaaagccttgaaggaaggtttgatagagatattcttggaggccggagctgtaataggacctcccacgtgtggaccctgtctcggaggtcacatgggagtgcttgcaagtggtgaaagggctgtctctacaactaacaggaacttcgttgggagaatggggcatccaaagagcgaggtttacttagctaacccatacgtcgccgctgcttcagctgttttgggtaggatagcatccccagaggaggtggtaaaatga

SEQ ID NO: 103192 - protein, 423 aa, Pyrococcus abyssi
MGMTIAEKILADHSEREEVKPGEIVMAKLDFVFGNDVTMPLAIKKFRELGVKRVFDRERIAIVLDHFTPNKDIKSAEQCKSSREFAKEMGIKWFFEGGSVGVEHCLLPELGLVLPGDLIIGADSHTCTYGALGAFATGVGSTDLAVAMATGEAWFRVPETMKFIYEGELQPYVTGKDLILHTIGDIGVNGALYKVMEFSGSVIEELSVEQRMTMSNMAIEAGAKTGIIEPDKKTLDYVKERAKRKFKVYKSDEDAKYYKVIEYDVTNWEPVVAFPHLPENTVPISKAAKMNIKIDQVFIGSCTNGRIEDLRMAAEILEGQKVAKWVRLIVIPCSPTVYWKALKEGLIEIFLEAGAVIGPPTCGPCLGGHMGVLASGERAVSTTNRNFVGRMGHPKSEVYLANPYVAAASAVLGRIASPEEVVK

SEQ ID NO: 103193 - DNA, 1275 bp, Pyrococcus furiosus
  CDS (1)..(1275): transl_table=11
atgggcggaatgacaatagctgaaaaaattttggcaactcatgccggaaaggaagaggtaaaacctggagagatagttttggcaaaagtggacttcatgtttgggaatgatgtaacaacccccttagccataaaaacgtttagaaagattggagtggagaaggtttttgacccagaaagaatagcaatagttttagatcacttcactccaaataaagatatcaaagctgcggagcaatgtaaattctcacgagaatttgccagagaacagggaatcaagtggttctttgagggaggaaacgttggtgtcgagcattgtttactccctgagttaggattagttctcccaggagagctaattattggagcagattcccacacttgcacttatggagccctgggtgcctttgcaactggagttggtagtactgacttagcagttgcaatggcaacaggagaggcgtggttcagggttcccgaaacgataaaattcgtttatgaaggagaccttcaaccctgggtaactagtaaggatctcatactttacacaatcggagacataggggttaatggagccctctacaaagtcatggaattttcgggagaagttatagagaagctttccgtggaacagaggatgacgatgactaatatggccatagaggccggagcaaagactgggataatagagccggataagaagactatagagtacgtaaaggggagggccaagagagagtacaagatctacaagagcgatgaagatgcaaagtactacaaggttattgagtatgacgttagtaaaattgaacctcaagttgcctttccacacttacccgaaaacacggttcccatcagcaaggccgcaaagatgaacataaagatagaccaagttgtcattggctcatgtacgaatggtaggttggaagaccttagaatggccgctgaagttttagaaggccagaaagtggccccctgggtaaggcttatcattcttccatgttcaccgactgtgtatttcaaggcaatgaaggagggcctcttggagattttcctggaggcaggagctgttatagggcctccaacttgtggaccgtgcctaggaggtcacatgggtattctggcgagtggtgagagagctgtatctacaacaaacaggaactttgttggaagaatgggtcacccaaagagcgaagtttacttggcaagtccctatgtagctgcagcttcggctattcttggtagaattgcctctccagaggaggtggtaaaatga

SEQ ID NO: 103194 - protein, 424 aa, Pyrococcus furiosus
MGGMTIAEKILATHAGKEEVKPGEIVLAKVDFMFGNDVTTPLAIKTFRKIGVEKVFDPERIAIVLDHFTPNKDIKAAEQCKFSREFAREQGIKWFFEGGNVGVEHCLLPELGLVLPGELIIGADSHTCTYGALGAFATGVGSTDLAVAMATGEAWFRVPETIKFVYEGDLQPWVTSKDLILYTIGDIGVNGALYKVMEFSGEVIEKLSVEQRMTMTNMAIEAGAKTGIIEPDKKTIEYVKGRAKREYKIYKSDEDAKYYKVIEYDVSKIEPQVAFPHLPENTVPISKAAKMNIKIDQVVIGSCTNGRLEDLRMAAEVLEGQKVAPWVRLIILPCSPTVYFKAMKEGLLEIFLEAGAVIGPPTCGPCLGGHMGILASGERAVSTTNRNFVGRMGHPKSEVYLASPYVAAASAILGRIASPEEVVK

SEQ ID NO: 103195 - DNA, 1401 bp, Salmonella choleraesuis
  CDS (1)..(1401): transl_table=11
atggccaaaacgttatacgaaaaattatttgatgcccacgtggtctttgaggcgccaaacgaaacgccgctgctgtacatcgaccgccacctggtgcatgaagtcacctctccgcaggcgtttgacggtctgcgcgcgcaccatcgtccggtacgtcagccagggaaaaccttcgctacgatggatcacaacgtctcgacgcagactaaagacattaatgcttccggtgaaatggcgcgtatccagatgcaggagctgattaagaactgtaacgagttcggcgtcgagctgtatgacctgaatcacccatatcagggcatcgtccatgtgatggggccggaacagggcgtcaccctgccgggcatgaccatcgtctgcggcgactcccacaccgccacccacggcgcgtttggcgcgctggccttcggcatcggcacttctgaggtagaacatgtactggcgacgcaaaccctgaaacaggggcgcgctaaaaccatgaagattgaagtcacgggcaacgccgcgccgggcattaccgccaaagacatcgtgctggcgatcatcggtaaaaccggtagcgccggcggcaccggacacgtggttgaattttgcggcgacgcgatccgcgcgctgagtatggaaggccgcatgacgctgtgcaatatggcgattgagatgggcgccaaagccggtctggtcgccccggatgaaaccactttcaactacgtaaaagggcgtttgcacgcgccgaagggccgcgattttgacgaagccgtcgagtactggaaaacgctgaaaaccgatgacggcgcgacctttgatactgtcgtcaccctgcgagcagaagagatcgcgccgcaggtgacctggggcacgaatccgggccaggtgatttccgtcaccgacatcatccccgatcccgcctcctttagcgatccggttgaacgcgccagcgccgaaaaagcgctggcttatatgggcttacagccgggcgtaccgttaacggacgttgctatcgataaagtctttatcggctcttgtaccaattcgcgcattgaagatttgcgcgcggcggcagaagtcgccaaagggcgcaaagtggcgccgggcgtgcaggctctggtggtgccgggttcaggtccggtgaaagcgcaggcggaagcggaaggtctggacaagatctttatcgaagcaggatttgaatggcgcttaccgggctgttccatgtgcctggccatgaataatgaccgcctgaacccgggcgagcgctgcgcatccaccagcaaccgtaactttgaaggtcgtcagggccgcgggggtcgcacgcatttagtcagcccggcgatggccgccgctgccgccgttaccggccacttcgccgatattcgcagcatcaaataa

SEQ ID NO: 103196 - protein, 466 aa, Salmonella choleraesuis
MAKTLYEKLFDAHVVFEAPNETPLLYIDRHLVHEVTSPQAFDGLRAHHRPVRQPGKTFATMDHNVSTQTKDINASGEMARIQMQELIKNCNEFGVELYDLNHPYQGIVHVMGPEQGVTLPGMTIVCGDSHTATHGAFGALAFGIGTSEVEHVLATQTLKQGRAKTMKIEVTGNAAPGITAKDIVLAIIGKTGSAGGTGHVVEFCGDAIRALSMEGRMTLCNMAIEMGAKAGLVAPDETTFNYVKGRLHAPKGRDFDEAVEYWKTLKTDDGATFDTVVTLRAEEIAPQVTWGTNPGQVISVTDIIPDPASFSDPVERASAEKALAYMGLQPGVPLTDVAIDKVFIGSCTNSRIEDLRAAAEVAKGRKVAPGVQALVVPGSGPVKAQAEAEGLDKIFIEAGFEWRLPGCSMCLAMNNDRLNPGERCASTSNRNFEGRQGRGGRTHLVSPAMAAAAAVTGHFADIRSIK

SEQ ID NO: 103197 - DNA, 1401 bp, Salmonella typhimurium
  CDS (1)..(1401): transl_table=11
atggccaaaacgttatacgaaaaattatttgatgcccacgtggtctttgaggcgccaaacgaaacgccgctgctgtacatcgaccgccacctggtgcatgaagtcacctctccgcaggcgtttgacggtctgcgcgcgcaccatcgtccggtacgtcagccagggaaaaccttcgctacgatggatcacaacgtctcgacgcagactaaagacattaatgcttccggtgaaatggcgcgtatccagatgcaggagctgattaagaactgtaacgagttcggcgtcgagctgtatgacctgaatcacccatatcagggcatcgtccatgtgatggggccggaacagggcgtcaccctgccgggcatgaccatcgtctgcggcgactcccacaccgccacccacggcgcgtttggtgcgctggccttcggcatcggcacttctgaggtagaacatgtactggcgacgcaaaccctgaaacagggacgcgctaaaaccatgaagattgaagtcacgggcaacgccgcgccgggcattaccgccaaagacatcgtgctggcgatcatcggtaaaaccggtagcgccggcggcaccggacacgtggttgaattttgcggcgacgctatccgcgcgctgagtatggaaggccgcatgacgctgtgcaatatggcgattgagatgggcgccaaagccggtctggtcgccccggatgaaaccactttcaactacgtaaaagggcgtttgcacgcgccgaagggccgcgattttgacgaagccgtcgagtactggaaaacgctgaaaaccgatgacggcgcgacctttgatactgtcgtcgccctgcgagcagaagagatcgcgccgcaggtgacctggggcacgaatccgggccaggtgatttccgtcaccgacatcatccccgatcccgcctcctttagcgatccggttgagcgcgccagcgccgaaaaagcgctggcttatatgggcttacagccgggcgtaccgttaacggacgttgctatcgataaagtctttatcggctcttgtaccaattcacgcattgaagatttgcgcgcggcggcggaagtcgccaaagggcgcaaagttgcgccgggcgtgcaggcgctggtggtgccgggttcaggtccggtgaaagcgcaggcggaagcggaaggtctggacaagatctttatcgaagcaggatttgaatggcgcttaccgggctgttccatgtgcctggccatgaataacgaccgcctgaacccgggcgagcgctgcgcctccaccagcaaccgtaactttgaaggtcgtcagggccgcgggggtcgcacgcatttagtcagcccggcgatggccgccgctgccgccgttaccggccacttcgccgacattcgcagcatcaaataa

SEQ ID NO: 103198 - protein, 466 aa, Salmonella typhimurium
MAKTLYEKLFDAHVVFEAPNETPLLYIDRHLVHEVTSPQAFDGLRAHHRPVRQPGKTFATMDHNVSTQTKDINASGEMARIQMQELIKNCNEFGVELYDLNHPYQGIVHVMGPEQGVTLPGMTIVCGDSHTATHGAFGALAFGIGTSEVEHVLATQTLKQGRAKTMKIEVTGNAAPGITAKDIVLAIIGKTGSAGGTGHVVEFCGDAIRALSMEGRMTLCNMAIEMGAKAGLVAPDETTFNYVKGRLHAPKGRDFDEAVEYWKTLKTDDGATFDTVVALRAEEIAPQVTWGTNPGQVISVTDIIPDPASFSDPVERASAEKALAYMGLQPGVPLTDVAIDKVFIGSCTNSRIEDLRAAAEVAKGRKVAPGVQALVVPGSGPVKAQAEAEGLDKIFIEAGFEWRLPGCSMCLAMNNDRLNPGERCASTSNRNFEGRQGRGGRTHLVSPAMAAAAAVTGHFADIRSIK

SEQ ID NO: 103199 - DNA, 1407 bp, Bradyrhizobium japonicum
  CDS (1)..(1407): transl_table=11
atgtccaagccgaccaccctgtacgacaagatctggaacgaccatctggtgcacgaagccgacgacggcacctgcctgctctatatcgaccgccatctggtgcacgaggtgacctcgccgcaggcgttcgaaggcctgcgcgcgaccgggcgcaaggttcacgcgccggaaaagacactcgccgtcgtcgaccacaacgtgccgaccaccgaccgcaccaagccgaatccggatccggagagcatcgagcagatcaaggcgctggccgacaatgccagggaattcggcatcgaatattacaacgagttcgacaagcgccagggcatcgtccacgtcatcggccccgagcagggcttcaccctgcccggcaccaccatcgtctgcggtgacagccacacctcgacgcatggcgcgttcggcgcgctcgcgcacggcatcggcacctccgaggtcgagcacgtgctggcgacgcagacgctgatccagaagaaggccaagaacatgcgcgtcaccgtcgacggcaaattgcctgacggcgtgaccggcaaggacatcatcctcgccatcatcggcgagatcggcaccgcgggcggcaccggctacgtgctggaatacgccggcgaggcgatccgcgcgctcagcatggaaggccgcatgacggtctgcaacatgtcgatcgaaggcggcgcccgcgccggcctcgtcgcgcccgaccagaaagcctacgacttcctgcgtgaccgccccaaggcgccgaagggcgcggcctgggacgcggcgatgcgctattgggagaagctgcgctccgacgacggcgcgcatttcgaccacgagctgcgcctcgacgctgcaaagctgccgccgatcgtgacctggggcacctcgccggaggacgtcatctcggtgaccggcatcgtccccgaccccgacaagatcgcggacgaggccaagcgtctctccaagcaccgcgccttgaagtacatgggcctgacggcggggacgaagatcaccgacatcaagctcgatcgcgtcttcatcggctcctgcaccaacggccgcatcgaggatctgcgcgccgccgccaagatcgcggaaggcaagcaggtctccgccagcgtcaacgccatggtggtgccgggctccggcatcgtgaaggagcaggccgaggccgagggtctggacaagatcttcatcaaggccggcttcgaatggcgcgagccgggctgctcgatgtgccttgccatgaacccggacaagctgaagccggaagagcgctgcgcctcgacctcgaaccgcaatttcgagggccgccagggcttcaagggccgcacgcatctggtgtcgccggcgatggcggcggcagctgcgatcgcgggtcacttcgtcgacgtcagggagtggcgctaa

SEQ ID NO: 103200 - protein, 468 aa, Bradyrhizobium japonicum
MSKPTTLYDKIWNDHLVHEADDGTCLLYIDRHLVHEVTSPQAFEGLRATGRKVHAPEKTLAVVDHNVPTTDRTKPNPDPESIEQIKALADNAREFGIEYYNEFDKRQGIVHVIGPEQGFTLPGTTIVCGDSHTSTHGAFGALAHGIGTSEVEHVLATQTLIQKKAKNMRVTVDGKLPDGVTGKDIILAIIGEIGTAGGTGYVLEYAGEAIRALSMEGRMTVCNMSIEGGARAGLVAPDQKAYDFLRDRPKAPKGAAWDAAMRYWEKLRSDDGAHFDHELRLDAAKLPPIVTWGTSPEDVISVTGIVPDPDKIADEAKRLSKHRALKYMGLTAGTKITDIKLDRVFIGSCTNGRIEDLRAAAKIAEGKQVSASVNAMVVPGSGIVKEQAEAEGLDKIFIKAGFEWREPGCSMCLAMNPDKLKPEERCASTSNRNFEGRQGFKGRTHLVSPAMAAAAAIAGHFVDVREWR

SEQ ID NO: 103201 - DNA, 1296 bp, Deinococcus radiodurans
  CDS (1)..(1296): transl_table=11
atgggaatgacgattgccgagaagatgctggccgcccacagcgggcacgacaccgtggtgccgggccaactcatcgagtgcgccaccgactgggtgctgtgccacgaaatcaccacgcccgccgcgctgaggatgctcgaggagcgcggcatggaccgggtgttcgacccgcagaagatcgtggcggtgcccgaccactcggtgcctgccatgaacatcaaggccgccaagatgtaccaaaagctcaagagctgggtgcaggaaaaaggcatcgagcacttctacgacgtggggcgcggcggcatcgctcacgtggtgctggaaaacaccggcctgatgaagccggggcagacgctggtttccggcgactcgcacacctgcaatgcgggcgcactgggcgccttcgcgaccggcgtgggctcgaccgacctcgcgggcgccatctacgcgggcaaggtgtggttcaaggtgcccgagacgatgctcatccgggtgacgggaaaaaccaaccccggcgtgacccccaaggacatcgtgctggaggtcatcaagcagatcggggccgacggcgccaactacatggtgatggaatgggtgggcgactacatcgaccagctcgacatggaaggccgcttcaccctgaccaacatggcgattgaggcgggcggcaagaccggcatcgtggcggtggacgacaccacccgcgcctacatgcagcagcgcggcgtgtcgcccgagcagtacaccgagtaccagtccgaccccgacgccaagtacaaggtcgtggtcgagattgacgccgcgcaggtcgaacccaccgtcgcctacccccacattcccagcaacggccgggtggcgggcagcgaccgcatccgggtgacgcacgcctacgtgggcagctgcacgaacgggcgcatcacggacctgcgcgacgtggcccggattctgaagggccgcaaggtggcgcaggacgtgcagatgattgtcgtgccggcgacgcaggccatctggaagcaggcggcgcaggaagggctgctcgaaatcttcgtggacgcgggcgcgagcgtcagctacccctcgtgcggcgcctgtctggggatgcactcgggcgtactcgggccagacgacatctgcatttcgagttccaaccgcaacttcgtgggccgtatgggcgacccctcggcgcagatttacctcgccagccccgccacggtggccgcgagcgcagtggagggcttcatcgccgacccgcgccgctatgacgccgagggcaacgacctgaacgcggcggactga

SEQ ID NO: 103202 - protein, 431 aa, Deinococcus radiodurans
MGMTIAEKMLAAHSGHDTVVPGQLIECATDWVLCHEITTPAALRMLEERGMDRVFDPQKIVAVPDHSVPAMNIKAAKMYQKLKSWVQEKGIEHFYDVGRGGIAHVVLENTGLMKPGQTLVSGDSHTCNAGALGAFATGVGSTDLAGAIYAGKVWFKVPETMLIRVTGKTNPGVTPKDIVLEVIKQIGADGANYMVMEWVGDYIDQLDMEGRFTLTNMAIEAGGKTGIVAVDDTTRAYMQQRGVSPEQYTEYQSDPDAKYKVVVEIDAAQVEPTVAYPHIPSNGRVAGSDRIRVTHAYVGSCTNGRITDLRDVARILKGRKVAQDVQMIVVPATQAIWKQAAQEGLLEIFVDAGASVSYPSCGACLGMHSGVLGPDDICISSSNRNFVGRMGDPSAQIYLASPATVAASAVEGFIADPRRYDAEGNDLNAAD

SEQ ID NO: 103203 - DNA, 1410 bp, Mannheimia succiniciproducens
  CDS (1)..(1410): transl_table=11
atggcaaaaacactctaccaaaaattattcgacgcccatgttgtttatgaagcggaaggcgaaacgccgattctttatattaaccggcatttgattcacgaagtaacctcaccgcaggcatttgacggtctgcgcgtagccggtcgccaagtgcgccaggtaagcaaaaccttcggtaccatggatcacagtatttcaacccaagtccgtgatgtgaacaaacttgaaggtcaggcaaaaattcaggtgttggaattagataaaaactgtaaagccaccgggatttcattattcgatatgaataccaaagaacaaggtatcgtgcatgtcatggggcctgagcaaggcttaactttgccggggatgaccattgtctgcggtgactcgcacactgcaacccacggcgccttcggcgctcttgccttcggcatcggtacttccgaagtggaacacgtattagcgacccaaaccctgaaacaggctcgtgccaaaagcatgaaagttgaagtacgcggcaaagtcaatccgggtattaccgcaaaagatatcgtacttgccattatcggcaaaaccaccatggcgggcggtaccggtcatgtagtggaattttgcggcgaagccattcgtgatctttctatggaaggacgaatgaccgtatgtaacatggccattgaattcggtgcgaaagcgggcttggttgcaccggacgaaaccacctttgagtacttaaaaggtcgtccgcatgccccgaaaggcaaagattgggacgatgccgtcgcttattggaaaacgttaaaatccgatgaagacgcacaattcgatacggttgtggttctggaagccaaagatatcgctccgcaagttacttgggggacgaacccgggtcaagtgatcggcattgaccaattagtacctaatccggcggaaatgacggatcccgtgaccaaagcatcggcggaaaaagccctggcttatatcggtttagaacctaataccgatttgaaaaacgtgccggtggatcaagtctttatcggttcctgtaccaactcccgcattgaagatttacgggcggctgcggcagttatgaaaggccgtaaaaaagcggataacgtgaaacgcgtattagtagttccgggttcgggtttagtgaaagaacaagcggaaaaagaaggattggataaaatctttctggcagcgggcgccgaatggcgtaatccgggttgttccatgtgcttaggcatgaacgacgaccgtttgggcgaatgggaacgttgcgcgtctacttcaaaccgcaatttcgaaggccgccaggggcgtaacggacgtactcacttagtcagtccggcaatggcggcggcagcggcggtattcggcaaattcgtcgatattcgtaatgtatctctaaattaa

SEQ ID NO: 103204 - protein, 469 aa, Mannheimia succiniciproducens
MAKTLYQKLFDAHVVYEAEGETPILYINRHLIHEVTSPQAFDGLRVAGRQVRQVSKTFGTMDHSISTQVRDVNKLEGQAKIQVLELDKNCKATGISLFDMNTKEQGIVHVMGPEQGLTLPGMTIVCGDSHTATHGAFGALAFGIGTSEVEHVLATQTLKQARAKSMKVEVRGKVNPGITAKDIVLAIIGKTTMAGGTGHVVEFCGEAIRDLSMEGRMTVCNMAIEFGAKAGLVAPDETTFEYLKGRPHAPKGKDWDDAVAYWKTLKSDEDAQFDTVVVLEAKDIAPQVTWGTNPGQVIGIDQLVPNPAEMTDPVTKASAEKALAYIGLEPNTDLKNVPVDQVFIGSCTNSRIEDLRAAAAVMKGRKKADNVKRVLVVPGSGLVKEQAEKEGLDKIFLAAGAEWRNPGCSMCLGMNDDRLGEWERCASTSNRNFEGRQGRNGRTHLVSPAMAAAAAVFGKFVDIRNVSLN

SEQ ID NO: 103205 - DNA, 1275 bp, Methanococcus jannaschii
  CDS (1)..(1275): transl_table=11
atgggaatgacaattgtagagaagatattagcaaaggcgtctggaaagaaggaagttagtcctggagatatagtgatggcaaacattgatgtagcaatggttcatgatattacagggcctttaacagtcaatacattaaaggagtatggaattgaaaaagtttggaatccagaaaagatagttattttatttgaccaccaagttcctgctgatagtataaaagcggctgaaaaccatatattaatgagaaagttcgtaaaagaacagggtattaaatacttctacgatattagagagggagtttgtcaccaagttttaccagagaaaggacatgtagctccaggagaggtagttgttggagctgattcacacacatgcacacatggagcttttggtgcttttgctaccggtataggttcaactgacatggctcacgtatttgcaacaggtaaattgtggtttaaagttccagaaacaatatacttcaacattactggagatttacaaccttacgttacttcaaaggatgttattctaagcattataggagaagttggtgttgatggggctacatataaagcatgccagtttggtggagaaaccgttaaaaagatgtccatagcatcaagaatgacaatgacaaacatggctattgagatggggggaaaaacaggaattatagagccagatgagaaaaccatccaatatgtaaaagaggctatgaagaaacatggaactgagagaccatttgaggtaataaaaggagatgaagatgctgaatttgcagaggtttatgaaattgaggcagataaaatagagccagtatttgcatgcccacacaatgtagataatgttaaacaggcgagagaagtggctggaaagcctatagaccaggtgtttattggttcatgtacgaacggaagattggaagatttaagaatggctattaagattattgagaagcatggtggaattgctgatgatgttagggttgttgtaactccagcttcaagggaagagtatctaaaagcattaaaagagggaataattgagaaattcttaaagtatggatgtgttgttacaaatccttcatgctctgcttgtatgggttcattgtatggtgttttaggtcctggagaggtctgtgtctcaacctcaaacagaaacttcagaggaaggcagggttcattagaagcagagatttatttagcatcaccaataactgctgctgcatgtgctgttaaaggagaacttgttgacccaagggatttataa

SEQ ID NO: 103206 - protein, 424 aa, Methanococcus jannaschii
MGMTIVEKILAKASGKKEVSPGDIVMANIDVAMVHDITGPLTVNTLKEYGIEKVWNPEKIVILFDHQVPADSIKAAENHILMRKFVKEQGIKYFYDIREGVCHQVLPEKGHVAPGEVVVGADSHTCTHGAFGAFATGIGSTDMAHVFATGKLWFKVPETIYFNITGDLQPYVTSKDVILSIIGEVGVDGATYKACQFGGETVKKMSIASRMTMTNMAIEMGGKTGIIEPDEKTIQYVKEAMKKHGTERPFEVIKGDEDAEFAEVYEIEADKIEPVFACPHNVDNVKQAREVAGKPIDQVFIGSCTNGRLEDLRMAIKIIEKHGGIADDVRVVVTPASREEYLKALKEGIIEKFLKYGCVVTNPSCSACMGSLYGVLGPGEVCVSTSNRNFRGRQGSLEAEIYLASPITAAACAVKGELVDPRDL

SEQ ID NO: 103207 - DNA, 1422 bp, Salmonella typhimurium
  CDS (1)..(1422): transl_table=11
atgtctgctaaaacgctgtatgaaaaattagttgagtcacataccattcgtgaacttgataacgaaggacatgttttactttatattgatcgttcaatactgaatgaatataccagcccgcaggcatttagcgggttaagagaacgcggccgcaccgttcggcaccccgacacgtttttattgaatattgaccatgttaatcctacgcggtcgcaacgggatgacttaatgaccgatccgggaggacagctacaggttgattactttcgggaaaatgccgctgactttggcatcacattatttgatgtgctggatccgcgtcaggggattgaacacgtggttgctcatgaacaagggctagtgatgcctggcatggtgatcgccgccggggatagtcacacgacaacctacggtgcatttggcgcgctgggctttggtatcgggacgtcggaaattgaacatctgctggccacgcagacgctggtttaccgcaagctcaaaaccatgcgcgtaagtgttcagggagagctacctttcgcctgttccgcaaaagatattgttcttgaattgcttgaacgtattggcgctgatggcgcgacgggatatgccattgaatttgtgggtgaggccatcagcgcgttgagcgttgaaggacgaatgacgctctgcaacatggcggtagaagcgggggcgcgtggtgccattattgcgccggataaaaaggtttttgactatatctacggtaaaccgcaaatgcctgtaggtgaactctggcagcaggcattgctggaatggtcacagttgagcagcgatgctgatgcggtatttgataagacggtggcgatcaactgccatgatcttgagcctaaagtcacctggggaatcagtccggatcaaacaggttccatcaccggacgtgttcctttcccggaacaggaaaccaatccgcttaagcgcctggcgcttgagaaggcccttcattacatgggattaacggctggcatgttgctgaaagatattcgtatctctcacgcttttattggttcatgcacaaatggtcgcattgaggatttgcgtgccgttgcgaaggtgcttgaagggcgcaaaatcgccagccatgttcgcgggatcattgtgcctggttcaacaatggtaagacgccaggcggaagaagaaggactggcgaaaatctttattgctgccggttttgaatggcggcagtcgggttgctcaatgtgccttgcgatgaatgaagatgtattgtcgcccggcgatcgctgtgcatcaggtacgaaccgtaacttccctggacgacagggcgctggagcaagaacgcatttgatgagcccggcgatggttgcggcggcggcggtagcggggcatctggtcgatgttcggtcattacttcaggcaggggaataa

SEQ ID NO: 103208 - protein, 473 aa, Salmonella typhimurium
MSAKTLYEKLVESHTIRELDNEGHVLLYIDRSILNEYTSPQAFSGLRERGRTVRHPDTFLLNIDHVNPTRSQRDDLMTDPGGQLQVDYFRENAADFGITLFDVLDPRQGIEHVVAHEQGLVMPGMVIAAGDSHTTTYGAFGALGFGIGTSEIEHLLATQTLVYRKLKTMRVSVQGELPFACSAKDIVLELLERIGADGATGYAIEFVGEAISALSVEGRMTLCNMAVEAGARGAIIAPDKKVFDYIYGKPQMPVGELWQQALLEWSQLSSDADAVFDKTVAINCHDLEPKVTWGISPDQTGSITGRVPFPEQETNPLKRLALEKALHYMGLTAGMLLKDIRISHAFIGSCTNGRIEDLRAVAKVLEGRKIASHVRGIIVPGSTMVRRQAEEEGLAKIFIAAGFEWRQSGCSMCLAMNEDVLSPGDRCASGTNRNFPGRQGAGARTHLMSPAMVAAAAVAGHLVDVRSLLQAGE

SEQ ID NO: 103209 - DNA, 1254 bp, Thermotoga maritima
  CDS (1)..(1254): transl_table=11
atgacactcgcagaaaagatactctctcaaaaagcgggaagaaaggtggaaccgggagaatttctccttctggagccggacatcgctctcgcgaacgacataacggctccgcttgcgataaagaagttcaaggagtacggtggaaagaaagtgaagtatccagacagagtggtgctcgttccagaccatttcacccccaacaaggacataaagtccgccatgcaggtgaagatgatgagagaatttgccagagagcaggggatcgaaaagttcttcgaaataggcaggatgggtattgaacacgtgctgcttccagaagaaggaatcgtgaaatccggagatctcgtggtcggtgcggattcacacacctgtacctacggagcccttggagcgtttgcgaccggagtggggtccaccgacatcgcgggcttctatctcataggaaaggtatggttccgtgtccccgagagtataaaggtgactcttcgcgggaagttcaaggatctggtgactgccaaagacctcgtgttgaagctcatctcgatactcggtgtagatggagccaactacaaggcgatagaattctctggaccgggtgtgaaagagatcagcatggacggccgttttaccatttcgaacatggcgatcgaggcgggaggaaagacgggactgtttccggtggacgagatcaccattgcctacgaaagagaaagaggcatagaagtggaagagatgtacccggacgaagacgcaaaatacgtgagagaagtggaaatggacctttctgagctcgaacctcaggttgcatatcccttcctcccatccaacgcgaaggacgtttccgaagctgagaaagagagaataaagatagatcaggcggtgataggaagctgtaccaacggaaggatagaagatctcagacttgccgcgcagattctgaagggaaggacagtatcaccggacgttcgatgcatcataattccgggatcccagaaggtttacaaacaggctctcaaagaaggactcatcgacatattcatcgacgcgggctgcgccgtttccacgcccacatgtggaccctgtcttggcggacacatgggagtgctcgcagaaggagaggttgcgatctccacaacgaacaggaacttcgttggaaggatgggacatccgaacagcaaggttttcctggcatctcctgcagtggcggcggccagcgcaataaaaggatacatcgcagatccgagaaagctgtga

SEQ ID NO: 103210 - protein, 417 aa, Thermotoga maritima
MTLAEKILSQKAGRKVEPGEFLLLEPDIALANDITAPLAIKKFKEYGGKKVKYPDRVVLVPDHFTPNKDIKSAMQVKMMREFAREQGIEKFFEIGRMGIEHVLLPEEGIVKSGDLVVGADSHTCTYGALGAFATGVGSTDIAGFYLIGKVWFRVPESIKVTLRGKFKDLVTAKDLVLKLISILGVDGANYKAIEFSGPGVKEISMDGRFTISNMAIEAGGKTGLFPVDEITIAYERERGIEVEEMYPDEDAKYVREVEMDLSELEPQVAYPFLPSNAKDVSEAEKERIKIDQAVIGSCTNGRIEDLRLAAQILKGRTVSPDVRCIIIPGSQKVYKQALKEGLIDIFIDAGCAVSTPTCGPCLGGHMGVLAEGEVAISTTNRNFVGRMGHPNSKVFLASPAVAAASAIKGYIADPRKL

SEQ ID NO: 103211 - DNA, 1434 bp, Acinetobacter sp
  CDS (1)..(1434): transl_table=11
atggcaggcacgacccaaggcgctaaaaccttgtacgacaaattatgggatgaccatttggtttcacaacgagacgatggttcatgcttgatttatattgaccgtcatttattgcatgaagtgaccagtccacaagcttttgaaggtttacagcttgcaggtcgtcagccttggcgtctaaatgccaatatcgcgacaccagatcacaatgttccaacctctaaaaaagagcgtgagcaaggaattgcgggtattgaagatgatacctcacgtattcaggttcagacgctagatgataactgtaagacatttaatatcgttgagtttggtatcaatgatattcgtcaaggcattgtgcatgttgtcgggccagagcagggtttaaccttaccaggcatgaccgttgtctgtggcgattcgcatacagcgacgcatggtgcttttggttgtttggcgcacggtattggtacatctgaagtggaacatgtgttagcaacacaatgtttgattcagaaaaaatctaaaaacatgttgattcgtgtagatggccagttaggcaaaggtgtgacacccaaagacgtggtattggcgatcattggtaaaattggcactgcaggcggaacaggctatgccatcgaatttggtggacaggtcttccgtgacatgtcgattgaaggccgcatgactgtatgtaacatggcgattgaagcaggcgcacgtgtgggtatggtggctgtagatgataaaaccattgaatatgtacaatctcgtcattacgcaccaaagggcgaacaatgggatcaggcagtagcctactggaataccttgcattcagatgatgatgcggtatttgatgaagttgttgtattaaatggtgcagagattgaaccacaggtatcttggggaacatctcctgaaatggtgattccagtatctcaagctgttccaactttagaacaggcaaaagacgacgtacaacgcaatgactggacacgtgcataccaatatatgggcctaacagcaggtcaggcgttggctgatattcagctagatcgtgtatttattggttcgtgcaccaactcacgtatcgaagatattcgtgcagcggcagaggtcgtgaaaggtcgtaaagttgcttcgagcattaagcaagcgatgattgttcctggttctggtttggtcaagcagcaagcagagcaagaaggtttggatcaggtgttccttgaagctggttttgaatggcgtgaaccaggttgttcgatgtgtttggcgatgaactctgacaaattacagccaggtgaacactgtgcttcgacctcaaatcgtaattttgaaggacgtcagggcaatggcggacgcacccatttggtaagtccagcaatggcagcagcagcagcaattgcaggtcacttcgtcgatgttagaagtttctaa

SEQ ID NO: 103212 - protein, 477 aa, Acinetobacter sp
MAGTTQGAKTLYDKLWDDHLVSQRDDGSCLIYIDRHLLHEVTSPQAFEGLQLAGRQPWRLNANIATPDHNVPTSKKEREQGIAGIEDDTSRIQVQTLDDNCKTFNIVEFGINDIRQGIVHVVGPEQGLTLPGMTVVCGDSHTATHGAFGCLAHGIGTSEVEHVLATQCLIQKKSKNMLIRVDGQLGKGVTPKDVVLAIIGKIGTAGGTGYAIEFGGQVFRDMSIEGRMTVCNMAIEAGARVGMVAVDDKTIEYVQSRHYAPKGEQWDQAVAYWNTLHSDDDAVFDEVVVLNGAEIEPQVSWGTSPEMVIPVSQAVPTLEQAKDDVQRNDWTRAYQYMGLTAGQALADIQLDRVFIGSCTNSRIEDIRAAAEVVKGRKVASSIKQAMIVPGSGLVKQQAEQEGLDQVFLEAGFEWREPGCSMCLAMNSDKLQPGEHCASTSNRNFEGRQGNGGRTHLVSPAMAAAAAIAGHFVDVRSF

SEQ ID NO: 103213 - DNA, 1458 bp, Actinoplanes teichomyceticus
  CDS (1)..(1458): transl_table=11
atggtgggagtcactccccagagcgggaaacccaggaccctggccgagaaggtctgggatgaccacgtggtgcgcacggcggccgagggtgagcccgacctgctcttcatcgacctgcacctgctgcacgaggtcaccagtccgcaggcgttcgacggtctgcggatggccggccgacgcgtgcgccggaccgacctcacgctcgcgacggaggaccacaacaccccgaccgggtacgcggatccctcgttcaacacccgccgcggtgagctgctgaccatcgcggacacggtctcccgcacccagatcgagacgctgcggaagaactgcgccgagttcggggtggagatccgcccgctcggtgacgtgaaccagggcatcgtgcacgtgatcggtccgcagctcggcctcacccagccgggcatgacgatcgtctgcggcgactcgcacaccgcgacccacggcgcgtccggcgcgctggccttcggtatcggcaccagcgaggtcgagcacgtgctcgcgacccagacgctgccgcagtcgaagccgaagacgatggccgtcacggtcgtcggcgagctgcggccgggcgtgagcgcgaaggacctgatcctcacgctgatcacgcagaccggcaccggcggcggcaacggccacatcgtggagtaccgcggtgaggcgatccgcaagctctccatggagggccggatgacgatctgcaacatgtcgatcgagtggggcgccaaggccggcatgatcgcgccggacgagaccacgttcgactacctctccggccgtaagcacgcgcggcggggcgcggactgggacgcagcggtcgcgtactggaagaccctcgccaccgacgagggcgccgagtacgacaccgagatcatcctggacgcctcgaagatcagcccgttcatcacctggggcaccaacccgggccagggcgccgcgctcgacggtgtggtgccggacccgcaggacttcctggacgaggtggagcggggcgccgccgagcgcgcactggcgtacatggggctgaccccgggcacaccgttccgcgacgtcccggtggacgtggtgttcgtcggctcgtgcaccaatggccggctggaggacctgcgtgccgcggccgacgtgatccgcggccgcaaggtcgccgacggggtccggatgatgatcgtcccgggctcgtaccaggtgcgcgagcaggccgaggccgagggcctggacaagattttcatcgacgcgggcgccgagtggcggttcgccggctgctcgatgtgcctcggcatgaacccggacacgctcagccccgggcagcgcgcggcgtcgacctccaaccgcaacttcgagggccggcagggcaagggtggccgtacccacctggtctcgccgcaggtcgccgccgccaccgcggtggtcggcaagctggccgctccggccgacctctga

SEQ ID NO: 103214 - protein, 485 aa, Actinoplanes teichomyceticus
MVGVTPQSGKPRTLAEKVWDDHVVRTAAEGEPDLLFIDLHLLHEVTSPQAFDGLRMAGRRVRRTDLTLATEDHNTPTGYADPSFNTRRGELLTIADTVSRTQIETLRKNCAEFGVEIRPLGDVNQGIVHVIGPQLGLTQPGMTIVCGDSHTATHGASGALAFGIGTSEVEHVLATQTLPQSKPKTMAVTVVGELRPGVSAKDLILTLITQTGTGGGNGHIVEYRGEAIRKLSMEGRMTICNMSIEWGAKAGMIAPDETTFDYLSGRKHARRGADWDAAVAYWKTLATDEGAEYDTEIILDASKISPFITWGTNPGQGAALDGVVPDPQDFLDEVERGAAERALAYMGLTPGTPFRDVPVDVVFVGSCTNGRLEDLRAAADVIRGRKVADGVRMMIVPGSYQVREQAEAEGLDKIFIDAGAEWRFAGCSMCLGMNPDTLSPGQRAASTSNRNFEGRQGKGGRTHLVSPQVAAATAVVGKLAAPADL

SEQ ID NO: 103215 - DNA, 1410 bp, Agrobacterium tumefaciens
  CDS (1)..(1410): transl_table=11
atgagcgcaccccgcactttatatgacaagatctgggacgaccacgtcgtcaatcgtgacccggacggaacctgtcttctctacatcgaccgtcatctcgtgcatgaggtgacgagcccacaggccttcgaaggtttgcgcattgccggtagacccgtgcattcgccgacccgcacgctcgccgtggtcgaccataacgttccgaccacagccgaccggctggaaggcatcaagaacgaggaaagccgcattcaggtggaagcgcttgcgcagaacgccaaggagttcggtgtcgaatattattccgagcgcgacaagcgccagggcatcgtccacatcgtcggccccgagcagggcttcaccctgcccggcatgacgatcgtctgcggcgatagccacacctccacccacggcgctttcggcgctctggcgcacggtatcggcacgtcggaagtggagcatgttctggccacccagacgctgatccagaaaaaggccaagaacatgctggtgcgtgtcgatggcaagcttccggaaagcgtgaccgccaaggacatcatccttgccattatcggcgagatcggcacggccggcggcaccggccatgtgatcgaatttgctggcgaggcgatccgctcgctctccatggaagggcgcatgacggtctgcaacatgaccatcgagggcggcgcccgcgccggtctgatcgcacccgatgaaacgactttcgattacatcaaggacaaaccgcgtgcgccgaagggtgagacgctggaacaggccatcgcatattggaagacgctgaaatccgatgagggcgcccattacgacaaggttgtcatcctcgatgcagccaatctgccgccaattgtctcctggggttcatctccggaggatgtgacctccgttgaaggcatcgttcccaatcccgatgatatcgaggaagaaaacaagcgcacttccaaatggcgcgcgcttgactatatgggcctgaaacccggcacgcgcatcaccgatatcgccatcgaccgtgtcttcatcggctcctgcaccaatggccgcatcgaggatctgcgggcggcggccaagatcgtcgatggccgcaaggtggcttccaccgtctcggccatgatcgtgcccggctccggactcgtcaaggaacaggcggaaaaagaaggtctggacaagattttcctcgacgccggtttcgaatggcgcgaaccgggctgctctatgtgccttgccatgaatgacgaccgcctgaagcccggcgaacgctgtgcctccacctcgaaccgcaacttcgagggccgtcagggctataagagccgaacccacctcgtctcgccagccatggctgcggctgcggcaattgccggtcatttcgtcgacgtgcgcgagtggcaataa

SEQ ID NO: 103216 - protein, 469 aa, Agrobacterium tumefaciens
MSAPRTLYDKIWDDHVVNRDPDGTCLLYIDRHLVHEVTSPQAFEGLRIAGRPVHSPTRTLAVVDHNVPTTADRLEGIKNEESRIQVEALAQNAKEFGVEYYSERDKRQGIVHIVGPEQGFTLPGMTIVCGDSHTSTHGAFGALAHGIGTSEVEHVLATQTLIQKKAKNMLVRVDGKLPESVTAKDIILAIIGEIGTAGGTGHVIEFAGEAIRSLSMEGRMTVCNMTIEGGARAGLIAPDETTFDYIKDKPRAPKGETLEQAIAYWKTLKSDEGAHYDKVVILDAANLPPIVSWGSSPEDVTSVEGIVPNPDDIEEENKRTSKWRALDYMGLKPGTRITDIAIDRVFIGSCTNGRIEDLRAAAKIVDGRKVASTVSAMIVPGSGLVKEQAEKEGLDKIFLDAGFEWREPGCSMCLAMNDDRLKPGERCASTSNRNFEGRQGYKSRTHLVSPAMAAAAAIAGHFVDVREWQ

SEQ ID NO: 103217 - DNA, 1299 bp, Aquifex aeolicus
  CDS (1)..(1299): transl_table=11
atgggaatgactataaccgagaagattctggcggaacacgctggtaagaaggaagtccaccccggagaactcataactgcaaagatagacctcgcaatggcaaacgatgtgaccgcaccccttgccataaagatacttgagaagtacggaatagataaggtctttgaccctgagaggatagcccttgttctctcacacttcgttcccgcaaaggacataaagtccgctgagcaggcaaagatagtaagagaattcgtaaaaaagcacggtataaagtggttctttgaagagggagaaggtatagaacacgccatactccccgagcaaggactcgtcgttcccggggacctcgttgtaggtgcggactcccacacctgcacttacggagctctcggagcctttgcaacgggggtcggttccaccgatatagcctacgctatggctaccggagaagtttggctcagagttcccgaaagtatgaagttcatcttctacggaaaactaaaaccatgggtgatgggaaaggacctaatcctctacacgatagggcaaataggggttgacggagcactctacagggctatggaatttgacggagagaccataagaaacctttctatggaacagaggtttactatagcaaacatggcgatagaagcgggtggaaagagcggaataatctctcctgatgaaaaaacgatagaatacgtaaaacaaagggcaaagagaccatggaaagtttaccagagcgaccctgacgctgagtaccactccgtttacgagtgggacgcttctcagatagaacccttagtagcgtggccctacctaccttcaaacgtgcatcccgtttctgaatccacccatataacgatagaccaggcatttataggctcctgcacaaacggaagaatagaggacctgagagttgcagcaaaggtgtttgaagctgcgctaaagcaaggaaagaaagttcacccttacgtgaggtgcatagtaattcccgcgtccaaggctatatacaagcaagctttgaaagaaggactcatagatatctttatggaagccggttgcgtggtttctacttctacgtgcggtccctgccttggtggacacatgggagtgcttgcggaaggtgaaaggtgtatatccacatctaacagaaacttccccggaaggatgggtcatcctaagagcgaaagctacctcgcaaaccctgccgtggtcgctgcgagtgcaataatgggaagaattgcccaccccgacgaggtggtgaaagccgaaacccttgcgggtgtttaa

SEQ ID NO: 103218 - protein, 432 aa, Aquifex aeolicus
MGMTITEKILAEHAGKKEVHPGELITAKIDLAMANDVTAPLAIKILEKYGIDKVFDPERIALVLSHFVPAKDIKSAEQAKIVREFVKKHGIKWFFEEGEGIEHAILPEQGLVVPGDLVVGADSHTCTYGALGAFATGVGSTDIAYAMATGEVWLRVPESMKFIFYGKLKPWVMGKDLILYTIGQIGVDGALYRAMEFDGETIRNLSMEQRFTIANMAIEAGGKSGIISPDEKTIEYVKQRAKRPWKVYQSDPDAEYHSVYEWDASQIEPLVAWPYLPSNVHPVSESTHITIDQAFIGSCTNGRIEDLRVAAKVFEAALKQGKKVHPYVRCIVIPASKAIYKQALKEGLIDIFMEAGCVVSTSTCGPCLGGHMGVLAEGERCISTSNRNFPGRMGHPKSESYLANPAVVAASAIMGRIAHPDEVVKAETLAGV

SEQ ID NO: 103219 - DNA, 2331 bp, Ashbya gossypii
  CDS (1)..(2331)
atgatgacgaacggggcaaagacgctgtatgacaaggtgtttgaggcgcacattgtgcaccaggacgagtctgggagctgtttactgtacatcgataggcacttggtgcacgaggtgacttccccgcaggcattcgaggggttgaagaccgctgggagaccggtgcggaggacggactgcaccctggcgacggtggaccacaacatcccgactgagtctcggcggcacttccgcaacacggagtcgttcatcaaggaggcggactcgcgcctgcaggtgcagactttggagcaaaatgtgaaggacttccacgttccatacctcgggatgagcgacgaacggcaggggattgtgcacatcatcgggcctgagcaggggtttacgctgccggggacgaccgtggtgtgcggggactcgcacacgtcgacgcacggggcgttcggcgcacttgcgtttggcatcggcacgtcggaggtggagcatgtcctggccacgcagacggtcatgcaaagcaagtcgaagaacatgcggatacacgtggaggggtcgctttccccgggcatcacgtccaaagacctgattctgcacatcatcggggtgatcggcaccgcaggcggtacgggatgcgtgatagagtttacagggcaggcaatccaggagctaacgatggaagcgcggatgtccatgtgcaacatggcgattgaggccggggctagggcgggcatgattcagcccgacgagactaccttcgagtacctgaagggtcggccgcttgcgccgacgggcgccgagtgggaaaaggccgtgacgtattggaagacgctgaagacggacgaggatgcggtctttgatatttcggtcacagttaagggcgcagatatcaggccaacaataacgtggggcacgtcgccgcaggatgccttgccgattgacgccgctgtgcccgacccagcaaatgtatccgaccctatcaagcgctctggtatggaggctgcgctcgaatacatgggccttgagccaaacaccctactcaaagacattaagattgacaaggtatttatcgggtcttgcaccaacgcgagaattgaagacctcagagctgcggctgccgtggtcgatggccatcgcatagcgcccaccgttaagcgggcaatggtggtgccaggctcgggtctagtcaagaagcaggcagaagctgaggggctagataagatattcgaggcggccgggtttgaatggagagaggcaggttgttccatgtgcttggggatgaatccagatatcctgggtccaaaagaaagatgtgcttcgacttccaacagaaatttcgaagggcggcaagggcgcttgtcgcgtacccatcttatgtcaccagcaatggctgcagctgcaggcattatggggcattttgtggatataagagaattcgagttcaaggaaagcaatgctccgaaagtggaggttagacatgatacggacagttccaccttagaagaggcgaactatggacacgcaaaggaggagccgccatctgccgagctctctgatgttgctaagcaggaaaaggtcaacgacatcccagtttcgaactcgtctacgcaatcccctggctccgcgccatccgcggatgcaggcttacaaccattcttgcaactacaggggatagcagcaccgctcgataaagcaaatgttgacacggacgccattataccgaagcagttcttgaagactattaagcgcacagggttgaaagaaggtttgttttacgattggcggtttgctaagcatgctgatggaaaggtcaccggcacggattttgtcttaaacagggaaccttaccgcaaagcaaccacattggttgtcactggtcctaacttcggctgcggctcctctagagagcatgcgccatgggccttgaaagattttggaatcatgtgtattatcgccccttcgttcggtgatatattctacaacaactcttttaaaaatgggctgctcccaatcaggttgcctcaagacgtgattaaggagaagctataccctattgcctctgcgggaggtgagcttgttatcgatctaccagcacagcagatcgcagatggtgagggacatattcttgtgacccaatttgacgttgagccatccagaaagcattgtctagttaatggtctggatgatattgggctaacgcttcaaaaggagcgctttattgctgactatgaagcgatgaggcggagagacttctccttcctcgagggcggctcgaagcttctccctcgtatttctcacagcaaacctacttccatgccacaggcggcgaacgactggtag

SEQ ID NO: 103220 - protein, 776 aa, Ashbya gossypii
MMTNGAKTLYDKVFEAHIVHQDESGSCLLYIDRHLVHEVTSPQAFEGLKTAGRPVRRTDCTLATVDHNIPTESRRHFRNTESFIKEADSRLQVQTLEQNVKDFHVPYLGMSDERQGIVHIIGPEQGFTLPGTTVVCGDSHTSTHGAFGALAFGIGTSEVEHVLATQTVMQSKSKNMRIHVEGSLSPGITSKDLILHIIGVIGTAGGTGCVIEFTGQAIQELTMEARMSMCNMAIEAGARAGMIQPDETTFEYLKGRPLAPTGAEWEKAVTYWKTLKTDEDAVFDISVTVKGADIRPTITWGTSPQDALPIDAAVPDPANVSDPIKRSGMEAALEYMGLEPNTLLKDIKIDKVFIGSCTNARIEDLRAAAAVVDGHRIAPTVKRAMVVPGSGLVKKQAEAEGLDKIFEAAGFEWREAGCSMCLGMNPDILGPKERCASTSNRNFEGRQGRLSRTHLMSPAMAAAAGIMGHFVDIREFEFKESNAPKVEVRHDTDSSTLEEANYGHAKEEPPSAELSDVAKQEKVNDIPVSNSSTQSPGSAPSADAGLQPFLQLQGIAAPLDKANVDTDAIIPKQFLKTIKRTGLKEGLFYDWRFAKHADGKVTGTDFVLNREPYRKATTLVVTGPNFGCGSSREHAPWALKDFGIMCIIAPSFGDIFYNNSFKNGLLPIRLPQDVIKEKLYPIASAGGELVIDLPAQQIADGEGHILVTQFDVEPSRKHCLVNGLDDIGLTLQKERFIADYEAMRRRDFSFLEGGSKLLPRISHSKPTSMPQAANDW

SEQ ID NO: 103221 - DNA, 1410 bp, Azoarcus sp
  CDS (1)..(1410): transl_table=11
atggaagcccaaacgctgtacgaaaagctctggtccagtcacgtcgttcaccaggaggcggacggcacggcgctgatctatatcgaccgccacctgatccacgaggtgaccagcccgcaggctttcgaaggcctgaagcttgccgggcgcaagccgtggcgcgtcagctcgatcgttgcgacggccgaccacaacacgccgaccgaccactgggaacggggcattctagatcccgtctcgcggcaacaggtcgaaacgctggacgcgaacatccgcgaggtgggcgcactggcctactttcctttcagggacgcgcgccagggcatcgtccatgtgatcgggcccgagatcggcgcgacgctccccggcatgacggtcgtgtgcggcgactcccatacgtcgacgcacggtgccttcgcctgtctcgcgcacggaatcgggacctcggaagtcgagcatgtgcttgcgacccagtgtctgttgcagaagcgttccaagacgatgctggtccgggtggacggcgaactgggccgcggcgtatcggcgaaagacattgcgctggcgatcatcggccgcctcggtaccgcgggcggaaccggctacgcgatcgagttcggcggcagtgcgatccgcgcgctgtcgatggaagggcggatgacgatctgcaacatggcgatcgaagccggcgcacgcgccggtctggtcgcggtcgaccagacgacgatcgactacctgcgcgacaagccgctcgcgccgaaaggccaggcgtgggagcaggcggtcgcttactggcgcacgctgaaaacggacgatggcgcgaaattcgacaagatcgtcgaactcgacgccgcgcagatccagccgcaagtcacgtgggggacttccccggagatggtcgagacggtttcggggcgcgtgcccgatccggccggcatcggcgatccggtcaggcgcgaaggcatcgagcgcgcgctgaaatacatgggtctcgcgccgaacacgccgatcagcgagattcccgtcgatcaggtgttcatcggttcctgtaccaattcccgcatcgaggacctgcgcgaggcggcgtcggtcgcgaaggggcgcagcaaggcgccgagcgtcaagcgcgtgctggtcgtgcccggttcgggtctggtcaagcgtcaggccgaggccgagggattgcacgaggtgttcctcgctgccggattcgagtggcgcgagccggggtgttcgatgtgcctcgcgatgaatgccgaccggctcgagcccggcgaacactgcgcttcgacgtcgaatcgcaacttcgagggccggcagggagccggcggccggacgcatctcgtcagcccggcgatggctgccgcggcagcggtcgtcggccatttcatcgacgtgcgcgagcttgcgtga

SEQ ID NO: 103222 - protein, 469 aa, Azoarcus sp
MEAQTLYEKLWSSHVVHQEADGTALIYIDRHLIHEVTSPQAFEGLKLAGRKPWRVSSIVATADHNTPTDHWERGILDPVSRQQVETLDANIREVGALAYFPFRDARQGIVHVIGPEIGATLPGMTVVCGDSHTSTHGAFACLAHGIGTSEVEHVLATQCLLQKRSKTMLVRVDGELGRGVSAKDIALAIIGRLGTAGGTGYAIEFGGSAIRALSMEGRMTICNMAIEAGARAGLVAVDQTTIDYLRDKPLAPKGQAWEQAVAYWRTLKTDDGAKFDKIVELDAAQIQPQVTWGTSPEMVETVSGRVPDPAGIGDPVRREGIERALKYMGLAPNTPISEIPVDQVFIGSCTNSRIEDLREAASVAKGRSKAPSVKRVLVVPGSGLVKRQAEAEGLHEVFLAAGFEWREPGCSMCLAMNADRLEPGEHCASTSNRNFEGRQGAGGRTHLVSPAMAAAAAVVGHFIDVRELA

SEQ ID NO: 103223 - DNA, 1413 bp, Azotobacter vinelandii
  CDS (1)..(1413): transl_table=11
atggccggcaaaacgctctacgacaaactctgggacatgcatgaggtgaagcggcgcgacgatggctcgtcgctgatctacatcgatcgccagattctccacgaagtgacctcgccgcaggttcgaggggctgcgcctggccgggcgaacgtggcgcgtggatgccaacatcgccaccccggaccacaacgtgccgaccacccaggatcgccagtcgggggtcgccgccatcgccgacgaaacctcgcgcatccaggtgcagaccctggacgagaactgcgacgagttcggcatcgtcgagttcaagatgaacgacccgcgccagggcatcgtccatgtggtcggcccggagcagggcgccacctgccgggcatgaccgtggtctgcggcgactcgcacacgtccacccactggtgcggcgcgctggcccacggcatcggtacctccgaggtggagcatgtgctcgccacccaatgcctggtggccaagaagatgaagaacatgcaggtgcgcgtggagggcgaactgcccctgggcgtcagcgccaaggacatagtgctcgccgtgatcggccggatcggcaccgccggcggtaccggccacgccctggagttcgccggcagcgccatccgcggcttgtccatggagggccgcatgaccctctgcaacatggccatcgaagccggggcccgggtcggcatggtggcggtggacgagaagaccatcgactacgtcaagggccgcccctatgcaccgcagggcgccgactgggacaaggcggtcgcccagtggcgggaactggtgtccgatgccgatgccgggttcgacaccgtcgtcgaactgaaggccgaagaaatcaggccgcaggtcacctgggggacctcgccggagatggtcctgccggtcgacgagcgcgtgccggacccggcttccgagagcgatccggtcaagcgcgattccatcgttcgcgcgctgaagtacatgggcctcgcggccaatcagccgatcggcgagatcaaggtcgaccgcgtgttcatcggttcctgcaccaactcgcggatcgaggatctgcgcgccgccgccgaggtggccaagggcgcaaggtcgccgcgagcgtcaagcaggcgctggtggtgccgggctccgggctggtcaaggagcaggcggagaaggaggggctggacaggatcttcatcgaggccggtttcgagtggcgcgacgggttgctccatgtgcctggcgatgaacccggaccgcctggagagcggcgagcactgcgcctccacgtccaaccgcaacttcgagggccgtcagggcgccggcgggcgtacccacctggtcagtccggccatggccgcagccgccgcggtcgccggccgtttcgtcgatgtacgccaattgctccaggcctga

SEQ ID NO: 103224 - protein, 470 aa, Azotobacter vinelandii
MAGKTLYDKLWDMHEVKRRDDGSSLIYIDRQILHEVTSPQVRGAAPGRANVARGCQHRHPGPQRADHPGSPVGGRRHRRRNLAHPGADPGRELRRVRHRRVQDERPAPGHRPCGRPGAGRHLPGMTVVCGDSHTSTHWCGALAHGIGTSEVEHVLATQCLVAKKMKNMQVRVEGELPLGVSAKDIVLAVIGRIGTAGGTGHALEFAGSAIRGLSMEGRMTLCNMAIEAGARVGMVAVDEKTIDYVKGRPYAPQGADWDKAVAQWRELVSDADAGFDTVVELKAEEIRPQVTWGTSPEMVLPVDERVPDPASESDPVKRDSIVRALKYMGLAANQPIGEIKVDRVFIGSCTNSRIEDLRAAAEVAKGARSPRASSRRWWCRAPGWSRSRRRRRGWTGSSSRPVSSGATGCSMCLAMNPDRLESGEHCASTSNRNFEGRQGAGGRTHLVSPAMAAAAAVAGRFVDVRQLLQA

SEQ ID NO: 103225 - DNA, 1395 bp, Bacillus anthracis
  CDS (1)..(1395): transl_table=11
atggggaaaaggttgctagataagctttgggaaagacacgtagttacgaccaacgaaaatggattggatttattatatatcgatctgcatcttgttcatgaagtaacgtcaccgcaagcctttgaaggcttgcggcttacaaatcgaacggtacgcagaccagatttaacattcgcaacgatggatcataatattccaacgaaagatgtttggaatattaccgatcgcattgcgaagcagcaactagatacgcttcgggaaaattgtaaacaatttcaggtgccgttagcggatatcggggatgaagagcaagggatcgttcatgttatcggaccagaacttgggctcacgcagccaggaaaaacaattgtttgtggtgatagtcatacagcaacgcacggtgcgtttggcgcgctagcatttggcattggtacgagtgaagtggaacatgtattggcaacgcaaacgttgtggcaaagaaaaccgaaagcgatgggaattgagttaaaaggaaaattacagaaaggcgtttacgcaaaagatattattttgcatctcctttcaaagtacggtgtagcagttggaactggatacgtaatggaattttacggagagacgattgggaccatggagatggaagagagaatgacgctttgtaatatggcgattgaaggaggagcaaaagcgggtattatcgcaccagatgaaaaaacatttgcttatgtaaaaggacgtaaatatgcaccgagagactatgaaactttcgagaagaaatggtttgaactgtatacagatgcagatgcaatttatgatttacatatttcgatagatgttacggatttagcgccgtatgttacgtggggaacgaacccgagtatgggagttcgtattgatgagaaattgccagaaaagcatgatgtaaatgacgaaagagcattctcttatatgggattaatccctggacaaagtacgtatgacattccagttcagcatgtcttcattggatcttgtacaaattctagattatctgatttagaaattgctgcatctgttgtgaaagggagaaaggtaaaagaaggtgtgcgagcactcgttgtacctggatcgaaaagagtaagggatgcggcgatgcaaaaaggactacatcacatatttgaagaagctggatttgaatggagagaacctggatgttccatgtgtcttggaatgaatccagatcaagtacctgaaggagagcattgtgcttcaacttcaaatcgtaattttgaaggaagacaaggaaaaggagcacgaacgcatttagttagcccagcaatggcggcagcagctgcgttatatggtcattttgttgatattagaaaggagagttatgatggagccatttcgtattcataa

SEQ ID NO: 103226 - protein, 464 aa, Bacillus anthracis
MGKRLLDKLWERHVVTTNENGLDLLYIDLHLVHEVTSPQAFEGLRLTNRTVRRPDLTFATMDHNIPTKDVWNITDRIAKQQLDTLRENCKQFQVPLADIGDEEQGIVHVIGPELGLTQPGKTIVCGDSHTATHGAFGALAFGIGTSEVEHVLATQTLWQRKPKAMGIELKGKLQKGVYAKDIILHLLSKYGVAVGTGYVMEFYGETIGTMEMEERMTLCNMAIEGGAKAGIIAPDEKTFAYVKGRKYAPRDYETFEKKWFELYTDADAIYDLHISIDVTDLAPYVTWGTNPSMGVRIDEKLPEKHDVNDERAFSYMGLIPGQSTYDIPVQHVFIGSCTNSRLSDLEIAASVVKGRKVKEGVRALVVPGSKRVRDAAMQKGLHHIFEEAGFEWREPGCSMCLGMNPDQVPEGEHCASTSNRNFEGRQGKGARTHLVSPAMAAAAALYGHFVDIRKESYDGAISYS

SEQ ID NO: 103227 - DNA, 1395 bp, Bacteroides fragilis
  CDS (1)..(1395): transl_table=11
atgaatacattatttgataaaatatgggatgcacacgtagtgactacagtggaagatggccctacacagctctatatcgacagattatattgtcatgaagtaaccagtcctcaagcttttgccggattgcgtgcacgcgggattaaggtgtttcgtccggagaaagtatattgtatgccagaccataatacgccgactcacgatcaggataaaccaattgaagatcctgtttcaaagactcaggtggatacactgactaagaatgcagctgattttggtttgactcattatggaatgatggacaagcggaatggtattatccatgtggttggtccggagcgaggacttactttacctgggatgaccattgtttgcggcgattcacatacttccactcacggcgcgatgggagcggttgcttttggtatcggtacaagtgaggtcgaaatggtacttgcttctcagtgtattttgcagtcacgtcccaagaccatgcgcatcacggtggatggtaagttgggcaagggagtaacagccaaagacatcgctctctatatgatgtcgaaaatgacaacgagtggtgcgaccggatattttgtagaatatgcgggtgaagcgatccgtagccttacgatggaaggtcggttgacgctctgtaacctttctattgagatgggggcccgtggaggtatgattgcaccggatgaagtgactttcgaatatatcaaaggccgtgagaatgcacctcagggagaagaatgggatcaggcagtgcagtattggaaaactctgaagagtgaagatgatgcggtttttgataaagaagttcattttgatgctgcggatattgagccgatgattacttatggaactaatccgggtatgggtatgggcattacgcagcatattcctacaacggatggaatgaatgaaacaaccaaagcttcattcctgaaatctttggattatatgggatttcagccgggggaagcattgttggggaagaagattgattatgtgtttctgggtgcttgtacgaatgggcgtatcgaagatttccgtgcatttgcttctattgtgaaaggacatcagaaagctgaacatgtgatagcatggctggtgccgggctcttggatggttgatgcccagatccgcgaagaaggattggataagattctggaggatgccggttttgctattcgtcaaccgggatgttcggcttgcttggctatgaatgatgataagattcctgccggaaagtattcggtttctaccagtaaccgtaactttgaaggacgtcagggacccggagcgcgtacactattagctagtccgcttgtggcagctgccgctgcgataacgggagtgatagctgacccgagggaactgatgtaa

SEQ ID NO: 103228 - protein, 464 aa, Bacteroides fragilis
MNTLFDKIWDAHVVTTVEDGPTQLYIDRLYCHEVTSPQAFAGLRARGIKVFRPEKVYCMPDHNTPTHDQDKPIEDPVSKTQVDTLTKNAADFGLTHYGMMDKRNGIIHVVGPERGLTLPGMTIVCGDSHTSTHGAMGAVAFGIGTSEVEMVLASQCILQSRPKTMRITVDGKLGKGVTAKDIALYMMSKMTTSGATGYFVEYAGEAIRSLTMEGRLTLCNLSIEMGARGGMIAPDEVTFEYIKGRENAPQGEEWDQAVQYWKTLKSEDDAVFDKEVHFDAADIEPMITYGTNPGMGMGITQHIPTTDGMNETTKASFLKSLDYMGFQPGEALLGKKIDYVFLGACTNGRIEDFRAFASIVKGHQKAEHVIAWLVPGSWMVDAQIREEGLDKILEDAGFAIRQPGCSACLAMNDDKIPAGKYSVSTSNRNFEGRQGPGARTLLASPLVAAAAAITGVIADPRELM

SEQ ID NO: 103229 - DNA, 1419 bp, Bacillus halodurans
  CDS (1)..(1419): transl_table=11
atggctccaaaaacaattattgaaaaaatttgggacgctcatacggtcatcggtgaggaaggcaagccgagccttctttatatcgacttgcatatggtccatgaagtcacctcaccgcaagcatttgagggcttacgcttagcaggccgccctgtgcgccggccagatttgacatttgctacgatggatcacaatgttccgacggttgatcgctttaacattcaagatcaaattgctcggaagcaaattgagacgttagaggcgaactgcaaagaattcggaattgagatcgctggtttagatagcccgaataacggaatagtccacgttatcggaccagagctcggcttaacgcaaccaggaaaaacgatcgtttgtggtgacagtcatacgtccactcatggcgcatttggtgcgctggcttttgggatcggtacaagtgaagtagaacatgtactagcaacgcaaacgttgtggcaatcgaagccgaaaacgatggaagttcgtgttacaggggaattagcaccatctgtgtcagcaaaagacattattcttgccgtcattgcgaaatatggtgttgattttggaaccggacatgtcatcgagtttacgggagaagcgattcgctccctatcaatggaagagcggatgacgatctgtaatatgtcgattgaggcaggagcaaaagctggtttaattagtccagactctgtaacgtttgaataccttcgaggccgaccgaatgctcctaaaggtgaggcgtttgacgtggctatccagcaatgggaagcgttagcgactgatgctggagctgtgtatgatcgtgtgctcacaatgaatgcgtctgaaattgaaccgatggtcacgtggggaacaaatccagcccaagggacaggggttagtcaggttgtcccttcaccagacgatgcaaaagatgagaatgagcgtcgggcgatcaaacaatcgctagcttacatgggccttgaaccaggaacaccgattactgagattgcgattcagcacgtgtttatcggttcatgtacaaactcacgtcttagtgacttacgtacagcagcagaattaataaaaggaagaaaagtggcggatggcgtgcgagcacttgtcgtaccaggttctcagcaagtaaagcgagcagcagagaaagaaggattggatgaaatctttaaggaagctgggtttgagtggcgtgattctggctgtagtatgtgcttagggatgaaccctgataccgttcctgaaggtgagcgctgtgcgtctacgtcgaatcgtaactttgaaggaagacaaggaaaaggagcgcggacacaccttgtgagcccacagatggcagcagctgctgcgattgcaggtcactttgtggacgttcgcacattccaatccgaaccgcagaccgtttaa

SEQ ID NO: 103230 - protein, 472 aa, Bacillus halodurans
MAPKTIIEKIWDAHTVIGEEGKPSLLYIDLHMVHEVTSPQAFEGLRLAGRPVRRPDLTFATMDHNVPTVDRFNIQDQIARKQIETLEANCKEFGIEIAGLDSPNNGIVHVIGPELGLTQPGKTIVCGDSHTSTHGAFGALAFGIGTSEVEHVLATQTLWQSKPKTMEVRVTGELAPSVSAKDIILAVIAKYGVDFGTGHVIEFTGEAIRSLSMEERMTICNMSIEAGAKAGLISPDSVTFEYLRGRPNAPKGEAFDVAIQQWEALATDAGAVYDRVLTMNASEIEPMVTWGTNPAQGTGVSQVVPSPDDAKDENERRAIKQSLAYMGLEPGTPITEIAIQHVFIGSCTNSRLSDLRTAAELIKGRKVADGVRALVVPGSQQVKRAAEKEGLDEIFKEAGFEWRDSGCSMCLGMNPDTVPEGERCASTSNRNFEGRQGKGARTHLVSPQMAAAAAIAGHFVDVRTFQSEPQTV

SEQ ID NO: 103231 - DNA, 1395 bp, Bacillus thuringiensis subsp
  CDS (1)..(1395): transl_table=11
atggggaaaaggttgctagataagctttgggaaagacacgtagttacgacaaatgagaatggattagatttattatatatcgatctgcatcttgttcatgaagtaacgtcaccgcaagcctttgaaggcttgcggcttacaaatcgaaaggtacgcagaccagatttaacattcgcaacgatggaccataatattccaacgaaagatgtttggaatattactgatcgcattgcgaagcagcaactagatacacttcgggcaaactgtaaacaatttcaggtgccgttagcagatatcggagatgaagagcaggggatcgttcatgttatcggaccagaacttgggctcacgcagccaggaaaaacaattgtttgtggtgatagtcatacagcaacgcacggtgcgtttggtgcgctagcgtttggtattggtacgagtgaagtggaacatgtattggcaacgcaaacgctgtggcaaagaaaaccgaaagcgatgggaattgaactaaaaggaaaattacagaaaggcgtttacgcaaaagatattattttgcatctcctttcaaagtacggtgtagcagttggaactggatacgtaatggaattttacggagagacgattggggctatggagatggaagagagaatgacgctttgtaatatggcgatcgaaggaggagcaaaagcgggtattatcgcgccagatgaaaaaacatttgtttatgtaaaaggacgtaaatatgcaccgagagactatgaaactttcgagaagaaatggtttgaactgtatacagatgcagatgcaatttatgatttacatatttcgatagatgtgacggatttagcgccgtacgttacgtggggaacgaacccgagtatgggagttcgtattgatgagaaattgccagaaaaacatgatgtaaatgacgaaagagcattctcttatatgggattaatccctggacaaagtacgtatgacattccagttcagcatgtcttcattggatcttgtacaaattctagattatctgatttagaaatcgctgcatctgttgtgaaagggagaaaggtaaaagaaggtgtgcgagcactcgttgtacctggatcgaaaagagtaagggacgcggcgattcaaaaaggactacatcacatatttgaagaagcaggatttgaatggagagaacctggatgttccatgtgtcttggaatgaatccagatcaagtacctgaaggagagcattgtgcttcaacttcaaatcgtaattttgaaggaagacaaggaaaaggagcacgaacgcatttagttagcccagcaatggcggcagcagctgcgttatatggtcattttgttgatacaagaaaggagagttatgatggagccatttcgtattcataa

SEQ ID NO: 103232 - protein, 464 aa, Bacillus thuringiensis subsp
MGKRLLDKLWERHVVTTNENGLDLLYIDLHLVHEVTSPQAFEGLRLTNRKVRRPDLTFATMDHNIPTKDVWNITDRIAKQQLDTLRANCKQFQVPLADIGDEEQGIVHVIGPELGLTQPGKTIVCGDSHTATHGAFGALAFGIGTSEVEHVLATQTLWQRKPKAMGIELKGKLQKGVYAKDIILHLLSKYGVAVGTGYVMEFYGETIGAMEMEERMTLCNMAIEGGAKAGIIAPDEKTFVYVKGRKYAPRDYETFEKKWFELYTDADAIYDLHISIDVTDLAPYVTWGTNPSMGVRIDEKLPEKHDVNDERAFSYMGLIPGQSTYDIPVQHVFIGSCTNSRLSDLEIAASVVKGRKVKEGVRALVVPGSKRVRDAAIQKGLHHIFEEAGFEWREPGCSMCLGMNPDQVPEGEHCASTSNRNFEGRQGKGARTHLVSPAMAAAAALYGHFVDTRKESYDGAISYS

SEQ ID NO: 103233 - DNA, 1419 bp, Bacillus licheniformis
  CDS (1)..(1419): transl_table=11
atgatgcctcgaacgatcatcgaaaaaatttgggatcaacacgtgattaaaaaaggtgaagggaagcctgaccttctctatatcgatctgcatctgatacatgaggtaacgtcgcctcaggcctttgaaggcctgaggcaaaagaacagaaaagtcagacggcctcaaaatacgtttgccacgatggaccacaacattccgactgtcaatcggtttgagattaaagatgatgtcgctaaacggcaggtcagtgcgctcgaacggaattgcgaagaattcggcatccgccttgcagacttgtcaagcgtagaccaggggatcgtccatgtcatcgggcctgaactgggattgacgctcccgggcaaaacgatcgtttgcggagacagccatacatccacacacggagcgtttggcgcgctcgctttcggaatcggaacgagcgaagtcgaacacgtcttgtcaacgcagacgctttggcagcaaaaaccgaagacgctggaaatccgcgttgacggcaaactgcaaaaaggagtgacggctaaagacgtcattctggcgatcatcggaaaatacggggttaaattcggtgcgggctatgtcattgaatataccggcgaagtgttccgaaacatgtcgatggacgaacggatgacggtttgcaacatgtcaatcgaagctggggcaagagctggattgattgcaccggatgagacgacgtttgaatatgtcaaaacaaaaaaatatgcgccaaaaggcgaggattttgagaaagctgtagaagaatggaagaacctgaaaaccgatccgggggcggtctacgaccggacgatcgtgatggacggaagcgccatttctccgatggtgacgtggggcatcaaccctggcatggtgctgccggttgatgaaacgattccggggcctgaggctttcttgcaggaagacgataaaaaagaagcgcagcgcgcatatgaatatatgggtcttgaaccatataaaaaaatcgaggacattacaattgagcatgtctttatcggttcatgcaccaactcgcgtatgacagatcttcgccaggcggccgaaatgattaaaggtcaaaaagtcgccgacggcgtcagagcgatcgtcgtacccggctcgcaaagcgtcaaaatccaagcggaaaaagaagggcttcacaagattttcatcgaagcgggctttgaatggagagaatcgggatgcagcatgtgtttgagcatgaacaatgatgttgtccctgaaggagagcgctgcgcttcgacttccaaccgcaattttgaaggcaggcagggcaaaggagccagaacgcatctcgtcagcccggcgatggctgcgatggccgcgattcacggccgctttgtcgatgtcagaaaatattaccaagagacaacagctgtatag

SEQ ID NO: 103234 - protein, 472 aa, Bacillus licheniformis
MMPRTIIEKIWDQHVIKKGEGKPDLLYIDLHLIHEVTSPQAFEGLRQKNRKVRRPQNTFATMDHNIPTVNRFEIKDDVAKRQVSALERNCEEFGIRLADLSSVDQGIVHVIGPELGLTLPGKTIVCGDSHTSTHGAFGALAFGIGTSEVEHVLSTQTLWQQKPKTLEIRVDGKLQKGVTAKDVILAIIGKYGVKFGAGYVIEYTGEVFRNMSMDERMTVCNMSIEAGARAGLIAPDETTFEYVKTKKYAPKGEDFEKAVEEWKNLKTDPGAVYDRTIVMDGSAISPMVTWGINPGMVLPVDETIPGPEAFLQEDDKKEAQRAYEYMGLEPYKKIEDITIEHVFIGSCTNSRMTDLRQAAEMIKGQKVADGVRAIVVPGSQSVKIQAEKEGLHKIFIEAGFEWRESGCSMCLSMNNDVVPEGERCASTSNRNFEGRQGKGARTHLVSPAMAAMAAIHGRFVDVRKYYQETTAV

SEQ ID NO: 103235 - DNA, 1419 bp, Bacillus subtilis
  CDS (1)..(1419): transl_table=11
atgatgcctcgaacaatcatcgaaaagatttgggatcagcatattgtaaaacatggtgagggaaagccggatcttctctatattgatttgcacctcattcatgaggtgacgtctcctcaggcatttgaaggcttgagacaaaagggaagaaaggtcagaagaccccaaaacacatttgcgacaatggaccacaacatcccgactgtcaatcgttttgagataaaggatgaagttgcgaaacgccaggtaacggcgcttgaaagaaactgtgaggaatttggcgtgcgccttgccgatcttcacagtgtggatcaagggattgtccatgtcgtcggacctgaactaggcttaacgcttccagggaaaacgattgtgtgcggtgacagtcatacatcaacacatggcgctttcggcgctcttgcatttggaatcgggacgagtgaagttgaacatgtcctttccacacagacactttggcagcagcgtccaaaaacacttgaagtgcgcgtagatggaacgcttcaaaaaggggtaacggcaaaggatgtcatccttgctgtcatcggcaaatacggtgtgaaattcggcacaggctacgtcattgaatacactggggaagtattcagaaatatgacgatggatgaacgaatgactgtttgtaacatgtcaattgaagcaggagcaagagcaggtttgattgcacctgacgaggtgacgtttgaatattgcaaaaatcgcaagtacacgccaaaaggcgaagaatttgacaaggccgtagaggaatggaaggcgctgcgcacagacccgggcgctgtttacgataaatctatcgtccttgacggcaacaaaatttcccctatggtgacatggggcattaacccgggaatggttcttcctgtcgattctgaagttcctgcgccggaaagcttttctgcagaagacgataaaaaagaagcgattcgtgcttatgaatatatgggattgactcctcaccaaaaaattgaagacattaaagtggagcacgtatttatcggttcctgcacaaattcccgcatgactgaccttcgacaggctgctgacatgatcaaagggaagaaggtagctgacagcgtaagggccatcgtcgtgcccggatcccaaagcgtgaagcttcaggctgaaaaagaagggcttgaccagattttcttggaagctggatttgaatggagagagtcaggctgcagcatgtgtttgagtatgaataatgatgttgttcctgagggagagcgctgtgcatcaacctctaaccgcaacttcgagggcagacaaggaaaaggtgcaagaacacatctcgtcagcccggcaatggctgcgatggctgccattcacggacacttcgttgatgtcagaaagttttatcaggaaaaaacagttgtgtaa

SEQ ID NO: 103236 - protein, 472 aa, Bacillus subtilis
MMPRTIIEKIWDQHIVKHGEGKPDLLYIDLHLIHEVTSPQAFEGLRQKGRKVRRPQNTFATMDHNIPTVNRFEIKDEVAKRQVTALERNCEEFGVRLADLHSVDQGIVHVVGPELGLTLPGKTIVCGDSHTSTHGAFGALAFGIGTSEVEHVLSTQTLWQQRPKTLEVRVDGTLQKGVTAKDVILAVIGKYGVKFGTGYVIEYTGEVFRNMTMDERMTVCNMSIEAGARAGLIAPDEVTFEYCKNRKYTPKGEEFDKAVEEWKALRTDPGAVYDKSIVLDGNKISPMVTWGINPGMVLPVDSEVPAPESFSAEDDKKEAIRAYEYMGLTPHQKIEDIKVEHVFIGSCTNSRMTDLRQAADMIKGKKVADSVRAIVVPGSQSVKLQAEKEGLDQIFLEAGFEWRESGCSMCLSMNNDVVPEGERCASTSNRNFEGRQGKGARTHLVSPAMAAMAAIHGHFVDVRKFYQEKTVV

SEQ ID NO: 103237 - DNA, 1404 bp, Bifidobacterium longum
  CDS (1)..(1404): transl_table=11
atgggaacgacactggccgagaaggtctgggccgatcatctggtgcgcaagggcagcgacggagcccctgatttgctgtacatcgatctgatgctcatgcatgaggtcaccagcccgcaggcgtttgagggcctgcgcttggccggccgcaagccgcgtcacgtggatcagctcattgccaccgaggatcacaacacgccgaccgttgatatcgatcgcccgaacccggatgagacgagcgcgttgcagttgacgactttggagaagaactgcaaggagttcggcgtgcgcctgcacccgctgggcgatgccgatcagggcatcgtccacgcgttcgccccgattctgggcctgacccagccgggcatgaccatcgtgtgcggtgattcgcatacgtcgacgcacggcgcgttcggcgcgctggcgttcggcatcggcacttccgaagtcgaacacgtgatggccacacagacgctgtctctgaagccgttcaagaccatggccgtcaacgtcaacggcaagctgcccgcggacgcgacggccaaggacatcattctggcgatcatcgccaagatcggcaccggcggcggccagggttacgtgatcgaataccgtggtgaggcgattcgcaacctcaccatggacgagcgcatgaccgtgtgcaacatgtccatcgaggccggtgcgcgtgccggcatgatcgcgccggacgagaccacgttcgagtacctgaagggccgtccgcacgcgccggaaggcgagctgtgggatcaggccgtggcgtactggaagacgctgaagaccgatgacgatgccgtattcgacaaggtggtggatattgacgccaccaagctcggtccatatgtgacgtggggcaccaaccccggccaaggtctgccgatcaccgcctccgtgccggagccgggcaagatcgccgacgccaccaagcgcgccgccgccgaacgtgcgattacatacatgggtttgaagccaggcatgccgatcaaggacatcgccgtggacaccgtgttcattggttcgtgcaccaacggtcgtatcgacgatttgcgccaggccgccgcgattatgaagggccaccgcaaggccgagaacatccaccgcgtgctggtggtgccggcctcctcccgcgtgcgtttgcaggcggagaaggaaggcctcgataaggtgttcaaggactttggcgccgaatggcgtaacgccggctgctcgatgtgcctgggcatgaacccggacaagctggtgccgaacgagcgctcgatttccacttcgaaccgtaacttcgagggccgccaaggcaagggctcgcgcacgcatctggcgtcgccggccgtagccgccgccaccgccatccgcggcacaatctcgtctcccgccgatctctga

SEQ ID NO: 103238 - protein, 467 aa, Bifidobacterium longum
MGTTLAEKVWADHLVRKGSDGAPDLLYIDLMLMHEVTSPQAFEGLRLAGRKPRHVDQLIATEDHNTPTVDIDRPNPDETSALQLTTLEKNCKEFGVRLHPLGDADQGIVHAFAPILGLTQPGMTIVCGDSHTSTHGAFGALAFGIGTSEVEHVMATQTLSLKPFKTMAVNVNGKLPADATAKDIILAIIAKIGTGGGQGYVIEYRGEAIRNLTMDERMTVCNMSIEAGARAGMIAPDETTFEYLKGRPHAPEGELWDQAVAYWKTLKTDDDAVFDKVVDIDATKLGPYVTWGTNPGQGLPITASVPEPGKIADATKRAAAERAITYMGLKPGMPIKDIAVDTVFIGSCTNGRIDDLRQAAAIMKGHRKAENIHRVLVVPASSRVRLQAEKEGLDKVFKDFGAEWRNAGCSMCLGMNPDKLVPNERSISTSNRNFEGRQGKGSRTHLASPAVAAATAIRGTISSPADL

SEQ ID NO: 103239 - DNA, 1401 bp, Blochmannia floridanus
  CDS (1)..(1401): transl_table=11
atgggaaaattattatatcacaaaatatatgattcacatgtaatacatgaagatacgaatgatgatccaatactatatattgatcgtcatttattacatgaagtcacttcacctcaagcttttgaatctatcagatttaaaaatcgaaaaatcagaagaccaaataaaacttttgctactatggatcataatgttcctaccattatgcaaaatatacattctattgaaggtatgtctaaaatacaattaaatcaattaacaaaaaattgcaaagattttaacattacattatttgatttaagtcatcctcaccaaggtatcattcatgttttagccccagaacaaggtattatactccctggtatgacagttgtatgtggggattcacatacttccactcatggagcttttggggcattatcttttggtattggaacatcagaaatagagcatgtattagttacacaaaccctaagacaacctaaatataaatcaatgggaataaatttattcggaacaataccaccttatatcacagcaaaggatttaatcttatttataataggaaaaatcgggcacggaggggcatcaggttatatagtagaattttatggtgatgttatcaatacactcagcatggaagaacgaatgactatttgcaatatgtccatcgagatgggagctgcatctgctttaatagctccagacgtaactacttataattatttaaaaaataaaaaattttccccaaataaaacgcattggaatcaagctcttttattctggaatactttacattctgatcatgatactaattttgacaaaatattcaatttcgatatatctaatattaaaccacaaataacttggggaactaatcctagccaggttatttctattgaccaacctatacctaaattagaaatttttacagatcctatagaacgtaaatccgttatacaagctttaaattacatgaagttaactcctaatacttatttaacaaatatttctatagataaagtatttataggatcatgcacaaattcaagaatcgaagatttaagatccgctgctaatattatcaaagatcataaaatatccaataacgtccatgctatagtagtaccgggatctaaaccagttaaaaaacaagctgaaaaagaaggattagattcaatatttataaaagccggttttgaatggcgtttacctggttgttccatgtgtttaggtatgaacgaagatcgattaaacgcaggagaacgttgcgcttctacaagtaatcgaaactttgaaggacgacaaggtcgaggaggacttactcatttagtcagtccagcaatggcagcagctgctgccattgctggacattttgtcgacattcgaacatatttttaa

SEQ ID NO: 103240 - protein, 466 aa, Blochmannia floridanus
MGKLLYHKIYDSHVIHEDTNDDPILYIDRHLLHEVTSPQAFESIRFKNRKIRRPNKTFATMDHNVPTIMQNIHSIEGMSKIQLNQLTKNCKDFNITLFDLSHPHQGIIHVLAPEQGIILPGMTVVCGDSHTSTHGAFGALSFGIGTSEIEHVLVTQTLRQPKYKSMGINLFGTIPPYITAKDLILFIIGKIGHGGASGYIVEFYGDVINTLSMEERMTICNMSIEMGAASALIAPDVTTYNYLKNKKFSPNKTHWNQALLFWNTLHSDHDTNFDKIFNFDISNIKPQITWGTNPSQVISIDQPIPKLEIFTDPIERKSVIQALNYMKLTPNTYLTNISIDKVFIGSCTNSRIEDLRSAANIIKDHKISNNVHAIVVPGSKPVKKQAEKEGLDSIFIKAGFEWRLPGCSMCLGMNEDRLNAGERCASTSNRNFEGRQGRGGLTHLVSPAMAAAAAIAGHFVDIRTYF

SEQ ID NO: 103241 - DNA, 1404 bp, Bordetella pertussis
  CDS (1)..(1404): transl_table=11
atggcccaaacgctttacgacaaactctgggacgcccacgtcgtccaccaggaatccgacggaacctgtatgctctatatcgaccgccacctgctgcacgaagtgaccagcccgcaggcgttcgaggggctggcgctggccggacgccagccgtggcgcgtcggggccaacctggccgtggccgaccataacgttcccacgctcaaccgcgcccagggcatcgaagacccgatctcgcgcctgcaggtcgatacgctggacgacaactgcgccaagtacggcatcaccgaattccgcatgaatgacctgcgccagggcatcgtgcacgtcatcggcccggagcagggcgcgaccctgcccggcatgaccgtcgtctgtggcgactcgcataccagcacgcacggcgcgctgggcgcgctggccttcggcatcggcacttccgaggtcgagcacgtgctggccacgcagacgctgctcatgaagaaagccaagagcatgcagatcaacgtcgagggcgagttgccgttcggctgtaccgccaaggacgtggtgctgcacatcatcggcatcatcggcacggctggcggcaccggccacgccatcgaattctccggcagcacgatccgcggcctgtccgtcgagggccgcatgacggtgtgcaacatggccatcgaggccggcgcgcgctcgggcatggtggccgtcgacgacaagaccatcgattacttccgcggccgcccgttcgcgcccgtcggcgtgctgtgggaccaggccgttggctattggcgcacgctgcactcggatgccggcgccaggttcgaccgcgtcatcaacgtcgatgcgcgcgacatcaagccgcaggtcacctggggcacttcgcccgaaatggtgctgcccgtcgatggccgcgtgcccgatcccgatcgcgagaaggacgacgtgcgccgcagcggcatggaacgcgcgctcgagtacatgggcctcaagcccaatacacccctggtcgatatccgcgtcgatcgcgtgttcatcggctcgtgcaccaactcgcgcatcgaagacctgcgcgcggccgcggtcgtggcgcgcggcaagcgcgtggccgccaacgtgcgccaggccatggtggtgccgggttccgggctggtcaagcaacaggccgagcgcgaggggctggacaagatcttcatcgaagccggcttcgagtggcgcgagccgggctgttcgatgtgcctggccatgaatgccgaccgcctcgaaccgggcgagcgctgcgcctcgacctccaaccgcaacttcgaaggccgtcaggggcagggcgggcgcacgcacctggtcagcccggcgatggccgccgccgccgcggtggccggccatttcgtcgacgtccgctcgttccgttga

SEQ ID NO: 103242 - protein, 467 aa, Bordetella pertussis
MAQTLYDKLWDAHVVHQESDGTCMLYIDRHLLHEVTSPQAFEGLALAGRQPWRVGANLAVADHNVPTLNRAQGIEDPISRLQVDTLDDNCAKYGITEFRMNDLRQGIVHVIGPEQGATLPGMTVVCGDSHTSTHGALGALAFGIGTSEVEHVLATQTLLMKKAKSMQINVEGELPFGCTAKDVVLHIIGIIGTAGGTGHAIEFSGSTIRGLSVEGRMTVCNMAIEAGARSGMVAVDDKTIDYFRGRPFAPVGVLWDQAVGYWRTLHSDAGARFDRVINVDARDIKPQVTWGTSPEMVLPVDGRVPDPDREKDDVRRSGMERALEYMGLKPNTPLVDIRVDRVFIGSCTNSRIEDLRAAAVVARGKRVAANVRQAMVVPGSGLVKQQAEREGLDKIFIEAGFEWREPGCSMCLAMNADRLEPGERCASTSNRNFEGRQGQGGRTHLVSPAMAAAAAVAGHFVDVRSFR

SEQ ID NO: 103243 - DNA, 1410 bp, Brucella melitensis
  CDS (1)..(1410): transl_table=11
atgagcgcgccgcgtacactttatgacaagatttgggatgaccatgtagtggatcagcaggaagacggcacctgcctcctttatattgatcgccatcttgtgcatgaagtgacgagcccgcaggcctttgaggggctgcacatggcaggccgcccggtgcgccacccggaaaagacgcttgccgtggtggaccataacgttccgacgtcgcccgaccgcatcaatggcatccagaacgaggaaagccgcatccaggtcgaggcactggccaggaatgccgccgatttcggcgtcgaatattattccgaacgcgacaagcgccagggcatcgtgcatatcgtcgggccagagcagggcttcaccctgccgggcatgaccatcgtttgcggtgacagccacacttccacccacggcgctttcggtgcgcttgcacatggcatcggcacatcggaggtggagcatgtgctcgccacccagacgctgatccagaaaaaagccaagaatatgctggtgcgcgttgacggcaagttgccggcgggcgtgaccgccaaggatattgttctggcgatcattggcgagatcggcacggcaggcggcaccggctatgtcatcgaatatgcgggcgaagccattcgctcgctgtcgatggaaggccgcatgacgatctgcaacatgtcgatcgagggcggcgcgcgtgccggtcttatcgctcccgacgagacgacgtttgaatatatcaagggccgcccgcgtgctccgcagggcgaaacgctggaacaggcgatcaattactggaagacgctgcattcggatgaaggggcgcatttcgacaagatcgtgacgctcgacgccggcagcctgccgcccatcgtttcctggggttcttcgccggaagacgtcgtttccgtcacgggggtcgtgcccaatccggacgatatcgccgacgaaaccaagcgtgcctccaagtggcgtgcgctcgactatatgggcctgaagcccggcacgaaaatcacggatatcgcggttgatcgcgtcttcatcggttcgtgcaccaatggccgcatcgaagaccttcgcgctgccgccaaggtcgtggaaggcaagaaggttgccccgaccgtcaatgccatgatcgttccgggttcgggtctcgtaaaggaacaggcggaagccgaaggcctgcacaagattttcattgaagccggtttcgactggcgcgagccgggctgctccatgtgccttgcgatgaacgatgaccggctgaagccgggcgagcgttgcgcttcgacctcgaaccgcaatttcgagggccgtcagggcttcaagggtcgtacgcatctggtatcgccagcaatggctgcggcggctgcaattgccggtcacttcgtcgatattcgcgcgtggaagtga

SEQ ID NO: 103244 - protein, 469 aa, Brucella melitensis
MSAPRTLYDKIWDDHVVDQQEDGTCLLYIDRHLVHEVTSPQAFEGLHMAGRPVRHPEKTLAVVDHNVPTSPDRINGIQNEESRIQVEALARNAADFGVEYYSERDKRQGIVHIVGPEQGFTLPGMTIVCGDSHTSTHGAFGALAHGIGTSEVEHVLATQTLIQKKAKNMLVRVDGKLPAGVTAKDIVLAIIGEIGTAGGTGYVIEYAGEAIRSLSMEGRMTICNMSIEGGARAGLIAPDETTFEYIKGRPRAPQGETLEQAINYWKTLHSDEGAHFDKIVTLDAGSLPPIVSWGSSPEDVVSVTGVVPNPDDIADETKRASKWRALDYMGLKPGTKITDIAVDRVFIGSCTNGRIEDLRAAAKVVEGKKVAPTVNAMIVPGSGLVKEQAEAEGLHKIFIEAGFDWREPGCSMCLAMNDDRLKPGERCASTSNRNFEGRQGFKGRTHLVSPAMAAAAAIAGHFVDIRAWK

SEQ ID NO: 103245 - DNA, 1416 bp, Buchnera aphidicola subsp
  CDS (1)..(1416): transl_table=11
atgaaaaagactttatatgaaaaaatatatgatgcacatattgtacatgaagaaaaaaacaatgcatcaattttatatatagatttacatttactacatgaagtaacatcacctcaagcttttgattcactacgtataaaaaatcgtgttgttagacaacctaaaaaaacttttgctacgatggatcataatgtttctacagaaagtaaagatattaatgcatcaggatctatggctaaaatacaaatgcaacaattaataagaaattgtaatcaatttaatatatctttatatgatttaaataatcctaaacagggtatagttcatgttatcggtcctgaacaaggtatgacattacctggtatgactatagtatgtggtgattctcatacttctactcatggtgcatttggtgccttatcttttggaattggtacttctgaagttgaacatgttcttgtaacacaaactttaaaacaacaacgtttaaagaatatgaaaattcaaataaaggggaaaattaaaaattttgttactgctaaggatattattctttttattataggaaaattaggtacatcgggtggttctggatatgtaattgagttttgtggtgatgtaattaaaaaaatgaacatggaagaacgaatgacagtttgcaatatggcgattgaaatgggtgctaaatcagccttaatagcaccagatgaaactacatttttatatttaaaaggtagacgttattcacctcaaggtaaattttgggaagaagctgtaaaatattggaaaacattaataacaagatcaaaagcgttttttgataaagagtttacttttgatgtatctaatctttctcctcaaattacttgggggactagtcctgatcaggttttatcaattaacgaaaaaattcctgattttaatttttttaaagattctgtaaagaaaaatttagctcgttctgcatgtgattatatgaatttaaaaccaggttcatatttaacagacattaaaattgataaggtatttattggttcttgtactaattctcgtatagaagatttaagatctgcagctaaaatattgaaaaataaaaagatttccaaaaatataaaagcaattcttctgcctggatctggtacaggtacagtaaaaaaaccggctgaaaaagaaggtttagataaaatttttattgatgcaggatttgaatggcgattaccaggttgttctatgtgtttaggtatgaataacgataaattaagtgatggtgaacgttgtgcttctactagcaaccgaaattttgaaggacgtcaaggtaggggtggtagaacacatttagttagtcctattatggctgctgcagctatatacggtcgatttattgatgttagaaatttagatagtgagactaattaa

SEQ ID NO: 103246 - protein, 471 aa, Buchnera aphidicola subsp
MKKTLYEKIYDAHIVHEEKNNASILYIDLHLLHEVTSPQAFDSLRIKNRVVRQPKKTFATMDHNVSTESKDINASGSMAKIQMQQLIRNCNQFNISLYDLNNPKQGIVHVIGPEQGMTLPGMTIVCGDSHTSTHGAFGALSFGIGTSEVEHVLVTQTLKQQRLKNMKIQIKGKIKNFVTAKDIILFIIGKLGTSGGSGYVIEFCGDVIKKMNMEERMTVCNMAIEMGAKSALIAPDETTFLYLKGRRYSPQGKFWEEAVKYWKTLITRSKAFFDKEFTFDVSNLSPQITWGTSPDQVLSINEKIPDFNFFKDSVKKNLARSACDYMNLKPGSYLTDIKIDKVFIGSCTNSRIEDLRSAAKILKNKKISKNIKAILLPGSGTGTVKKPAEKEGLDKIFIDAGFEWRLPGCSMCLGMNNDKLSDGERCASTSNRNFEGRQGRGGRTHLVSPIMAAAAIYGRFIDVRNLDSETN

SEQ ID NO: 103247 - DNA, 1410 bp, Burkholderia mallei
  CDS (1)..(1410): transl_table=11
atggcacagacgctctacgacaaattgtggaattcgcacgtcgtccacaccgaagaggacggcaccgcactgctctatatcgatcgccaactgctgcatgaagtcacgagcccgcaggcgttcgaagggctgaagctcgcgcagcgcccggtgtggcggatcagcgcgaacctcgcggtgtccgaccacaacgtgccgaccaccgaccgcagccacggcatcgccgatccggtgtcgaagctgcaggtcgacacgctcgacgcgaactgcgacgcatatggcatcacgcaattcaagatgaacgacgtgcgccagggcatcgtccatatcatcggcccggagcagggcgcgacgctgcccggcatgacgatcgtctgcggcgattcgcacacgtcgacgcacggcgcgttcggcgcgctcgcgcacggcatcggcacgtcggaagtcgagcacgtgctcgcgacgcagacgctccttcagaagaagagcaagaacatgctcgtgaaggtcgagggccaactgccgcgcggctgcaccgcgaaggacatcgtgctcgcgatcatcggccagatcggcaccgcgggcggcaccggctacgcgatcgaattcggcggctcgacgatccgcgcgctcacgatggaaggccggatgacggtctgcaacatggcgatcgaggcgggcgcgcgcgccggcatggttgccgtcgacgacacgacggtcgaatacctgaagggccgcccgttcgtgccgacgggcgccgaatgggatcaggcggtcgaatactggaagacgttcaggtccgacgagggcgcgcagttcgaccgcgtcgtcgagctggacgcggcgcagatcgtgccgcaggtcacgtggggcacgtcgcccgagatggtcacgtcgatcgacggccgcgtgcccgatcccgagcgcgagaaggacccggtcaagcgcgacgcgatggagcgcgcgctcgcatacatggcgctcgcgccgaacacgccgatcgaggcgatcaaggtcgacaagatcttcatcggctcgtgcacgaacgcgcggatcgaggacatccgcgcggccgcgtacgtcgtgaagaagctcaatcgccgcgtcgcgccgaacgtgcggctcgcgatggtcgtgccgggctcgggcctcgtgaaggcgcaggccgagcgcgaggggctcgacaaggtgttcaccgaggcgggcttcgaatggcgcgagccgggctgctcgatgtgtctcgcgatgaacgccgaccggctcgagccgggcgagcgctgcgcgtcgacgtcgaaccgcaatttcgaagggcgccagggccagggcggccgcacgcatctcgtcagcccggcgatggccgcggcggcggcgatcgaaggccacttcgtcgatattcgccggctggggtga

SEQ ID NO: 103248 - protein, 469 aa, Burkholderia mallei
MAQTLYDKLWNSHVVHTEEDGTALLYIDRQLLHEVTSPQAFEGLKLAQRPVWRISANLAVSDHNVPTTDRSHGIADPVSKLQVDTLDANCDAYGITQFKMNDVRQGIVHIIGPEQGATLPGMTIVCGDSHTSTHGAFGALAHGIGTSEVEHVLATQTLLQKKSKNMLVKVEGQLPRGCTAKDIVLAIIGQIGTAGGTGYAIEFGGSTIRALTMEGRMTVCNMAIEAGARAGMVAVDDTTVEYLKGRPFVPTGAEWDQAVEYWKTFRSDEGAQFDRVVELDAAQIVPQVTWGTSPEMVTSIDGRVPDPEREKDPVKRDAMERALAYMALAPNTPIEAIKVDKIFIGSCTNARIEDIRAAAYVVKKLNRRVAPNVRLAMVVPGSGLVKAQAEREGLDKVFTEAGFEWREPGCSMCLAMNADRLEPGERCASTSNRNFEGRQGQGGRTHLVSPAMAAAAAIEGHFVDIRRLG

SEQ ID NO: 103249 - DNA, 1410 bp, Burkholderia pseudomallei
  CDS (1)..(1410): transl_table=11
atggcacagacgctctacgacaaattgtggaattcgcacgtcgtccacaccgaagaggacggcaccgcactgctctatatcgatcgccaactgctgcatgaagtcacgagcccgcaggcgttcgaagggctgaagctcgcgcagcgcccggtgtggcggatcagcgcgaacctcgcggtgtccgaccacaacgtgccgaccaccgaccgcagccacggcatcgccgatccggtgtcgaagctgcaggtcgacacgctcgacgcgaactgcgacgcatatggcatcacgcaattcaagatgaacgacgtgcgccagggcatcgtccatatcatcggcccggagcagggcgcgacgctgcccggcatgacgatcgtctgcggcgattcgcacacgtcgacgcacggcgcgttcggcgcgctcgcgcacggcatcggcacgtcggaagtcgagcacgtgctcgcgacgcagacgctccttcagaagaagagcaagaacatgctcgtgaaggtcgagggccaactgccgcgcggctgcaccgcgaaggacatcgtgctcgcgatcatcggccggatcggcaccgcgggcggcaccggctacgcgatcgaattcggcggctcgacgatccgcgcgctcacgatggaaggccggatgacggtctgcaacatggcgatcgaggcgggcgcgcgcgccggcatggttgccgtcgacgacacgacggtcgaatacctgaagggccgcccgttcgtgccgacgggcgccgaatgggatcaggcggtcgaatactggaagacgttcaggtccgacgagggcgcgcagttcgaccgcgtcgtcgagctggacgcggcgcagatcgtgccgcaggtcacgtggggcacgtcgcccgagatggtcacgtcgatcgacggccgcgtgcccgatcccgagcgcgagaaggacccggtcaagcgcgacgcgatggagcgcgcgctcgcatacatggcgctcgcgccgaacacgccgatcgaggcgatcaaggtcgacaagatcttcatcggctcgtgcacgaacgcgcggatcgaggacatccgcgcggccgcgtacgtcgtgaagaagctcaatcgccgcgtcgcgccgaacgtgcggctcgcgatggtcgtgccgggctcgggcctcgtgaaggcgcaggccgagcgcgaggggctcgacaaggtgttcaccgaggcgggcttcgaatggcgcgagccgggctgctcgatgtgtctcgcgatgaacgccgaccggctcgagccgggcgagcgctgcgcgtcgacgtcgaaccgcaatttcgaagggcgccagggccagggcggccgcacgcatctcgtcagcccggcgatggccgcggcggcggcgatcgaaggccacttcgtcgatattcgccggctggggtga

SEQ ID NO: 103250 - protein, 469 aa, Burkholderia pseudomallei
MAQTLYDKLWNSHVVHTEEDGTALLYIDRQLLHEVTSPQAFEGLKLAQRPVWRISANLAVSDHNVPTTDRSHGIADPVSKLQVDTLDANCDAYGITQFKMNDVRQGIVHIIGPEQGATLPGMTIVCGDSHTSTHGAFGALAHGIGTSEVEHVLATQTLLQKKSKNMLVKVEGQLPRGCTAKDIVLAIIGRIGTAGGTGYAIEFGGSTIRALTMEGRMTVCNMAIEAGARAGMVAVDDTTVEYLKGRPFVPTGAEWDQAVEYWKTFRSDEGAQFDRVVELDAAQIVPQVTWGTSPEMVTSIDGRVPDPEREKDPVKRDAMERALAYMALAPNTPIEAIKVDKIFIGSCTNARIEDIRAAAYVVKKLNRRVAPNVRLAMVVPGSGLVKAQAEREGLDKVFTEAGFEWREPGCSMCLAMNADRLEPGERCASTSNRNFEGRQGQGGRTHLVSPAMAAAAAIEGHFVDIRRLG

SEQ ID NO: 103251 - DNA, 1413 bp, Campylobacter jejuni
  CDS (1)..(1413): transl_table=11
atgacaatggctaaaactttatatgaaaaagtctttgatgctcatgtggtttatgaaggcaaaaacgaacttcctatactttatatcgatagacatttaatccatgaagtaacaagccctcaagcattttcagggcttaaaatggctaagcgtagaatggcaagagcggatttaactttggctactatagatcatgatgtttcaactaaaagtatggatttaaatgcttgttctgatatggcaaaagagcaaattacaactttgatgcaaaatactaaggaatttggagtaaggcttttaggacttggagataaaaatcaaggcatagttcatatagtaggtcctgagcttggctttactttacctggggttactttagtttgcggggattctcatacggcaacacatggggcttttggagctttagcctttggtataggcacgagtgaagtagagcatgtcatggcaacgcaaactttaaaacaagccaaacttaaaactatgaaaatcgaatgtaaagggcagtttcaaaaaggcgtttatactaaggatttgattttgtatttgatcgcacaatacggcacagcaaaaggcacaggctatgctatagaattttgcggagaacttataagaaatctaagcatggaagctagaatgactctttgtaatatggctatagaatttggagcgaaagtaggtatgatagctcctgatgagatcacttttgagtatattaagggaaaggaatttgcacctaaaggagaagaatttcaaaagtattgtgagtattggaagagtttaagaagtgatgaaggagcaaaatatgatgcgagtattactctagatgtaagcaagataaaaccacaaattagctatggaacaaatccttcgcaagtgattggcatagatgaaaaaattccaaaaataagtgattttaaaaatcaaagcgagcaaaaatctttgcttgatgctttatattatgtaaatttagagcaagatcaagttatagaaggggtaaaaatcgacattgtatttataggatcttgcacaaatgggcgtttagaagatcttaaaatagctgctgatatcttaaaagggcgcaaaattcataaaaatgttaaagctttaatcgtgcctggttcaatgcaagtaagaaaagaagctgaaaatttaggacttgataagatttttatcgaggcagggtgtgagtggagatatgcagggtgttctatgtgtcttggtatgaatgatgacaaagcaaattcaggtcaaagagttgcttcaacttcaaatcgtaactttgtaggcagacaaggtaaaggttctatcactcatttgatgagtcctgcaagtgcagcagcttgtgccatagaaggtgttatttgtgataatagaaagtatttaggagtttaa

SEQ ID NO: 103252 - protein, 470 aa, Campylobacter jejuni
MTMAKTLYEKVFDAHVVYEGKNELPILYIDRHLIHEVTSPQAFSGLKMAKRRMARADLTLATIDHDVSTKSMDLNACSDMAKEQITTLMQNTKEFGVRLLGLGDKNQGIVHIVGPELGFTLPGVTLVCGDSHTATHGAFGALAFGIGTSEVEHVMATQTLKQAKLKTMKIECKGQFQKGVYTKDLILYLIAQYGTAKGTGYAIEFCGELIRNLSMEARMTLCNMAIEFGAKVGMIAPDEITFEYIKGKEFAPKGEEFQKYCEYWKSLRSDEGAKYDASITLDVSKIKPQISYGTNPSQVIGIDEKIPKISDFKNQSEQKSLLDALYYVNLEQDQVIEGVKIDIVFIGSCTNGRLEDLKIAADILKGRKIHKNVKALIVPGSMQVRKEAENLGLDKIFIEAGCEWRYAGCSMCLGMNDDKANSGQRVASTSNRNFVGRQGKGSITHLMSPASAAACAIEGVICDNRKYLGV

SEQ ID NO: 103253 - DNA, 2313 bp, Candida maltosa
  CDS (1)..(2313)
atgtctccaaaaactttatacgacaaggtctttgaagatcatattgtctacgaagacgaatccggttccaatttattatatatcgacagacatttagtccatgaagtcacatctccacaagcattcgaaggattgaaaaacgctggccgtaccgtcagaagaaccgactgtactttagccaccgttgaccacaacatcccaactatttcccgtgtcaatttcaaaacgttgctaacgttcattgatcaagatgattccagattacaagtgcaaactttggaacaaaacgttaaagatttcgacgttacttatttcggcatgactgatgacagacaaggtatcgtgcatgttgttggtcctgaacaaggttttactttaccgggtaccactgttgtctgtggtgattcacatacatccacccatggtgctttcggtgccttggctttcggtattggtacttctgaagttgaacatgttttggctacccaaaccaccattcaagctaatccgaaaaacatgagaatcaccatcgatggcgaattgtctgaaggtatcacttcgaaagatttggtcttgcatgtcattggtgtgattggtactgctggtggtactggatgtgtgattgaatttgctggtaaagcaattgaagatttatcaatggaagcaagaatgtccatttgtaatatggctattgaagccggtgccagagccggtatgattaaaccagatgaaaaaacatttgaatatattaaaggtagaccattagctccaaaaggtgatgaatgggaaaaagctttgaaatattggaaaactttacataccgatgatggagctaaattgcattatgatattaaaatcgctgcttctgatattgtcccaactatcacctggggtaactctcctcaagatgctttgccaatcactgccagtgttcctgatccagctaatgtttctgatccaattaagaaatccggtatggaacgtgcattgaaataccaaggtttaaccccaaatactccattcgtggtaatcaaaatgcataaagcttttattggttcatgtaccaattccagaattgaagatttaagagccgctgctaaagttgctaaaggacataaaaaagccgataatgttaaattggttttagttgttccaggttccgggttgattaaaaaacaagccgaaaaggaaggtttggataaaatttttgaaagtgctgggttcacatggagagaagctggatgttccatgtgtcttggtatgaatccagatatcttggatccagaagaaagatgtgcttccaccagtaatagaaatttcgaaggtcgtcaaggtgctcgttccagaactcatttgatgtctcctgccatggctgctgctgctgctattaaaggtcatttcacagatattagagaattcgattatgttgacaatgacgaaccttcaatcactattgaacatgaagttgaagataaagaattacaagatgccgtatatgaacatgaaaaagaaatcattgaaggtactccaggtactgaagctgaaagatcgacgacatccctaaagatgaaccagaattcaaaaaagccaaatcagatgctcatcaaaatggtaccgataacagttttaccgtttttgaccggtatcactgctccactttataaagccaatgttgatactgatgccattattccaaaacaatttttgaaaacaatcaagagaacaggtttgaagaatggtttattctacgaatctagattcgttaagatgccaatggtaagatgtcagactgatttcgtcttgaatgttgaaccttacagacaagcggaaatcttattagtcactggtgataatttcggttgtggatcaagtcgtgaacatgcaccatgggcattaaaagatttcggtatcaagagtatcattgctccttcattcggggatattttctacaataactcttttaagaatttcttattacctatcagaattcctcaagatgtgattgaaagtaaattggtgcctgtggttaaagccggacacaaattgactatcgatttgccaaaccaacaaattaaagatggtgaaactggtgatgttttgattgaaaaattcgatgttgaagaattcagaaaacattgtttggttaacggtttagatgatattggtttgactttacaaaaggaagaatatatccaagaatatgaagctaaaagaagagaaaaattctccttcttggaaggtggttctaaattgattaaaccaatcaaaggtactaaaaagagtatttacggtaacaaagctcaagaatggtaa

SEQ ID NO: 103254 - protein, 770 aa, Candida maltosa
MSPKTLYDKVFEDHIVYEDESGSNLLYIDRHLVHEVTSPQAFEGLKNAGRTVRRTDCTLATVDHNIPTISRVNFKTLLTFIDQDDSRLQVQTLEQNVKDFDVTYFGMTDDRQGIVHVVGPEQGFTLPGTTVVCGDSHTSTHGAFGALAFGIGTSEVEHVLATQTTIQANPKNMRITIDGELSEGITSKDLVLHVIGVIGTAGGTGCVIEFAGKAIEDLSMEARMSICNMAIEAGARAGMIKPDEKTFEYIKGRPLAPKGDEWEKALKYWKTLHTDDGAKLHYDIKIAASDIVPTITWGNSPQDALPITASVPDPANVSDPIKKSGMERALKYQGLTPNTPFVVIKMHKAFIGSCTNSRIEDLRAAAKVAKGHKKADNVKLVLVVPGSGLIKKQAEKEGLDKIFESAGFTWREAGCSMCLGMNPDILDPEERCASTSNRNFEGRQGARSRTHLMSPAMAAAAAIKGHFTDIREFDYVDNDEPSITIEHEVEDKELQDAVYEHEKEIIEGTPGTEAERSTTSLKMNQNSKKPNQMLIKMVPITVLPFLTGITAPLYKANVDTDAIIPKQFLKTIKRTGLKNGLFYESRFVKMPMVRCQTDFVLNVEPYRQAEILLVTGDNFGCGSSREHAPWALKDFGIKSIIAPSFGDIFYNNSFKNFLLPIRIPQDVIESKLVPVVKAGHKLTIDLPNQQIKDGETGDVLIEKFDVEEFRKHCLVNGLDDIGLTLQKEEYIQEYEAKRREKFSFLEGGSKLIKPIKGTKKSIYGNKAQEW

SEQ ID NO: 103255 - DNA, 1440 bp, Caulobacter crescentus
  CDS (1)..(1440): transl_table=11
atgtccggcaaaaccctttacgacaagatctgggacgcccacgtcgtcagcgaagcaggcggcgaagcgatcctctatatcgacctgcacctcatccatgaggtgaccacgccacaggccttcgcaggccttcgcgcggccggccgcaaggtgcgccggcctgaccgcaccctggccgtggccgaccacaacatcccaaccgagggccaggccctgggcgtcgacgccgtggccgacgaggaagcgcgcctgcagctgaagacgctggcccgcaacgtcgccgacaacggcatcgagtttttcccgatgggcgacatccgcaacggcatcgtccacgtggtgggccccgagcagggccgcacccagccgggcatgaccatcgtctgcggcgacagccacacctcgacccacggcgcttttggggccctggcccacggcatcggcacgtccgaggtcgagcacgtcctggccacccagaccctgcgccagaagaaggccaagaacatgctggtccgcgtcgacggtcagctgccgcccggcgtcactggcaaggacgtggccctggccgtgatcggcgagatcggcaccgccggcggcaccggctatgtcatcgagttcgccggcgaggccattgccggcctgtcgatggagggccgcatgaccctctgcaacctgaccatcgagggcggcgctaaggccggcctggtggctccggacgacaagaccttcgcctatatccagggcaagcccgccgcccccaagggcgcggcctgggacatggcgctgagccactggaagaccttcttcaccgacgaggacgccgtcttcgaccgcacggtcgtcatcgacggctcggccctcgtgccgatggtcacctggggcacgtcgcctgaggacgtcatcccggtcaccggcaacgtgcccgacccggaaagcttcgccacgcccgacaagcgcgccgctgctcatcgcgcccttgactatatgggcctgaaggccggccagccgatctcggaagcccgtatcgaccgcgtcttcatcggctcgtgcaccaacagccgcattgaggacatgcgcgccgccgccgccgtggtgcaggaagccttcctgcacgggcgcctcgtggccccgcacgtcaaggccatggtcgtgccgggctcaggccttgtgaaagaacaggccgaagaagaaggcctggacgccatcttcaaggccgccggctttgactggcgcgaacccggctgctcgatgtgcctggccatgaaccccgacaagctggccccgcaggagcgctgcgcctcgaccagcaaccgcaacttcgaaggccgccagggccgcgccggccgcacccacctcgtctcccccgccatggcggcggcggcggcgatcgcgggccatctggtggatgtgcggaccctgttctcggagaccgcccaatga

SEQ ID NO: 103256 - protein, 479 aa, Caulobacter crescentus
MSGKTLYDKIWDAHVVSEAGGEAILYIDLHLIHEVTTPQAFAGLRAAGRKVRRPDRTLAVADHNIPTEGQALGVDAVADEEARLQLKTLARNVADNGIEFFPMGDIRNGIVHVVGPEQGRTQPGMTIVCGDSHTSTHGAFGALAHGIGTSEVEHVLATQTLRQKKAKNMLVRVDGQLPPGVTGKDVALAVIGEIGTAGGTGYVIEFAGEAIAGLSMEGRMTLCNLTIEGGAKAGLVAPDDKTFAYIQGKPAAPKGAAWDMALSHWKTFFTDEDAVFDRTVVIDGSALVPMVTWGTSPEDVIPVTGNVPDPESFATPDKRAAAHRALDYMGLKAGQPISEARIDRVFIGSCTNSRIEDMRAAAAVVQEAFLHGRLVAPHVKAMVVPGSGLVKEQAEEEGLDAIFKAAGFDWREPGCSMCLAMNPDKLAPQERCASTSNRNFEGRQGRAGRTHLVSPAMAAAAAIAGHLVDVRTLFSETAQ

SEQ ID NO: 103257 - DNA, 1416 bp, Chromobacterium violaceum
  CDS (1)..(1416): transl_table=11
atgaccgcgcaaaccttgtacgacaaactctggaacagccacgtggtgcgcgaggaggccgacggcaccgcgctgctgtacatcgatcgccacctggtgcacgaagtgaccagcccgcaggccttcgagggcctgaagctggccggccgcaggctgtggcgcgtggattcggtggtatccaccgccgaccacaatacgcctaccgaccactgggaccagggcatccaggacccgatctcgcgccagcaggtggaaacgctggacgccaacatcaaggccttcggcgcgctggcttatttcccgttcaaggacaaggggcagggcatcgtccacgtgatgggtccggagcagggcgccacgctgccgggcatgaccgtggtgtgcggcgacagccacacctccactcacggcgctttcggcgcgctggcgcatggcatcggcacctctgaggtggagcacgtgatggccactcagtgcctggtggccaagaagtcgaagaacatgctggtgcgggtggacggccggctgggcgccggcatcaccgccaaggacgtggcgctggccatcatcggcaagatcggcaccgccggcggcaccggctacgcgatcgagtttggcggcgaggcgatccgcgggctttccatggaaggccggatgaccttgtgcaatatggcgatcgaaggcggcgcccgttccggcatggtggcggtggacgacaagaccatcgaatatgtcaaaggacggccgttcgcgcccaagggcgagcagtggaaccaggcggttgcctactggaataccctgcattccgatgacggcgcgcatttcgaccaagtggtggcgctggatgccgccgacatccagccgcaggtcacctggggcacgtcgccggaaatggtggcggaggtgggcggcaaggtgccgaacccggccaatgaaagcgatccggtcaagaaggccggcatcgagcgcgcgctggcctacatgggcctggaagcggatacgccgatagagcagatcccggtggacgtggtgttcatcggctcctgtaccaacagccgcatcgaggatctgcgcgaggccgccgcggtggccaagggccgcagcaaggccggcaacgtcaagcaggtgctggtggtgccgggctccggtctggtcaaagcgcaggccgaggccgaagggctggacaagatcttcgtcgccgccggtttcgagtggcgcgagccggggtgttcgatgtgtttggcgatgaacgccgacaggctgttgcccggcgagcgctgcgcctcgacttccaaccgaaatttcgaaggccggcagggccagggcggacgcacccacctggtcagtcctgcgatggccgccgccgccgcggtggcgggccgctttgtcgatgtgcgccgcttggcggcgggctag

SEQ ID NO: 103258 - protein, 471 aa, Chromobacterium violaceum
MTAQTLYDKLWNSHVVREEADGTALLYIDRHLVHEVTSPQAFEGLKLAGRRLWRVDSVVSTADHNTPTDHWDQGIQDPISRQQVETLDANIKAFGALAYFPFKDKGQGIVHVMGPEQGATLPGMTVVCGDSHTSTHGAFGALAHGIGTSEVEHVMATQCLVAKKSKNMLVRVDGRLGAGITAKDVALAIIGKIGTAGGTGYAIEFGGEAIRGLSMEGRMTLCNMAIEGGARSGMVAVDDKTIEYVKGRPFAPKGEQWNQAVAYWNTLHSDDGAHFDQVVALDAADIQPQVTWGTSPEMVAEVGGKVPNPANESDPVKKAGIERALAYMGLEADTPIEQIPVDVVFIGSCTNSRIEDLREAAAVAKGRSKAGNVKQVLVVPGSGLVKAQAEAEGLDKIFVAAGFEWREPGCSMCLAMNADRLLPGERCASTSNRNFEGRQGQGGRTHLVSPAMAAAAAVAGRFVDVRRLAAG

SEQ ID NO: 103259 - DNA, 1446 bp, Corynebacterium efficiens
  CDS (1)..(1446): transl_table=11
atgaccagccccgtggatgccagctcctcgaaggagaagctgaccctggcagagaaggtgtggcgcgaccatgtcgtgtccaagggagaaaacggcgaacccgatctcctctacatcgacctgcagctgctgcatgaggtcacctccccgcaggccttcgacggtctgcgcatggccggccgcaagctgcgccgtccggacctgcacctggccaccgaggaccacaacgtgcccaccgagggcatcaagaccggctccctgctggagatcaacgaccagatctcccgcctccaggtgtccacgctgcgggacaactgcaaggagttcggtgtccgcctgcaccccatgggtgatgtgcgtcagggcatcgtccacaccgtcggcccgcagctgggtgccacccagccgggcatgaccatcgtgtgcggtgactcccacacctccacccacggtgccttcggcgccatggccttcggcatcggcacctccgaggtcgagcacgtcatggccacccagaccctgccgctcaagccgttcaagaccatggccatcgaggtcaccggtgaactgcagccgggcgtgtcctccaaggacctgatcctggcgatcatcgctaagatcggcaccggcggcggccagggatacgtcctggagtaccgcggcgaggccatccgcaagctctccatggatgcccgcatgaccatctgcaacatgtccatcgaggccggtgcccgcgcgggcatgatcgccccggatgagaccaccttcgaatacgtcaagggccgtgagatggccccgaccggcgcggactgggatgaggccgtggcctactggaagaccctgcccaccgatgagggtgcggagttcgacaaggtcgtggagatcgacggttcctccctgaccccgttcgtcacctggggcaccaaccccggccagggcctgcccctgtccgagtccgtcccggatcccgaggacttcaccaacgataatgacaaggccgccgcggagaaggccctgcagtacatggacctgaccccgggcaccccgctgcgcgagatcaagatcgacaccgtgttcctggggtcctgcaccaacgcacgcatcgaggacctggagatcgccgcggagatcctcaagggccgcaagatcgccgatgatatccgcatgatggtggttccctcctccacctgggtcaagcaggaggcggaaaagctcggactggacaagatcttcatcgaggccggcgccgagtggcgcaccgcgggctgctccatgtgcctgggtatgaacccagaccagctcaagcccggtgagcgttccgcctccacctccaaccgcaacttcgagggccgtcagggcccgggtggacgcacccacctggtgtccccggccgtggccgccgccaccgccgtccgcggcaaactgtcctcaccggcggatctgtaa

SEQ ID NO: 103260 - protein, 481 aa, Corynebacterium efficiens
MTSPVDASSSKEKLTLAEKVWRDHVVSKGENGEPDLLYIDLQLLHEVTSPQAFDGLRMAGRKLRRPDLHLATEDHNVPTEGIKTGSLLEINDQISRLQVSTLRDNCKEFGVRLHPMGDVRQGIVHTVGPQLGATQPGMTIVCGDSHTSTHGAFGAMAFGIGTSEVEHVMATQTLPLKPFKTMAIEVTGELQPGVSSKDLILAIIAKIGTGGGQGYVLEYRGEAIRKLSMDARMTICNMSIEAGARAGMIAPDETTFEYVKGREMAPTGADWDEAVAYWKTLPTDEGAEFDKVVEIDGSSLTPFVTWGTNPGQGLPLSESVPDPEDFTNDNDKAAAEKALQYMDLTPGTPLREIKIDTVFLGSCTNARIEDLEIAAEILKGRKIADDIRMMVVPSSTWVKQEAEKLGLDKIFIEAGAEWRTAGCSMCLGMNPDQLKPGERSASTSNRNFEGRQGPGGRTHLVSPAVAAATAVRGKLSSPADL

SEQ ID NO: 103261 - DNA, 1446 bp, Corynebacterium glutamicum
  CDS (1)..(1446): transl_table=11
atgaccagccccgtggagaacagcacctcaactgagaagctgaccctggcagagaaggtgtggcgcgaccatgtcgtgtccaagggagaaaacggcgagcccgacctcctctacatcgacctgcagctgctgcatgaagtgacctcaccacaggcatttgacggcctgcgcatgaccggccgtaaactgcgccacccagaactgcacctggccaccgaagaccacaacgtgccaaccgaaggcatcaagactggctcactgctggaaatcaacgacaagatttcccgcctgcaggtatctactctgcgcgacaactgtgaagaattcggcgtgcgcctgcacccaatgggtgatgtccgacagggcatcgtgcacaccgtcggcccacagctcggcgcaacccagccaggcatgaccattgtgtgcggtgactcccacacctccacccacggtgcttttggctccatggcattcggcatcggtacctcagaggttgagcacgtcatggctactcaaaccctgccactgaagcctttcaagaccatggccattgaagttactggtgaactgcagccaggtgtttcctccaaggacctgattctggcgattatcgccaagatcggcaccggcggcggacagggctacgttctggaataccgcggcgaagcaatccgtaagatgtccatggatgcacgcatgaccatgtgcaacatgtccatcgaagctggcgcacgtgccggcatgatcgccccagaccaaaccaccttcgactacgttgaaggccgcgaaatggcaccaaagggcgccgactgggacgaagcagttgcttactggaagaccctgccaaccgacgaaggcgcaacctttgacaaggtcgtagaaatcgatggctccgcactgaccccattcatcacctggggcaccaacccaggccagggcctgccactgggcgaatccgtaccaagcccagaagacttcaccaacgacaacgacaaggcagcagccgaaaaggcactgcagtacatggacctggtaccaggaaccccactgcgcgacatcaagatcgacaccgtcttcctgggatcctgcaccaacgcccgcatcgaagacctgcagatcgccgctgacatcctcaagggccacaaaatcgccgacggcatgcgcatgatggtcgtgccttcctccacctggatcaagcaagaggcagaagcgctcggactggacaaaatcttcaccgacgctggcgctgaatggcgtaccgcaggctgctccatgtgcctgggcatgaacccagaccaactgaagccaggcgagcgctccgcatccacctccaaccgaaacttcgaaggacgccaaggaccaggaggccgcacccacctggtatccccagcagtcgcagccgccaccgcaatccgcggcaccctgtcctcacctgcagatatctaa

SEQ ID NO: 103262 - protein, 481 aa, Corynebacterium glutamicum
MTSPVENSTSTEKLTLAEKVWRDHVVSKGENGEPDLLYIDLQLLHEVTSPQAFDGLRMTGRKLRHPELHLATEDHNVPTEGIKTGSLLEINDKISRLQVSTLRDNCEEFGVRLHPMGDVRQGIVHTVGPQLGATQPGMTIVCGDSHTSTHGAFGSMAFGIGTSEVEHVMATQTLPLKPFKTMAIEVTGELQPGVSSKDLILAIIAKIGTGGGQGYVLEYRGEAIRKMSMDARMTMCNMSIEAGARAGMIAPDQTTFDYVEGREMAPKGADWDEAVAYWKTLPTDEGATFDKVVEIDGSALTPFITWGTNPGQGLPLGESVPSPEDFTNDNDKAAAEKALQYMDLVPGTPLRDIKIDTVFLGSCTNARIEDLQIAADILKGHKIADGMRMMVVPSSTWIKQEAEALGLDKIFTDAGAEWRTAGCSMCLGMNPDQLKPGERSASTSNRNFEGRQGPGGRTHLVSPAVAAATAIRGTLSSPADI

SEQ ID NO: 103263 - DNA, 1407 bp, Dechloromonas aromatica
  CDS (1)..(1407): transl_table=11
atgtcgaagaccctttacgacaagctctgggagaaccacgttgttcatcaggaagctgatggcacggcgcttctctacatcgatcgtcacctcatccacgaagtgaccagcccacaggcttttgaaggcctgaagctggctggccgcaagccgtggcgcgtttcctccatcgtcgcgacaccggaccacaacacgccgaccgaccactgggaagaggggatcaaggatccaatctcgcgccagcaggtcgaaacgctggatgccaacattcgcgaagtcggggcactggcctatttcccattcaaggatcagcgcatgggtattctccatgtcgtcggtccggaaaacggcgcgaccttgcccggtatgactgttgtctgcggcgactcgcacacttcgacgcatggcgcatttgcctgtatggcgcatggtatcggcacttccgaggtcgagcatgtgctggccacgcagtgcctgctacagaagcgctccaagaccatgttggtcgcagtcgagggcaagcttggcaagggtgttaccgccaaggatgtggcgctggccattatcggcaccatcggcacggcggggggcacgggctacgccattgaattcggcggcagcgccatccgtggcctgagcatggaaggtcgcatgaccctgtgcaacatggccatcgaaggcggcgcgcgtctgggcttcgttgctgtcgatgacacgacgatcaattacctgaaggggcgtcccttctcgccaactggcgagacctgggatcgcgccgttgcctactggcgtaccctgcattccgatgccggagcacagttcgaccgtgtcgttacgctgagggccgaagacattcgtccgcaggtgacctggggtacttcacccgagatggtcgtttcggtggatgccgtggtgcctgatccggccaaggaagcagatccggtcaagcgcgaggggatggaacgggctttgcagtacatggggctgaatccgaataccccgatcaaccagattgccatcgacaaggttttcatcggctcgtgcaccaattcccgtatcgaggatttgcgcgaagccgcctcggtgctcaaggggcgtcatgtcgctgccaacgtcaagctggcactggctgtgccgggttccggtctggtcaagcggcaggcagaagccgaagggctggacaaggtgttcgttgcggctggttttgaatggcgcgaacctggttgctcgatgtgtctggccatgaatgccgaccgtctggaaccgggcgaacgttgcgcgtcaacctccaaccgcaactttgaggggcgtcaggggccgggtgggcgtacccatttggtcagcccggcaatggctgcagcggcggcgattgccggccgctttgcggatgtccgcgacgtcctgtaa

SEQ ID NO: 103264 - protein, 468 aa, Dechloromonas aromatica
MSKTLYDKLWENHVVHQEADGTALLYIDRHLIHEVTSPQAFEGLKLAGRKPWRVSSIVATPDHNTPTDHWEEGIKDPISRQQVETLDANIREVGALAYFPFKDQRMGILHVVGPENGATLPGMTVVCGDSHTSTHGAFACMAHGIGTSEVEHVLATQCLLQKRSKTMLVAVEGKLGKGVTAKDVALAIIGTIGTAGGTGYAIEFGGSAIRGLSMEGRMTLCNMAIEGGARLGFVAVDDTTINYLKGRPFSPTGETWDRAVAYWRTLHSDAGAQFDRVVTLRAEDIRPQVTWGTSPEMVVSVDAVVPDPAKEADPVKREGMERALQYMGLNPNTPINQIAIDKVFIGSCTNSRIEDLREAASVLKGRHVAANVKLALAVPGSGLVKRQAEAEGLDKVFVAAGFEWREPGCSMCLAMNADRLEPGERCASTSNRNFEGRQGPGGRTHLVSPAMAAAAAIAGRFADVRDVL

SEQ ID NO: 103265 - DNA, 1401 bp, Escherichia coli O157
  CDS (1)..(1401): transl_table=11
atggctaagacgttatacgaaaaattattcgacgctcacgtagtgtacgaagccgaaaacgaaaccccgctgttatatatcgaccgccacctggtgcatgaagtgacctcaccgcaggcgttcgatggtctgcgcgcccacggtcgcccggtacgtcagccgggcaaaaccttcgccaccatggatcacaacgtctctacccagactaaagacattaatgcctgcggtgaaatggcgcgcatccagatgcaggagctgatcaaaaactgcaaagaatttggcgtcgaactgtatgacctgaatcacccctatcaagggatcgtccacgtaatggggccggaacagggcgtgaccttgccggggatgaccattgtctgcggcgactcgcataccgccacccacggcgcgtttggcgcactggcctttggtatcggcacttccgaagttgaacacgtactggcaacgcaaaccctgaaacagggccgtgcgaagaccatgaaaattgaagtccagggcaaagccgcgccgggcattaccgcaaaagatatcgtgttggcaattatcggtaaaaccggtagcgcaggcggcaccgggcatgtggtggagttttgcggcgaagcaatccgtgatttaagcatggaaggtcggatgaccctgtgcaatatggcaatcgaaatgggcgcgaaagccggtctggttgcacctgacgaaaccacctttaactatgtcaaaggccgtctgcatgcgccgaaaggcaaagatttcgacgacgccgttgcctactggaaaaccctgcaaaccgacgaaggcgcaactttcgataccgttgtcactttgcaggcagaagagatttcaccgcaggtcacctggggaactaacccaggccaggtgatttccgtgaacgacaatattcccgatccggcttcgtttgccgatccggttgaacgcgcgtcggcagaaaaagcgttggcctatatggggctgaaaccgggtattctgctgaccgaagtggctatcgacaaagtgtttatcggttcctgcaccaactcacgtattgaagatttacgcgcggcggcggaaatcgccaaagggcggaaagtcgcgccaggcgtacaggcgctggtggttcccggctctggtccggtaaaagcgcaggcggaagcagaaggtctggataaaatctttattgaagccggttttgaatggcgcttgcctggctgctcaatgtgtctggcgatgaacaacgaccgtctgaatccgggcgaacgttgtgcctccaccagcaaccgtaactttgaaggccgtcaggggcgcggcgggcgcacgcatctggtcagcccggcaatggctgccgccgcggctgtgaccggccatttcgccgacattcgcaacattaaataa

SEQ ID NO: 103266 - protein, 466 aa, Escherichia coli O157
MAKTLYEKLFDAHVVYEAENETPLLYIDRHLVHEVTSPQAFDGLRAHGRPVRQPGKTFATMDHNVSTQTKDINACGEMARIQMQELIKNCKEFGVELYDLNHPYQGIVHVMGPEQGVTLPGMTIVCGDSHTATHGAFGALAFGIGTSEVEHVLATQTLKQGRAKTMKIEVQGKAAPGITAKDIVLAIIGKTGSAGGTGHVVEFCGEAIRDLSMEGRMTLCNMAIEMGAKAGLVAPDETTFNYVKGRLHAPKGKDFDDAVAYWKTLQTDEGATFDTVVTLQAEEISPQVTWGTNPGQVISVNDNIPDPASFADPVERASAEKALAYMGLKPGILLTEVAIDKVFIGSCTNSRIEDLRAAAEIAKGRKVAPGVQALVVPGSGPVKAQAEAEGLDKIFIEAGFEWRLPGCSMCLAMNNDRLNPGERCASTSNRNFEGRQGRGGRTHLVSPAMAAAAAVTGHFADIRNIK

SEQ ID NO: 103267 - DNA, 1401 bp, Escherichia coli O6
  CDS (1)..(1401): transl_table=11
atggctaagacgttatacgaaaaattattcgacgctcacgtagtgtacgaagccgaaaacgaaaccccgctgttatatatcgaccgccacctggtgcatgaagtgacctcaccgcaggcgttcgatggtctgcgcgcccacggtcgcccggtacgtcagccgggcaaaaccttcgccaccatggatcacaacgtctctacccagacgaaagacattaatgcctgcggtgaaatggcgcgcatccagatgcaggagctgatcaaaaactgcaaagaatttggcgtcgagctgtatgacctgaatcacccgtatcaggggatcgtccacgtaatggggccggaacagggcgtgaccttgccggggatgaccattgtctgcggcgactcacataccgccacccacggcgcgtttggcgcactggcctttggtatcggcacttccgaagttgaacacgtactggcaacgcaaaccctgaaacagggccgggcgaagaccatgaaaattgaagtccagggcaaagccgcgccgggcattaccgcaaaagatatcgtgctggcaattattggtaaaaccggcagcgcaggcggtaccgggcatgtggtggaattttgcggcgaagcaatccgtgatttaagcatggaaggtcgtatgaccctgtgcaatatggcaatcgaaatgggcgcaaaagccggtctggttgcaccggacgaaaccacctttaactatgttaaaggccgtctgcatgcgccgaaaggcaaagatttcgacgacgccgttgcctactggaaaaccctgcaaaccgacgaaggagcaactttcgataccgttgtcactctgcaagcagaagagatttcgccgcaggtcacctggggcaccaatccaggccaggtgatttctgtgaacgacaatattcccgatccggcttcgtttgccgatccggttgaacgcgcgtcggcagaaaaagcgctggcctatatggggctgaaaccgggtattccgctgacagaagtggctatcgacaaagtgtttattggttcctgtactaactcgcgtattgaagatttacgcgcggcagcggaaatcgccaaaggccggaaagtcgcgccaggcgtacaagcgctggtggttcccggctccggtccggttaaagcccaggcggaagcggaaggtctggacaaaatttttatcgaagctggttttgaatggcgcttgccaggttgttcaatgtgcctggcgatgaacaacgaccgcctgaatccgggcgaacgttgcgcctccaccagcaaccgtaactttgaaggccgccaggggcgcggcgggcgcacgcatctggtcagtccggcaatggctgccgccgcggctgtgaccggacatttcgccgacattcgcaacattaaataa

SEQ ID NO: 103268 - protein, 466 aa, Escherichia coli O6
MAKTLYEKLFDAHVVYEAENETPLLYIDRHLVHEVTSPQAFDGLRAHGRPVRQPGKTFATMDHNVSTQTKDINACGEMARIQMQELIKNCKEFGVELYDLNHPYQGIVHVMGPEQGVTLPGMTIVCGDSHTATHGAFGALAFGIGTSEVEHVLATQTLKQGRAKTMKIEVQGKAAPGITAKDIVLAIIGKTGSAGGTGHVVEFCGEAIRDLSMEGRMTLCNMAIEMGAKAGLVAPDETTFNYVKGRLHAPKGKDFDDAVAYWKTLQTDEGATFDTVVTLQAEEISPQVTWGTNPGQVISVNDNIPDPASFADPVERASAEKALAYMGLKPGIPLTEVAIDKVFIGSCTNSRIEDLRAAAEIAKGRKVAPGVQALVVPGSGPVKAQAEAEGLDKIFIEAGFEWRLPGCSMCLAMNNDRLNPGERCASTSNRNFEGRQGRGGRTHLVSPAMAAAAAVTGHFADIRNIK

SEQ ID NO: 103269 - DNA, 1401 bp, Erwinia carotovora subsp
  CDS (1)..(1401): transl_table=11
atgggtaagacgttatatcaaaaattgttcgatgcgcacatcgttcatgaagcgccgaacgaaacaccgttgctgtatatcgacaggcatctggtgcatgaagtgacctctccgcaggcgttcgacggcctgcgtgcgatgggccgcaaggttcgtcaaccggggaaaaccttcgcgaccatggaccacaacgtgtccacgcagaccaaggacatcaacgccagtggtgagatggcccgcattcagatgcaggagctaatcaagaactgtgcggagtttggcgttcaattgtatgacctgaaccacccgtatcaaggcatcgttcacgttatcggcccagaacaagggatgacgctgccgggtatgaccatcgtttgcggtgactcacacaccgcaacgcacggcgcatttggctcactggccttcggcatcggtacgtcggaagtggaacatgtgctggcgacgcaaaccctgaaacagggtcgcgccaaaaccatgaagattgaagtcaccggtgatgctgctcatggcatcaccgcgaaagacatcgtgctggcgatcatcggtaaaaccggtagcgcgggcggcaccggccatgtggttgaattctgtggtaaagctattcgtgcgctgagcatggaaggccgtatgacgctgtgcaacatggccattgagatgggcgcgaaggccggtctggttgcaccagatgaaaccacgtttaactatctgaaaggtcgtcagtttgccccgaaagacgcaaactgggatgccgccgttgcatactggagcacgctgaaatccgatgatgacgcgcagttcgacactatcgtcacgctggacgccgcgcaaattgcaccacaggtcacctggggcaccaaccccggtcaggttatcgccgttaatcaggaaatccctaaccctgattctttcagcgatccggtagaacgcgcctctgccgccaaagctctggcctatatggatctgcaacccggcattaaactgaccgacgtgaagatcgataaagtcttcattggttcttgcaccaactcacgtattgaagatttgcgtgcggcggcagaaatcgccaaagggcgtaaagttgccgcaggcgttcaggctatcgtcgtacccggctccggcccggtaaaaaccatggcggagctggaagggctggataaagtgttcatcgaagcaggttttgagtggcgcttaccgggctgctccatgtgtctggcgatgaacaatgaccgcctgaaccccggcgagcgttgcgcatcaaccagcaaccgtaattttgaaggccgtcaggggcgcgctggacgcacccatctggtcagcccggcgatggctgctgcagctgcggtgacgggtcgctttgccgacgtccgcgagttgaattaa

SEQ ID NO: 103270 - protein, 466 aa, Erwinia carotovora subsp
MGKTLYQKLFDAHIVHEAPNETPLLYIDRHLVHEVTSPQAFDGLRAMGRKVRQPGKTFATMDHNVSTQTKDINASGEMARIQMQELIKNCAEFGVQLYDLNHPYQGIVHVIGPEQGMTLPGMTIVCGDSHTATHGAFGSLAFGIGTSEVEHVLATQTLKQGRAKTMKIEVTGDAAHGITAKDIVLAIIGKTGSAGGTGHVVEFCGKAIRALSMEGRMTLCNMAIEMGAKAGLVAPDETTFNYLKGRQFAPKDANWDAAVAYWSTLKSDDDAQFDTIVTLDAAQIAPQVTWGTNPGQVIAVNQEIPNPDSFSDPVERASAAKALAYMDLQPGIKLTDVKIDKVFIGSCTNSRIEDLRAAAEIAKGRKVAAGVQAIVVPGSGPVKTMAELEGLDKVFIEAGFEWRLPGCSMCLAMNNDRLNPGERCASTSNRNFEGRQGRAGRTHLVSPAMAAAAAVTGRFADVRELN

SEQ ID NO: 103271 - DNA, 1416 bp, Geobacillus kaustophilus
  CDS (1)..(1416): transl_table=11
atgaagccgaaaacgatcatcgataaaatttgggaaaaccacgtcgtctaccgtgaggagggcaaaccggatttattgtacatcgatttgcacttagtgcatgaagtgacctcgccgcaagcgtttgaagggttgcggcaaaaaggacggaaggtgcggcggccggatttgacctttgcgacgatggaccataacgtgccaaccgttaaccgatttgtgattaccgacgaagtggcgcgcaaccaaatcgctgcgcttgagcgcaactgccgcgagttcggcattccgctcgccgacctacacagcgaagagcaaggaatcgttcacgtcatcggcccagagctcgggttgacccagccggggaaaacgatcgtttgcggcgacagccatacgtcgacgcacggggcgtttggcgccttggcgtttggcatcggcacgagcgaagtcgagcatgtattggctacacaaacgctttggcagcataagccgaaaacgctgcaaatctgcatcaacggccgcctcggcaaaggagtgaccgccaaagacgtcatcttggccattatcggccgctatggcgttggcgtcggcaccggttatattatcgaatttacaggcgaagcgatccgacgcatgtcgatggaagagcgaatgacgatttgcaacatgtcgattgaagctggggcgagagccggcctcatcagtccggatgaaacgacgttcgcctatttgcgcggccgcaaatatgcaccaaaaggcgaggagtttgacaaggcggtggaacggtggcgggcgttagccagcgatgagggggcaaaatacgataaaacgattgaaatcgatgcgtcgacgatcgctccgatggtgacgtgggggacgaaccccgcgatgagcacttccgtcgatggcgtcgtgccgcatcccgagcaatttgaaagcaaaacagagcaaaacgcggtgcgccgggcgcttgagtacatggggctcaagccgggcacgccgattacggatattccggtgcagcacgtcttcatcggttcgtgcaccaactcacgcctcagcgatttgcgcgcggcggcgagcatcgtgaaagggaaaaaagtggctcctggtgtacgggcgctcgtcgtgcctggatcgcagcaagtgaaaaaacaagccgaagcggaagggttggcacaaattttcatcgacgccggttttgaatggcgcgactccggctgcagcgcctgtttgggcatgaacccggacatcatcccagaaggcgagcactgtgcgtcaacgtcgaaccgcaactttgaagggcggcaaggaaaaggggcgcgcacgcatctcgtcagcccggtgatggccgcggcggctgcgatttacggacattttgtcgatgtgcgccagcttgaagccgagccggtctgttaa

SEQ ID NO: 103272 - protein, 471 aa, Geobacillus kaustophilus
MKPKTIIDKIWENHVVYREEGKPDLLYIDLHLVHEVTSPQAFEGLRQKGRKVRRPDLTFATMDHNVPTVNRFVITDEVARNQIAALERNCREFGIPLADLHSEEQGIVHVIGPELGLTQPGKTIVCGDSHTSTHGAFGALAFGIGTSEVEHVLATQTLWQHKPKTLQICINGRLGKGVTAKDVILAIIGRYGVGVGTGYIIEFTGEAIRRMSMEERMTICNMSIEAGARAGLISPDETTFAYLRGRKYAPKGEEFDKAVERWRALASDEGAKYDKTIEIDASTIAPMVTWGTNPAMSTSVDGVVPHPEQFESKTEQNAVRRALEYMGLKPGTPITDIPVQHVFIGSCTNSRLSDLRAAASIVKGKKVAPGVRALVVPGSQQVKKQAEAEGLAQIFIDAGFEWRDSGCSACLGMNPDIIPEGEHCASTSNRNFEGRQGKGARTHLVSPVMAAAAAIYGHFVDVRQLEAEPVC

SEQ ID NO: 103273 - DNA, 1422 bp, Gloeobacter violaceus
  CDS (1)..(1422): transl_table=11
atggccgtcagccgcgcaacgctttttgacaaagtctgggatctgcacacggtgggcactctggcctccggtcagacccagctttttatcggactgcacctgattcatgaggtgaccagtccccaggcctttgcgatgttgcgcgagcgaggtttgggggtgctctatgcggaacggacagtggcgacagtagaccacatcgtgcccacccagagccagcagcggccttttgccgacacgctggccgagcagatgatccgcgccctcgaagataactgtgccgaattcggcattcgcttttacaacatcggttcgggttcccagggcatcgtgcacgtcatcgcccccgagcaggggttcacccagccgggcatgaccatcgcctgcggcgacagccataccgccacccacggcgctttcggcgccatcgccttcggcatcggcaccagccaggtgcgcgacgtgctcgccacccagacgctcgccctagacaagctcaaagtgcgccgcatcgagatgaacggcagcctgcacccgggggtgtttgccaaggatgtgattttgcacatcatccgcaagctcggtgtcaaagccggggtgggctatgcctacgaatttgccggcaccaccttcgaggcgatgaatatggaagagcggatgaccgtctgcaatatggccatcgagggcggtgcccgctgcggctacatcaaccccgacgccgtcacctacgcctacctcaaaggccgcgacttcgccccccagggcgccgactgggagcgggcggtcgcctggtgggagaacctgcgctccgaccccgacgcccagtacgacgacaccatacacttcgatgccgccgagattgcccccaccgtcacctggggcatcaccccgggtcaggggattgccgtcgacgagatcgttccccggccggaggaactccccggcgaagatcggcctctggcggaagaagcttatcgctacatggatctggccccaggggtgcccatcgtcggcaccaaggtcgatgtctgcttcatcggcagctgcaccaacggacgtctgagcgatctgcgcgaagcagccaatctcgcccggggccggcatgtcgccccgggcgtcaaagctttcgtcgtccccggctccgagcgcgtcaagcggcaggctgaagccgagggtctgcacgaagtctttttagaagccggtttcgagtggcgcgagcccggctgttcgatgtgcctggcgatgaaccccgaccggctcgaaggccgccaactgagcgcctcctcctccaaccgcaacttcaagggtcgccagggctcagcctccggccgcacgctgctgatgagcccggcgatggtggtggccgctgccgtgagcggtgcggtcgccgacgttcgcgccctattggagcccaccccatga

SEQ ID NO: 103274 - protein, 473 aa, Gloeobacter violaceus
MAVSRATLFDKVWDLHTVGTLASGQTQLFIGLHLIHEVTSPQAFAMLRERGLGVLYAERTVATVDHIVPTQSQQRPFADTLAEQMIRALEDNCAEFGIRFYNIGSGSQGIVHVIAPEQGFTQPGMTIACGDSHTATHGAFGAIAFGIGTSQVRDVLATQTLALDKLKVRRIEMNGSLHPGVFAKDVILHIIRKLGVKAGVGYAYEFAGTTFEAMNMEERMTVCNMAIEGGARCGYINPDAVTYAYLKGRDFAPQGADWERAVAWWENLRSDPDAQYDDTIHFDAAEIAPTVTWGITPGQGIAVDEIVPRPEELPGEDRPLAEEAYRYMDLAPGVPIVGTKVDVCFIGSCTNGRLSDLREAANLARGRHVAPGVKAFVVPGSERVKRQAEAEGLHEVFLEAGFEWREPGCSMCLAMNPDRLEGRQLSASSSNRNFKGRQGSASGRTLLMSPAMVVAAAVSGAVADVRALLEPTP

SEQ ID NO: 103275 - DNA, 1428 bp, Gluconobacter oxydans
  CDS (1)..(1428): transl_table=11
atgcccgttaccaattcgcccagaaccctttttgacaagatctgggacgatcatgtcgtcgaacgtctcgaggacgggacgtgcatcctctacatcgaccggcacctcgtccacgaggtgacaagtccgcaggctttcgaaggcctgcggatgtccgggcgccgcgtgcgtcgtccggatgccacggtggccgtggcggaccacaatgtccccacgtccgaccgttccaagccgatcgaggagccgcagagccgcctccagatcgaaacgcttgagaagaatgtcgccgaattcggcgtcccctatttcccgctgcgctccgcctctcagggcatcgtgcatgttgtcgggccggagcagggcatttccctgccaggcatgacgatcgtctgcggcgacagccacacctccacgcatggcgcgctcggctcgctggcgttcgggattggtacgtccgaagtcgaacacgtgctggcgacgcagacgatcctgcagaagcccgcgaagaacatgcgtgtctccgtcgagggcaaggtcggtcccggcgtgacggcgaaagacattttgctggccatcatcggccggatcggtaccgctggcggcaccggtcatgtcattgaatttgcaggatccgcgatccgtgatctggacatggccggccgtatgacgctgtgcaacatgtccatcgaagccggcgcgcgtgccggtctggtggcacccgacgaaaccaccttcgcctatgtgaagggccgtccgtttgcaccgaagggcgaagcgttcgagcaggcctgcgactactggcgcagccttgcctctgacgatggcgcctatttcgatacggaagtcacgctcgccgctgaagagatcatcccgtctgtcacctggggcaccagcccgcagaacgtgctgccgattgatggttccgtgccgtccccgtccgatgagcccgatccggctcgtgcagcccagatccagcgggccctggattatatgggccttgaagccgggcagaagatcgccgggacgccggtggatgtcgtgttcatcggctcctgcacgaacagccgtctggaagacctgcgcgctgctgcggacgtggtccgcggacggcatgtcgcggaaggcgttcgcgccatgatcgtgccgggctccggtctggtgaagcatgcggctgaggctgaagggttggacaaggtctttctggatgccgggttcgaatggcgtgaggcgggatgctcgatgtgtctgggaatgaacccggaccgtctgacgccgggccagcgctgcgcctcgacatccaaccgcaactttgaaggacgtcagggcccggatggccggacacatctgtgttcgcccgccatggcggccgcagccgctgtcacgggacgtctgtgcgatgtgcgtgaactggtgaaggagaccgtctga

SEQ ID NO: 103276 - protein, 475 aa, Gluconobacter oxydans
MPVTNSPRTLFDKIWDDHVVERLEDGTCILYIDRHLVHEVTSPQAFEGLRMSGRRVRRPDATVAVADHNVPTSDRSKPIEEPQSRLQIETLEKNVAEFGVPYFPLRSASQGIVHVVGPEQGISLPGMTIVCGDSHTSTHGALGSLAFGIGTSEVEHVLATQTILQKPAKNMRVSVEGKVGPGVTAKDILLAIIGRIGTAGGTGHVIEFAGSAIRDLDMAGRMTLCNMSIEAGARAGLVAPDETTFAYVKGRPFAPKGEAFEQACDYWRSLASDDGAYFDTEVTLAAEEIIPSVTWGTSPQNVLPIDGSVPSPSDEPDPARAAQIQRALDYMGLEAGQKIAGTPVDVVFIGSCTNSRLEDLRAAADVVRGRHVAEGVRAMIVPGSGLVKHAAEAEGLDKVFLDAGFEWREAGCSMCLGMNPDRLTPGQRCASTSNRNFEGRQGPDGRTHLCSPAMAAAAAVTGRLCDVRELVKETV

SEQ ID NO: 103277 - DNA, 1422 bp, Haloarcula marismortui
  CDS (1)..(1422): transl_table=11
atgagtcagggaacgctgtacgacaaggtatgggaccagcacaaagtcacgaccctgccgaacggccaagaccagctgttcgtcgggctgcacctcattcacgaggtcaccagcccgcaggctttcggcatgatcaaagagcgtggtcttgaggtcgcacgcccggacctgacccacgcgacggtcgaccacatcgtcccgaccgccaatcaggaccggccctacagcgacgacgcggccgagacgatgatggccgaacttgaggagaacgtccgcgacgccggtatccagttctctgacccaacgacgggcgaccagggtatcgtccatgtcatcggcccggagcagggcatcacccagcccggcaagaccatcgtctgtggtgacagccacacctcgacccacggcgcgttcggcgcgctcgcgttcggtatcgggacgagccagatccgcgacgtactggccacccagaccatcgcgatggagaaacagaaggtccgcaaaattgaggtcaccggcgaactcgacgagggcgtcgaggcaaaggacatcatcctcgaaattatccgccggctcgggaccgagggcggcgtcggctacgtgtacgagtacgccggcgagacaatcgagaacctcgacatggaaggtcggatgtccatctgtaatatgtccatcgagggcggcgctcgcgcgggctatgtcaaccccgacgagaccacctacgagtggctcgaagagacggactacttccaggaacaccccgagaaattcgaggaactcaagccctactgggagtccatccgctccgacgaggacgccgagtacgacgacgtcgtcgaaatcgacgcgggcgaactggaccctgtcgtcacgtggggaaccacacccggccagggcatcggtatcgacgacccgattccggagcccgaggatctggccgacgacaaggtcgacaccgcccgccgcgcccagaagcacatgcgcgtcgagcccggcgagacgatggaagggtacgacatcgacgttgccttccttggctcctgtaccaacgctcggctgcctgatctccgccgcgcggcccgcatcgtcaagggccgtgaggtcgccgacgacgtgcgagcgttcgtcgtccccggtagccagcgcgtccagcgcgccgccgaggaagaaggcctgaaagacatcttcgaggaagccggcttcgagtggcgcaacgccggctgttcgatgtgtctgggcatgaacgaggaccagctggaaggcgacgaggcctgtgcctcctcctcgaaccggaacttcgtcggccggcagggcagcaaggacggccggaccgtcctgatgaacccgcggatggtggctgctgcggccatcaccggcgaagtgtctgacgtgcgcgacctgaaggaggtgaccctggcatga

SEQ ID NO: 103278 - protein, 473 aa, Haloarcula marismortui
MSQGTLYDKVWDQHKVTTLPNGQDQLFVGLHLIHEVTSPQAFGMIKERGLEVARPDLTHATVDHIVPTANQDRPYSDDAAETMMAELEENVRDAGIQFSDPTTGDQGIVHVIGPEQGITQPGKTIVCGDSHTSTHGAFGALAFGIGTSQIRDVLATQTIAMEKQKVRKIEVTGELDEGVEAKDIILEIIRRLGTEGGVGYVYEYAGETIENLDMEGRMSICNMSIEGGARAGYVNPDETTYEWLEETDYFQEHPEKFEELKPYWESIRSDEDAEYDDVVEIDAGELDPVVTWGTTPGQGIGIDDPIPEPEDLADDKVDTARRAQKHMRVEPGETMEGYDIDVAFLGSCTNARLPDLRRAARIVKGREVADDVRAFVVPGSQRVQRAAEEEGLKDIFEEAGFEWRNAGCSMCLGMNEDQLEGDEACASSSNRNFVGRQGSKDGRTVLMNPRMVAAAAITGEVSDVRDLKEVTLA

SEQ ID NO: 103279 - DNA, 1509 bp, Halobacterium volcanii
  CDS (88)..(1509): transl_table=11
atgtggaccacacgccccgcaacggcgagggcgcgaaccaggtctgggaacgcggccgcgacgaccgcgtcgtaccgggtgacggacatgagtgagggaacgctgtacgacaaggtctgggaggaacacacggtttcggagctgccgaccggccagacgcagctgttctgtggcctccacctcatccacgaggtgacgagcccgcaggcgttcggcatgttgcaggagcgcgacctcgaagtcgcctacccgaaccggacgcacgcgacggtcgaccacatcgtccccacgtcggaccagtcgcggccgttccgcgacgacgccgccgaggagatgatggccgaactggagcagaacgtccgcgaagcgggcatcaacttctcggaccccacgtcgggcgagcagggaatcgtccacgtcatcgggcccgagaagggactcacccagcccggcatgaccatcgtctgcggcgacagccacacctcgacccacggcgcgttcggcgcgctcgcgttcggtatcgggacgagccagattcgcgacgtgctggcgacccagaccgtcgcgatggagaagaagaaggtgcggaaaatcgaggtcacgggcgaactcggccccggcgtcgaagcgaaggacgtcatcctcgaaatcatccgtcgcctcggcaccgaaggcggcgtcggctacgtctacgagtacgccggcgaggccatcgaggatctcgacatggagggccggatgagcatctgtaacatgtccatcgagggcggcgctcgcgcgggctacgtcaaccccgacgagaccacctacgagtggctgaaagagaccgagtacttccaggagaaccccgagcggttcgacgaactcaagccgtactgggaatccatccgctccgacgaggacgccgagtacgacgacgtcgtcaccatcgacggctccgaactcgaacccgtcgtgacgtgggggaccacgcccggacagggcgtcggcatcacccagccgattccggcccccgaagacctgcccgaggagaagcaggaaaccgcccggatggcgcaggaacacatgggcgtcacgcccggcgagacgatggagggctacgaaatcgacgtggctttcctcggctcgtgtacgaacgctcgcctgcccgacctccgccgcgcggcgggggtcgtgaagggtcgacaggtcgcggacagcgtccgcgcgatggtcgtccccggcagtcagcgcgtcaaggccgccgccgaagcggagggcctcgacgaggtgttcaaagaagccggcttcgagtggcgcgaggcgggctgttcgatgtgtctcggcatgaacgaggaccaactggagggcgacgaggcctccgcgtcctcgtcgaaccgcaacttcatcggccggcaggggtcgaaagacggccgcaccgtcctgatgaacccgcgcatggtcgccgcggcggccgtcaccggggaagtgactgacgtacgcgaactgaaggaggtgaccacggtatga

SEQ ID NO: 103280 - protein, 473 aa, Halobacterium volcanii
MSEGTLYDKVWEEHTVSELPTGQTQLFCGLHLIHEVTSPQAFGMLQERDLEVAYPNRTHATVDHIVPTSDQSRPFRDDAAEEMMAELEQNVREAGINFSDPTSGEQGIVHVIGPEKGLTQPGMTIVCGDSHTSTHGAFGALAFGIGTSQIRDVLATQTVAMEKKKVRKIEVTGELGPGVEAKDVILEIIRRLGTEGGVGYVYEYAGEAIEDLDMEGRMSICNMSIEGGARAGYVNPDETTYEWLKETEYFQENPERFDELKPYWESIRSDEDAEYDDVVTIDGSELEPVVTWGTTPGQGVGITQPIPAPEDLPEEKQETARMAQEHMGVTPGETMEGYEIDVAFLGSCTNARLPDLRRAAGVVKGRQVADSVRAMVVPGSQRVKAAAEAEGLDEVFKEAGFEWREAGCSMCLGMNEDQLEGDEASASSSNRNFIGRQGSKDGRTVLMNPRMVAAAAVTGEVTDVRELKEVTTV

SEQ ID NO: 103281 - DNA, 1461 bp, Leifsonia xyli subsp
  CDS (1)..(1461): transl_table=11
atgaccaccgaagccctcccgctgacactggccgagaaggtgtggcaggatcatctggtcgtcaagggcgaggacggttctcccgacctcatctacattgacctgcacctcgtccacgaggtgaccagtccgcaggcgtttgacggcctccgggtggcgggccgaccggtccgccggccggacctcaccatcgccacggaagaccacaacaccccgaccatcggcatcgacaagccgatcgccgacctcacgagccgcacccagatcgagacgctgcgccgcaacgccgaggaattcggcgtccgcctgcactcgctgggcgacatcgagcagggcatcgtccatgtcgtcggcccccagctgggcctcaccatgccgggcatcactgtggtgtgcggcgactcgcacacctcgacccacggcgcgttcggcgcgatggcgttcggtatcggcacctccgaggtcgagcatgtgctcgccacgcagaccctgccgctgaagccgttcaagacgatggggatcaccgtggagggtgagctgcgccccggtgtgacggcgaaggacatcatcctggccgtcatcgccaagatcggcaccggcggcgggcaggggtatgtgctggagtaccgcggcagcgccatccgcgccctctcgatggagggccgcatgaccgtctgcaatatgtcgatcgaggccggcgcgcgtgctgggatggtcgcgcccgatgagaccacgttcgcctacctgaagggccgccctcacgcgccggagggcgaggactgggacgaggctgtcgcctattggaccacgctccagacggacgacgctgccgtgttcgacgccgaggtcttcctcgacgccggcgagatcgagccgttcgtcacctggggcaccaaccccggtcagggcgtctcgctcagccaggacgttccggaccccgccgacatcgaggagccgaacgcccgcgcggccgctgagcgcgcgctggagtacatggacttgaagtcgggaacgccgatgaagagcgtccccgtggacgccgtcttcatgggctcctgcactaacagccgcattgaggacctgcgcgccttcgcctccgtgatcaagggcaggaagaaggccgagggggtgcgcgtcatggtggtgcccggcagcgcccgggtgcgtctcgaggccgaggccgagggcatcgacaagatcgtcgaggagttcggtgcggagtggcggttcgccggctgctccatgtgcctcggcatgaaccccgatcagcttgcgccgggggagcgctgcgcctccacctccaaccgcaacttcgagggccggcagggcaagggcggccgtacgcacctggtttcgccgctcgtcgcggcggcgacggccatccgtggcacactgtcgagcccctgggacctcgaacacgaggacgctgacacccggaccggggagaaggtgggcatctga

SEQ ID NO: 103282 - protein, 486 aa, Leifsonia xyli subsp
MTTEALPLTLAEKVWQDHLVVKGEDGSPDLIYIDLHLVHEVTSPQAFDGLRVAGRPVRRPDLTIATEDHNTPTIGIDKPIADLTSRTQIETLRRNAEEFGVRLHSLGDIEQGIVHVVGPQLGLTMPGITVVCGDSHTSTHGAFGAMAFGIGTSEVEHVLATQTLPLKPFKTMGITVEGELRPGVTAKDIILAVIAKIGTGGGQGYVLEYRGSAIRALSMEGRMTVCNMSIEAGARAGMVAPDETTFAYLKGRPHAPEGEDWDEAVAYWTTLQTDDAAVFDAEVFLDAGEIEPFVTWGTNPGQGVSLSQDVPDPADIEEPNARAAAERALEYMDLKSGTPMKSVPVDAVFMGSCTNSRIEDLRAFASVIKGRKKAEGVRVMVVPGSARVRLEAEAEGIDKIVEEFGAEWRFAGCSMCLGMNPDQLAPGERCASTSNRNFEGRQGKGGRTHLVSPLVAAATAIRGTLSSPWDLEHEDADTRTGEKVGI

SEQ ID NO: 103283 - DNA, 1398 bp, Leptospira interrogans serogroup Icterohaemorrhagiae serovar
  CDS (1)..(1398): transl_table=11
atgaagacaatgttcgaaaaaatttgggaagatcatctagtcggagaactagatgctggatcctatctaatctatatagatcgccatctcattcatgaagttacaagtcctcaggcgtttgaaggacttaaacttgcaggcagaaaggttcgtcgtcctgaagctacttttgccacaatggatcataacgtttctactagaacacgtgatttaagtctggccgatcccgtttccgcaattcaaatgcagactttaaaaaagaactgcgacgaaaatggaatccgcgtttatgattttcaaaaccctgaccaaggaatcattcacgtaattgctcctgaaatgggactgactcatcctggaatgacaatcgtatgcggagattctcatacttctacacacggtgcgtttggtgcgcttgctttcgggatcggaaccagcgaagtagagcacgttcttgcgactcaaaccttagttcaaaaaagagcaaaaacaatggagattagagtcgatggaaaactttccgataaggtcacagcaaaagacatcattcttgcgatcattggaaaaattggaaccgcaggtgcgacaggttatgtgatcgaatatagaggttctgcaattcaagccctcagtatggaagctagaatgactatttgtaatatgtctatcgaagcgggagctagagcaggtttaatcgcaccagatgaaactacttttaattatattcaaggaaaggacttttctccaaaaggagttgaatgggatcttgcggtcaaaaaatggaaacactatgtaacggacgaaggtgctaaatttgatagaaccgtaattcttcatgcagatgaaatcgctcctatggtaacttggggaacttctcccagtcaggttgtttcgataaaaggagtcgttccagatccaaaagatgcaaatgatccggtggaaaaaattggaattgagtctgcgcttaaatatatggatctcaaatcgggccagaagatagaagacatttcaattaataaagtttttatcggttcctgtactaattctagaatcgaagatttaagagcggccgctgctaccgtaaaaggaaaaaaagtttcctctaaggttcaggcgattgtggttcctggttcaggcagagtcaaacgtcaggcggaacaagaaggtctggataaaatttttaccgcggccggttttgaatggagaaatccaggctgttctatgtgtcttgcgatgaacgacgacgtattagaaccgggagatcgttgtgcttctacttctaaccgaaactttgaaggtcgtcaaggaaaaggtggaagaacccatctagtaggaccggaaatggccgccgccgcggctatcgaaggccattttgtggatattcgaaactggaaataa

SEQ ID NO: 103284 - protein, 465 aa, Leptospira interrogans serogroup Icterohaemorrhagiae serovar
MKTMFEKIWEDHLVGELDAGSYLIYIDRHLIHEVTSPQAFEGLKLAGRKVRRPEATFATMDHNVSTRTRDLSLADPVSAIQMQTLKKNCDENGIRVYDFQNPDQGIIHVIAPEMGLTHPGMTIVCGDSHTSTHGAFGALAFGIGTSEVEHVLATQTLVQKRAKTMEIRVDGKLSDKVTAKDIILAIIGKIGTAGATGYVIEYRGSAIQALSMEARMTICNMSIEAGARAGLIAPDETTFNYIQGKDFSPKGVEWDLAVKKWKHYVTDEGAKFDRTVILHADEIAPMVTWGTSPSQVVSIKGVVPDPKDANDPVEKIGIESALKYMDLKSGQKIEDISINKVFIGSCTNSRIEDLRAAAATVKGKKVSSKVQAIVVPGSGRVKRQAEQEGLDKIFTAAGFEWRNPGCSMCLAMNDDVLEPGDRCASTSNRNFEGRQGKGGRTHLVGPEMAAAAAIEGHFVDIRNWK

SEQ ID NO: 103285 - DNA, 1389 bp, Listeria innocua
  CDS (1)..(1389): transl_table=11
atggggaaaacactttttgataaactttggaaccgccatgtcatttatggtaaagaaggtgaaccgcaattattatatgttgaccttcatttgattcatgaagttacttctcctcaagcgtttgaaggacttagaatggaaaatcgaccactgcggagaccagataaaacatttgctacaatggatcataatgttcccactgaagacattttcaacattcaagatttagttgctaaaaagcaaattgaagcactacaaactaactgcgaagaattcggggtaacactagctgatatgggtagcgaccgtcaaggaatcgtgcatatggttggacctgaaactggtcttactcaacctggaaaagtgattgtatgtggagattcgcatactgcaacacatggtgcttttggcgcgattggctttgggattggttccagtgaagtagagcatgtttttgcgacccaaactatttggcaacaaaaaccaaaatctatgggtattgaaattaatggaaaacttcccaaaggcgtttatgcaaaagatataattttgcatttgattgccacatatggcgtcgcttttggaacaggttatgcggttgaatattatggcgaaacgattcgcaatatgtcgatggaagaacgtatgacgatttgtaatatggctattgaaggtggcgcaaaaatgggcatgatggcgccagaccaaactacttttgaatatgttcgtggtcgtgaatatgctccttctgacatggaaaaagccattcgtgattgggaaacgcttaaaactgatcctgatgcggaatatgaccttcatatcgaaatggatgctagcattttagaaccatatgtcacttggggaacaaatccagagatgggtgtccctttttcaaaagcatttccggaaattaaagatatgaactatgagcgagcttatgaatatatgggactaaaacctggtcaaactgcagaagaaatcgagcttggttatgtgtttattggttcttgtacgaatgctcggctgtctgatttagaagaagcagctcgtatcgttaaaggaaataaagtaaaaaataatattcgggcactagtcgttcctggttctcgccaagttcgtaatgcagcagaagcaatcggccttgataagatatttaaagatgccggttttgaatggcgtgaacctggttgttcgatgtgtctcggaatgaatcccgaccaagttccagacggggtccactgcgcttctacttcgaatcgtaattttgaagggcgccaaggtaaaggagcacgtacccatcttgtttcaccagcaatggctgcagcggcggcaattaacggacactttatcgatattcgaaaggaggcggttattagtggaggcaattaa

SEQ ID NO: 103286 - protein, 462 aa, Listeria innocua
MGKTLFDKLWNRHVIYGKEGEPQLLYVDLHLIHEVTSPQAFEGLRMENRPLRRPDKTFATMDHNVPTEDIFNIQDLVAKKQIEALQTNCEEFGVTLADMGSDRQGIVHMVGPETGLTQPGKVIVCGDSHTATHGAFGAIGFGIGSSEVEHVFATQTIWQQKPKSMGIEINGKLPKGVYAKDIILHLIATYGVAFGTGYAVEYYGETIRNMSMEERMTICNMAIEGGAKMGMMAPDQTTFEYVRGREYAPSDMEKAIRDWETLKTDPDAEYDLHIEMDASILEPYVTWGTNPEMGVPFSKAFPEIKDMNYERAYEYMGLKPGQTAEEIELGYVFIGSCTNARLSDLEEAARIVKGNKVKNNIRALVVPGSRQVRNAAEAIGLDKIFKDAGFEWREPGCSMCLGMNPDQVPDGVHCASTSNRNFEGRQGKGARTHLVSPAMAAAAAINGHFIDIRKEAVISGGN

SEQ ID NO: 103287 - DNA, 1389 bp, Listeria monocytogenes serotype 4b
  CDS (1)..(1389): transl_table=11
atggggaaaacactttttgataaactttggaatcgccatgtcatttatggcaaagaaggtgaaccacaattattatatgttgatcttcatttgattcatgaagttacttctcctcaagcgtttgaaggacttagaatggaaaatcggccactgcgtagaccagataaaacgttcgcgacaatggatcataacgttccaactgaagatattttcaacattcaagaccttgttgctaaaaaacaaatcgaagcactgcaaaccaattgcgaggaatttggcgtgacgctagctgatatgggtagtgatcgccaaggaatcgtgcatatggttggaccagaaactgggctaacacaacctggaaaagtcattgtatgtggagattcgcatactgcaactcatggagcatttggagcaattggctttgggattggttctagtgaagtagagcatgtttttgcgactcaaaccatttggcaacaaaagccaaaatcaatgggcatagaaattaacggcaatcttccaaaaggtgtctatgcaaaagatattattttgcatctgattgccacgtatggcgtcgcttttggaactggctatgccgttgagtattacggcgaaactattcgcaatatgtcgatggaagaacggatgacgatttgtaatatggcaattgaaggtggcgcaaagatgggcatgatggcgccagatgaaactacttttgaatatgtgcgcggtcgtgaatacgctcccgctgatatggataaagcaattagtgactggaaaacgctccaaacagatccagatgccgaatatgaccttcatatcaaaatggatgcgagcattttggaaccgtatgtcacttggggaacgaatcccgaaatgggagtgccattttctaaagcatttccggaaattaaagatatgaactatgagcgtgcttatgaatatatggggctaaaacctggtcaaactgcagaagaaatcgagcttggctatgtgtttattggttcttgtacaaatgccagactttctgacttagaagaagctgctcgtatcgtcaaaggaaataaagtgaaaaataatattcgcgcactcgtggtccctggttctcgccaagtgcgtaatgcggcagaatctatcggactagataaaatttttatagaagctggctttgagtggcgtgaacctggttgttcgatgtgtctaggaatgaaccctgatcaagtaccagacggcgttcactgtgcttctacttcgaaccgaaattttgaaggtcgtcaaggtaaaggcgctcgtactcatcttgtttcaccagcaatggctgctgctgcggcaattaacgggcactttatcgatattcgaaaggaggcggttatcagtggaggaaattaa

SEQ ID NO: 103288 - protein, 462 aa, Listeria monocytogenes serotype 4b
MGKTLFDKLWNRHVIYGKEGEPQLLYVDLHLIHEVTSPQAFEGLRMENRPLRRPDKTFATMDHNVPTEDIFNIQDLVAKKQIEALQTNCEEFGVTLADMGSDRQGIVHMVGPETGLTQPGKVIVCGDSHTATHGAFGAIGFGIGSSEVEHVFATQTIWQQKPKSMGIEINGNLPKGVYAKDIILHLIATYGVAFGTGYAVEYYGETIRNMSMEERMTICNMAIEGGAKMGMMAPDETTFEYVRGREYAPADMDKAISDWKTLQTDPDAEYDLHIKMDASILEPYVTWGTNPEMGVPFSKAFPEIKDMNYERAYEYMGLKPGQTAEEIELGYVFIGSCTNARLSDLEEAARIVKGNKVKNNIRALVVPGSRQVRNAAESIGLDKIFIEAGFEWREPGCSMCLGMNPDQVPDGVHCASTSNRNFEGRQGKGARTHLVSPAMAAAAAINGHFIDIRKEAVISGGN

SEQ ID NO: 103289 - DNA, 1413 bp, Methylococcus capsulatus
  CDS (1)..(1413): transl_table=11
atgagcggaaaaaccctttacgacaagctgtgggacgaccacgtcgtgcatgtcgatgcggacggatcgtgcctgatctacatcgatcgtcatctaatccacgaggtgacctcgcctcaggcattcgaagggctgcggatggcggggcgtgtaccctggcgggtggatgccaatcttgcggtggccgaccacaacgtccccaccgccgaccgcgacaggggtatcgccgatccggtgtcgcgcctgcaggtggaaaccctggacaagaactgcgccgatttcggcatcaccgaattcgcgatggacgacgtgcgccagggtatcgtgcatgtgatcgggcccgagcagggcgcgaccctgccgggcatgaccatcgtttgcggcgattcgcatacttcgactcacggtgctttcggggcgctcgccttcgggatcggcacttccgaggtcgagcacgtactggccacgcaatgcctggtgcagcgcaaggcgaagaacatgctggtccgcgtccagggcaagctggcgccgggcgtgacggcgaaagatctggtactggcggtcatcggccgtatcggaaccgccggcggcaccggctacaccatcgaattcgctggcgaagccattcgcggcctgtcgatggaaggccggatgacggtctgcaacatggcgatcgaggcgggcgcacgtgccggcctggtggcggtggacgaagtcacgctcgactatctcgagggccgcccgttcgctccggcgggcgcgttgtgggagcgggcggtcgaggcatggaaagacctgcacagcgatccggatgcggtattcgacaaggtcgtcgagatcgatgccgccagcatcaagccgcaggtgacctggggaacttcgccggaacaggtcgtgccggtggatgccgaggtgcccgacccggccacggaagccgatcccgtgcggcgggaaagcatggagcgggcgctgcagtacatggatctcctgccgggcacgccaatcggcgcgatccgggtcgatcgggtgttcatcggctcctgcaccaatgccaggatcgaggatctgcgcgccgcggcggaagtcgtccgggggcacaagcgcgctgccagcgtgaagcaggcactggtggtgcccggctcgggtttggtcaagcggcaggcggagcaggaggggctggacaaggtgttcctcgaggccggtttcgaatggcgcgacccgggttgttccatgtgtctggcgatgaacgccgaccgcctggaacccggcgagcgttgcgcctcgacctccaaccggaattttgaggggcgccagggctatggcgggcgtacccatctggtgagtccggccatggcggctgcggcggccattcacgggcatttcgtcgacatcaccgaaggagggcgcgcatga

SEQ ID NO: 103290 - protein, 470 aa, Methylococcus capsulatus
MSGKTLYDKLWDDHVVHVDADGSCLIYIDRHLIHEVTSPQAFEGLRMAGRVPWRVDANLAVADHNVPTADRDRGIADPVSRLQVETLDKNCADFGITEFAMDDVRQGIVHVIGPEQGATLPGMTIVCGDSHTSTHGAFGALAFGIGTSEVEHVLATQCLVQRKAKNMLVRVQGKLAPGVTAKDLVLAVIGRIGTAGGTGYTIEFAGEAIRGLSMEGRMTVCNMAIEAGARAGLVAVDEVTLDYLEGRPFAPAGALWERAVEAWKDLHSDPDAVFDKVVEIDAASIKPQVTWGTSPEQVVPVDAEVPDPATEADPVRRESMERALQYMDLLPGTPIGAIRVDRVFIGSCTNARIEDLRAAAEVVRGHKRAASVKQALVVPGSGLVKRQAEQEGLDKVFLEAGFEWRDPGCSMCLAMNADRLEPGERCASTSNRNFEGRQGYGGRTHLVSPAMAAAAAIHGHFVDITEGGRA

SEQ ID NO: 103291 - DNA, 1410 bp, Neisseria gonorrhoeae
  CDS (1)..(1410): transl_table=11
atgacggcacaaaccctctacgacaaactctggaacagccacgtcgtccgcgaagaaggagacggcaccgtcctgctttacatcgaccgccatctggttcacgaagtaaccagcccgcaggcgtttgaaggtctgaaaatggcggggcgcaagctgtggcgcatcgacagcgtggtctccaccgccgaccacaacaccccgaccggcgattgggacaaaggcatccaagacccgatttccaagctgcaagtcgatacgttggatcaaaacatcaaagagtttggcgcactcgcctacttcccgtttatggacaaaggccagggcatcgtacacgttatggggcccgaacaaggcgcgaccctgcccgggatgaccgtcgtctgcggcgattcgcacacttccacccacggcgcattcggcgcactggcacacggcatcggcacttccgaagtcgaacacacgatggcgacccagtgcattaccgcgaaaaaatccaaatctatgctgattgccgctgacggcaaattaaaagcgggcgttaccgccaaagacgtggcgctctacatcatcgggcaaatcggcacggcgggcggcacgggttacgccgtcgagttcggcggcgaagccatccgcagcctttcgatggaaggcaggatgaccctgtgcaatatggcgattgaggcaggcgcgcgttccggtatggttgccgtcgatcaaaccaccatcgactatgtcaaaggcaagcccttcgcacccgaaggcgaagcttgggacaaagccgtcgagtactggcgcacgctggtgtctgacgaaggcgcggtttttgataaagaataccgtttcaacgccgaagacatcgaaccgcaagttacttggggcacgtcgcccgaaatggttttaaacatcggcggcaaagtgccgaatcccgccgaagaaaccgatccggtcaaacgcagcggcatagagcgcgcactcgaatatatgggtttgaaggccggtacgccgctgaacgaaatccctgtcgatatcgtctttatcggctcttgcaccaacagccgcatcgaagacttgcgcgaagccgctgctatcgccaaaggccataaaaaagccggcaacgtacagcgcgtgttaatcgtccccggctccggtttggttaaagaacaagccgaaaaagaaggcttggacaaaattttcatcgaagccggttttgaatggcgcgaaccgggctgttcgatgtgccttgcgatgaatgccgaccgcctcgcgccgaggcaacgctgcgcctccacgtccaaccgcaattttgaaggccgccaaggcaacggcgggcgcacccacctcgtcagccccgctatggccgccgccgccgccgttaccggacactttaccgacatccgcacgatggcgtaa

SEQ ID NO: 103292 - protein, 469 aa, Neisseria gonorrhoeae
MTAQTLYDKLWNSHVVREEGDGTVLLYIDRHLVHEVTSPQAFEGLKMAGRKLWRIDSVVSTADHNTPTGDWDKGIQDPISKLQVDTLDQNIKEFGALAYFPFMDKGQGIVHVMGPEQGATLPGMTVVCGDSHTSTHGAFGALAHGIGTSEVEHTMATQCITAKKSKSMLIAADGKLKAGVTAKDVALYIIGQIGTAGGTGYAVEFGGEAIRSLSMEGRMTLCNMAIEAGARSGMVAVDQTTIDYVKGKPFAPEGEAWDKAVEYWRTLVSDEGAVFDKEYRFNAEDIEPQVTWGTSPEMVLNIGGKVPNPAEETDPVKRSGIERALEYMGLKAGTPLNEIPVDIVFIGSCTNSRIEDLREAAAIAKGHKKAGNVQRVLIVPGSGLVKEQAEKEGLDKIFIEAGFEWREPGCSMCLAMNADRLAPRQRCASTSNRNFEGRQGNGGRTHLVSPAMAAAAAVTGHFTDIRTMA

SEQ ID NO: 103293 - DNA, 1413 bp, Nitrosomonas europaea
  CDS (1)..(1413): transl_table=11
atgaaaacgttatatgacaaactctggagtgaccatgtagtgcatgcggaatcggatgatccgaatggcatggttattctgtatatcgatcgccatctggtacatgaagttaccagccctcaggcttttgagagcctgaagctggccggacgcaaaccctggcggactggctcgattctggcggtagccgatcataatgttccaacgacggatcgaagcagtggtatcagcgatcctgtatcccgtttacaagtcgaaacgctggatcagaattgtgaggaattcgcgattaccgaattcagaatgaacgatgaacgtcagggaatcgttcatgtgatcgggcctgagcaaggtgcgacactgcctggtatgaccgtggtgtgtggagattcccataccagtacacatggggcatttgcttgtctggcatttggtatcgggacatccgaggttgaacatgttctggcgacacaatgtctggttgcccggaaatccaaaactatgctggtcagggtcgaaggggatctgccacctggtgtgacggccaaagatattgcactggctgttattggtgaaataggtacggccggcggtacgggttatgccattgaatttgccggcagtgcgatacgatcgctttccatggaaggccggatgacgctctgcaatatggcgatcgaggcgggtgcccgtgcaggtatggttggagcggatgaggttacgatcgattatatcaaggggagaccctttgccccgcagggagcactgtgggatcaggcggtggcttactggcgtacattgaaaagtgatgaagatgcggtgttcgatcggatggtggaattgaaggcagtcaacatcaaaccgcaggtaacctggggcacctcaccagaaatggtgactactgtggatgggtatgtgcccgatcctgcggatatcagcgatccgaccaaacgccatgatgtcgaacatgcactcgggtatatgggactgaagccgaagatgcccattcaggaaataacgctggataaagttttcattggttcctgtaccaattcacgtatcgaagatctgcgcgcagcagcagaaatcgtcaaaggaaaacggattgccccgaatatcaggctggctatggtggtccctggttccggtctggtcaaatcgatggccgagaaggaggggctggataaaatttttctgtcggcgggattcgaatggcgcgaacccggatgttcgatgtgcctggccatgaatgatgacagattgttacctggagagcgttgtgcctcgacttccaatcgtaattttgaaggccggcaaggccccggcgggcgaacacatctcgtcagccctgccatggcagccgctgctgcaatagctggccatttcgttgatgtgcgttcttttattcggtaa

SEQ ID NO: 103294 - protein, 470 aa, Nitrosomonas europaea
MKTLYDKLWSDHVVHAESDDPNGMVILYIDRHLVHEVTSPQAFESLKLAGRKPWRTGSILAVADHNVPTTDRSSGISDPVSRLQVETLDQNCEEFAITEFRMNDERQGIVHVIGPEQGATLPGMTVVCGDSHTSTHGAFACLAFGIGTSEVEHVLATQCLVARKSKTMLVRVEGDLPPGVTAKDIALAVIGEIGTAGGTGYAIEFAGSAIRSLSMEGRMTLCNMAIEAGARAGMVGADEVTIDYIKGRPFAPQGALWDQAVAYWRTLKSDEDAVFDRMVELKAVNIKPQVTWGTSPEMVTTVDGYVPDPADISDPTKRHDVEHALGYMGLKPKMPIQEITLDKVFIGSCTNSRIEDLRAAAEIVKGKRIAPNIRLAMVVPGSGLVKSMAEKEGLDKIFLSAGFEWREPGCSMCLAMNDDRLLPGERCASTSNRNFEGRQGPGGRTHLVSPAMAAAAAIAGHFVDVRSFIR

SEQ ID NO: 103295 - DNA, 1425 bp, Nocardia farcinica
  CDS (1)..(1425): transl_table=11
atggccgaccgcccacgtaccctggccgagaaggtctgggaagagcacgtcgtcgcccggggtgagggcgagggcgcctcgcgcgagccggatctgatctacatcgacctgcacctcgtgcacgaggtcaccagcccgcaggccttcgacggcctgcgcgccgcgggccgcccggtccgccgtcccgacctcaccatcgccaccgaggaccacaacgtccccaccgtcgacatcgacaagccgatcgccgacccgatctcacgcacgcaggtcgagacgctgcgccgcaactgcgccgaattcggcatccggctgcacccgatgggggacctggaacagggcatcgtgcacgtggtcggcccgcagctcggcctgacccagcccggcatgaccgtggtctgcggtgacagccacacctccacccacggcgccttcggcgcgctggcgatgggtatcggcaccagcgaggtcgagcacgtgctggccacgcagaccttgtcgctgcgcccgttcaagaccatggcgatcaacatcgacgggcagctgccgcccggggtcaccagcaaggacgtcatcctggccgtgatcgcccagatcggcaccggtggcggccagggctatgtgctcgagtaccgcggcgaggccgtgcgcgccatgtcgatggaggcgcggatgacgatgtgcaacatgtccatcgaggcgggtgcgcgagccggcatgatcgcccccgacgaggtgacctacgagttcctgaaggggcgtccgcacgcgccgaagggtgccgactgggacgccgcggtggccgcgtgggacgcgctgcggaccgacgagggcgctgttttcgacgccgaggtgcacatcgacgcgagctcgctgagcccgttcgtcacctggggcacgaacccgggccagggtgcgccgctgagcgcgaccgtgcccgatccggccgatttcgccgacgagaccgcccgcgaggccgccgcgaaagcgctgcggtacatggatttgaccccgggcacgccgctgcgcgaagtcgccgtcgacaccgttttcgtcggctcgtgcaccaacggccggatcgaggatttgcgggcggcggccgaaatcctgaagggccgccgggttgccgagggcgtgcgaatgctggtcgtaccgggctcgatgcgggtgcgcgcgcaggcggaaaaggaggggctcggcgagattttcaccgccgcgggcgccgaatggcggcaggcgggctgctcgatgtgcctgggcatgaatcccgaccagctcgagcccggccaacgctgcgcctccacctcgaaccgcaacttcgaaggcaggcagggcaagggcggccgcacccatctggtctcgccgctggtggcggccgcgaccgcggtgcgcgggaccctgtcctcaccggccgacctggactga

SEQ ID NO: 103296 - protein, 474 aa, Nocardia farcinica
MADRPRTLAEKVWEEHVVARGEGEGASREPDLIYIDLHLVHEVTSPQAFDGLRAAGRPVRRPDLTIATEDHNVPTVDIDKPIADPISRTQVETLRRNCAEFGIRLHPMGDLEQGIVHVVGPQLGLTQPGMTVVCGDSHTSTHGAFGALAMGIGTSEVEHVLATQTLSLRPFKTMAINIDGQLPPGVTSKDVILAVIAQIGTGGGQGYVLEYRGEAVRAMSMEARMTMCNMSIEAGARAGMIAPDEVTYEFLKGRPHAPKGADWDAAVAAWDALRTDEGAVFDAEVHIDASSLSPFVTWGTNPGQGAPLSATVPDPADFADETAREAAAKALRYMDLTPGTPLREVAVDTVFVGSCTNGRIEDLRAAAEILKGRRVAEGVRMLVVPGSMRVRAQAEKEGLGEIFTAAGAEWRQAGCSMCLGMNPDQLEPGQRCASTSNRNFEGRQGKGGRTHLVSPLVAAATAVRGTLSSPADLD

SEQ ID NO: 103297 - DNA, 1407 bp, Oceanobacillus iheyensis
  CDS (1)..(1407): transl_table=11
gtgcaaaaaccacaaactattttcgaaaagatatgggaaaatcatatggttcatgaagaagaggggaaaccaagtcttctttatattgatcaacatttggttcatgaagtaacttctccacaagcttttgaggggcttcgtttaaataatcgaaaggttcgtcgtcctgacttaacatttgcaacgatggatcataatgtcccaactgtaaatagggagtcatttaaagatgaaatttccaaaaagcagatggacgcactgaagaaaaattgtgaggaatttggtataaagcttgctgatatgtaccatccagatcaggggattgtacacgtaattggcccgcaacttggtcttacccaaccagggaaaacgattgtatgtggggatagtcatacttcaacacatggagcatttggtgctttagcatttggaataggtacaagtgaggtcgaacatgttttagcaacacaaactatttggcaagacaaaccaaaaaccttaaatgtcaaagttataggtgaactaggcataggggtaactgcaaaagatttaattttagcgattattgcaaagtttggtgttcaatttggtactggatatgtaatggaatatacaggtgagtccattcgtaaaatgtccatggaagaaagaatgacaatctgtaatatgtcgattgaagcgggtgcgagagcaggtttaattagccctgatcaaactacagtagactacttacgtggacgtgaaatggttccaaaaggagaagcatatgatactttagcagctgaatggttacaattagctacggatgaagatgctgtctatgatgatacggttactattcatgctaatgaaattgagcctcaagttacatggggaacaaatccaggtatgtgtgtaccgataagctcttctacaccatctattgaaaaagcaagttatccagacgaagtagaacgtgcgcttgaatatatggggttaacagaaaatcaattaatgacttctattgaagtagaccatgtatttatcggatcatgtacgaactcgagactaagtgatttgaaaaaagcagcagcaattgtgaagggtaaaaaagtgaaagctggtattcgtgctatggtagtgcccggttcatttcttgtaaagcagaaagcagaggaaatagggttagatcaagtatttatggatgctggttttgaatggagaaattctggatgtagtatgtgtctaggaatgaatgatgatattgtgccagctggaggaagatgtgcttcaacttccaacagaaattttgaaggtagacaaggaaacggggctagaacacatctcgtcagtccagaaatggctgcagctgcggcaatagaaggacactttgttgatgttagatcctacgctagcgtcccgagttag

SEQ ID NO: 103298 - protein, 468 aa, Oceanobacillus iheyensis
MQKPQTIFEKIWENHMVHEEEGKPSLLYIDQHLVHEVTSPQAFEGLRLNNRKVRRPDLTFATMDHNVPTVNRESFKDEISKKQMDALKKNCEEFGIKLADMYHPDQGIVHVIGPQLGLTQPGKTIVCGDSHTSTHGAFGALAFGIGTSEVEHVLATQTIWQDKPKTLNVKVIGELGIGVTAKDLILAIIAKFGVQFGTGYVMEYTGESIRKMSMEERMTICNMSIEAGARAGLISPDQTTVDYLRGREMVPKGEAYDTLAAEWLQLATDEDAVYDDTVTIHANEIEPQVTWGTNPGMCVPISSSTPSIEKASYPDEVERALEYMGLTENQLMTSIEVDHVFIGSCTNSRLSDLKKAAAIVKGKKVKAGIRAMVVPGSFLVKQKAEEIGLDQVFMDAGFEWRNSGCSMCLGMNDDIVPAGGRCASTSNRNFEGRQGNGARTHLVSPEMAAAAAIEGHFVDVRSYASVPS

SEQ ID NO: 103299 - DNA, 1407 bp, Pasteurella multocida
  CDS (1)..(1407): transl_table=11
atgtccaaaaccctatacgaaaaactcttcgacgcacatgtcgtccacgaagccaatggcgaaacgccattgatttacatcaaccgccatttagtgcatgaagtgacctccccacaagcctttgatggtttgcgcgccatgggacgttccgttcgtcaaccgagtaaaaccgttgctaccatggatcacaatgtcccaactgatagtcgtgatctagcaggctcaggcgaaatgggacgagtgcaaatggtagagttagccaaaaatactgaacaatttggcatcacactctacgatattaaccacatcaatcaaggtattgtgcatgtcatgggaccagaacaaggtttaactctaccgggtatgaccattgtctgtggcgactcacataccgctacccatggcgcctttggggcattagcctttgggatcggcacctccgaagttgagcatgtgcttgctactcaaaccattaaacaagcacgcgcgaaaaaaatgaaaattgaagtgcgtggcaaagtacgtgacgggattagcgcgaaagatatcgtgttagccatcatcggtaaaacaaccatgggcggtggcacaggacacgttgtggaattctgtggtgaagcgatccgcgatctttccatggaaggacgcatgaccgtctgcaatatggctatcgagttaggtgcgaaatccggtattattgcgcccgatgaaacgacgtttgcttacttaaaagacaaaccttacgcgccgaaaggcaaagattgggacgaggctgttgcctattggcaaacattgcatagcgatgaaggggctgaatttgataccgttgtcacgctagaagccagtgaaatcgaaccacaagtgacttggggtaccaacccaggacaagtgattggtattaatcagccgatcccaaatccagcggaaatgtcagatccgattgagcgtcaatctgctgaaaaagccttagcctacatggatttaccgcacagcattaaattgaccgatgtcgccattgataaagtctttattggctcttgcacaaactctcgtattgaagatttgcgtgcagcagcagcgatcgccaaaggacgcaaagtggcagacggcgtacaagccttggtcgtaccgggttcaggtttagtgcgagaacaagcagagaaagaaggcttagataaaatctttattgaagccggttttgaatggcgtttaccgggttgttctatgtgtctagccatgaataacgaccgcttagccccaggtgaacgttgcgcctccaccagtaaccgtaactttgaggggcgtcaaggtcgtggtggacgcactcatttagtcagtcctgcgatggccgccgccgctgccgtttacggcaaatttgtcgacatccgtaacttggaattacattaa

SEQ ID NO: 103300 - protein, 468 aa, Pasteurella multocida
MSKTLYEKLFDAHVVHEANGETPLIYINRHLVHEVTSPQAFDGLRAMGRSVRQPSKTVATMDHNVPTDSRDLAGSGEMGRVQMVELAKNTEQFGITLYDINHINQGIVHVMGPEQGLTLPGMTIVCGDSHTATHGAFGALAFGIGTSEVEHVLATQTIKQARAKKMKIEVRGKVRDGISAKDIVLAIIGKTTMGGGTGHVVEFCGEAIRDLSMEGRMTVCNMAIELGAKSGIIAPDETTFAYLKDKPYAPKGKDWDEAVAYWQTLHSDEGAEFDTVVTLEASEIEPQVTWGTNPGQVIGINQPIPNPAEMSDPIERQSAEKALAYMDLPHSIKLTDVAIDKVFIGSCTNSRIEDLRAAAAIAKGRKVADGVQALVVPGSGLVREQAEKEGLDKIFIEAGFEWRLPGCSMCLAMNNDRLAPGERCASTSNRNFEGRQGRGGRTHLVSPAMAAAAAVYGKFVDIRNLELH

SEQ ID NO: 103301 - DNA, 1410 bp, Photorhabdus luminescens subsp
  CDS (1)..(1410): transl_table=11
atggctaagactttatatcaaaaattatatgacgctcatattgttcgggaagtaccgaatgaaaccccgttactctatattgatcgtcatctggttcatgaagtaacctccccgcaagcttttgatggtttgcgtactaaaggccgcccagtgcaccaaccaggtaaaacgttcgcaacaatggatcataatgtatccacgcaaacaaaagatattaacgcttgtggtgacatggcacgtattcaaatgcaggagttgatgaaaaactgtgccgaattcggtatcacattatatgacctcaatcatccctatcaggggattgttcatgtcatcggccctgaacaggggataaccctgccaggcatgacgattgtttgtggtgattcccacactgccacgcacggagcattcggctcgttagccttcggtattggcacttctgaagttgaacatgtactcgccagccaaactctaaaacaagcccgtgccaaaactatgaaaatcgaagtgatgggtgatgtcggtgacgctattaccgccaaagatatcgttctggcgattatcggcaaaacaggtagtgcaggtggtacagggtatgtggtggaattctgtggtaaggcgattgaagcacttagcatggaaggccgtatgactttatgtaacatggcaattgaaatgggtgctaaagcaggtttggttgcaccggatgaaaccacttttacttatatgaaaggccgccagttctcaccaaaaggagagctgtgggaacaagctgttgcttactggaagacattgaaatccgatcctgatgcacaatatgacaccattgttacgattaatgcagaagagatctctccgcaggttacatggggaacaaaccctgggcaagtgatcgccattgatcaaacaattcctgcaccggaatcttttagtgatcctgttgaacgagcatctgctgaaaaagcactggcgtatatggatttgaaacccggtattaaactaacagatgtgaagatcgataaagtctttatcggctcttgcaccaactcccggattgaagatttacgggctgccgcagctatcgcacaaggtcataaagttgcacctggtgttcaggcaatcgttgttcccggatcaggccccgttcaagcacaagcagaagcagaaggtttagataaaattttcatagaggccggttttgaatggcgcttacccggatgttccatgtgtctggcaatgaataatgaccgcctgcaacccggtgaacgctgcgcttctaccagtaaccgcaactttgaagggcgacaaggacgtggtggacgcactcatttggtgagtccagcgatggcagcagcagcagcgattaatggtcattttatcgatatacgccacccagcacagaagtcataa

SEQ ID NO: 103302 - protein, 469 aa, Photorhabdus luminescens subsp
MAKTLYQKLYDAHIVREVPNETPLLYIDRHLVHEVTSPQAFDGLRTKGRPVHQPGKTFATMDHNVSTQTKDINACGDMARIQMQELMKNCAEFGITLYDLNHPYQGIVHVIGPEQGITLPGMTIVCGDSHTATHGAFGSLAFGIGTSEVEHVLASQTLKQARAKTMKIEVMGDVGDAITAKDIVLAIIGKTGSAGGTGYVVEFCGKAIEALSMEGRMTLCNMAIEMGAKAGLVAPDETTFTYMKGRQFSPKGELWEQAVAYWKTLKSDPDAQYDTIVTINAEEISPQVTWGTNPGQVIAIDQTIPAPESFSDPVERASAEKALAYMDLKPGIKLTDVKIDKVFIGSCTNSRIEDLRAAAAIAQGHKVAPGVQAIVVPGSGPVQAQAEAEGLDKIFIEAGFEWRLPGCSMCLAMNNDRLQPGERCASTSNRNFEGRQGRGGRTHLVSPAMAAAAAINGHFIDIRHPAQKS

SEQ ID NO: 103303 - DNA, 1500 bp, Photobacterium profundum
  CDS (70)..(1500): transl_table=11
ttgtacctgtcgttaaacacgcatataaaaagtgaaacgacaggtattaatgacaaggaacatcgaacaatgtcagcaaaaaccggaacatcaaaaacactgtatgaaaaagtctacgatgcccacgtcgcggtagctgcagaaggtgaaaacccaatactgtatattgaccgccacttggtacacgaggtgacatcaccgcaagcctttgatggtttgcgtgaaaaaggccgtaaggttcgccaaatcggtaagaccttcgcaaccatggatcacaacgtttcaacccaaacgaaagatattaatgcatcgggtgaaatggcgcgtatccaaatggagacccttgcaaaaaactgtaaagagtttggtgtcaccctatatgacctaaaccataagtatcagggcattgtgcatgtcataggaccagaactaggtatcactttaccgggtatgaccattgtttgtggtgactcacacacggccactcatggtgcatttggctcgttggcatttggtattggtacctcagaagttgagcatgtactggcgacgcaaacattgaagcaatcactcgctaaaaccatgaaaatcgaagtggttggtaaagtcgcagaaggcattacggctaaagatatcgtactggcaatcatcggcaagacaacagcggctggcggtacaggttatgtggttgaattctgcggtgaagccattaccgatttaacaatggaaggtcgtatgaccgtctgtaatatggcgatcgaattaggtgcaaaagcgggtcttattgcccccgaccaaaccacttacgactacattaaagatcgtaaattctcgccgacaggtgcaaattttgacgctgccgtcgaatactggagcaccttaaaaacagatgatggtgccacgtttgatgccgttgttacactagacgctaaaaacatcaaaccgcaagtcacctggggtacaaacccaggtcaagttattgctattgatgaattaattcctggccctgacaacttcagcgagcaagttgataaaacatcggctgaaaaagcactggcctacatggggctagaagctggcaagaaattatctgatttcgatattgataaagtctttatcggttcttgtaccaactcccgtatcgaagacatgcgtgcagcagcagcgattgccaaagggcgtaaagtcgcagcaaatgttcaggcattggttgttccgggctcagagcaagtaaaagcacaagctgaaaaagaagggttagataagatcttcattgaagcagggtttgaatggcgcctaccgggttgttcaatgtgtctggcaatgaataatgaccgcttagggcctaaagagcgctgtgcttcaacaagtaaccgtaacttcgaaggtcgtcaaggtcgtgatggtcgtactcatttagtcagcccagcgatggcagcagcagcagcatgtgctggtcactttgttgatatccgcgacttagataacgcaacggcttaa

SEQ ID NO: 103304 - protein, 476 aa, Photobacterium profundum
MSAKTGTSKTLYEKVYDAHVAVAAEGENPILYIDRHLVHEVTSPQAFDGLREKGRKVRQIGKTFATMDHNVSTQTKDINASGEMARIQMETLAKNCKEFGVTLYDLNHKYQGIVHVIGPELGITLPGMTIVCGDSHTATHGAFGSLAFGIGTSEVEHVLATQTLKQSLAKTMKIEVVGKVAEGITAKDIVLAIIGKTTAAGGTGYVVEFCGEAITDLTMEGRMTVCNMAIELGAKAGLIAPDQTTYDYIKDRKFSPTGANFDAAVEYWSTLKTDDGATFDAVVTLDAKNIKPQVTWGTNPGQVIAIDELIPGPDNFSEQVDKTSAEKALAYMGLEAGKKLSDFDIDKVFIGSCTNSRIEDMRAAAAIAKGRKVAANVQALVVPGSEQVKAQAEKEGLDKIFIEAGFEWRLPGCSMCLAMNNDRLGPKERCASTSNRNFEGRQGRDGRTHLVSPAMAAAAACAGHFVDIRDLDNATA

SEQ ID NO: 103305 - DNA, 1407 bp, Prochlorococcus marinus
  CDS (1)..(1407): transl_table=11
ttgagctcagaaacactctatgacaagatttgggaccttcacagggtagctgaaatccctggaggctcaacacagctttttgtaggcttgcatctaattcatgaagtcacaagtccccaagctttttctgcgttaaatgaaaagggattatcagtgcattgtcctgaaagaacaattgcaacagtcgatcatattgtccctacaactagtcaaaatagaccttttcccgattctctggctgagcaaatgctgaggactcttgaattaaactgcttaaaacactcaataaagttttttaaaattggttcaggcaatcaaggaatagttcatgtaatagctccagaaacaggtttgacgcaaccaggcatgactatcgcttgtggcgactctcacacctcaacacatggagcttttggttctattgcatttggaataggaaccagccaagttcgagatgttcttgccagtcaaaccttggcaatgaagaaattgaaagtgaaacgcatctggtttgatggatatcttcaaaaaggtgtattcgcaaaagatcttatccttcatgtaattcaaaaacttggcgtcaaagatggtgttggttatgcctatgaatttgctgggcctgcaatagatggtctctcgatggaagaaagaatgaccatctgcaatatggctattgaaggtggtgcaagatgcggctatatcaatcctgataaaacaacatttaactatttaaaagggcggccctattcaccaaaaggaaaagaatgggaaaaagcaattctttggtgggaatcgcttgctagttcaaaaagcgcaatctatgacgatgaagtgagattcaacgcttctctaattgctccaactgtaacttggggaattactccagggcagtcaatagctattgatgcctccattcccactccagaatccttagataaaaacgatcaacaaattgctttagaggcttataaatatatggatctaaaaccaggcagttctatcgaaggaatacctatagatgtatgttttataggaagttgcactaatggtagattaagcgaccttgagaaggctgccgaaatagcaaaaaaccggcaagtagcaaaaggtgttaaagcatttgtagtaccaggctcagagaaagtggcccaagatgctgaatctcaagggttagatactatttttgaaaaagcaggcttcgaatggcgtaagcctggttgttcaatgtgtctcgcaatgaatccagataaactagagagaaatcaaatcagtgctagctccagcaatagaaacttcaaaggcaggcaaggttctgctcaaggtcgaactttattaatgagccccgcaatggttgcagcagcagcagtgacaggatcaataacagacgtacggaaactacttcactag

SEQ ID NO: 103306 - protein, 468 aa, Prochlorococcus marinus
MSSETLYDKIWDLHRVAEIPGGSTQLFVGLHLIHEVTSPQAFSALNEKGLSVHCPERTIATVDHIVPTTSQNRPFPDSLAEQMLRTLELNCLKHSIKFFKIGSGNQGIVHVIAPETGLTQPGMTIACGDSHTSTHGAFGSIAFGIGTSQVRDVLASQTLAMKKLKVKRIWFDGYLQKGVFAKDLILHVIQKLGVKDGVGYAYEFAGPAIDGLSMEERMTICNMAIEGGARCGYINPDKTTFNYLKGRPYSPKGKEWEKAILWWESLASSKSAIYDDEVRFNASLIAPTVTWGITPGQSIAIDASIPTPESLDKNDQQIALEAYKYMDLKPGSSIEGIPIDVCFIGSCTNGRLSDLEKAAEIAKNRQVAKGVKAFVVPGSEKVAQDAESQGLDTIFEKAGFEWRKPGCSMCLAMNPDKLERNQISASSSNRNFKGRQGSAQGRTLLMSPAMVAAAAVTGSITDVRKLLH

SEQ ID NO: 103307 - DNA, 1437 bp, Prochlorococcus marinus
  CDS (1)..(1437): transl_table=11
ttgagctccggcaccctctacgacaaggtgtgggatctccatcgggtggctgacctgcctggtggatccactcagttatttgtgggtttgcatttgatccatgaggtcaccagcccgcaggctttcgctgctttgcaggacaagggtttgccggtgcggtgccctgagcgcaccgtggcgactgttgatcacatcgtgccgacgattagtcagaagcgtccgtttgctgaccctttggctgaggagatgctcagcaccttggaacgaaactgtgccaactacgggattgttctttgcggccttggcagtggccgccagggcatcgtgcatgtgatagctcctgagttggggctgacccagccgggcatgactgtggcttgtggtgactcacacacgtccactcatggggcgtttggcgccattgcgttcggcatcggcaccagccaggtgcgggatgtgcttgctagtcagagtcttgccatgaacaagctcaaggtgcgccggatctgggtcgacggtcagcttggttccggtgtttatgccaaggatttgatccttcatgtgatccgaagccttggggtcaaagctggcgtgggctatgcctatgagttcgccggaccagccattgatgtgctctctatggaagaacgcatgaccctctgcaatatggcgattgagggaggcgcccgctgcggatatgtcaatcctgatggggtcacttttgactatttgcaaggacggttttatgcgcctactggggaggctttgcatcgggcagtggcctggtggaggagcttggccagtgatccaaatgctgtttttgatgatgaggtgacctttgatgcggccagtattgcgcccatggtgacctggggcatcactcccggtcagggcattgctgtagacgaatcggtaccgactgctgattcgcttgagccaagtgaacgtccaatctccgaggaagcttgtcgctatatggatttggagccgggaatggcgattgaaggggttccagttgatgtttgttttattggcagttgcaccaatggtcgtcttagtgatttaaaggctgctgccgctatcgccaagggccgccatgtagcacaagggatcaaggcctttgtggtgccaggatcggaacaagtcgccagggctgcggaagcagaggggcttgatggtgtttttcggaaggctggatttgaatggcgtgaaccaggctgttccatgtgtctggcaatgaatcctgatcgtcttgaggggcgtcagatcagtgcaagttccagtaacaggaatttcaaggggcgtcagggttcgtcccgaggccgcaccttgttgatgagccccgcaatggtggctgctgctgccattaccggtcaggtcactgatgtgcgcaagctaatcagcaacactgttccttctaaaagcttccaccaatga

SEQ ID NO: 103308 - protein, 478 aa, Prochlorococcus marinus
MSSGTLYDKVWDLHRVADLPGGSTQLFVGLHLIHEVTSPQAFAALQDKGLPVRCPERTVATVDHIVPTISQKRPFADPLAEEMLSTLERNCANYGIVLCGLGSGRQGIVHVIAPELGLTQPGMTVACGDSHTSTHGAFGAIAFGIGTSQVRDVLASQSLAMNKLKVRRIWVDGQLGSGVYAKDLILHVIRSLGVKAGVGYAYEFAGPAIDVLSMEERMTLCNMAIEGGARCGYVNPDGVTFDYLQGRFYAPTGEALHRAVAWWRSLASDPNAVFDDEVTFDAASIAPMVTWGITPGQGIAVDESVPTADSLEPSERPISEEACRYMDLEPGMAIEGVPVDVCFIGSCTNGRLSDLKAAAAIAKGRHVAQGIKAFVVPGSEQVARAAEAEGLDGVFRKAGFEWREPGCSMCLAMNPDRLEGRQISASSSNRNFKGRQGSSRGRTLLMSPAMVAAAAITGQVTDVRKLISNTVPSKSFHQ

SEQ ID NO: 103309 - DNA, 1425 bp, Pseudomonas syringae pv
  CDS (1)..(1425): transl_table=11
atggccgggaaaacgctctacgacaagctctgggattcgcatttggtcaagcagcgcgacgacggttcggcgttgatctacattgaccgccatatcatccacgaagtgacctcgccgcaagcgttcgaaggcctgcggctggcgaagcgcaagccatggcggatcgactcgatcatcgccacgcctgaccataacgtgccgaccacgtcggaacgcaaggggggtatcgacgccattgaagatcaggtgtcgcgcctgcaggtgcagactctggacgacaactgcgacgagtacggcattaccgaattcaagatgaacgatccgcgtcagggcatcgttcacgtgatcggcccggagcagggcgcaaccctgccaggcatgagcgtggtctgcggcgactcgcacacctcgacccacggcgcatttggtgcgctggcgcacggtatcggtacttccgaggtcgagcacgtgcttgccactcagtgcctggtggccaagaaaatgaagaacatgctggtctcggtcgaagggcaactgccgttcggcgtgacggctaaagacatcgtgctggccgtgattggcaagatcggtacggcaggcggtaacggttacgccatcgagtttgccggcagcgcaattcgcgacctgtcgatcgaaggccgcatgaccatctgcaacatgtccatcgaagccggtgcgcgggtcggcatggttgccaccgacgaaaagaccgtcgagtacgtcaagggtcgtccgtttgcccctaaaggtgcggaatgggacctggcagtcgaggcctggaaggatctggtttccgacgcagacgctgtattcgataccgtggtcaggctggacgccgcgcagatcaagccacaggtcagctggggcacttcgccggaaatggtgctcgccgtcgatcagaacgtgccagaccctgcgcaagagccggatctggtcaagcgtggctccatcgagcgcgccttgaagtacatgggcctgaaggccaatcagccgatcaccgatatccagctggaccgggtgttcatcggttcttgcaccaactcgcggatcgaagacctgcgcgcggctgccgacgtcgccaagggccgcaaggtggccgcgaccatcaagcaggccatcgtggtgccgggttcgggcctgatcaaggaacaggccgagaaggaagggctggacaaagtgttcatcgaagccggttttgaatggcgtgagccgggctgttcgatgtgcctggcgatgaacccggaccgcctgggttccggcgagcattgcgcatccacgtccaaccgcaacttcgaaggccgtcagggcgctggcggccgcacgcatctggtaagccctgcgatggctgccgcggcggcggtcaatggccgtttcattgacgttcgcgacttgatccagctctga

SEQ ID NO: 103310 - protein, 474 aa, Pseudomonas syringae pv
MAGKTLYDKLWDSHLVKQRDDGSALIYIDRHIIHEVTSPQAFEGLRLAKRKPWRIDSIIATPDHNVPTTSERKGGIDAIEDQVSRLQVQTLDDNCDEYGITEFKMNDPRQGIVHVIGPEQGATLPGMSVVCGDSHTSTHGAFGALAHGIGTSEVEHVLATQCLVAKKMKNMLVSVEGQLPFGVTAKDIVLAVIGKIGTAGGNGYAIEFAGSAIRDLSIEGRMTICNMSIEAGARVGMVATDEKTVEYVKGRPFAPKGAEWDLAVEAWKDLVSDADAVFDTVVRLDAAQIKPQVSWGTSPEMVLAVDQNVPDPAQEPDLVKRGSIERALKYMGLKANQPITDIQLDRVFIGSCTNSRIEDLRAAADVAKGRKVAATIKQAIVVPGSGLIKEQAEKEGLDKVFIEAGFEWREPGCSMCLAMNPDRLGSGEHCASTSNRNFEGRQGAGGRTHLVSPAMAAAAAVNGRFIDVRDLIQL

SEQ ID NO: 103311 - DNA, 1425 bp, Pseudomonas aeruginosa
  CDS (1)..(1425): transl_table=11
atggccggcaagaccctctacgacaaactctgggacatgcacctggtcaagcagcgcgacgacggttcggcgctgatctacatcgaccgccatatcctgcacgaagtgacctcgccgcaggccttcgagggtcttcgcctggccgggcgcaagccgtggcggatcgacgccaacatcgccaccccggaccacaacgtgccgaccacccgcaccgagcgcaagggcggcatcgccgccatcgccgacgaggtctcgcgcctgcaggtgcagaccctcgacgagaactgcgacgacttcggcatcaccgaattcaagatgaacgacgtgcgccagggcatcgtccatgtggtcggtccggagcagggcgcgaccctcccggggatgaccgtggtctgcggcgactcgcacacttccacccacggcgccttcggcgcgctggcccacggcatcggcacttccgaggtagagcatgtgctggcgacccagtgcctggtggcgaagaagatgaagaacatgctggtcaaggtcgaaggcaggctgccggccggcgtcacggcgaaggatatcgtcctcgcggtgatcggcaggatcggcaccgccggcggcaacggccacgccatcgagttcgccggcagcgccatccgcgacctgtccatcgaagggcggatgaccatctgcaacatgtcgatcgaggcgggcgcccgcgtcggcctggtcgccgtcgaccagaagaccatcgactacgtgaagggccggcccttcgcgccgagcgccgagcaatgggaccaggccgtcgcctgctggcaggggctggtgtcggacgccgatgcccgcttcgataccgtggtcgagctggacgccgcgcagatcaagccgcaggtcagctggggcacgtcgccggaaatggtcctggccgtggaccagaacgtgccggacccggcccgcgagagcgacccgatcaagcgcggttcgatcgagcgcgccttgaagtacatgggcctgcggccgaaccaggcgatcaccgacatccagctggaccgggtattcatcggttcctgcaccaactcgcggatcgaggacctgcgcgctgccgccgaagttgccaggggccgcaaggtcgccgcgaccatcaagcaggcgctggtggtgccgggttccgggttggtcaaggagcaggccgagaaggaaggcctggaccggatcttcatcgaggccggcttcgaatggcgcgagccgggctgttccatgtgcctggcgatgaacccggaccggctggagagcggcgaacactgcgcctcgacctccaaccgcaacttcgagggccgtcagggcgccggtggccgtacccacctggtcagcccggcgatggccgccgccgcggccgtcaacggccgcttcatcgatgtccgcgaattgctcgcctga

SEQ ID NO: 103312 - protein, 474 aa, Pseudomonas aeruginosa
MAGKTLYDKLWDMHLVKQRDDGSALIYIDRHILHEVTSPQAFEGLRLAGRKPWRIDANIATPDHNVPTTRTERKGGIAAIADEVSRLQVQTLDENCDDFGITEFKMNDVRQGIVHVVGPEQGATLPGMTVVCGDSHTSTHGAFGALAHGIGTSEVEHVLATQCLVAKKMKNMLVKVEGRLPAGVTAKDIVLAVIGRIGTAGGNGHAIEFAGSAIRDLSIEGRMTICNMSIEAGARVGLVAVDQKTIDYVKGRPFAPSAEQWDQAVACWQGLVSDADARFDTVVELDAAQIKPQVSWGTSPEMVLAVDQNVPDPARESDPIKRGSIERALKYMGLRPNQAITDIQLDRVFIGSCTNSRIEDLRAAAEVARGRKVAATIKQALVVPGSGLVKEQAEKEGLDRIFIEAGFEWREPGCSMCLAMNPDRLESGEHCASTSNRNFEGRQGAGGRTHLVSPAMAAAAAVNGRFIDVRELLA

SEQ ID NO: 103313 - DNA, 1434 bp, Pseudomonas putida
  CDS (1)..(1434): transl_table=11
atggctggcaaaacgctctacgacaaactctgggaagcccatgaggtcaagcgccgtgatgacggctcgtccctgatctacatcgaccgccacatcatccacgaagtgacgtcgccccaggccttcgaaggcctgcgcctggccaaccgcaagccatggcgtatcgacgccaacatcgccacgcccgaccacaacgtgccgaccacgccagagcgcaagggcggtatcgaggcgatcgtcgaccaggtgtcgcgcctgcaggtgcagaccctcgacgagaactgtgacgaatacggcatcgtcgaattcaagatgaatgacgagcgccagggcatcgtccacgtcatcagcccggagcagggcgccaccttgccgggcatgaccgtggtctgcggtgactcgcacacctccactcacggcgccttcggtgccttggcccatggcatcggcacttccgaggtcgagcacgtgctcgccacccagtgcctggtcgccaagaagatgaagaacatgctggtgcgcgtggaaggccaattgcctgccggcgtcaccgccaaggatatcgtgctggccgtgatcggcaagatcggcaccgccggtggcaacggtcacgccatggaattcgcaggcagtgccattcgcgaattgtcgatggaaggccgcatgaccatctgcaacatgtccatcgaagccggcgcccgcgtgggcctggtggcaaccgatgccactaccgttgcctacgtcgaagggcgcccgtacgcgccgaagggcgagcagtggaagcaagcggtcgagtcgtggaaagacctggtgtcggatgacgatgccgtattcgacaccgtggtcgagctggatgccagccagatcaagccacaggtcagctggggcacttcgcccgagatggtcctggccgtcgaccagcgcgtaccggatccggctgccgaaaccgacctggtcaagcgtggttcgatcgagcgtgccttgaagtacatgggtctgaccgccaaccaggcgatcaccgacatcaagctggaccgtgtgttcatcggctcgtgcaccaactcgcgaatcgaggacctgcgcgctgcggcggaaatcgccaagggccgcaaggtggccgccagcgtcaagcaagccatcgtcgtgccaggttccggtctggtcaaggcccaggccgagcgtgagggcctggacaagatcttcctcgaagccggtttcgaatggcgtgaaccaggctgctcgatgtgcctggcgatgaacccggaccgccttgaaagcggcgagcactgtgcgtccacctccaaccgcaacttcgaaggccgtcagggcgccggtggccgtacccacctggtcagtccggccatggccgccgctgctgctgtagcgggccacttcatcgatgtccgcgagttgatccaagggagcgcagcatga

SEQ ID NO: 103314 - protein, 477 aa, Pseudomonas putida
MAGKTLYDKLWEAHEVKRRDDGSSLIYIDRHIIHEVTSPQAFEGLRLANRKPWRIDANIATPDHNVPTTPERKGGIEAIVDQVSRLQVQTLDENCDEYGIVEFKMNDERQGIVHVISPEQGATLPGMTVVCGDSHTSTHGAFGALAHGIGTSEVEHVLATQCLVAKKMKNMLVRVEGQLPAGVTAKDIVLAVIGKIGTAGGNGHAMEFAGSAIRELSMEGRMTICNMSIEAGARVGLVATDATTVAYVEGRPYAPKGEQWKQAVESWKDLVSDDDAVFDTVVELDASQIKPQVSWGTSPEMVLAVDQRVPDPAAETDLVKRGSIERALKYMGLTANQAITDIKLDRVFIGSCTNSRIEDLRAAAEIAKGRKVAASVKQAIVVPGSGLVKAQAEREGLDKIFLEAGFEWREPGCSMCLAMNPDRLESGEHCASTSNRNFEGRQGAGGRTHLVSPAMAAAAAVAGHFIDVRELIQGSAA

SEQ ID NO: 103315 - DNA, 1428 bp, Pseudomonas syringae pv
  CDS (1)..(1428): transl_table=11
atggccgggaaaacgctctacgacaagctctgggattcacatttggtcaaacagcgcgacgacgggtcggcgctgatctacattgaccgtcatatcatccacgaagtgacctcgccgcaagcgttcgaaggcctgcgccttgccagacgcaaaccgtggcggatcgattcgatcatcgccacacccgaccacaacgtgccgaccacgtcggaacgcaagggcgggatcgaggctatcgaagaccaggtgtcgcgcctgcaagtgcagactctggacgacaactgcgacgaatacggcatcaccgaattcaagatgaatgacccgcgtcagggcatcgtccacgtcatcggcccggagcagggcgcaaccctgccgggcatgagcgtggtctgcggcgactcgcacacctcgacccacggcgcattcggcgcgctggcccatggtatcggcacctccgaggtcgagcatgtgctggcgacccagtgcctggtggccaagaagatgaagaacatgctggtgtcggtcgaagggcaattgccgttcggcgtgactgccaaagacatcgtgctggctgttatcggcaagatcggcaccgcaggcggtaacggttacgccatcgagttcgctggcagcgcgattcgtgacctgtcgatcgaaggccgcatgaccatttgcaacatgtccattgaggccggtgcgcgggtcggcatggtcgccactgacgagaagaccatcgaatacgtcaaaggccgtccgtttgcaccgaagggcgctgaatgggaccttgccgtcgaggcctggcaggatctggtgtccgacgctgatgcggtgttcgacaccgtggtcaagctggatgccgcacagatcaagccacaggtcagttggggcacttcgccggaaatggtcctggccgtcgatcagaacgtgccggaccctgcgcaggagccggacctggtcaagcgtggctccattgagcgcgccttgaaatacatgggcctgaaagccaatcagccgatcaccgatatccagctggacagggtgttcatcggctcctgcaccaactcgcgcatcgaagatttgcgcgccgcggcggacgttgccaagggccgtaaggtggctgcaaccatcaagcaggccatcgtggtgccaggctcggggctgatcaaggcgcaggctgagaaagaagggctggacaaggtcttcattgacgccggttttgaatggcgcgagccgggctgttcgatgtgcctggccatgaacccggatcgcctcggctccggcgagcattgcgcgtcaacttccaaccgtaactttgaaggccgtcagggcgcaggtggtcgtacgcatctggtgagcccggcgatggctgctgctgcagcggttactggccgtttcatcgatgttcgcgaattgaggaatccagcatga

SEQ ID NO: 103316 - protein, 475 aa, Pseudomonas syringae pv
MAGKTLYDKLWDSHLVKQRDDGSALIYIDRHIIHEVTSPQAFEGLRLARRKPWRIDSIIATPDHNVPTTSERKGGIEAIEDQVSRLQVQTLDDNCDEYGITEFKMNDPRQGIVHVIGPEQGATLPGMSVVCGDSHTSTHGAFGALAHGIGTSEVEHVLATQCLVAKKMKNMLVSVEGQLPFGVTAKDIVLAVIGKIGTAGGNGYAIEFAGSAIRDLSIEGRMTICNMSIEAGARVGMVATDEKTIEYVKGRPFAPKGAEWDLAVEAWQDLVSDADAVFDTVVKLDAAQIKPQVSWGTSPEMVLAVDQNVPDPAQEPDLVKRGSIERALKYMGLKANQPITDIQLDRVFIGSCTNSRIEDLRAAADVAKGRKVAATIKQAIVVPGSGLIKAQAEKEGLDKVFIDAGFEWREPGCSMCLAMNPDRLGSGEHCASTSNRNFEGRQGAGGRTHLVSPAMAAAAAVTGRFIDVRELRNPA

SEQ ID NO: 103317 - DNA, 1425 bp, Pseudomonas syringae pv
  CDS (1)..(1425): transl_table=11
atggccgggaaaacgctctacgacaagctctgggattcgcatttggtcaaacagcgcgacgacggttcggcgctgatctacattgaccgtcatatcatccatgaagtgacctcgccgcaggcgttcgaaggtctgcggctggcgaagcgcaagccgtggcggatcgactcgatcatcgccacgcctgaccataacgtgccgaccacggccgaacgcaagggtggcatcggtgccatcgaggatcaggtgtcgcgcttgcaggtgcagaccctcgacgacaactgcgacgagtacggcatcaccgaattcaagatgaatgacccgcgccagggcatcgtccatgtgatcggcccggagcagggcgcaaccctgccaggcatgagcgtggtctgcggcgactcgcacacctctacccacggtgcattcggtgcgctggcccacggtatcggcacttccgaggtcgagcacgtgctcgccacccagtgcctggtcgccaagaaaatgaagaacatgctggtgtcggtcgaagggcaattgccgttcggcgtgacggccaaggacatcgtgctggcggtgatcggcaagatcggcaccgcaggcggtaacggttacgccatcgagttcgccggcagcgcgattcgcgacctgtcgatcgaagggcgcatgaccatctgcaacatgtccatcgaagcgggtgcccgggtcggcatggtggccaccgacgagaagaccgtcgagtacgtcaaaggtcgtccgttcgcacccaagggtgcagagtgggacctcgctgtcgaagcctggaaggacctggtgtccgacccggacgctgtgttcgataccgtggtcaggctggacgccgcacagatcaagccgcaggtcagctggggcacctcgccggaaatggtcctcgcggtcgatcagaacgtgccggaccctgcgcaagagccggatctggtcaagcgcggctccatcgagcgtgcgctcaagtacatgggcctgaaagccaatcagccgattaccgatattcaactggaccgggtattcatcggttcctgcaccaactcgcgcatcgaagatttgcgtgctgctgcggatgtcgccaagggccgcaaggtggcttcaaccatcaagcaggccatcgtggtgccgggttcggggctgatcaaggcgcaggccgagaaggaagggctggacaaggtgttcatcgaagccggcttcgaatggcgtgaaccgggctgctccatgtgcctggcgatgaacccggaccgcctgggttccggcgagcattgcgcgtcgacctccaaccgtaacttcgaaggtcgtcagggcgccggtggccggacgcatctggtgagtccggcgatggccgctgccgctgcagtgaatggccgtttcatcgatgttcgcgacctgatccagcactga

SEQ ID NO: 103318 - protein, 474 aa, Pseudomonas syringae pv
MAGKTLYDKLWDSHLVKQRDDGSALIYIDRHIIHEVTSPQAFEGLRLAKRKPWRIDSIIATPDHNVPTTAERKGGIGAIEDQVSRLQVQTLDDNCDEYGITEFKMNDPRQGIVHVIGPEQGATLPGMSVVCGDSHTSTHGAFGALAHGIGTSEVEHVLATQCLVAKKMKNMLVSVEGQLPFGVTAKDIVLAVIGKIGTAGGNGYAIEFAGSAIRDLSIEGRMTICNMSIEAGARVGMVATDEKTVEYVKGRPFAPKGAEWDLAVEAWKDLVSDPDAVFDTVVRLDAAQIKPQVSWGTSPEMVLAVDQNVPDPAQEPDLVKRGSIERALKYMGLKANQPITDIQLDRVFIGSCTNSRIEDLRAAADVAKGRKVASTIKQAIVVPGSGLIKAQAEKEGLDKVFIEAGFEWREPGCSMCLAMNPDRLGSGEHCASTSNRNFEGRQGAGGRTHLVSPAMAAAAAVNGRFIDVRDLIQH

SEQ ID NO: 103319 - DNA, 1410 bp, Ralstonia eutropha
  CDS (1)..(1410): transl_table=11
atggccaagacgctctacgacaaactctgggatgaccacaccgtccacgtcgaggaagacggcactacgctgctctacatcgatcgtcatctgctgcatgaagtgaccagcccgcaggcgttcgaaggcctgaagatagcagagcgtccggtgtggcgcatcagcgcgaacctggcggtgtcggaccacaacgtgccgaccactgaccgcagcgaaggtatcgccgacccggtgtcgaagctgcaggtcgatacgctggacgcaaactgcgacagtttcggcatcacccagttcaagatgaacgatcatcgccagggcatcgtgcacgtgatcgggccggagcagggcgccacgctgccgggcatgacggtggtgtgcggcgactcgcatacctccacgcacggtgcattcggtgcgctcgcgcatggcatcggtacgtcggaagtcgagcacgtgctggccacgcagacgctgctgggcaagaaggccaagaacatgctggtcaaggtggaaggcaagctgccgcgcggctgcaccgccaaggacatcgtgctggccatcatcggcaagatcggcacggccggcggtaccggctacacgatcgaattcgccgggtcggccatccgcgacctgaccatggaaggccgcatgacggtctgcaacatggccatcgaagccggcgcacgtgcggggctggtggccgtggacaatgtcacgctggaatacgtgaagggtcgtccgtatgcgccgcagggcgtagagtgggaccaggccgtggcctactggagcacgctgcattcggacgccggcgccagtttcgaccaggtgatcgagctgcgtgccgaggacatccgcccgcaggtgacctggggcacgtcgcccgaaatggtcgtcagcatcgaagaccgcgtgccggatcccgaaaaggaaaaggacccgaccaggcgcaacgccatggagcgcgcgctcgagtacatgaacctgcagcccaacgtgccgatggaaagcatcaacgtggacaaggtgttcatcggttcctgcaccaacagccgcatcgaagacatgcgcgccgccgcgtgggtggtgcagaagctgggccgcaaggtggcttcgaacgtgaagctggcgatggtcgtgccgggttcgggcctggtcaaggaacaggccgagcgcgaagggctcgacaaggtcttcaaggccgcaggcttcgaatggcgcgagccgggttgctcgatgtgcctggcgatgaatgccgatcgcctggagccgggcgagcgctgcgcgtccacgtcgaaccgcaacttcgaaggccgtcagggcgcgggtggccgcacccatctggtgagcccggcgatggccgccgcggccgccatcgaaggccacttcgtcgacatccgcaagctcggctga

SEQ ID NO: 103320 - protein, 469 aa, Ralstonia eutropha
MAKTLYDKLWDDHTVHVEEDGTTLLYIDRHLLHEVTSPQAFEGLKIAERPVWRISANLAVSDHNVPTTDRSEGIADPVSKLQVDTLDANCDSFGITQFKMNDHRQGIVHVIGPEQGATLPGMTVVCGDSHTSTHGAFGALAHGIGTSEVEHVLATQTLLGKKAKNMLVKVEGKLPRGCTAKDIVLAIIGKIGTAGGTGYTIEFAGSAIRDLTMEGRMTVCNMAIEAGARAGLVAVDNVTLEYVKGRPYAPQGVEWDQAVAYWSTLHSDAGASFDQVIELRAEDIRPQVTWGTSPEMVVSIEDRVPDPEKEKDPTRRNAMERALEYMNLQPNVPMESINVDKVFIGSCTNSRIEDMRAAAWVVQKLGRKVASNVKLAMVVPGSGLVKEQAEREGLDKVFKAAGFEWREPGCSMCLAMNADRLEPGERCASTSNRNFEGRQGAGGRTHLVSPAMAAAAAIEGHFVDIRKLG

SEQ ID NO: 103321 - DNA, 1410 bp, Ralstonia solanacearum
  CDS (1)..(1410): transl_table=11
atggccaagacgctctacgacaaactctgggacgaccacgtcgtccacaccgaagaggacggcacgaccgtgctctacatcgaccgccagctgctgcacgaggtgaccagcccgcaggcgttcgagggcctgaagctggccaaccgcccggtctggcgcatcagcgcgaacctggccgtctcggaccacaacgtgccgaccaccgaccgctcgcacggcatcgccgacccggtctccaagctgcaggtcgacacgctcgatgccaactgcgacagcttcggcatcacgcaattcaagatgaccgacaagcgccagggcatcgtgcacgtgatcgggccggagcagggcgcgacgttgccgggcatgacggtggtctgcggcgactcgcacaccagcacgcacggcgcgttcggcgcgctggcgcacggcatcggcacctcggaagtcgagcacgtgctggccacgcagacgctgctcgccaagaagagcaagaacatgctggtgaaggtcgaaggcacgctgccgcgcggctgcaccgccaaggacatcgtgctcgccatcatcggcaagatcggcacggcgggcggcaccggctacgcgatggagttcggtggctcggccatccgcgcgctgtcgatggaaggccgcatgacggtgtgcaacatggcgatcgaggcgggcgcgcgcgccggcatggtcggcgtggacgacatcacgctcgagtacatcaagggccgtccgttcgcgccgcagggcgtggaatgggagcaggccgtggcctactggcgctcgctgcactccgatgagggtgcccgcttcgaccacgtggtcgagctgcgcgccgaagagatccgcccgcaggtgagctggggcacctcgccggaaatggtggtcagcatcgaagaccgcgtgccggatccggacaaggaaaaggacccggtcaagcgcaatgccatggagcgcgcgctcgagtacatggccctgcagcccaacgtcgccatcggcgacatccgcatcgacaaggtcttcatcggctcgtgcaccaacagccgcatcgaggacatgcgcgccgccgcctgggtggtgcagaagctcggcaagcgcattgcctccaacgtgaagctggccatggtggtgccgggttcgggcctggtcaaggagcaggccgagcgcgaagggctggacaaaattttcaaggccgccggcttcgaatggcgcgagccgggctgctcgatgtgcctggcgatgaacgccgaccggctggagccgggcgagcgctgcgcgtccacgtccaaccgcaatttcgaaggccggcagggcgcgggcggccgcacccacctggtgagcccggcgatggccgccgccgccgcgctggaaggccacttcgtcgacgtgcgcaagctcggctga

SEQ ID NO: 103322 - protein, 469 aa, Ralstonia solanacearum
MAKTLYDKLWDDHVVHTEEDGTTVLYIDRQLLHEVTSPQAFEGLKLANRPVWRISANLAVSDHNVPTTDRSHGIADPVSKLQVDTLDANCDSFGITQFKMTDKRQGIVHVIGPEQGATLPGMTVVCGDSHTSTHGAFGALAHGIGTSEVEHVLATQTLLAKKSKNMLVKVEGTLPRGCTAKDIVLAIIGKIGTAGGTGYAMEFGGSAIRALSMEGRMTVCNMAIEAGARAGMVGVDDITLEYIKGRPFAPQGVEWEQAVAYWRSLHSDEGARFDHVVELRAEEIRPQVSWGTSPEMVVSIEDRVPDPDKEKDPVKRNAMERALEYMALQPNVAIGDIRIDKVFIGSCTNSRIEDMRAAAWVVQKLGKRIASNVKLAMVVPGSGLVKEQAEREGLDKIFKAAGFEWREPGCSMCLAMNADRLEPGERCASTSNRNFEGRQGAGGRTHLVSPAMAAAAALEGHFVDVRKLG

SEQ ID NO: 103323 - DNA, 1410 bp, Rhizobium loti
  CDS (1)..(1410): transl_table=11
atgagcgcaccgcgcaccctctacgacaagattttcgacgaccacgtcgtcgaccgccaggacgatggcacctgcctgctctacatcgaccgccacctcgtccatgaagtgaccagcccgcaggccttcgaaggcctgcgcctgagcggccgtaaggtccgccatccggaaaagacgctggccgtggtcgatcacaatgtctcgacctcgcccgagcgcaagttcggcatcaagaacgaggaaagccgcatccaggtcgaggcgctggccaagaacgccaaggacttcggcgtcgaatattattccgagaacgatatccgccagggcatcgtccacatcatcggcccggagcagggctttaccttgcccggcatgaccatcgtctgcggcgacagccacacgtcgacgcatggcgcgttcggcgcgctggcgcacggcatcggcacctcggaagtcgagcatgtgctggcgacgcagacgctgatccagcgcaaggccaagaacatgctggtgcgtgtcgacggccagctgccggaaggcgtcaccgccaaggacatcatcctggccatcattggcgagattggcaccgccggcggcaccggctatgtcatcgaatatgccggcgaggcgatccgctcgctgtcgatggaaggccgcatgacgatctgcaacatgtcgatcgagggcggtgcgcgcgccggcctgatcgccgccgacgagaccaccttcgcctatgtcaaggacaagccgcgcgcgccgaagggcgcggcctgggatgccgcgctcgcctactggaagacgctgcagtccgacgaaggcgcgcatttcgacaaggtgatcgtgctcgacgcggccaagctgccgccgatcgtgtcctggggctcctcgcccgaggatgtggtttcggtgcagggcgtcgttcccaatccggaagagatcacggacgagaacaaacgcacctcaaagatccgcgcgctcgactatatgggcctgacgccgggcaccaagatcaccgatatcgcgctcgaccgcgtcttcatcggctcctgcaccaatggccgcatcgaggatctgcgcgccgccgccaaggtgatcgagggcaagaccgtcaatccgcgcgtcaacgccatgatcgtgccgggctccggcctggtcaaggaacaggcggaagccgagggtctggacaagatcttcctcgccgccgggttcgactggcgcgagccgggctgctcgatgtgcctggccatgaacgacgacaggctgaagccgcatgaacgctgtgcctcgacctcgaaccgcaatttcgagggaaggcaaggcttcaagggccgcacccatctggtgtcgccggccatggcggcggcggcggcgatcgccggccacttcgtcgacatccgtgattggaagtaa

SEQ ID NO: 103324 - protein, 469 aa, Rhizobium loti
MSAPRTLYDKIFDDHVVDRQDDGTCLLYIDRHLVHEVTSPQAFEGLRLSGRKVRHPEKTLAVVDHNVSTSPERKFGIKNEESRIQVEALAKNAKDFGVEYYSENDIRQGIVHIIGPEQGFTLPGMTIVCGDSHTSTHGAFGALAHGIGTSEVEHVLATQTLIQRKAKNMLVRVDGQLPEGVTAKDIILAIIGEIGTAGGTGYVIEYAGEAIRSLSMEGRMTICNMSIEGGARAGLIAADETTFAYVKDKPRAPKGAAWDAALAYWKTLQSDEGAHFDKVIVLDAAKLPPIVSWGSSPEDVVSVQGVVPNPEEITDENKRTSKIRALDYMGLTPGTKITDIALDRVFIGSCTNGRIEDLRAAAKVIEGKTVNPRVNAMIVPGSGLVKEQAEAEGLDKIFLAAGFDWREPGCSMCLAMNDDRLKPHERCASTSNRNFEGRQGFKGRTHLVSPAMAAAAAIAGHFVDIRDWK

SEQ ID NO: 103325 - DNA, 1410 bp, Rhizobium meliloti
  CDS (1)..(1410): transl_table=11
atgagcgcaccgcgtactctctacgacaagatctgggacgatcacctggtggacagccaggacgacggaacctgtcttctctacatcgaccgtcacctcgttcacgaggtgacgagcccgcaggccttcgagggactgcgcatggctgggcgcaaggttcgcgccccggaaaagacgctcgccgtcgtcgatcacaacgtcccgacttcgccggaccgccatctcggcatcaagaacgaggaaagccgcatccaggtcgaggcgctcgccaggaacgccgcggatttcggcgtcgaatattattcggaaaatgacaagcgccaagggatcgtccacatcgtcggtccggagcagggcttcacgctgccgggcatgacgatcgtctgcggcgacagccacacttcgacgcacggcgctttcggtgcgctggcgcacggcatcggcacgtccgaggtcgagcatgtcctggcgacgcagacgctgatccagaaaaaggcgaagaacatgctggtgcgcgtcgacggccaattgccgccgggcgtcaccgcaaaggacatcatccttgcgatcatcggcgagatcggcaccgcgggcggcaccggccacgtcatcgaattcgccggtgaagcgatccggtcgctgtctatggaaggccgcatgaccgtctgcaacatgacgatcgaaggcggcgcgcgcgccgggctgatcgcaccggacgaaaccactttcgagtacatcaaggacaagccgcgcgctcccaaaggcgaggcctgggacagggcggtcgaatactggaagacgctgcacacggacgaaggcgcccattacgaccgcgtcgtcgtgctcgatgccgccaatctgccgccgatcgtttcctggggctcctcgccggaagacgtcgtctccgtacagggcgtggttcccaaccctgacgacatccaggacgagacgaagcggacctccaagtggcgtgcgctcgactatatgggcctgaagcccggcacgaagatcaccgatatcgccatcgaccgggtgttcatcggctcctgcaccaatggccgcatcgaggacctgcgcgccgtcgccgaggtggtcgaaggccgcaaggtcgccccgaccgtttcggcgatgatcgttccgggctccggcctcgtcaaggaacaggcggaagcggaaggcctggacaagatcttcaaggaagcgggcttcgactggcgcgagcccggctgctccatgtgcctggcgatgaacgacgaccggctgaagcctggcgaacgttgtgcctccacatcgaaccgcaacttcgaaggccgtcagggcttcaaggggcgcacgcatctgctttctccggcaatggcggctgcggcggcggtcgccggtcattttgtcgacattcgcgagtggaaatag

SEQ ID NO: 103326 - protein, 469 aa, Rhizobium meliloti
MSAPRTLYDKIWDDHLVDSQDDGTCLLYIDRHLVHEVTSPQAFEGLRMAGRKVRAPEKTLAVVDHNVPTSPDRHLGIKNEESRIQVEALARNAADFGVEYYSENDKRQGIVHIVGPEQGFTLPGMTIVCGDSHTSTHGAFGALAHGIGTSEVEHVLATQTLIQKKAKNMLVRVDGQLPPGVTAKDIILAIIGEIGTAGGTGHVIEFAGEAIRSLSMEGRMTVCNMTIEGGARAGLIAPDETTFEYIKDKPRAPKGEAWDRAVEYWKTLHTDEGAHYDRVVVLDAANLPPIVSWGSSPEDVVSVQGVVPNPDDIQDETKRTSKWRALDYMGLKPGTKITDIAIDRVFIGSCTNGRIEDLRAVAEVVEGRKVAPTVSAMIVPGSGLVKEQAEAEGLDKIFKEAGFDWREPGCSMCLAMNDDRLKPGERCASTSNRNFEGRQGFKGRTHLLSPAMAAAAAVAGHFVDIREWK

SEQ ID NO: 103327 - DNA, 2253 bp, Rhizopus niveus
  CDS (1)..(2253)
atggctcgtacactttacgataaagttttagaagatcacatcatcgaccgtcaagaatatgggacttgcttgatttatatcgatagacatcttgtccatgaagtgacaagtcctcaagctttcgaaggacttcgcaatgcaggccgtcctgtccgtcgtccagactgtaccttggccacagtagatcacaacatcccaacaagtcccagaaggaactttaaggacattgccacttttatcaaagaaggcgattcaagcacacagtgtgaaacgctgggggaaaacattgaagcttttggtttgacctatttcggtatggaagacagtcgtcagggtattgtgcatgtcatcggtcccgagcaaggtttcacacttcctggaacgacagtggtctgtggtgattctcacacatcgactcatggtgcctttggcgcccttgcgtttggtatcggtacttctgaagtagagcatgtccttgcaacccaaactctcttgcaaaagaaatcaaaaaatatgagaatccgtgtggaaggtaagccctcggcaggtgtgacatccaaagacattgcacttcacgtcattggtgtcattggtactgcgggtggtacgggttgtgtgatcgagttctgtggtgaagcgaacgaatccctttcgatggaatctcgcatgtcgatctgtaacatgtccattgaagctggtgctcgtgcaggtatgattgcccctgatgacattacatttgaatacctttgcaacaagcctttggcttccaagggtgaagagtgggatcgtgccgttgcttattggaagacattgaagtttgatgcagatgctcaatacgatatcactgtcgacatcaaggcctctgatattgcacccactgtgacctggggtaccagtcctcaagacgtggctcctattacgggtaagacgcctgatttagacagcattgctgatcctcttcgtcgtttggctgttcagcgtgctttggattacatcggtattgcttccaatacgcctttggaaggtgttaagattgacaaggtctttatcggatcctgtaccaactcacgtattgaagatcttggtcctgctgctgccattgtaaagggcaaacgtgtcgctgactgggtcgatgccatggtcgtccccggttcggctttagtcaagcgccaagccgaacgtaaaggtttagacaaaatcttccaggaagccggatttaactggagagaagcgggttgttccatgtgtcttggtatgaatcctgatcaattgaagcccggagagcgttgtgcgtctacttccaaccgtaactttaaaggtcgtcaaggtgctggtggacgtacgcatcttttgagtcctgctatggctgctgctgcaggtattaagggctgtttaacggatgtacgccacatggaagtggccggaatcgctctgactggaaacgaaagtcctcgtcaagaagttgtcgcctctaaatatgacggatctcctgaggtttttaaaagcactcaagacacaacacccgccgtaaagcctcctcagcctgcttcggactcatcctcttcaggtggtatgccagccttcactaccctcaagggatacgctgctcctctcgatatttccaatattgacactgatatgattattcccaaacaattcctcaagaccatcaagcgtaccggtctcggtagtgccctcttttactctcttcgctttgatcctcagactggtgctgagaaccctgcctttgtcctcaaggaaagaacctttcgtcaggcacgcatcttagtctgtaccggtcccaactttggttgtggcagtagtcgtgaacatgctccttgggcctttaatgattttggtattcgctgtatcttggcccccagtttcgctgatatctttttcaacaactgtttcaagaatgggatgctccccatcgtcctccctcaggcccaattggaagccatcgctgccgaagctcaaaagggtgttgaggtggaagtggacctcgttcaacagatcgttcgtaatcctggtggagaagtttcctttgatgtggaagaattccgtaaacattgtcttgtgaatggcttggatgatattggattgacaatgcaaaaggcagacaagattgctcaatttgaaacaaaacgtactcaaacatggccttggttagatggtaaaggttataaaggaaaggctacaaagattgaaatcaatggaggtcaacaaaagaaagcaaaattagactggtag

SEQ ID NO: 103328 - protein, 750 aa, Rhizopus niveus
MARTLYDKVLEDHIIDRQEYGTCLIYIDRHLVHEVTSPQAFEGLRNAGRPVRRPDCTLATVDHNIPTSPRRNFKDIATFIKEGDSSTQCETLGENIEAFGLTYFGMEDSRQGIVHVIGPEQGFTLPGTTVVCGDSHTSTHGAFGALAFGIGTSEVEHVLATQTLLQKKSKNMRIRVEGKPSAGVTSKDIALHVIGVIGTAGGTGCVIEFCGEANESLSMESRMSICNMSIEAGARAGMIAPDDITFEYLCNKPLASKGEEWDRAVAYWKTLKFDADAQYDITVDIKASDIAPTVTWGTSPQDVAPITGKTPDLDSIADPLRRLAVQRALDYIGIASNTPLEGVKIDKVFIGSCTNSRIEDLGPAAAIVKGKRVADWVDAMVVPGSALVKRQAERKGLDKIFQEAGFNWREAGCSMCLGMNPDQLKPGERCASTSNRNFKGRQGAGGRTHLLSPAMAAAAGIKGCLTDVRHMEVAGIALTGNESPRQEVVASKYDGSPEVFKSTQDTTPAVKPPQPASDSSSSGGMPAFTTLKGYAAPLDISNIDTDMIIPKQFLKTIKRTGLGSALFYSLRFDPQTGAENPAFVLKERTFRQARILVCTGPNFGCGSSREHAPWAFNDFGIRCILAPSFADIFFNNCFKNGMLPIVLPQAQLEAIAAEAQKGVEVEVDLVQQIVRNPGGEVSFDVEEFRKHCLVNGLDDIGLTMQKADKIAQFETKRTQTWPWLDGKGYKGKATKIEINGGQQKKAKLDW

SEQ ID NO: 103329 - DNA, 2268 bp, Rhizomucor pusillus
  CDS (1)..(2268)
atgggacgcacgctatacgacaaagtttgggacgaccacgtcgttgaccaacaagaagacggaacctgcttgatctatatcgacaggcatctcgtgcacgaagtcactagtccgcaggcctttgaaggtcttcgcaacgctggtcgcaaggtccgtcgtccggactgtaccttggcaaccgtcgaccacaatattcccaccaccccacgcaaaaatttcaagaatgtgtcgacgtttatccaagaagccgactctcgtacgcagtgcgagacgctggaacacaacgtcaaggagtttggcctgacatactttggcatggacgacagccgtcaaggtatcgtgcacgtcattggtcctgagcaaggtttcacacttcccggctgcactgttaactgcggtgattcgcacacttctacccatggtgcgtttggcgctctcgcattcggtatcggtacctctgaagtagagcatgttttggcaacacagaccctcttgcaaaagaagagcaagaacatgcgtgtcaaggtcgatggcaagttggctcccggtgtgaccagcaaggatatcgttctgcacatcatcggtgttatcggcacggctggcggcacgggctgcgttattgagttttgtggatcagcgttcgagcaaatgtcaatggaagctagaatgtccgtctgcaacatgtctatcgaagcgggtgcgcgtgcaggcatgattgcccctgatgagactacattcgagtatatccgtggccgacctcttgcaccaaccggcgccgagtgggacaaagctgtcgagtactggcgatctctgcgctcagatcccgacgcaaagtacgacgtggatgtatttatcgacgctgctgacattgcacctaccttgacctggggtaccagtcctcaggatgttgttgccatcaccggcactacccctgatccctctactgtctctgatcctatccgtcgtcaggctatggagcgtgctttggattacatcggcttgaagcccaatacccctatgcaggaagtcaagattgacaaggtgttcattggaagctgcactaactctcgcattgaagacttgcgcgcagcagcagctatcgccaagggccgccacgttgctgactgggtgtatgctatggttgtccctggatctggccttgtcaagaagcaagctgagcaggaaggattggacagaattttcaaggaagctggattcgactggcgcgaggcaggctgttcaatgtgtcttggtatgaaccctgatcaactgaagcctggtgagcgctgtgccagtacaagcaaccgtaactttgagggtcgacaaggcgctggaggtcgtactcacttgatgagccctgccatggctgctgcagcagctgtcactggctacttcaccgatgttcgcaaactgacccccgcgcagcaggaccgtcctgcttctcccacacccaagaagatcgagaccgagctggaacctccagtggaagaccacgccaaggctgccgaccaagctgacattgttaccgatgctcctgccaccggtgccagcccaccgagcccagcaccctcagacgcggctggtatgcccaagtttacgactttgcgcggctatgcagccccgctcgacattgccaacgttgatacggatatgattattcccaagcagttcttgaagaccatcaagcgcaccggtctcggcactgctctcttctacaatatccgatttgatggtgccactggcgaggagaaccccgactttgtgctgaaccaggaaccttaccgccaatctcgcattcttgtctgcaccggtcccaactttggatgcggtagctcccgcgaacacgcgccctgggcattcaacgactttggcatccgatcgatcattgcacctagctttgctgatatctttttcaacaactgcttcaagaacggtatgcttcccatcacgttgccccaagacaaggtcgagatgttggccgagcacgccaagcaaaaggccgaactcgaggtcgatctggtcaaccaagtcgtgcgctaccctggaggcgaagtacccttcgatgtcgagcctttccgcaaacactgcctcgtgaacggtttggacgatattggtttgacgatgcaaaaggctgatctcatcgaggcattcgaggcaaagcggtcacagacctggccctggttggatggcaaggattatgccggcaaggctacaaagtttacgcccgtcgcaacaaacactgcaaagaagcaaaagcttgattggtaa

SEQ ID NO: 103330 - protein, 755 aa, Rhizomucor pusillus
MGRTLYDKVWDDHVVDQQEDGTCLIYIDRHLVHEVTSPQAFEGLRNAGRKVRRPDCTLATVDHNIPTTPRKNFKNVSTFIQEADSRTQCETLEHNVKEFGLTYFGMDDSRQGIVHVIGPEQGFTLPGCTVNCGDSHTSTHGAFGALAFGIGTSEVEHVLATQTLLQKKSKNMRVKVDGKLAPGVTSKDIVLHIIGVIGTAGGTGCVIEFCGSAFEQMSMEARMSVCNMSIEAGARAGMIAPDETTFEYIRGRPLAPTGAEWDKAVEYWRSLRSDPDAKYDVDVFIDAADIAPTLTWGTSPQDVVAITGTTPDPSTVSDPIRRQAMERALDYIGLKPNTPMQEVKIDKVFIGSCTNSRIEDLRAAAAIAKGRHVADWVYAMVVPGSGLVKKQAEQEGLDRIFKEAGFDWREAGCSMCLGMNPDQLKPGERCASTSNRNFEGRQGAGGRTHLMSPAMAAAAAVTGYFTDVRKLTPAQQDRPASPTPKKIETELEPPVEDHAKAADQADIVTDAPATGASPPSPAPSDAAGMPKFTTLRGYAAPLDIANVDTDMIIPKQFLKTIKRTGLGTALFYNIRFDGATGEENPDFVLNQEPYRQSRILVCTGPNFGCGSSREHAPWAFNDFGIRSIIAPSFADIFFNNCFKNGMLPITLPQDKVEMLAEHAKQKAELEVDLVNQVVRYPGGEVPFDVEPFRKHCLVNGLDDIGLTMQKADLIEAFEAKRSQTWPWLDGKDYAGKATKFTPVATNTAKKQKLDW

SEQ ID NO: 103331 - DNA, 1935 bp, Rhizomucor racemosus
  CDS (1)..(1935)
atgatttcatcaatctcattgagtcaggataaatgcaaatatttactttataacaacctgctagtagacgagcgagagaattttcttgtttctttaacttgttcttacattctctttcaaaaaacaatcccctatatacaaaatgtctcgactctctatgataaagtctgggatgatcatgtcattgatcaacaagaagatggtacttgtttgatctatatcgacagacatctcgtgcatgaagttactagtcctcaagctttcgaaggtcttcgtaacgccaatcgtccagtacgtcgccctgattgtacactcgctactgtcgatcacaacattcctactacaacaagaaagattttcaaaaatatcaccacttttatcaaggaagctgattcaagaactcaatgtgagacgcttgagcaaaacattgaagcctttggtcttacttatttcggcatggaggatagccgccaaggtattgtgcatgttattggccctgagcaaggtttcactctccccgcaaccactgttgtgtgcggcgattcacacacatccacacacggtgcctttggtgctctcgcttttggtattggtacatccgaagtagaacatgtacttgctactcaaaccctcttacaaaagaagtcaaagaacatgcgtattcgcgttcaaggtaaggctctccctggcgtcacatccaaggatatcgtccttcacatcattggtgtcattggtactgctggtggtactggttgtgttattgagttctgtggtgataccattgctgctctctccatggagtcaagaatgtccatctgtaacatgtccattgaagctggtgctcgtgctggtatggtggctcctgatgaggtgacctttgaataccttcgtgataaacctctcgctcccaagggcgctgattgggatcgtgctgtcaaatactggaagtctctcagctctgatgccgatgccaaatacgatatcaacgtcgaaatcaacgctgctgatattgctcctactcttacctggggtaccagccctcaagatgtagtccccatcactggctccactcctgatcctgccaagattgaggatcccattcgtcgctctgctgtccaacgtgctctcgactacattggtattgctcccaacacccctatggaaggcgtcaaggtggataaggtattcattggtagttgtacaaactctcgtattgaggatctccgtgctgctgctgctgtggtaaagggtaagcgtgctgctgagtgggtggatgccatggtggtgcctggctctggtttagtcaagcgtcaagctgagcgtgaaggtttggacaagatctttactgacgctggtttcgattggagagaggctggttgttccatgtgtctcggtatgaaccctgatcaattgaagcctggagagcgttgtgcatctacatccaaccgtaatttcgagggtcgtcaaggtgctggtggtcgtactcatcttgtcagtcctgctatggctgctgctgctggcatcaagggctgtctcacagatgttcgtaacatggaagtctctgagatccctggcactcccaagcaaagccctcgtcaagaagtggttgctgaattcgagtctgaggaagacgatgttgattccagctctgttgattctgcccctgtcgctacacctcctagcacaggggactctgctggtatgcccaagtttactactctcaagggttatgctgctcctcttgatatctccaatgtcgatactgatatgattattcccaagcaattcctcaagaccatcaagcgtactggtctcggtagtgctcttttctatgctcttcgtttcgaccctgctactggtgccgagaaccctgactttgtcctcaacctaagagccttaccgtcaaggacgtaccttggtctgcacaggtcctaa

SEQ ID NO: 103332 - protein, 644 aa, Rhizomucor racemosus
MISSISLSQDKCKYLLYNNLLVDERENFLVSLTCSYILFQKTIPYIQNVSTLYDKVWDDHVIDQQEDGTCLIYIDRHLVHEVTSPQAFEGLRNANRPVRRPDCTLATVDHNIPTTTRKIFKNITTFIKEADSRTQCETLEQNIEAFGLTYFGMEDSRQGIVHVIGPEQGFTLPATTVVCGDSHTSTHGAFGALAFGIGTSEVEHVLATQTLLQKKSKNMRIRVQGKALPGVTSKDIVLHIIGVIGTAGGTGCVIEFCGDTIAALSMESRMSICNMSIEAGARAGMVAPDEVTFEYLRDKPLAPKGADWDRAVKYWKSLSSDADAKYDINVEINAADIAPTLTWGTSPQDVVPITGSTPDPAKIEDPIRRSAVQRALDYIGIAPNTPMEGVKVDKVFIGSCTNSRIEDLRAAAAVVKGKRAAEWVDAMVVPGSGLVKRQAEREGLDKIFTDAGFDWREAGCSMCLGMNPDQLKPGERCASTSNRNFEGRQGAGGRTHLVSPAMAAAAGIKGCLTDVRNMEVSEIPGTPKQSPRQEVVAEFESEEDDVDSSSVDSAPVATPPSTGDSAGMPKFTTLKGYAAPLDISNVDTDMIIPKQFLKTIKRTGLGSALFYALRFDPATGAENPDFVLNLRALPSRTYLGLHRS

SEQ ID NO: 103333 - DNA, 1536 bp, Rhodopirellula baltica; identical to SEQ ID NO: 102975
  CDS (79)..(1536): transl_table=11

SEQ ID NO: 103334 - protein, 485 aa, Rhodopirellula baltica
MSDASSTAPSQAGATSQSTGSRTLLDKIWDQHLVHAPESGPAIIYIDLHLVHEVTSPQAFEGLRINNRPVRRPERTIATPDHNVPTSDRSLPIADPISRKQIETLRENCKEFGVQLFDIDDVRQGIVHVIGPENGYTQPGMTIVCGDSHTATHGAFGSLAFGIGTSEVEHVLATQTLLQFKPKTFELRVDGELARGVTAKDMILYLIGQIGTAGGTGYVLEFTGDAVRNLTMEERMTVCNMSIEAGARAGMIAPDQTTFDYLRGRPECPADFDAAVEAWKKLPSDPGATYDRSNLYKGSDIRPQVTWGTNPGQVCSVDSVVPSPGDSTDVNVQKSTASALQYMDLKAGTPITEIEINRVFIGSCTNARIEDLRAAAAVIKGHHCSDKVNAMIVPGSGKVKLQAEEEGLHKVFTDAGFDWREAGCSMCLAMNPDKLAPGERCASTSNRNFEGRQGKGGRTHLVSPAMAAAAAIKGHFVDIRDWDYR

SEQ ID NO: 103335 - DNA, 1410 bp, Rhodopseudomonas palustris
  CDS (1)..(1410): transl_table=11
atgtccgctaagcccaccacgctgtacgacaagatctggaacgaccatctggtccacgaggccgaagacggcacctgcctgctgtatatcgaccgccatctggtgcacgaagtgacttcgccgcaggcgttcgaaggtctgcgcaccgctggccgcaaggtgcacgcgccggagaagacgctggcggtggtcgatcacaacgtgccgaccacggatcgctccaagccgaatcccgatccggaaagcgccgagcagattgccgcgctggccgagaacgcccgtgacttcggcatcacctactacaacgaattcgacaagcgtcagggcgtggtccacgtcatcggcccggagcagggcttcacgctgcccggcaccaccatcgtctgcggtgacagccacacctcgacccacggcgcgttcggcgcgctggcgcacggcatcggcacctctgaggtcgagcacgtgctggcgacccagacgctgatccagaagaaggccaagaacatgcgggtgacggtcgacggccaattgccggacggcgtcaccgccaaggacgtgatcctggcgatcatcggcgagatcggcaccgcgggcggcaccggctacgtgctggaatacgccggcgacgcgatccgctcgctgtcgatggaaggccgcatgacggtctgcaacatgtcgatcgaaggcggcgcccgcgccggcctgatcgcgccggacgagcgggcctacgagttcctgaagggccggccgttggcgccgaagggcgccgcctgggacgccgcgctgcgctattgggacacgctgcgctccgacgacggcgcgcatttcgatcacgagctgaagctcgacgccgccgcgctgccgccgatcgtcacctggggcacttcgcctgaggacgtgatctcggtcaccggccgcgtgccgaacccggccgacatcgccgatgaggccaagcggctctccaaggagcgcgcgctggcctatatgggcctgaccccgggcaccaagatcaccgatatcaagatcgaccggatgttcatcggctcctgcaccaacggccgcatcgaagatctgcgcgccgccgccaaggtcgccgagggcaagaccgtcaacgccaatgtcaacgccatcatcgtgccgggctccggtctggtgaaggagcaggccgaggccgaaggtctggacaagatcttcatcaaggccggcttcgaatggcgcgagccgggctgctcgatgtgcctcgccatgaaccccgacaagctggcgccggaagagcgctgcgcctcgacctcgaaccgcaacttcgagggccgtcagggcttcaagggccgcacccatctggtgtcgccggcaatggccgccgccgccgcgatcgccggccacttcgtcgacatccgcgactggcactaa

SEQ ID NO: 103336 - protein, 469 aa, Rhodopseudomonas palustris
MSAKPTTLYDKIWNDHLVHEAEDGTCLLYIDRHLVHEVTSPQAFEGLRTAGRKVHAPEKTLAVVDHNVPTTDRSKPNPDPESAEQIAALAENARDFGITYYNEFDKRQGVVHVIGPEQGFTLPGTTIVCGDSHTSTHGAFGALAHGIGTSEVEHVLATQTLIQKKAKNMRVTVDGQLPDGVTAKDVILAIIGEIGTAGGTGYVLEYAGDAIRSLSMEGRMTVCNMSIEGGARAGLIAPDERAYEFLKGRPLAPKGAAWDAALRYWDTLRSDDGAHFDHELKLDAAALPPIVTWGTSPEDVISVTGRVPNPADIADEAKRLSKERALAYMGLTPGTKITDIKIDRMFIGSCTNGRIEDLRAAAKVAEGKTVNANVNAIIVPGSGLVKEQAEAEGLDKIFIKAGFEWREPGCSMCLAMNPDKLAPEERCASTSNRNFEGRQGFKGRTHLVSPAMAAAAAIAGHFVDIRDWH

SEQ ID NO: 103337 - DNA, 1401 bp, Salmonella paratyphi
  CDS (1)..(1401): transl_table=11
atggccaaaacgttatacgaaaaattatttgatgcccacgtggtctttgaggcgccaaacgaaacgccgctgctgtacatcgatcgccacctggtacacgaagtgacctcgccgcaggcgtttgacggtctgcgcgcgcaccatcgtccggtacgtcagccggggaaaaccttcgccacgatggatcacaacgtctcgacgcagaccaaagacattaatgcctccggtgaaatggcgcgtatccagatgcaggagctgattaagaactgtaacgagttcggcgtcgagctgtatgacctgaatcacccataccagggcatcgtccatgtgatggggccggaacagggcgtcaccctgccgggcatgaccatcgtctgcggcgactcccacaccgccacccacggcgcgtttggcgcgctggccttcggcatcggcacttctgaggtagaacatgtactggcgacgcaaaccctgaaacaggggcgcgctaaaaccatgaagattgaagtcacgggcagcgccgcgccgggcattaccgccaaagacatcgtgctggcgatcatcggtaaaaccggtagcgccggcggcaccggacacgtggttgaattttgcggcgacgctatccgcgcgctgagtatggaaggccgcatgacgctgtgcaatatggcgattgagatgggcgccaaagccggtctggtcgccccggatgaaaccactttcaactacgtaaaagggcgtttgcacgcgccgaagggctgcgattttgacgaagccgtcgagtactggaaaacgctgaaaaccgatgacggcgcgacctttgatactgtcgtcaccctgcgagcagaagagatcgcgccgcaggtgacttggggcactaatccgggccaggtgatttccgtcaccgacatcatccccgatcccgcctcctttagcgatccggttgagcgcgccagcgccgaaaaagcgctggcttatatgggcttacagcctggcgtaccgttaacggacgttgctatcgataaagtctttatcggctcttgtaccaattcacgcattgaagatttgcgcgcggcggcggaagtcgccaaagggcgcaaagttgcgccgggcgtgcaggcgctggtggtgccgggttcaggtccggtgaaagcgcaggcggaagcggaaggtctggacaagatctttatcgaagcaggatttgaatggcgcttaccaggctgttccatgtgcctggccatgaataatgaccgcctgaacccgggcgagcgctgcgcatccaccagcaaccgtaactttgaaggccgtcagggccgcgggggtcgcactcacctggttagcccggcgatggccgccgctgccgccgttaccggccacttcgccgacattcgcagcatcaaataa

SEQ ID NO: 103338 - protein, 466 aa, Salmonella paratyphi
MAKTLYEKLFDAHVVFEAPNETPLLYIDRHLVHEVTSPQAFDGLRAHHRPVRQPGKTFATMDHNVSTQTKDINASGEMARIQMQELIKNCNEFGVELYDLNHPYQGIVHVMGPEQGVTLPGMTIVCGDSHTATHGAFGALAFGIGTSEVEHVLATQTLKQGRAKTMKIEVTGSAAPGITAKDIVLAIIGKTGSAGGTGHVVEFCGDAIRALSMEGRMTLCNMAIEMGAKAGLVAPDETTFNYVKGRLHAPKGCDFDEAVEYWKTLKTDDGATFDTVVTLRAEEIAPQVTWGTNPGQVISVTDIIPDPASFSDPVERASAEKALAYMGLQPGVPLTDVAIDKVFIGSCTNSRIEDLRAAAEVAKGRKVAPGVQALVVPGSGPVKAQAEAEGLDKIFIEAGFEWRLPGCSMCLAMNNDRLNPGERCASTSNRNFEGRQGRGGRTHLVSPAMAAAAAVTGHFADIRSIK

SEQ ID NO: 103339 - DNA, 2277 bp, Schizosaccharomyces pombe
  CDS (1)..(2277)
atgtctccctcagttgcttctcctaaaactttgtacgacaaggtttgggacagccacgttgtcgaccttcaagaggatggtacatgtttgttgtatattgatcgacacttgattcacgaagtcacttctcctcaagcctttgagggccttcgtactgctggtagaaaagttcgtcatcccgaacttgctcttgcaactgtcgatcacaatattcctaccgatcctcgtaaggacatgaaggatatcgcttccttcattcatcaacctgactcacgcactcaagtcttggctttggaaaataacattaaggagtttggtcttacctactatggtatgaatgacagacgtcaaggtatcgttcacgttattggtcctgaacagggcttcactctccctggtacgaccctcgtttgtggtgattctcacacctctacccacggcgcttttggtgctttggcttttggtatcggtactagtgaggtcgaacatgtcttggccactcaaaccattttgcaacgcaagagtaaaaacatgcgcattcgtgtaaacggtaaattgcctgagggtattgcttctaaggacttgatccttcatattattggagttattggtactgctggtggtactggttccgttattgagttttgcggtgaagctattgaaggtttaagtatggaagctcgtatgtccatgtgtaacatgtccattgaggctggtgctcgcgccggtatgattgctcctgatgcaacgacttttgaatatgttaaaaaccgccctcttgctcccaagggcgatgattgggaacaggccgtggcttattggaaaaccctccgctccgatgagaatgctaagtacgatattgaagttgaaatcaatgctgctgatgttttacccactgtaacatggggtacttctcctcaggacgttatccccattaatggtaatatccctgatcccgcacacgttaaagacaacgtacgtgctgcgtctattcaacgctctctagaatatatgggactcaaacctaatacctctattgtgtcctatcccatcgacaaagtctttattggctcttgtaccaattctcgtattgaggatttgcgtcttgctgctgccgttgtcaagggccgtaaggtcgctgctaacgtaaaagatgctatgattgttccaggctctggtctcgttaaaaaaatggccgaagctgaaggattggaccaaatattcattgaagctggatttgattggcgtgaagctggctgttcaatgtgtttgggtatgaatcccgatcaactcaagccatatgaacgttgtgcctcaacctcaaatcgtaactttgaaggtcgccaaggtgctaagggtagaacgcatcttgttagtcccgctatggctgccgctgccgctattaaaggacatctctgtaatgttcgtgaattttttggagatgtttccaacggatctccttctattattactaacaagaactatgatcccagccatgatgtagagggtgatataggcctttctgttgacgatgctactgatgcagttactgatgctgatggcattgccactaatgttgctggttctgtatcttctggatctgccggtattcccaaattcaccgtcgttgaaggcattgctgctcctttgcctatggctaatgtcgacactgacaaaattattcccaagcaatttttgaagaccattaaacgtaccggtcttggtcaatttgctttctacgaaatccgttacgatgcggacggaaaggagatacccgactttgtcctcaatcgcgaaccttaccgacatgcaactgttttggttgctcacgacaacttcggttgtggtagctctcgtgagcatgctccatgggcattaaacgattttggcattcgtgtaattattgcaccgtcttttgctgacattttcttcaataactgcttcaagaatggtatgcttcctattcctactccaattgagcaagttaatgatatgatgaaagccgctgaaaatcaagtcaaattctctgtcgatcttgttaatcaaactataacttatggtgataaacaagtcaaatttgatgttgagcctttccgtaaacattgtttggttaatggtttggatgacatcggactgactttgcaaaaagaaactatgattgacgcttttgaggctgctagagaagaaaacttcccttggatgaatatcaagcgcagccgggctcgcctttcacctgttaaaagcaataagcaatcttctagcaggaacgattggtga

SEQ ID NO: 103340 - protein, 758 aa, Schizosaccharomyces pombe
MSPSVASPKTLYDKVWDSHVVDLQEDGTCLLYIDRHLIHEVTSPQAFEGLRTAGRKVRHPELALATVDHNIPTDPRKDMKDIASFIHQPDSRTQVLALENNIKEFGLTYYGMNDRRQGIVHVIGPEQGFTLPGTTLVCGDSHTSTHGAFGALAFGIGTSEVEHVLATQTILQRKSKNMRIRVNGKLPEGIASKDLILHIIGVIGTAGGTGSVIEFCGEAIEGLSMEARMSMCNMSIEAGARAGMIAPDATTFEYVKNRPLAPKGDDWEQAVAYWKTLRSDENAKYDIEVEINAADVLPTVTWGTSPQDVIPINGNIPDPAHVKDNVRAASIQRSLEYMGLKPNTSIVSYPIDKVFIGSCTNSRIEDLRLAAAVVKGRKVAANVKDAMIVPGSGLVKKMAEAEGLDQIFIEAGFDWREAGCSMCLGMNPDQLKPYERCASTSNRNFEGRQGAKGRTHLVSPAMAAAAAIKGHLCNVREFFGDVSNGSPSIITNKNYDPSHDVEGDIGLSVDDATDAVTDADGIATNVAGSVSSGSAGIPKFTVVEGIAAPLPMANVDTDKIIPKQFLKTIKRTGLGQFAFYEIRYDADGKEIPDFVLNREPYRHATVLVAHDNFGCGSSREHAPWALNDFGIRVIIAPSFADIFFNNCFKNGMLPIPTPIEQVNDMMKAAENQVKFSVDLVNQTITYGDKQVKFDVEPFRKHCLVNGLDDIGLTLQKETMIDAFEAAREENFPWMNIKRSRARLSPVKSNKQSSSRNDW

SEQ ID NO: 103341 - DNA, 1401 bp, Shigella flexneri
  CDS (1)..(1401): transl_table=11
atggctaaaacgttatacgaaaaattattcgacgctcacgtagtgtacgaagccgaaaacgaaaccccgctgttatatatcgaccgccacctggtgcatgaagtgacctcaccgcaggcgttcgatggtctgcgcgcccacggtcgcccggtacgtcagccgggcaaaaccttcgccactatggatcacaacgtctctacccagaccaaagacattaatgcctgtggtgaaatggcgcgcatccagatgcaggagctgattaaaaactgcaaagaatttggcgtcgagctgtatgacctgaatcacccgtatcaggggatcgtccacgtaatggggccggaacagggcgtcaccttgccggggatgaccattgtctgcggcgactcgcataccgccacccacggcgcgtttggcgcactggcctttggtatcggcacttccgaagttgaacacgtactggcaacacaaaccctgaaacagggccgtgcgaagaccatgaaaattgaagtccagggcaaagccgcgccgggcattaccgcaaaagatatcgtgctggcaattatcggtaaaactggcagcgcaggcggcaccgggcatgtggtggagttttgcggcgaagcaattcgtgatttaagcatggaaggtcgtatgaccctgtgcaatatggcgatcgaaatgggcgcaaaagccgctctggttgctcctgacgaaaccacctttaactatgtcaaaggccgtctgcatgcgccgaaaggcaaagatttcgacgacgccgttgcctactggaaaaccctgcaaaccgacgaaggcgcaactttcgataccgttgtcactctgcaagcagaagaaatttcaccgcaggtcacctggggcaccaatcccggccaggtgatttctgtgaacgacaatattcccgatccggcttcgtttgccgatccggttgaacgtgcgtcggcagaaaaagcgctggcctatatggggctgaaaccgggtattccgctgaccgaagtggctatcgacaaagtgtttatcggttcctgtaccaactctcgcattgaagatttacgcgcggcagcggagatcgccaaagggcgaaaagtcgcgccaggcgtgcaggcactggtggttcccggctctggcccggtaaaagcccaggcggaagcggaaggtctggataaaatatttattgaagccggttttgaatggcgcttgcctggctgctcaatgtgtctggcgatgaacaacgaccgtctgaatccgggcgaacgttgtgcatccaccagcaaccgtaactttgaaggccgccaggggcgcggcgggcgcacgcatctggtcagcccggcaatggctgccgctgctgctgtgaccggacatttcgccgacattcgcaacattaaataa

SEQ ID NO: 103342 - protein, 466 aa, Shigella flexneri
MAKTLYEKLFDAHVVYEAENETPLLYIDRHLVHEVTSPQAFDGLRAHGRPVRQPGKTFATMDHNVSTQTKDINACGEMARIQMQELIKNCKEFGVELYDLNHPYQGIVHVMGPEQGVTLPGMTIVCGDSHTATHGAFGALAFGIGTSEVEHVLATQTLKQGRAKTMKIEVQGKAAPGITAKDIVLAIIGKTGSAGGTGHVVEFCGEAIRDLSMEGRMTLCNMAIEMGAKAALVAPDETTFNYVKGRLHAPKGKDFDDAVAYWKTLQTDEGATFDTVVTLQAEEISPQVTWGTNPGQVISVNDNIPDPASFADPVERASAEKALAYMGLKPGIPLTEVAIDKVFIGSCTNSRIEDLRAAAEIAKGRKVAPGVQALVVPGSGPVKAQAEAEGLDKIFIEAGFEWRLPGCSMCLAMNNDRLNPGERCASTSNRNFEGRQGRGGRTHLVSPAMAAAAAVTGHFADIRNIK

SEQ ID NO: 103343 - DNA, 1407 bp, Silicibacter pomeroyi
  CDS (1)..(1407): transl_table=11
atgtcccccaagacactctatgacaagatctgggatgcccatctggcccacgaggccgaggacggcacctgccttctctatatcgaccgtcacctggtgcacgaggtgaccagcccacaggccttcgaaggtctgcgcatggcgggccgcaaggtgcgcgcgccggaaaagaccatcgccgtgccggaccacaacgtgcccaccaccgagggccgcgaggacccggcgcagatgaccgaggagagccgcatccaggtgcaggcactggacaagaacgcgcgtgaattcggcgtgcattactatccggtcgacgacatccgccagggtatcgtgcatatcgtcggccccgagcagggctggaccctgccgggcatgaccgtggtctgcggtgatagccacactgccacccatggcgccttcggcgcgctggcgcatggcatcggcacctcggaagtggaacatgtgctggccacccagacgctgatccagaagaaatccaagaacatgaaggtcgaaatcaccggcaagctgaatccgggcgtcaccgccaaggatatcacgctggccgtgatcggtgcgaccggcaccgccggcggcaccggctatgtcatcgaatattgtggcgaagccattcgcgacctgtcgatggaaggccgcatgaccgtctgcaacatggcaatcgaaggcggtgcccgcgccggcctgatcgctccggaccagaccaccttcgactatgtcaaaggccgcccgcatgcgcccaagggcgcccagtgggaggccgcgcttgcctggtggaagacgctctattccgatgacggcgcccatttcgacaagatcgtcaccctgaagggcgaagagatcgaaccggtcgtaacctggggcaccagccccgaggacgtgctgccgatcaccggcgtggtgccgagccccgaggacttcaccggcggcaaggtcgaggcggcccgccgctcgatcgaatacatggggctgaccccgggtcagaagctgaccgacatcgagatcgacaccgtctttatcggatcctgcaccaacggccggatcgaggatctgcgcgctgtcgccgaggtggtgaagggtaagaagatcaagagcggcctgcgggccatggtggtgcccggctcgggcctggtgcgggctcaggcggaagaggaaggtattgccgatatcctcaaggatgccggtttcgaatggcgccttgcgggctgttcgatgtgcctggcgatgaaccccgaccagctggccccgggcgaacgctgcgccgcgacctcgaaccgcaacttcgaaggccgccagggctataagggtcgaacgcatcttgtatcgcccgccatggccgccgccgctgccctgaccggcaagctgaccgacgtgcgcgagctgatctga

SEQ ID NO: 103344 - protein, 468 aa, Silicibacter pomeroyi
MSPKTLYDKIWDAHLAHEAEDGTCLLYIDRHLVHEVTSPQAFEGLRMAGRKVRAPEKTIAVPDHNVPTTEGREDPAQMTEESRIQVQALDKNAREFGVHYYPVDDIRQGIVHIVGPEQGWTLPGMTVVCGDSHTATHGAFGALAHGIGTSEVEHVLATQTLIQKKSKNMKVEITGKLNPGVTAKDITLAVIGATGTAGGTGYVIEYCGEAIRDLSMEGRMTVCNMAIEGGARAGLIAPDQTTFDYVKGRPHAPKGAQWEAALAWWKTLYSDDGAHFDKIVTLKGEEIEPVVTWGTSPEDVLPITGVVPSPEDFTGGKVEAARRSIEYMGLTPGQKLTDIEIDTVFIGSCTNGRIEDLRAVAEVVKGKKIKSGLRAMVVPGSGLVRAQAEEEGIADILKDAGFEWRLAGCSMCLAMNPDQLAPGERCAATSNRNFEGRQGYKGRTHLVSPAMAAAAALTGKLTDVRELI

SEQ ID NO: 103345 - DNA, 1371 bp, Staphylococcus aureus
  CDS (1)..(1371): transl_table=11
atgggtcaaacattatttgacaaggtgtggaacagacatgtgttatacgggaaattgggcgaaccgcaactattatacattgatttacaccttatacatgaagttacttctcctcaagcatttgaaggacttaggcttcaaaacagaaaattaagacgcccagatttaacatttgcaacactcgatcacaatgttcctactattgatatattcaatattaaagatgaaattgcaaacaaacaaatcacaacattacaaaaaaacgccatagattttggggtgcatatttttgatatgggttctgatgaacaaggtattgttcacatggtaggacctgagacaggacttacacagcctggcaagacaatcgtttgtggtgactctcacacagcaacacatggagcatttggtgctattgcatttggaattggaacaagtgaagttgaacatgttttcgcaactcaaacgctatggcaaacaaaacccaaaaacttaaaaatcgatattaatggtaccttaccaacaggcgtctatgctaaggacattattctgcatttaattaaaacgtatggtgttgactttggtacaggctatgctttggaatttactggcgaaacaattaaaaacctttcaatggatggtcgaatgactatttgtaacatggctatcgaaggtggtgccaaatacggcataatccaacctgatgatataacatttgaatatgttaaagggagaccatttgccgataacttcgctaaatcagttgataagtggcgtgagctatattctgatgacgacgcgatatttgatcgtgtaattgaacttgatgtttcaacattagaaccacaagtgacatggggaactaatcctgaaatgggtgttaatttcagtgaaccattccctgaaatcaatgatatcaacgatcaacgtgcgtatgattatatggggttagaaccaggtcaaaaagctgaagacatcgacttagggtatgtttttctcggttcatgtacaaatgctagactatcagatttgattgaagctagtcatattgttaaaggaaataaagttcatccaaatattacagctattgtcgtaccaggttctcgtacagtaaaaaaagaagcagaaaaattaggtctagatactatctttaaaaatgcaggatttgaatggcgtgaaccaggatgttcaatgtgtttaggcatgaatcctgaccaagtacctgagggcgtacattgtgcatctacaagtaatcgaaactttgaaggacgacaaggcaaaggtgcaagaacacatttagtatcccctgctatggcagcagcagcagctattcatggtaaatttgtggacgtaagaaaggtggttgtttaa

SEQ ID NO: 103346 - protein, 456 aa, Staphylococcus aureus
MGQTLFDKVWNRHVLYGKLGEPQLLYIDLHLIHEVTSPQAFEGLRLQNRKLRRPDLTFATLDHNVPTIDIFNIKDEIANKQITTLQKNAIDFGVHIFDMGSDEQGIVHMVGPETGLTQPGKTIVCGDSHTATHGAFGAIAFGIGTSEVEHVFATQTLWQTKPKNLKIDINGTLPTGVYAKDIILHLIKTYGVDFGTGYALEFTGETIKNLSMDGRMTICNMAIEGGAKYGIIQPDDITFEYVKGRPFADNFAKSVDKWRELYSDDDAIFDRVIELDVSTLEPQVTWGTNPEMGVNFSEPFPEINDINDQRAYDYMGLEPGQKAEDIDLGYVFLGSCTNARLSDLIEASHIVKGNKVHPNITAIVVPGSRTVKKEAEKLGLDTIFKNAGFEWREPGCSMCLGMNPDQVPEGVHCASTSNRNFEGRQGKGARTHLVSPAMAAAAAIHGKFVDVRKVVV

SEQ ID NO: 103347 - DNA, 1368 bp, Staphylococcus aureus
  CDS (1)..(1368): transl_table=11
atgggtcaaacattatttgacaaggtgtggaacagacatgtgttatacggaaaattaggcgaaccgcaactattatacattgatttacaccttatacatgaagttacttctcctcaagcatttgaaggacttaggcttcaaaacagaaaattaagacgcccagatttaacatttgcaacactcgatcacaatgttcctactattgatattttcaatattaaagatgaaattgcaaacaaacaaatcacaacattacaaaaaaacgccatagattttggggtgcatatttttgatatgggttctgatgaacaaggtattgttcacatggtgggacctgagacaggacttacacagcctggcaaaacaatcgtttgtggtgactctcacacagcaacacatggagcatttggtgctattgcatttggaattggaacaagtgaagttgaacatgttttcgcaactcaaacgctatggcaaacaaaacccaaaaacttaaaaatcgatattaatggcaccttaccaacaggcgtctatgctaaggacattattctgcatttaattaaaacgtatggtgttgattttggtacaggctatgctttggaatttactggtgaaacaattaaaaacctttcaatggacggtcgaatgactatttgtaacatggctatcgaaggtggtgccaaatacggcataatccaacctgatgatataacatttgaatatgttaaaggtcgaccatttgccgataacttcgctaaatcagttgataagtggcgtgagctatattctaatgacgacgcgatatttgatcgtgtaattgaacttgatgtttcaacattagaaccacaagtgacatggggaactaatcctgaaatgggtgttaatttcagtgaaccattccctgaaatcaatgatatcaacgatcaacgtgcgtatgattatatggggttagagccaggacaaaaagctgaagatatcgacttagggtatgttttcctcggttcatgtacaaatgctagactatcagatttgattgaagctagtcatattgttaaaggaaataaagttcacccaaatattacagctatcgtcgtaccaggttctcgtacagtaaaaaaagaagctgaaaaattaggtctagatactatctttaaaaatgcaggatttgaatggcgtgagccaggatgttcaatgtgtttaggcatgaatcctgaccaagtacctgagggcgtacattgtgcatctacaagtaatcgaaactttgaaggacgacaaggcaaaggtgcaagaacacatttagtatcccctgctatggcagcagcagctattcatggtaaatttgtggacgtaagaaaggtggttgtttaa

SEQ ID NO: 103348 - protein, 455 aa, Staphylococcus aureus
MGQTLFDKVWNRHVLYGKLGEPQLLYIDLHLIHEVTSPQAFEGLRLQNRKLRRPDLTFATLDHNVPTIDIFNIKDEIANKQITTLQKNAIDFGVHIFDMGSDEQGIVHMVGPETGLTQPGKTIVCGDSHTATHGAFGAIAFGIGTSEVEHVFATQTLWQTKPKNLKIDINGTLPTGVYAKDIILHLIKTYGVDFGTGYALEFTGETIKNLSMDGRMTICNMAIEGGAKYGIIQPDDITFEYVKGRPFADNFAKSVDKWRELYSNDDAIFDRVIELDVSTLEPQVTWGTNPEMGVNFSEPFPEINDINDQRAYDYMGLEPGQKAEDIDLGYVFLGSCTNARLSDLIEASHIVKGNKVHPNITAIVVPGSRTVKKEAEKLGLDTIFKNAGFEWREPGCSMCLGMNPDQVPEGVHCASTSNRNFEGRQGKGARTHLVSPAMAAAAIHGKFVDVRKVVV

SEQ ID NO: 103349 - DNA, 1371 bp, Staphylococcus aureus
  CDS (1)..(1371): transl_table=11
atgggtcaaacattatttgacaaggtgtggaacagacatgtgttatacgggaaattgggcgaaccgcaactattatacattgatttacaccttatacatgaagttacttctcctcaagcatttgaaggacttaggcttcaaaacagaaaattaagacgcccagatttaacatttgcaacactcgatcacaatgttcctactattgatatattcaatattaaagatgaaattgcaaacaaacaaatcacaacattacaaaaaaacgccatagattttggggtgcatatttttgatatgggttctgatgaacaaggtattgttcacatggtaggacctgagacaggacttacacagcctggaaagacaatcgtttgtggtgactctcacacagcaacacatggagcatttggtgctattgcatttggaattggaacaagtgaagttgaacatgttttcgcaactcaaacgctatggcaaacaaaacccaaaaacttaaaaatcgatattaatggtaccttaccaacaggcgtctatgctaaggacattattctgcatttaattaaaacgtatggtgttgactttggtacaggctatgctttggaatttactggcgaaacaattaaaaacctttcaatggacggtcgaatgactatttgtaacatggctatcgaaggtggtgccaaatacggcataatccaacctgatgatataacatttgaatatgttaaagggagaccatttgccgataacttcgttaaatcagttgataagtggcgtgagctatattctgatgacgacgcgatatttgatcgtgtaattgaacttgatgtttcaacattagaaccacaagtgacatggggaactaatcctgaaatgggtgttaatttcagtgaaccattccctgaaatcagtgatatcaacgatcaacgtgcgtatgattatatggggttagaaccaggacaaaaagctgaagatatcgacttagggtatgttttcctcggttcatgtacgaatgctagactatcagatttgattgaagctagtcatattgttaaaggaaataaagttcacccaaatattacagctattgtcgtgccaggttctcgtacagtaaaaaaagaagctgaaaaattaggtctagatactatctttaaaaatgcaggatttgaatggcgtgaaccaggatgttcaatgtgtttaggcatgaatcctgaccaagtacctgagggcgtacattgtgcatctacaagtaatcgaaactttgaaggacgacaaggtaaaggtgcaagaacacatttagtatcccctgctatggcagcagcagcagctattcatggtaaatttgtggacgtaagaaaggtggttgtttaa

SEQ ID NO: 103350 - protein, 456 aa, Staphylococcus aureus
MGQTLFDKVWNRHVLYGKLGEPQLLYIDLHLIHEVTSPQAFEGLRLQNRKLRRPDLTFATLDHNVPTIDIFNIKDEIANKQITTLQKNAIDFGVHIFDMGSDEQGIVHMVGPETGLTQPGKTIVCGDSHTATHGAFGAIAFGIGTSEVEHVFATQTLWQTKPKNLKIDINGTLPTGVYAKDIILHLIKTYGVDFGTGYALEFTGETIKNLSMDGRMTICNMAIEGGAKYGIIQPDDITFEYVKGRPFADNFVKSVDKWRELYSDDDAIFDRVIELDVSTLEPQVTWGTNPEMGVNFSEPFPEISDINDQRAYDYMGLEPGQKAEDIDLGYVFLGSCTNARLSDLIEASHIVKGNKVHPNITAIVVPGSRTVKKEAEKLGLDTIFKNAGFEWREPGCSMCLGMNPDQVPEGVHCASTSNRNFEGRQGKGARTHLVSPAMAAAAAIHGKFVDVRKVVV

SEQ ID NO: 103351 - DNA, 1371 bp, Staphylococcus epidermidis
  CDS (1)..(1371): transl_table=11
atgggtcaaacactgtttgataaagtatggaaaaaacatgtgcttcatggaaaagaaggtgaaccacaattattatacattgatttacatctcattcatgaagtcacttctcctcaagcgtttgaaggacttagaatacaaaatcgtaaactcagaagacctgatctaacctttgcaactttagatcataacgttcccacaattgatatttttaatataaaagatgaaattgctaataaacaaattacaactttacaacaaaatgctaaggactttggtgtacatatttttgatatgggttctgacgaacaaggtattgtgcatatggttggaccagaaactggattaactcaaccaggaaaaactattgtatgtggagattcacatactgctacacatggcgcatttggtgctatcgcatttgggataggaacaagcgaggttgaacatgtatttgccacacaaacattatggcaaacaaaacctaaaaatttgaaaattaatataaatggttctttaccagctggagtttatgctaaagacattattttatatttaatcaatcaatatggtgtagatttcggtactggttatgctcttgaatttacaggagaaactataaaaaatttatccatggaagcacgtatgacgatttgtaatatggctattgaagcaggagcaaagtatggtttaatgcaacctgatgaaacaacctttaattacgtaaaaggtcgtccttatgctactgattttgatagttctatggcgtggtggaaagaactttattctgatgatgatgcctattttgataaagttattgaacttgatgtaacaaatttagaacctcaagtaacttggggaactaacccagaaatgggagttagttttagtaatccattcccagaaattaaaaatgcaaatgaccaacgtgcttatgactatatgggacttcacccaggtcaaaaagccgaagatataaaattaggttatgtttttttaggttcatgcacgaatgcaagattatctgatcttattgaagcaagtcatattattaaaggacaacaagttcatccaaatattactgctattgtggttccgggttcaagaactgttaagaaggaagctgaagctctgggactagataaattatttaaagatgctggatttgagtggcgtgaaccaggatgttctatgtgcttaggtatgaatccagatcaagttcctgaaggagtacattgtgcatccacgagtaatcgcaattttgaaggaagacaaggcaaaggcgctcgtacacatttggtatcccctgttatggctgctgctgctgcgattaatggtaaattcattgatgttagaaaggtggtagtataa

SEQ ID NO: 103352 - protein, 456 aa, Staphylococcus epidermidis
MGQTLFDKVWKKHVLHGKEGEPQLLYIDLHLIHEVTSPQAFEGLRIQNRKLRRPDLTFATLDHNVPTIDIFNIKDEIANKQITTLQQNAKDFGVHIFDMGSDEQGIVHMVGPETGLTQPGKTIVCGDSHTATHGAFGAIAFGIGTSEVEHVFATQTLWQTKPKNLKININGSLPAGVYAKDIILYLINQYGVDFGTGYALEFTGETIKNLSMEARMTICNMAIEAGAKYGLMQPDETTFNYVKGRPYATDFDSSMAWWKELYSDDDAYFDKVIELDVTNLEPQVTWGTNPEMGVSFSNPFPEIKNANDQRAYDYMGLHPGQKAEDIKLGYVFLGSCTNARLSDLIEASHIIKGQQVHPNITAIVVPGSRTVKKEAEALGLDKLFKDAGFEWREPGCSMCLGMNPDQVPEGVHCASTSNRNFEGRQGKGARTHLVSPVMAAAAAINGKFIDVRKVVV

SEQ ID NO: 103353 - DNA, 1434 bp, Streptomyces avermitilis
  CDS (1)..(1434): transl_table=11
atgggtaggacactcgcggagaaggtctgggacgaccatgtcgtccggcgcgccgagggcgagcccgacctcctcttcatcgatctgcacctgctgcacgaggtgaccagtccgcaggccttcgacggtctgcgccaggcggggcgtccggtgcgccgtctcgacctcaccatcgccaccgaggatcacaacaccccgaccctcgacatcgacaagcccatcgcggacccggtctcccgggcccagctggagacgctgcgcaagaactgcgccgagttcggcgtgcgcctgcactcgctcggcgacgtcgagcagggcgtcgtgcacgtcgtcggcccgcagctgggcctgacccagcccggcaccacggtcgtctgcggcgactcccacacctccacgcacggcgccttcggcgcgctggcgttcggcatcggcacctcgcaggtcgagcacgtgctggccacccagacgctgccgctggcccgccccaagaccatggccatcaccgtcgacggcgagctgcccgacggcgtcaccgccaaggacctgatcctggcgatcatcgccaggatcggtaccggcggcggccagggctacatcctggaataccgcggctccgccatcgagaagctctcgatggaggcccggatgaccatctgcaacatgtcgatcgaggccggcgcccgcgcgggcatgatcgcccccgacgagaccaccttcgcgtacctcaagggccgtgcccacgcgcccgagggcgaggagtgggacgccgccgtcgcgtactggaagaccctgaagtcggacgaggacgcggaattcgacgccgaggtcgtcatcgccgccgccgcgctgtcgccgttcgtcacctggggcaccaaccccggccagggcgcgccgctttcggcgtccgtccccgaccccgcttcgtacgaggacgcttcggagcgcttcgccgccgaaaaggccctggaatacatggggttgaccgccgggcagccgctgcgcgacatcaaggtcgacaccgtcttcgtaggttcgtgcaccaacggccgcatcgaggacctgcgtgcggccgccgcgatcgtcgagggccgcaaagtcgccgacggcgtacggatgctgatcgtccccggctcggcgcgggtcggtctccaggccgtctccgagggcctggacgtggtcttcaaggaggccggcgccgaatggcggcacgcgggctgctcgatgtgtctgggcatgaaccccgaccagctggcccccggtgagcgctccgcgtccacctccaaccgcaacttcgaaggcaggcagggcaagggcggccgtacgcacctggtgtcgccgcaggtcgccgccgccaccgccgtgctcggccacctggcctccccggccgacctggccgacgagaacgccgcccgtacgcccgctggagtctga

SEQ ID NO: 103354 - protein, 477 aa, Streptomyces avermitilis
MGRTLAEKVWDDHVVRRAEGEPDLLFIDLHLLHEVTSPQAFDGLRQAGRPVRRLDLTIATEDHNTPTLDIDKPIADPVSRAQLETLRKNCAEFGVRLHSLGDVEQGVVHVVGPQLGLTQPGTTVVCGDSHTSTHGAFGALAFGIGTSQVEHVLATQTLPLARPKTMAITVDGELPDGVTAKDLILAIIARIGTGGGQGYILEYRGSAIEKLSMEARMTICNMSIEAGARAGMIAPDETTFAYLKGRAHAPEGEEWDAAVAYWKTLKSDEDAEFDAEVVIAAAALSPFVTWGTNPGQGAPLSASVPDPASYEDASERFAAEKALEYMGLTAGQPLRDIKVDTVFVGSCTNGRIEDLRAAAAIVEGRKVADGVRMLIVPGSARVGLQAVSEGLDVVFKEAGAEWRHAGCSMCLGMNPDQLAPGERSASTSNRNFEGRQGKGGRTHLVSPQVAAATAVLGHLASPADLADENAARTPAGV

SEQ ID NO: 103355 - DNA, 1431 bp, Streptomyces coelicolor
  CDS (1)..(1431): transl_table=11
atgggtaggacactcgcggagaaggtctgggacgaccacgtcgtccggcgcgccgagggcgagcccgacctcctcttcatcgatctgcacctgctgcacgaggtgaccagcccgcaggccttcgacggcctccgcaagagcggccgcccggtgcggcggctcgacctgaccatcgccaccgaggaccacaacacccccacgctcgacatcgacaagcccatcgcggacccggtctcccgggcccagctggagacgctgcgcaagaactgcgcggacttcggcgtccggctgcacccgctgggcgacgtcgagcagggcgtcgtgcacgtcgtcggcccgcagctcggtctgacccagcccggcaccaccgtggtctgcggcgactcgcacacctcgacgcacggcgccttcggcgcgctcgcgttcggcatcggcacctcccaggtcgagcacgtgctggccacccagacgctgcccctggcccgcccgaagaccatggcgatcacggtcgacggcgagctgcccgagggtgtcaccgccaaggacctgatcctggcgatcatcgcgcggatcggcaccggcggcggccagggctacatcctggagtaccgcggcgaggccatcgagaagctctcgatggaggcccgcatgaccatctgcaacatgtcgatcgaggccggcgcccgcgcgggcatgatcgcccccgacgagaccaccttcgcctacctccagggccgcccgcacgcccccgagggcgccgactgggacgcggcggtggagtactggaagacgctgcgtacggacgacgacgccgagttcgacgccgaggtggtcatcgaggccgccgagctggcgccgttcgtcacctggggcaccaaccctggccagggcgcaccgctttccgcggccgtccccgacccggcttcgtacgaggacgcctcggagcgcttcgccgccgaaaaggccctggagtacatgggcttggaggccgggcagccgctgcgctccatccaggtggacaccgtcttcgtgggctcctgcaccaacggccgcatcgaggacctgcgcgccgccgccgagatcgtccgggaccgcaaagtcgccgacggcgtacgcatgctggtcgtccccggctccgcgcgggtcggtctgcaggccgtctccgagggcctggacgtggtcttcaaggaggccggcgccgaatggcggcacgcgggctgctcgatgtgcctgggcatgaacccggaccagctggccccgggtgagcgctccgcgtccacctccaaccgcaacttcgaggggcgccagggcaagggcggccgcacccacctggtgtcgccgcaggtcgcggccgcgacggcggtcctgggccacctggcctccccggccgacctgtccgccgccgacgtccccacgcccgctggagtctga

SEQ ID NO: 103356 - protein, 476 aa, Streptomyces coelicolor
MGRTLAEKVWDDHVVRRAEGEPDLLFIDLHLLHEVTSPQAFDGLRKSGRPVRRLDLTIATEDHNTPTLDIDKPIADPVSRAQLETLRKNCADFGVRLHPLGDVEQGVVHVVGPQLGLTQPGTTVVCGDSHTSTHGAFGALAFGIGTSQVEHVLATQTLPLARPKTMAITVDGELPEGVTAKDLILAIIARIGTGGGQGYILEYRGEAIEKLSMEARMTICNMSIEAGARAGMIAPDETTFAYLQGRPHAPEGADWDAAVEYWKTLRTDDDAEFDAEVVIEAAELAPFVTWGTNPGQGAPLSAAVPDPASYEDASERFAAEKALEYMGLEAGQPLRSIQVDTVFVGSCTNGRIEDLRAAAEIVRDRKVADGVRMLVVPGSARVGLQAVSEGLDVVFKEAGAEWRHAGCSMCLGMNPDQLAPGERSASTSNRNFEGRQGKGGRTHLVSPQVAAATAVLGHLASPADLSAADVPTPAGV

SEQ ID NO: 103357 - DNA, 1446 bp, Symbiobacterium thermophilum
  CDS (1)..(1446): transl_table=11
atggggcaaggggtgatcggcatgagcggacggaccttgctggacaagatctgggagcggcacgtggtgcgccgggagcccgggaagccggacctgctgtacatcgatctgcacctggtgcacgaggtgacctctccccaggccttcgaggggctgcgcatggcggggcggagggtccggcggccggacctgaccatcgccaccatggaccacaacgtgcccaccaccgaccggtcgcttcccctgaccgacgagatcgccgcgcggcagatggccgccctggagcggaactgcagcgagttcggggtcaggctctttgacctgtacagcccgtttcagggcatcgtgcacgtcatcggcccggagctgggcctcacccagccggggctgaccatcgtctgcggcgacagccacaccgccacccacggcgccttcggcgccctggccttcggcatcggcaccagcgaggtagagcacgtcctcgccacgcagtgtctctggcagcacaagccgaaggtgatggagatccgggtgaacgggaagctgccgcccgggacgacggccaaggacctcatcctgggcatcatcggccagatcggcaccgacggcgccaccgggtacgtgatcgagtacaccggcgaggcgatccggtcgctgtcgatggagggccgaatgaccgtctgcaacatgtccatcgaagccggagcccgggcggggatgatcgccccggacgagaccaccttcgcctatctgaaaggccggcctcacgccccccagggggagctgtgggaggcggcggtggccgactggcgcacgctggcctcagaccccgacgccgtctacgaccgggtggtggagttcgacgccggacagctggcgccggtcgtctcgtggggtaccaaccccgggcaggtggtgccggtcaccggccggatcccggatccccgggacttcgccgaccccgcccagcgcaaggcggcggaggcggccctggcctacatggacctggagcccggtaccccgatccaggacatccgcatcgaccgggtcttcatcggctcctgcaccaacgggcgcatcgaggacctgcgggccgccgcggcggtggtgaaggggcgcaaggtcgcccccggggtgcgggcgatggtcgtccccggctccggccaggtgaaggcgcaggccgaggcggaggggctggaccagatcttccgggaggcgggcttcgagtggcgggaggccggttgctcgatgtgcctcgggatgaatcccgacatcctggcccccggggaacggtgcgcatctacctccaaccgcaacttcgagggcaggcagggcaagggcggccggacgcacctggtcagcccggccatggcggcggccgcggccatcgccggccacttcgtcgacgtgcgtgaactcctggcggaagggggtgcggcccggtga

SEQ ID NO: 103358 - protein, 481 aa, Symbiobacterium thermophilum
MGQGVIGMSGRTLLDKIWERHVVRREPGKPDLLYIDLHLVHEVTSPQAFEGLRMAGRRVRRPDLTIATMDHNVPTTDRSLPLTDEIAARQMAALERNCSEFGVRLFDLYSPFQGIVHVIGPELGLTQPGLTIVCGDSHTATHGAFGALAFGIGTSEVEHVLATQCLWQHKPKVMEIRVNGKLPPGTTAKDLILGIIGQIGTDGATGYVIEYTGEAIRSLSMEGRMTVCNMSIEAGARAGMIAPDETTFAYLKGRPHAPQGELWEAAVADWRTLASDPDAVYDRVVEFDAGQLAPVVSWGTNPGQVVPVTGRIPDPRDFADPAQRKAAEAALAYMDLEPGTPIQDIRIDRVFIGSCTNGRIEDLRAAAAVVKGRKVAPGVRAMVVPGSGQVKAQAEAEGLDQIFREAGFEWREAGCSMCLGMNPDILAPGERCASTSNRNFEGRQGKGGRTHLVSPAMAAAAAIAGHFVDVRELLAEGGAAR

SEQ ID NO: 103359 - DNA, 1410 bp, Synechococcus elongatus
  CDS (1)..(1410): transl_table=11
atgtctatgagtcgcggcacgctcttcgataaggtttgggaacagcacacagtggctacactgccttcagggcaaactcaactctttattggcctgcacctaatccacgaagtgacgagtccccaagcctttgccatgctgcgggagcgggggttgccagtgctctatccccagcgaaccatagcgacagtggatcacattgtgcctacagatacgctggcgcgtcctctccaagacgcccttgctgaagagatgctgcaagcccttgaggcgaactgccgtgcccacaatattcccttttttgggattggctccggtcgtcagggcattgtccatgtcattgccccggagcaggggttaacgcaaccggggatgacgattgcctgcggcgatagccacacctctacccacggtgcctttggggcgatcgccttcggtattggcaccagtcaagtgcgggatgttttggccacccagacccttgccctcaataagctgaaggttcgcaaagtggaagtcaatggctcccttgcggctggcgtctatgccaaagatgtcattctgcacgttattcgccacctgggtgtcaagggtggtgtgggctatgcctatgaatttgcgggtaccacgtttggccaactttcaatggaagaacgcatgaccgtctgcaatatggccattgagggaggtgcccgctgcggctatgtcaaccccgatgaaaccacctttgcctaccttaagggacggccttttgccccccaaggaaaagcctgggacgaagcggtggcatggtggcgatcgctagccagtgatgccgatgctgaatacgatgatgttgtgacatttgcggctgcggatattgcaccgacggtgacctggggcattacccccggccagagcgttgccgtggatgaaaccttgcccaccctagagagcttgccggtggcagaacgggcgatcgccgccgaagcctatgcctacatggatctacaaccaggtcagcccattcaaggaaccaagattgatgtctgctttatcggcagttgcaccaacggtcgcatcagtgacctgcggcaggcggccaaagttgttgaagggcgcaaagtcaaacccggtgtcaaagccttcgttgtccccggttcagaacgagtgaaagcgcaagccgaagctgaaggcctagatgtcgttttcaaagccgcggggtttgaatggcgcaaccccggctgttcaatgtgccttgccatgaaccccgacaaactgcaagggcgtcagatcagcgcctcctcctccaatcgcaacttcaagggacgccaaggctctccaagcgggcgcactctcctcatgagtccggcgatggtggcagcagcggcaattgccggtgaagtgaccgatgtgcgagcgttcctttag

SEQ ID NO: 103360 - protein, 469 aa, Synechococcus elongatus
MSMSRGTLFDKVWEQHTVATLPSGQTQLFIGLHLIHEVTSPQAFAMLRERGLPVLYPQRTIATVDHIVPTDTLARPLQDALAEEMLQALEANCRAHNIPFFGIGSGRQGIVHVIAPEQGLTQPGMTIACGDSHTSTHGAFGAIAFGIGTSQVRDVLATQTLALNKLKVRKVEVNGSLAAGVYAKDVILHVIRHLGVKGGVGYAYEFAGTTFGQLSMEERMTVCNMAIEGGARCGYVNPDETTFAYLKGRPFAPQGKAWDEAVAWWRSLASDADAEYDDVVTFAAADIAPTVTWGITPGQSVAVDETLPTLESLPVAERAIAAEAYAYMDLQPGQPIQGTKIDVCFIGSCTNGRISDLRQAAKVVEGRKVKPGVKAFVVPGSERVKAQAEAEGLDVVFKAAGFEWRNPGCSMCLAMNPDKLQGRQISASSSNRNFKGRQGSPSGRTLLMSPAMVAAAAIAGEVTDVRAFL

SEQ ID NO: 103361 - DNA, 1398 bp, Thermobifida fusca
  CDS (1)..(1398): transl_table=11
atggcccgcacgatggccgaaaaagtctgggaggagcacgtcgtcaggcgagccgagggtgaacccgacctgctctacatcgacctgcacctcatccacgaggtgaccagccctcaggcgttcgaagggctccgcctggccaaccggaagctgcgccgcccggacctcaccatcgccaccgaggaccacaacgtccccaccgagaacatcttcctgccgatcgctgacccggtgtcgcgcacccaggtcgaaaccctgcgcaagaacgccgcggagttcggggtgcgcctccacccgatgggcgacatcgaccagggcatcgtgcacgtcatcggcccgcagctgggcctcacccagccggggatgaccatcgtctgcggcgacagccacaccagcacgcacggcgcgttcggcgcgctggccttcggcatcggtaccagccaggtcgagcacgtcatggccacccagacgctgccgatgacgccgttcaagaccatggcggtcaacgtcgagggcaagctcaagccgggggtgaccgccaaggacatcatcctcgccgtgatcgctcagatcggcaccggcggcggccagggccacgtgatcgagtaccggggcgaggccatccggtcgctgtccatggaagcccgcatgaccatctgcaacatgtcgatcgaggcgggcgcccgggccggcatgatcgcccccgaccagaccactttcgactacctcaagggccgtccgcacgcccccaagggcgaactgtgggaccaggccgtcgaatactggaagaccctgcccaccgacgaaggcgcagtgttcgacaaggaggtcttcctcaacgccgacgagctcagcccgttcgtcacctggggcaccaaccccggacagggcgtccccctggactcggtcgtccccgaccccgagtccttcaccgacccggtcgagcgtgccgccgccgagaaggccctggcctacatggacctgaagcccggcacccggatgcgggacatcaagatcgacacggtcttcctgggctcctgcaccaacggtcggatcgaggacctgcgcgccgccgccgaggtcctcaagggccgcaaggtggccgacggggtgcggatgctggtcgtccccggctcccagcgggtcaagcagcaggccgcggccgagggcctcgacgagatcttcaaggctgctggcgccgagtggcgtgaagcgggatgctcgatgtgcctgggcatgaaccccgacacgctcaagcccggggagcgcagcgcctccacctccaaccgcaacttcgagggccggcagggcaagggcggccgcacccacctggtgtcgccgctggtcgccgccgccaccgcggtgcgcggcacgctgtcctctcccgccgacctgtag

SEQ ID NO: 103362 - protein, 465 aa, Thermobifida fusca
MARTMAEKVWEEHVVRRAEGEPDLLYIDLHLIHEVTSPQAFEGLRLANRKLRRPDLTIATEDHNVPTENIFLPIADPVSRTQVETLRKNAAEFGVRLHPMGDIDQGIVHVIGPQLGLTQPGMTIVCGDSHTSTHGAFGALAFGIGTSQVEHVMATQTLPMTPFKTMAVNVEGKLKPGVTAKDIILAVIAQIGTGGGQGHVIEYRGEAIRSLSMEARMTICNMSIEAGARAGMIAPDQTTFDYLKGRPHAPKGELWDQAVEYWKTLPTDEGAVFDKEVFLNADELSPFVTWGTNPGQGVPLDSVVPDPESFTDPVERAAAEKALAYMDLKPGTRMRDIKIDTVFLGSCTNGRIEDLRAAAEVLKGRKVADGVRMLVVPGSQRVKQQAAAEGLDEIFKAAGAEWREAGCSMCLGMNPDTLKPGERSASTSNRNFEGRQGKGGRTHLVSPLVAAATAVRGTLSSPADL

SEQ ID NO: 103363 - DNA, 1419 bp, Thermus thermophilus
  CDS (1)..(1419): transl_table=11
atgggaaagacgctctacgagaaggtttgggaagcccacgaggtgaggaagctcaaaaacggccaaagccagctcttcatagacctccacctcctccacgaggtcacgagcccccaggccttcgggatgctcaaggaccttggccttcgggtacgctacccccaccgcaccttcgccaccgtggaccacatcgtccccacccacgaccgcaccgagcccttccaggaccctctggcccagagcatgctggaggccctcagggcgaacacaagggagcacggcatcaccttctttgacctggggagcggcaaccaaggcatcgtccacgtcatcgggccccagctcggcctcacccagcccgggatgaccatcgcctgcggggactcccacacctccacccacggggccttcggggccgtggccttcggcatcggcacgagccaggtccgggacgtcctcgccacccagaccctcgccgcccaaaagctcaaggtgcggcggatcaacgtggaggggaggctcgcccccggggtctacgccaaggacgtgatcctccacatcatccgccacctgggggtgaaggggggcttgggctacgcctatgaatacgggggaagcgccgtggaggccatggacatggaaagccgcatgaccctctgcaacatgtccattgagggcggagcccgcatcggctacgtgaaccccgacgagaccaccttccagtacctcgagggccgcccctacgtccccaaggggtccgagtgggaggaggccaagaggaggtggctcgcttggcgctccgaccccgacgcctcctacgacgacgtggtcaccttccgcgccgaggagatcgcccccaccgtcacctggggcatcaccccgggccaggccatccccattgacggcaggatccccctcctggaggagctccccgaggaggagcgccccgtggccgaggaggctttggcctacatgggcttcaggccgggccagcccatcaagggggtgcccatccaggtggccttcatcggaagctgcaccaacgccaggctttccgacctccgggaggtcgcccgctacctcaaggggcacaaggtgaagaagggggtgcgggccctggtggtgccgggctcggagtgggtggcgaggaaggccgaggaggaggggatcgccgaggtcttccgcgaggcggggtttgagtggcggatgcccggctgctccatgtgcctcgccatgaacccggaccggctggaaggggacgagctttgcgccagcagctccaaccggaactacaagggacgcatgggaagccccaggggccgcaccgtcctcatgagccccctcatggtggcggcggcggccgtggccggggagatcgccgacgcccgggaggtcttcggcctggcgggcgtccgctga

SEQ ID NO: 103364 - protein, 472 aa, Thermus thermophilus
MGKTLYEKVWEAHEVRKLKNGQSQLFIDLHLLHEVTSPQAFGMLKDLGLRVRYPHRTFATVDHIVPTHDRTEPFQDPLAQSMLEALRANTREHGITFFDLGSGNQGIVHVIGPQLGLTQPGMTIACGDSHTSTHGAFGAVAFGIGTSQVRDVLATQTLAAQKLKVRRINVEGRLAPGVYAKDVILHIIRHLGVKGGLGYAYEYGGSAVEAMDMESRMTLCNMSIEGGARIGYVNPDETTFQYLEGRPYVPKGSEWEEAKRRWLAWRSDPDASYDDVVTFRAEEIAPTVTWGITPGQAIPIDGRIPLLEELPEEERPVAEEALAYMGFRPGQPIKGVPIQVAFIGSCTNARLSDLREVARYLKGHKVKKGVRALVVPGSEWVARKAEEEGIAEVFREAGFEWRMPGCSMCLAMNPDRLEGDELCASSSNRNYKGRMGSPRGRTVLMSPLMVAAAAVAGEIADAREVFGLAGVR

SEQ ID NO: 103365 - DNA, 1257 bp, Thermoanaerobacter tengcongensis
  CDS (1)..(1257): transl_table=11
ttgggcttaactcttacacaaaagattttatcggcaaaggcgggaagagaggtaaaacctggagaattgatagagatagacgtggatatggtgctgggaaatgatataacggcacctgttgccataaaagagtttgaaaaaataggggtagataaggtttttgacaacacaaaaatagctttagtgccagaccactttgtgccgagcaaggatataaaatcagcggagcaggtaaatgtaatgagaaaatttgctaaaaaatataatatagttaatttctttgaagtgggaaggatgggcattgagcatgccctccttccagaacagggccttgttcttccaggtgatgtggtgataggagccgattctcatacctgcacttacggtgctcttacctgctttgctacaggagtgggaagcaccgatatggctgcggctatggccacagggaaagcctggtttaaggtgcctgaggcaataaagtttgttttaaaaggaaatctcggcaaatgggtgagtggaaaggacgtgatactctatatcattggcaagattggagttgacggggctttatataaatccatggaatttacagggaatataaaagctttgtcaattgacgacaggtttacaattgcaaatatggcgattgaagcaggagcaaagaatggaatctttgattttgacgagattacagaagcttatgttaaaaagagggcaaagcgagagtataaagtttttgaaagggatgaggatgcggagtacagcgaagtaattgaaataaatcttgatgatataaggcctcaagtggcgtttccccatttgcctgagaatacgagaagtattgatgaagtcggaaaagttaagatagatcaagtagttatagggtcctgtacaaatggaaggctttctgacatggagatagcttacaggattttgaagggcaaaaaggttcatccagatgtaaggcttataattttcccggctacacaggagatatacttggaatgcgtgaagagagggtacattgaagaatttataaaggcaggagcggcagtttcaactcctacctgtggtccatgccttggagggcatatgggagtcctggcaaagggagaaagagctttagctactacaaatagaaattttgtgggaaggatgggacatcctgaaagcgaggtttatctcgcaagtccagcagttgcagcggcttcagcaatagctggctacattgtaagccctgaggaggtggaatga

SEQ ID NO: 103366 - protein, 418 aa, Thermoanaerobacter tengcongensis
MGLTLTQKILSAKAGREVKPGELIEIDVDMVLGNDITAPVAIKEFEKIGVDKVFDNTKIALVPDHFVPSKDIKSAEQVNVMRKFAKKYNIVNFFEVGRMGIEHALLPEQGLVLPGDVVIGADSHTCTYGALTCFATGVGSTDMAAAMATGKAWFKVPEAIKFVLKGNLGKWVSGKDVILYIIGKIGVDGALYKSMEFTGNIKALSIDDRFTIANMAIEAGAKNGIFDFDEITEAYVKKRAKREYKVFERDEDAEYSEVIEINLDDIRPQVAFPHLPENTRSIDEVGKVKIDQVVIGSCTNGRLSDMEIAYRILKGKKVHPDVRLIIFPATQEIYLECVKRGYIEEFIKAGAAVSTPTCGPCLGGHMGVLAKGERALATTNRNFVGRMGHPESEVYLASPAVAAASAIAGYIVSPEEVE

SEQ ID NO: 103367 - DNA, 1404 bp, Thiobacillus denitrificans
  CDS (1)..(1404): transl_table=11
atggctggccaaaccttattccagaagctgtgggacgcccacgtcgtccatgtcgaacccgacggcacgacgctgctctacatcgatcgtcacctcgtgcacgaggtgacgagtccgcaggccttcgaggggctcaagctcgcgcagcgcctgccccggcggcccgacgcggcgatcgccgtgcccgaccacaacgttccgacgaccgatcgctcacagggcatcgccgacccggtgtcgcgcctgcaggtcgaaacgctcgacgccaactgcgccgagttcggcatcaccgaattccggatggacgacgtccgccagggcatcgtccacgtcatcggccccgaggagggcctgaccctgccgggcatgaccgtggtgtgcggtgattcgcatacctcgacgcacggggcgttcggggcattggcgttcggcattggcacgtccgaggtcgagcacgtgctggcgacgcaatgcctgtggcagaagccgtcgaaaacgatgctggtcaaggtcgagggcgaattgggcaagggcgtgacggccaaggacatcgcgctcgccgtcatcggccgcatcggcacggccggcggcaccggctacgcgatcgagttcggcggcgcggcgatccgcgcgctgtcgatggaaggccgcatgacgctgtgcaacatggcgatcgaagcgggcgcgcgcgccggcatggttgcggtcgatcagacgacgatcgactacgtcgaagggcgtccctatgcgccgacgggcgaggcctgggacacggcggtggcgtggtggaaaaccctgcactcggacgcggacgccgtgttcgaccgcgtggtcgaactcgacgccgcggccatcgagccgcaggtgacctggggaacgtcgcccgagatggtgaccacggtgggcgcgagcgtgcccgacccgagtgcggcgccgagcgaggtcaagcgtcaggactgggtgcgcgcactcgaatatatggggctcgcggccggcacgccggtcagcgcgatcgcgctcgacaaggttttcatcggctcgtgcaccaactcgcggatcgaggacctgcgcgaggctgcggccgtcgccaaggggcgccgggtcgcgcccaacgtgaagctcgcgatggtcgtgccgggctccgggctggtcaagcagcaggccgaggcggagggcctcgaccggatcttcatcgacgccggattcgagtggcgcgagccgggctgctcgatgtgcctcgcaatgaacgccgaccggctcgagcccggcgagcgctgcgcgtccacctccaatcgcaacttcgaaggccgccaggggcagggcgggcgcacccatctcgtgagtccggcgatggccgccgccgcggcgtgcgccggccacttcgtcgacgtccgcaacttttaa

SEQ ID NO: 103368 - protein, 467 aa, Thiobacillus denitrificans
MAGQTLFQKLWDAHVVHVEPDGTTLLYIDRHLVHEVTSPQAFEGLKLAQRLPRRPDAAIAVPDHNVPTTDRSQGIADPVSRLQVETLDANCAEFGITEFRMDDVRQGIVHVIGPEEGLTLPGMTVVCGDSHTSTHGAFGALAFGIGTSEVEHVLATQCLWQKPSKTMLVKVEGELGKGVTAKDIALAVIGRIGTAGGTGYAIEFGGAAIRALSMEGRMTLCNMAIEAGARAGMVAVDQTTIDYVEGRPYAPTGEAWDTAVAWWKTLHSDADAVFDRVVELDAAAIEPQVTWGTSPEMVTTVGASVPDPSAAPSEVKRQDWVRALEYMGLAAGTPVSAIALDKVFIGSCTNSRIEDLREAAAVAKGRRVAPNVKLAMVVPGSGLVKQQAEAEGLDRIFIDAGFEWREPGCSMCLAMNADRLEPGERCASTSNRNFEGRQGQGGRTHLVSPAMAAAAACAGHFVDVRNF

SEQ ID NO: 103369 - DNA, 2322 bp, Ustilago maydis
  CDS (1)..(2322)
atggcacccaaaacgctttacgaaaagatctttgactcgcacctcgtccacgaggaggcggatggcacctgcctcatctacatcgaccgtcacttggtgcacgaggtcacgtcgccacaggcgtttgaaggtctgcgcaatgcaaaccgcaaagtgcgcagaaccgactgcacgcttgccaccgtcgaccacaacatccctaccgcctcgcgcaagtcgtaccgcgatacaaagtcgtttgtcgagcaggtcgattcgagaacacagtgcatgacgctggaggaaaacgtcaaggcgttcggtctcaccttctttggtctctcggacaaccgtcagggtatcgtacacatcatcggtcccgagcaaggattcaccctgcccggtgcgacgatcgtctgcggtgactcgcacacctccacgcatggtgcctttggtgctctcgcctttggtatcggcacttctgaggtcgagcacgtgcttgccacgcagacgctgctccagaagcgcgccaagaacatgctcatccaggtcgatggcgagctttcgcaaggcgtcacctccaaggacattattctgcacatcatcggtctgattggtactgccggtggtacgggtcacgtgatcgagtacgccggttcgacaatccgttccctttccatggaggctcgaatgtcgatctgcaacatgtcgatcgaagcgggtgcacgtgccggtctgatcgcccccgacgagatcacgtacgaatacatcaaggggcgtcctctcgcacccaagcagggtgaagcgtgggaccaggcgctcgcctactggaagacgcttcccagtgacgagggcgcgcagtacgacacggtgatcaagatcgatgccaaagacattccgcctacagttacctggggtacgtcgccacaggatgtggttgcgatcacgggcactgtgccggacccgaagaacgcgtcgaacgaagctgaggcgaaagcgtggacgcgcgctctcgagtacatgggcctggaagcggggacgccgatggaaaagatcaagatcgacaaggtgtttatcgggtcgtgcaccaatgcgcgaatcgaggatctgcgcgctgctgctcgtgtgctgcacggacgcaaggtggcagatggactgtactgcatgctcgtgcccggttcggggctggtcaagaagcaggccgaagccgaggggctcgacaagatcttccaggcggccggattcgactggcgcgaggcaggatgctccatgtgtctgggcatgaatccggaccagcttgcgcctggcgagcgatgtgcttccacgtcgaaccgcaactttgagggccgacagggcgcaggtggacgcacgcatctcatgtcgcctgccatggctgcagcttgtgctgtgaccggctacctgaccgacgttcgcaaagtggttggtcattcgtccgccaaggtgggaagcgatgcggccaagccggcgtttgaaatcgaggtctcggacgctaaatcgtacctggtagatgcgacgcctgctcctgcgccgacgaatgtggctgcggcgggtgcgggtgcgctaacggacgaagatgcgttgcgcgatgtacctgcatcgcacatttcttcgagcggaggtggaatggaaaagttcactacgcttactggcattgcggcgccactggaacgatccaacgtcgacacggacctgatcatccccaagcagtttctcaagacgatcaaacgcacaggactcggctcggcgctgttctggccactgcgctacgatgccaagacgggcgagcccgacccggcgtttgtgctcaaccagaagccgtacgatcagagcaagatccttgtggttacaggaccgaatttcgggtgtggctcgtctcgcgaacatgcggcttggtcgctgcttgatttcggcattcgcgccgtgatcgccgaaagctttggcgacatcttccgcaacaacctcacgaaaaacggacagcttccggtcgtgctcagtcgcgctcagattcagagacttacccaagacgccaaggcgggcaagcagatcactgtcgacctggtcgatcagctcgtcattacggccgatggaaaagagaaattcagctttgaaactcccgaattcacgaggcactgtctcattaacggtctcgacgatatcgcgcttaccctccagcgcgatgctcagatcggcgcattcgagcgcaacagatctacacacaccccttggctcgacggtttcggctatcacgccaactcgaattcctcgagtctcttggattccgcaaaacctctcgtcaacaacgtcactgccacagactggtga

SEQ ID NO: 103370 - protein, 773 aa, Ustilago maydis
MAPKTLYEKIFDSHLVHEEADGTCLIYIDRHLVHEVTSPQAFEGLRNANRKVRRTDCTLATVDHNIPTASRKSYRDTKSFVEQVDSRTQCMTLEENVKAFGLTFFGLSDNRQGIVHIIGPEQGFTLPGATIVCGDSHTSTHGAFGALAFGIGTSEVEHVLATQTLLQKRAKNMLIQVDGELSQGVTSKDIILHIIGLIGTAGGTGHVIEYAGSTIRSLSMEARMSICNMSIEAGARAGLIAPDEITYEYIKGRPLAPKQGEAWDQALAYWKTLPSDEGAQYDTVIKIDAKDIPPTVTWGTSPQDVVAITGTVPDPKNASNEAEAKAWTRALEYMGLEAGTPMEKIKIDKVFIGSCTNARIEDLRAAARVLHGRKVADGLYCMLVPGSGLVKKQAEAEGLDKIFQAAGFDWREAGCSMCLGMNPDQLAPGERCASTSNRNFEGRQGAGGRTHLMSPAMAAACAVTGYLTDVRKVVGHSSAKVGSDAAKPAFEIEVSDAKSYLVDATPAPAPTNVAAAGAGALTDEDALRDVPASHISSSGGGMEKFTTLTGIAAPLERSNVDTDLIIPKQFLKTIKRTGLGSALFWPLRYDAKTGEPDPAFVLNQKPYDQSKILVVTGPNFGCGSSREHAAWSLLDFGIRAVIAESFGDIFRNNLTKNGQLPVVLSRAQIQRLTQDAKAGKQITVDLVDQLVITADGKEKFSFETPEFTRHCLINGLDDIALTLQRDAQIGAFERNRSTHTPWLDGFGYHANSNSSSLLDSAKPLVNNVTATDW

SEQ ID NO: 103371 - DNA, 1404 bp, Vibrio cholerae
  CDS (1)..(1404): transl_table=11
atgtcaaaagccaaaactctttacgaaaaaatttacgatgcccatgtggtggtggccgcaccgggtgaaacgccgattctgtacatcgatcgtcatctagtccatgaagtgacctctccacaagcctttgatggcttgcgtgaaaaaggtcgcccggtacgccaagttagcaaaacttttgcgaccatggatcacaacgtctccaccactactaaagacatcaatgcctcaggtgaaatggcgcgcatccagatgcaaacgctttccaaaaactgcgaagagtttggcgtcacgctgtacgacattaaccacaagtaccaaggcattgtgcatgtgatgggacctgagcttggtattaccctccccggcatgacgattgtatgtggtgattcacacaccgcaactcacggtgcattcggctcgcttgcctttgggataggcacctcagaagtagaacacgtactggctacccaaaccctaaagcaaggccgcgctaagacgatgaaaatcgaagtgcggggcaaagtggctcccggcatcaccgctaaagacatcgtactggcgatcattggtaaaacaactgccgctggcggtacaggctatgtcgtggaattttgtggagaagcgattcgcgatctctccatggaaggtcgcatgaccgtgtgtaacatggcgattgaacttggtgcgaaagcaggcttgattgcccctgatgcaactacattcaactacatcaaaggccgcaagtttgccccacaaggcagtgattgggatgctgctgtcgactattggcaaacattaaaaaccgatgaggatgcacagttcgatgccgtcgtgacgcttgaagccagtgaaatcaaaccgcaagtgacttggggtaccaacccaggccaagtgattgccgttgatgagccaatcccatcacctagccagtttgccgatcctgttgaacgcagctcagcagaaaaagctctggcttacatgggacttgaagccggcaaaatgctctccgattataaggtcgataaagtgttcgtcggttcatgcaccaactcgcgcatcgaagatatgcgcgctgcggcagcggtagccaaagggaaaaaagtcgcctctcatgtccaagcattgatcgtgcccggatccgaacaagtgaaagcgcaagccgaagcggaaggcttagataagatctttattgaagcaggatttgaatggcgcttaccgggttgctcaatgtgtttagccatgaacaatgaccgcttagggccaggagaacgctgcgcgtctacctcaaaccgcaactttgagggacgtcagggacgtgatggtcgcactcatttagttagcccagcaatggcagccgctgcagcgattgctggtcacttcgtcgatattcgtcagttttaa

SEQ ID NO: 103372 - protein, 467 aa, Vibrio cholerae
MSKAKTLYEKIYDAHVVVAAPGETPILYIDRHLVHEVTSPQAFDGLREKGRPVRQVSKTFATMDHNVSTTTKDINASGEMARIQMQTLSKNCEEFGVTLYDINHKYQGIVHVMGPELGITLPGMTIVCGDSHTATHGAFGSLAFGIGTSEVEHVLATQTLKQGRAKTMKIEVRGKVAPGITAKDIVLAIIGKTTAAGGTGYVVEFCGEAIRDLSMEGRMTVCNMAIELGAKAGLIAPDATTFNYIKGRKFAPQGSDWDAAVDYWQTLKTDEDAQFDAVVTLEASEIKPQVTWGTNPGQVIAVDEPIPSPSQFADPVERSSAEKALAYMGLEAGKMLSDYKVDKVFVGSCTNSRIEDMRAAAAVAKGKKVASHVQALIVPGSEQVKAQAEAEGLDKIFIEAGFEWRLPGCSMCLAMNNDRLGPGERCASTSNRNFEGRQGRDGRTHLVSPAMAAAAAIAGHFVDIRQF

SEQ ID NO: 103373 - DNA, 1440 bp, Xanthomonas axonopodis pv
  CDS (1)..(1440): transl_table=11
atgactgccaggaccctgtacgacaagctgtgggaactgcacgaggtcacacgccgtgacgatggctcgtcgctgatctacatcgaccgccacatcctgcacgaagtgacctcgccgcaggccttcgaaggcctgcgcctggccgggcgcaagccgtggcgcatcgacgccaatatcgccacgcccgatcacaacgtgccgaccacgcgcgccgaacgccagggcgggctggagtcgatttccgacgaggtctcgcgcctgcaggtgcagacgctggacgaaaactgcgacgacttcggcatcctcgagttcaagatgaacgatgcgcggcagggcatcgtgcatgtggtcggcccggagcagggcgccaccttgccgggcatgaccgtggtctgcggcgattcgcatacctccacgcatggcgcgttcggcgcgctggcgcacggcatcggcacctccgaggtcgagcacgtgctggccacccaatgcctgatcgccaagaaaatgaagaacatgcaggtgcgtgtggaaggcacgctgccgttcggggtgaccgccaaggacatcgtgctggcggtgatcggcaagatcggcaccgccggcggcaacgggcatgcgctggaatttgccggcagcgccattcggactctgtcgatggaaggccgcatgaccatctgcaacatggccatcgaagccggtgcccgcgtgggcatggtggcggtggacgagaagaccattgcctacgtcagagggcgcccgttcgcccccaagggcgcccactgggatgcggcggtggcgctctggagcacgctggtctccgacccggacgcgcacttcgacaccgtggtggagttgcgtgccgaagacatcaagccgcaggtcagctggggcacttcgccggaaatggtgctggccatcgatcagcacgtgcccgatccggccatcgagcaggacccgaccaagcgcgattcgatcgagcgcgcgctgaaatacatggggctgaaggccaaccagccgatcaccgccatccgcctggatcgcgtgttcatcggctcgtgcaccaattcgcgcatcgaagacctgcgtgccgctgccgcagtggccaagggccgcaaggtcgcctccaccatcaagcaggccttggtggtgccgggctcggggctggtgaaggcgcaggccgaagccgaaggcctggacaaggtgtttctggatgccggcttcgaatggcgcgagccaggctgctcgatgtgtctggccatgaacccggacaagctgggcagcggcgaacattgcgcttcgacctccaaccgcaacttcgaaggccgccaaggcgccggcggccgcacgcatctggtcagcccggcgatggcggcggctgcggcggtgagcggtcattttgtcgatgtacgtgaattgcagggaatcgagagtcgggaatag

SEQ ID NO: 103374 - protein, 479 aa, Xanthomonas axonopodis pv
MTARTLYDKLWELHEVTRRDDGSSLIYIDRHILHEVTSPQAFEGLRLAGRKPWRIDANIATPDHNVPTTRAERQGGLESISDEVSRLQVQTLDENCDDFGILEFKMNDARQGIVHVVGPEQGATLPGMTVVCGDSHTSTHGAFGALAHGIGTSEVEHVLATQCLIAKKMKNMQVRVEGTLPFGVTAKDIVLAVIGKIGTAGGNGHALEFAGSAIRTLSMEGRMTICNMAIEAGARVGMVAVDEKTIAYVRGRPFAPKGAHWDAAVALWSTLVSDPDAHFDTVVELRAEDIKPQVSWGTSPEMVLAIDQHVPDPAIEQDPTKRDSIERALKYMGLKANQPITAIRLDRVFIGSCTNSRIEDLRAAAAVAKGRKVASTIKQALVVPGSGLVKAQAEAEGLDKVFLDAGFEWREPGCSMCLAMNPDKLGSGEHCASTSNRNFEGRQGAGGRTHLVSPAMAAAAAVSGHFVDVRELQGIESRE

SEQ ID NO: 103375 - DNA, 1449 bp, Xanthomonas oryzae pv
  CDS (1)..(1449): transl_table=11
atgactgccaagaccctgtacgacaagctgtgggaaatgcacgaggtcacacgccgtgacgatggttcgtcgctgatctacatcgaccgccacatcctgcatgaagtgacttcgccgcaagccttcgaaggcctgcgcctggccgggcgcaatccgtggcgcatcgacgccaacatcgccacgcccgatcacaacgtgccgaccacacgcgccgagcgccagggcgggctggagtcgatttccgacgaggtgtcgcgcctgcaggtgcagacgctggacgagaattgcgacgatttcggcatcctcgagttcaagatgaacgatgcacgccagggcatcgtgcatgtggtcggcccggagcagggcgccaccttgccgggcatgaccgtggtctgcggcgactcgcacacctccacgcacggcgcattcggcgcgttggcgcatggcatcggcacctccgaggtcgagcatgtgctggccacccagtgcctgatcaccaagaagatgaaaaacctgcaggtgcgcgtggaaggcacgctgccgttcggggtgaccgccaaggacatcgtgctggcggtgatcggcaagatcggcaccgccggcggcaacgggcatgcgctggaatttgccggcagcgccatccgcgcgctgtcgatggaaggccgcatgaccatctgcaatatgtccatcgaagcgggtgcacgcgtgggcatggtggcggtggacgagaagaccatcgcctacgtcaaaggccgcccgttcgcacccaagggcgccgactgggacgcggcggtcgcgctgtggagcaccttggtgtccgacccggacgcacacttcgacaccgtggtggaactgcatgccgaagacatcaagccgcaggtcagctggggcacgtcgccggagatggtgctggccatcgaccagcacgtaccggatccggcgaccgagcaggatccgaccaagcgcaattcgatcgagcgcgcgttgaaatacatgggtttgaaggccaaccaggcgatcaccgacatccgcctggatcgcgtgttcattggctcgtgcaccaactcgcggatcgaagacctgcgcgcggccgccgcagtggccaagggacgcaaggtcgcgtcaaccatcaagcaggcgctggtggtgccgggttctggcttggtcaaggcgcaggcagaggcggaaggcctggacaaggtgttcctggatgccggtttcgaatggcgcgagccgggctgctcgatgtgtctggccatgaatccggacaagctcggcagcggcgagcactgcgcttccacctccaaccgcaacttcgaaggccgccagggcgccggtggccgcacgcatttggtcagcccggcgatggccgctgcagcagcggtgagcgggcattttgtcgatgtgcgtgaactcggggattcgggagtggggattcgggattcgtaa

SEQ ID NO: 103376 - protein, 482 aa, Xanthomonas oryzae pv
MTAKTLYDKLWEMHEVTRRDDGSSLIYIDRHILHEVTSPQAFEGLRLAGRNPWRIDANIATPDHNVPTTRAERQGGLESISDEVSRLQVQTLDENCDDFGILEFKMNDARQGIVHVVGPEQGATLPGMTVVCGDSHTSTHGAFGALAHGIGTSEVEHVLATQCLITKKMKNLQVRVEGTLPFGVTAKDIVLAVIGKIGTAGGNGHALEFAGSAIRALSMEGRMTICNMSIEAGARVGMVAVDEKTIAYVKGRPFAPKGADWDAAVALWSTLVSDPDAHFDTVVELHAEDIKPQVSWGTSPEMVLAIDQHVPDPATEQDPTKRNSIERALKYMGLKANQAITDIRLDRVFIGSCTNSRIEDLRAAAAVAKGRKVASTIKQALVVPGSGLVKAQAEAEGLDKVFLDAGFEWREPGCSMCLAMNPDKLGSGEHCASTSNRNFEGRQGAGGRTHLVSPAMAAAAAVSGHFVDVRELGDSGVGIRDS

SEQ ID NO: 103377 - DNA, 1425 bp, Xylella fastidiosa
  CDS (1)..(1425): transl_table=11
atggccggtaagaccctgtatggcaaattgtgggacattcatgaggtggcccgtcgcgacgatgggtcttcgctcatttacattgatcgccatatacttcacgaagtgacttcaccacaggcttttgaaggattgcgtttagctggacggccgttgtggcgagtcaatgccaatattgcgactccggatcataatgtcccgacgaccaaggcggagcgtcaaggcagtttgctatcgattgccgatacggtttcgcgtttgcaggtacagacgttggatgaaaattgcgacgatttcggtatcttcgaattcaagatgaatgatgtgcgtcaagggatcgtccacgtgatcggtccagaacagggagccaccttgcctggtatgacagtagtgtgcggtgattcacacacctccacacacggtgcctttggtgcattggcgcatggcattggtacctctgaagttgagcacgtgttagccacccagtgcttagtcacccagaagatgaaaaatatgcaagtgcgtgtggaaggcaccttgccatggggggtgacggccaaagatatcgtattggcgttgattgggaagataggcactgccggaggcaacggttatgcggtggagttttcagggagtaccatccgcgcgttgtcgatggaagggcgcatgaccatttgtaatatggctattgaggctggtgcgcgcgtgggtatggtggcggtggacgagaagaccatccagtatgtgcatggccgcccgtttgcacctaaaggatccgattgggatgctgctgttgcattctggcgtggtttggtttccgatccagatgcgcactttgatcgtgtggttgagttatctgctgaagagattaaacctcaggttacttggggaacctcgccagagatggtgtcggcagtggatcaatcggtgccagacccagagcgcgaaactgatccagtcaagaaggagtctttaattcgtgccctgaaatatatgggtttgcagccgaatgatccgatcacttcaataaagctggaccgtgtatttattggctcctgtacgaattcgcgtattgaagacttacgtgctgctgcggaagttgttaaaggccgtaaagttgcttccacggtgaagcaggcgatggtggtgcctggctcgggattggtaaaggcacaggctgaagttgagggcttggacaagatattcattgaggctggtttcgagtggcgtgaacctggatgttcgatgtgtttggcgatgaatcccgataaattgggcagtggcgagcattgcgcatctacttctaatcgtaacttcgaggggcgccagggcatcggtggtcgtacccatttagtcagccctgcgatggcagccgctgcggccgtggctggtcactttgtcgatgtccgcgaaatgatgcggtga

SEQ ID NO: 103378 - protein, 474 aa, Xylella fastidiosa
MAGKTLYGKLWDIHEVARRDDGSSLIYIDRHILHEVTSPQAFEGLRLAGRPLWRVNANIATPDHNVPTTKAERQGSLLSIADTVSRLQVQTLDENCDDFGIFEFKMNDVRQGIVHVIGPEQGATLPGMTVVCGDSHTSTHGAFGALAHGIGTSEVEHVLATQCLVTQKMKNMQVRVEGTLPWGVTAKDIVLALIGKIGTAGGNGYAVEFSGSTIRALSMEGRMTICNMAIEAGARVGMVAVDEKTIQYVHGRPFAPKGSDWDAAVAFWRGLVSDPDAHFDRVVELSAEEIKPQVTWGTSPEMVSAVDQSVPDPERETDPVKKESLIRALKYMGLQPNDPITSIKLDRVFIGSCTNSRIEDLRAAAEVVKGRKVASTVKQAMVVPGSGLVKAQAEVEGLDKIFIEAGFEWREPGCSMCLAMNPDKLGSGEHCASTSNRNFEGRQGIGGRTHLVSPAMAAAAAVAGHFVDVREMMR

SEQ ID NO: 103379 - DNA, 2340 bp, Saccharomyces cerevisiae
  CDS (1)..(2340)
atggtttacactccatccaagggtccaagaactctttacgataaggtttttgatgcacatgttgtccatcaagatgaaaatggttcctttttgttgtatatcgacagacacttggttcatgaagtcacctctccacaagctttcgaaggcctagaaaatgccggcagaaaggtcagaagagttgattgtactctagctactgtagatcataatattccaactgaatcaagaaagaatttcaaatcactagacacatttatcaagcaaactgattcgcgtttacaagtcaaaactttagagaataatgttaaacagttcggcgttccatatttcggtatgagtgatgccagacaaggtatcgtccacaccatcggtcccgaagaaggtttcactttaccaggtaccactgttgtttgtggtgactctcatacctctactcacggtgcctttggttcgctggcctttggtattggtacttctgaagttgaacacgtcttggccactcaaacaattatccaagctaaatcgaaaaacatgagaattactgttaatggtaagctatcacctggtatcacatctaaagatttgattttgtatattattggtctgataggtactgcaggtggtactggttgcgttattgaattcgcaggtgaagccattgaagctctttctatggaagcacgtatgtccatgtgtaacatggccatcgaagctggtgcaagagcaggtatgattaaaccagacgaaactactttccaatacaccaaaggcagacctttggctccaaaaggtgccgaatgggaaaaggctgttgcctactggaaaactttgaaaacagacgaaggtgccaaatttgaccacgaaatcaacattgaagctgtcgacgtgattccaactattacatggggtacttctcctcaagatgccttaccaattactggttccgtaccagatccaaaaaatgttacagacccaataaagaaatctggtatggaaagagccttagcctatatgggtttggaacctaacacaccgctaaagagcatcaaagtagataaagtctttattggatcttgtaccaatggccgtattgaagatttaagaagtgctgcagctgtagttaggggtcaaaaattggctagtaacatcaaattagctatggttgttccgggatctggtttggtcaaaaaacaagccgaagcagaaggtttggacaagattttccaagaagctggttttgaatggagagaagctggttgttcaatatgtttaggtatgaaccctgatattttggatgcctatgaacgttgtgcttctacttccaacagaaatttcgaaggtcgtcaaggtgccttgtctcgtacacatctaatgtccccagccatggcggctgctgcaggtatcgcaggtcacttcgtagatattagagaattcgaatataaggatcaagaccaaagtagtccaaaggttgaggtcacttccgaagatgaaaaagagcttgaaagtgctgcttacgatcacgctgaacctgtccaacccgaagacgctccccaagatattgccaatgatgaattaaaagatattccagtgaagtcagatgatacacctgctaaacctagctcttccggcatgaagccatttttgactttggaaggtattagcgcaccattagataaggccaatgttgatacagacgctattatcccaaagcaatttttaaagacaattaagagaacgggtttgaaaaaagggttgttttatgaatggcgtttccgtaaagacgatcaaggtaaggatcaagaaaccgattttgtattaaatgttgaaccttggagggaagctgaaatattggttgttactggtgacaatttcggatgtggttcttccagagaacacgcaccatgggctctaaaagactttggtataaaatccatcattgcaccttcttacggtgatattttctacaacaactctttcaagaacggcttattacctattagattggatcaacaaataatcattgacaaattgatccctattgctaataagggtggtaagctctgcgtcgatttaccaaatcaaaaaattttggattccgatggcaatgtgctcgttgatcattttgaaatagaacctttcagaaagcactgcctagttaacggtcttgatgatattggtattacattgcaaaaggaagaatacatttccagatacgaagctttgagaagagagaaatactcattcttggaaggtggatcaaaattattaaaatttgacaacgttccaaaaagaaaagctgttacaactactttcgataaagtccaccaggattggtag

SEQ ID NO: 103380 - protein, 779 aa, Saccharomyces cerevisiae
MVYTPSKGPRTLYDKVFDAHVVHQDENGSFLLYIDRHLVHEVTSPQAFEGLENAGRKVRRVDCTLATVDHNIPTESRKNFKSLDTFIKQTDSRLQVKTLENNVKQFGVPYFGMSDARQGIVHTIGPEEGFTLPGTTVVCGDSHTSTHGAFGSLAFGIGTSEVEHVLATQTIIQAKSKNMRITVNGKLSPGITSKDLILYIIGLIGTAGGTGCVIEFAGEAIEALSMEARMSMCNMAIEAGARAGMIKPDETTFQYTKGRPLAPKGAEWEKAVAYWKTLKTDEGAKFDHEINIEAVDVIPTITWGTSPQDALPITGSVPDPKNVTDPIKKSGMERALAYMGLEPNTPLKSIKVDKVFIGSCTNGRIEDLRSAAAVVRGQKLASNIKLAMVVPGSGLVKKQAEAEGLDKIFQEAGFEWREAGCSICLGMNPDILDAYERCASTSNRNFEGRQGALSRTHLMSPAMAAAAGIAGHFVDIREFEYKDQDQSSPKVEVTSEDEKELESAAYDHAEPVQPEDAPQDIANDELKDIPVKSDDTPAKPSSSGMKPFLTLEGISAPLDKANVDTDAIIPKQFLKTIKRTGLKKGLFYEWRFRKDDQGKDQETDFVLNVEPWREAEILVVTGDNFGCGSSREHAPWALKDFGIKSIIAPSYGDIFYNNSFKNGLLPIRLDQQIIIDKLIPIANKGGKLCVDLPNQKILDSDGNVLVDHFEIEPFRKHCLVNGLDDIGITLQKEEYISRYEALRREKYSFLEGGSKLLKFDNVPKRKAVTTTFDKVHQDW

SEQ ID NO: 103381 - DNA, 1431 bp, Yersinia pestis
  CDS (1)..(1431): transl_table=11
atgggcacaacatcatctcagagcaaaacgttataccaaaaattgtacgatgcgcacattgtgcatgaagcccccaatgagaccccattgctgtatatcgaccgccatttagtgcatgaggtcacctcaccgcaagcctttgatggtttgcgtgccatgggccgcccggtgcgtcaaccgggtaagactttcgctaccatggatcacaacgtttctacccaaacaaaagacattaacgccagtggtgagatggcccgtattcagatgcaagagttaattaaaaactgcgctgaattcggtgtctcattgtatgacctgaaccaccctttccaagggatcgtgcatgtcattggccctgagcaaggcatgacgttaccgggcatgaccatcgtttgtggtgactcacataccgccactcacggcgcattcggctccttggcctttggtatcggcacctcagaagttgagcatgtgttggcgacccaaaccctgaagcaggggcgagccaaaaccatgagaatcgaagtgaatggcactgtcggcgcgggtattacggctaaagacatcgtgctggcgattatcggtaaaaccgggagcgcaggcggtactggccatgtggtggagttctgtggcagcgcgattgaagcgttgagcatggaaggccggatgacattatgcaacatggcgatcgaaatgggggccaaagccggtttggttgcccctgatgacaccacctttgcctatctgaaaggccgtcagttcgccccaactggcgagcaatgggaacaaggtgttgcctactggcgtaccctgaaatctgatgctgatgcccaattcgataccatcgtgacactggatgccgctgatatcgcgccacaggtgacgtggggaaccaatccgggtcaggtcattgcggttaatcaaatcattcctgcccctgagtctttcagcgatccggtcgaacgtgcatcagcagagaaagccttagcttatatggacttgcgccccggcattaaattgactgaagtggcgattgataaagtctttatcggctcttgcactaactcacgtattgaagatttacgtgcggcagcggctattgcccaagggcgtaaagtcgccaagggtgtgcaagctatcgtggtgccaggctccggcccggtgaaagcgcaggcagaagcggaaggtttggataagatctttatcgccgcaggttttgagtggcgtctgcccggttgctcgatgtgtttggccatgaataatgaccgcctggagcccggcgaacgttgtgcctccaccagcaaccgtaattttgaaggccgccaaggccgtggggggcgcacacatttggtcagcccagccatggccgccgctgccgccgtcagtggtcattttgctgatgttcgcgaattatccgccaccacccactaa

SEQ ID NO: 103382 - protein, 476 aa, Yersinia pestis
MGTTSSQSKTLYQKLYDAHIVHEAPNETPLLYIDRHLVHEVTSPQAFDGLRAMGRPVRQPGKTFATMDHNVSTQTKDINASGEMARIQMQELIKNCAEFGVSLYDLNHPFQGIVHVIGPEQGMTLPGMTIVCGDSHTATHGAFGSLAFGIGTSEVEHVLATQTLKQGRAKTMRIEVNGTVGAGITAKDIVLAIIGKTGSAGGTGHVVEFCGSAIEALSMEGRMTLCNMAIEMGAKAGLVAPDDTTFAYLKGRQFAPTGEQWEQGVAYWRTLKSDADAQFDTIVTLDAADIAPQVTWGTNPGQVIAVNQIIPAPESFSDPVERASAEKALAYMDLRPGIKLTEVAIDKVFIGSCTNSRIEDLRAAAAIAQGRKVAKGVQAIVVPGSGPVKAQAEAEGLDKIFIAAGFEWRLPGCSMCLAMNNDRLEPGERCASTSNRNFEGRQGRGGRTHLVSPAMAAAAAVSGHFADVRELSATTH

SEQ ID NO: 103383 - DNA, 1431 bp, Yersinia pseudotuberculosis
  CDS (1)..(1431): transl_table=11
atgggcacaacatcatctcagagcaaaacgttataccaaaaattgtacgatgcgcacattgtgcatgaagcccccaatgagaccccattgctgtatatcgaccgccatttagtgcatgaggtcacctcaccgcaagcctttgatggtttgcgtgccatgggccgcccggtgcgtcaaccgggtaagactttcgctaccatggatcacaacgtttctacccaaacaaaagacattaacgccagtggtgagatggcccgtattcagatgcaagagttaattaaaaactgcgctgaattcggtgtctcattgtatgacctgaaccaccctttccaagggatcgtgcatgtcattggccctgagcaaggcatgacgttaccgggcatgaccatcgtttgtggtgactcacataccgccactcacggcgcattcggctccttggcctttggtatcggcacctcagaagttgagcatgtgttggcgacccaaaccctgaagcagggacgagccaaaaccatgagaatcgaagtgaatggcactgtcggcgcgggtatcacggctaaagacatcgtgctggcgattatcggtaaaaccggtagcgcaggcggtactggtcatgtggtggagttctgtggcagcgcgattgaagcattgagcatggaaggccggatgacattatgcaacatggcgatcgaaatgggggccaaagccggtttggttgcccctgatgacaccacctttgcctatctgaaaggccgtcagttcgccccaactggcgagcaatgggaacaaggtgttgcctactggcgtaccctgaaatctgatgctgatgcccaattcgataccatcgtgacactggatgccgctgatatcgcgccacaggtgacgtggggaaccaatccgggtcaggtcattgcggttaatcaaatcattcctgcccctgagtctttcagcgatccggtcgaacgtgcatcagcagagaaagccttagcttatatggacttgcgccccggcattaaattgactgaagtggcgattgataaagtctttatcggctcttgcactaactcacgtattgaagatttacgtgcggcagcggctattgcccaagggcgtaaagtcgccaagggtgtgcaagctatcgtggtgccaggctccggcccggtgaaagcgcaggcagaagcggaaggtttggataagatctttatcgccgcaggttttgagtggcgtctgcccggttgctcgatgtgtttggccatgaataatgaccgcctggagcccggcgaacgttgtgcctccaccagcaaccgtaattttgaaggccgccaaggccgtggggggcgcacacatttggtcagcccggccatggccgccgctgccgccgtcagtggtcattttgctgatgttcgcgaattatccgccgccacccactaa

SEQ ID NO: 103384 - protein, 476 aa, Yersinia pseudotuberculosis
MGTTSSQSKTLYQKLYDAHIVHEAPNETPLLYIDRHLVHEVTSPQAFDGLRAMGRPVRQPGKTFATMDHNVSTQTKDINASGEMARIQMQELIKNCAEFGVSLYDLNHPFQGIVHVIGPEQGMTLPGMTIVCGDSHTATHGAFGSLAFGIGTSEVEHVLATQTLKQGRAKTMRIEVNGTVGAGITAKDIVLAIIGKTGSAGGTGHVVEFCGSAIEALSMEGRMTLCNMAIEMGAKAGLVAPDDTTFAYLKGRQFAPTGEQWEQGVAYWRTLKSDADAQFDTIVTLDAADIAPQVTWGTNPGQVIAVNQIIPAPESFSDPVERASAEKALAYMDLRPGIKLTEVAIDKVFIGSCTNSRIEDLRAAAAIAQGRKVAKGVQAIVVPGSGPVKAQAEAEGLDKIFIAAGFEWRLPGCSMCLAMNNDRLEPGERCASTSNRNFEGRQGRGGRTHLVSPAMAAAAAVSGHFADVRELSAATH

SEQ ID NO: 103385 - DNA, 1455 bp, Zymomonas mobilis
  CDS (1)..(1455): transl_table=11
atgacaaaaaatccccgcactctttatgaaaaaatatgggacgctcatattgtcgagcgtcgtgaggatggttctgctcttatctatatcgatcggcatcttgtccatgaagtgaccagcccgcaggcttttgaagccctgcgtcaggcaggtcgccccttgcgtcgccctgatcggactttggcggtgccggatcacaatgtgccgacaaccgcacgtgtcgatagtgaaggccatctgttaccaattgctgacccacaatcggcaaagcaattagcggctttggctaaaaatgcgccggaatttggggttcgctatatcagtgcgactgaccctgagcagggcattgtccatgtcgtgggcccggaacaaggttttaccttgcccggaacgactttggtttgtggtgatagtcatacggcggctcatggggccttgggggctttggctttcggtatcgggacttccgaagtcgaacatgtcatggcaacccagactttgatcctgacccctgccaagactatggaagttcgggttgaaggcaagctgtctcccgatgtgtcggcaaaagacctgatccttcatatcattcatagcttaggcacggcaggcggcaccggatatgctattgaatataccggtgaggcgatccgcaatctgtcgatcgaagagcgtctgaccgtttccaatatgtcgatcgaagcgggtgcgcgcaccggattgattgcagcggatgaaaagacctttgcctatctctttggtcgtccgatggcacccaaaggcgcagattgggaaaaagcggtgcagtggtggaagtctttggcgactgataagggggctgtttatgacaagaccgttatcattaaagccgaggatgttcagccttccgtgacatggggcaccagccctgaagatgtggtaccgattaccggcgttgtgcctgatccggcttcttttgctgaccctgccaaacaggcggcggcgcgtcgttctctggaatatatggggttagaacccggccagaaaatggaaggtctggcagttgaaaacgtctttatcggaagctgcaccaatagccgtattgaagatttgagagcggcggcttcggtcgtttgggggcggcatgttgccgataacgttaaacaggctttggtcgttcccggatccggtttggtaaaacgtcaggccgaggctgaaggtttggatgaagtctttaaagcggctggctttgaatggcgtgaacccggttgttcgatgtgtttggcgatgaatcccgataaggttccagcaggtgagcgttgtgcttcgacctcgaaccgtaacttcgtcggacggcagggtcccggtgccagaacccatctggtttcacctgctatggcggccgctgcggctgtgaccggacatctgaccgacctgcgtcatctggagccggttaaaatgggagaaaaggcatga

SEQ ID NO: 103386 - protein, 484 aa, Zymomonas mobilis
MTKNPRTLYEKIWDAHIVERREDGSALIYIDRHLVHEVTSPQAFEALRQAGRPLRRPDRTLAVPDHNVPTTARVDSEGHLLPIADPQSAKQLAALAKNAPEFGVRYISATDPEQGIVHVVGPEQGFTLPGTTLVCGDSHTAAHGALGALAFGIGTSEVEHVMATQTLILTPAKTMEVRVEGKLSPDVSAKDLILHIIHSLGTAGGTGYAIEYTGEAIRNLSIEERLTVSNMSIEAGARTGLIAADEKTFAYLFGRPMAPKGADWEKAVQWWKSLATDKGAVYDKTVIIKAEDVQPSVTWGTSPEDVVPITGVVPDPASFADPAKQAAARRSLEYMGLEPGQKMEGLAVENVFIGSCTNSRIEDLRAAASVVWGRHVADNVKQALVVPGSGLVKRQAEAEGLDEVFKAAGFEWREPGCSMCLAMNPDKVPAGERCASTSNRNFVGRQGPGARTHLVSPAMAAAAAVTGHLTDLRHLEPVKMGEKA

SEQ ID NO: 103387 - DNA, 2310 bp, Aspergillus niger
  CDS (1)..(2310)
atgcagtcgcgtttgttgccctccggccctggcaggcgctggatttctcttcgcgtgccgaacacgcctcaacgacgtgccttcgcctccacccgcttccttttccaggatgtcttccagtcccagctggacgacccttcctccgccgccctcttctcctccctgcagtcctcccgggccgtgccccagaccttgacggaaaagatcgttcagaagtacgccgtaggtctgcccgatggcaagtttgtcaagtccggcgactatgtgactatcgctccccaccggattatgacccatgacaactcttggcccgtcgcattgaagttcatgtcgatcggtgcctccaagatgcacgatcccaatcaggtcgtgatgactctcgaccatgatgtccagaacaaaacagagaagaacctgcaaaagtaccgccagatcgaggagtttgccaagcaacacggtgtcgagttctatcccgccggtcgaggaattggtcaccaaatcatggttgaagaaggctttgcctggcccggcactctggtggtcgcctcggacagtcacagtaacacttatggtgccgtggcctccgttggaactcccatcgtgagaaccgatgcggccagtatctgggcgaccggtaagacgtggtggcagatccccccagtggccaaggtgacttttaccggtatcctgccccctggcgtgactggcaaggacgtcatcgttgctctgtgcggtctattcgacaaggacgatgtcctgaaccatgcaattgagttcactggctctgaggaaaccatgagaagcttgcccatggatagccggttgaccattgccaacatgacgactgagtggggtgctttgtcaggactgttccccatggatggtgttctgaaaggctggttgaagggcaaggctaccactgcggccatgggcttggctgatgggccgttcaagaccctggctgctcgcaacttcacccaccctgccatcgagcagctttttgtgaaccctctcactgccgataagggtgccaaatatgcgaaggagctcttcctggacctttcgactctttctccctacgtttccggccccaactcggtcaagattgccacccccctcaaggagctggaagcccaggatatcaaggtcgacaaggcctatctggtttcctgcaccaactctcgggcttcggacattgctgctgctgctaaggtgttcaaggatgccgcggagaagaacggtgggaaggtcccgaagatcgctgatggcgtcaagttttacattgctgccgcgtccattcccgaacagctcgctgcggaaggagctggtgactggcagaccctcctggaggctggagcaacggccctccccgctggatgcggaccttgcatcggtctgggaacgggattgctggagcccggcgaggtcggcatcagtgcgtcgaaccgcaacttcaagggtcgcatgggtagcactgaagccaaggcatacttgggtagccccgaaattgttgctgccagcgccctcagcggcaagctgagcggccctggctggtaccagccccctgaagggtggaccgaagttgtccgcggtgagggcgatggtatccgcgaggaggaccgcatgctcaataccgagcaagctcttgagaagctccttggtcagttggatgaccttgttgccgatggggagaagcgcttcgctccggaggagaaggttgaggaagagggtggcctgacggaggtgtatcctggtttccctgaacgcgtctctggcgagattgtgttctgtgatgctgacaacctgaacacggacgccatctatcccggttactggacctaccaagacaatgtccccgtggagaagatggctgaagtatgcatgtccaactacgataaggagttcgcctccattgccaaggagggtgacatcctggttgtcggatacaacttcggctgtggtagctctcgtgaacaggcggccactgctctcttggcgaagcagattcccctggttgtttcgggtagctttggcaacatcttctcccggaacagcattaacaatgctctcatgggtctggaggtccctcgcttggttagccgtctgcgcgaggagtttggcgacaagcagcttacccgtcggaccggttggaccctgacctgggatgtccggcgcagtcagattgagatccaggaaggccagaacggacccaagtggactcacaaggtgggcgagctgccgcccaacgtgcaggagatcattgcgaagggtggtctggagaaatgggtcaagaacgccattgaggcgtag

SEQ ID NO: 103388 - protein, 769 aa, Aspergillus niger
MQSRLLPSGPGRRWISLRVPNTPQRRAFASTRFLFQDVFQSQLDDPSSAALFSSLQSSRAVPQTLTEKIVQKYAVGLPDGKFVKSGDYVTIAPHRIMTHDNSWPVALKFMSIGASKMHDPNQVVMTLDHDVQNKTEKNLQKYRQIEEFAKQHGVEFYPAGRGIGHQIMVEEGFAWPGTLVVASDSHSNTYGAVASVGTPIVRTDAASIWATGKTWWQIPPVAKVTFTGILPPGVTGKDVIVALCGLFDKDDVLNHAIEFTGSEETMRSLPMDSRLTIANMTTEWGALSGLFPMDGVLKGWLKGKATTAAMGLADGPFKTLAARNFTHPAIEQLFVNPLTADKGAKYAKELFLDLSTLSPYVSGPNSVKIATPLKELEAQDIKVDKAYLVSCTNSRASDIAAAAKVFKDAAEKNGGKVPKIADGVKFYIAAASIPEQLAAEGAGDWQTLLEAGATALPAGCGPCIGLGTGLLEPGEVGISASNRNFKGRMGSTEAKAYLGSPEIVAASALSGKLSGPGWYQPPEGWTEVVRGEGDGIREEDRMLNTEQALEKLLGQLDDLVADGEKRFAPEEKVEEEGGLTEVYPGFPERVSGEIVFCDADNLNTDAIYPGYWTYQDNVPVEKMAEVCMSNYDKEFASIAKEGDILVVGYNFGCGSSREQAATALLAKQIPLVVSGSFGNIFSRNSINNALMGLEVPRLVSRLREEFGDKQLTRRTGWTLTWDVRRSQIEIQEGQNGPKWTHKVGELPPNVQEIIAKGGLEKWVKNAIEA

SEQ ID NO: 103389 - DNA, 2064 bp, Yarrowia lipolytica
  CDS (1)..(2064)
atgtttgcattcagaaatcgagcagtcacacaaacactcctggtgcgacgatactccacaaagcgcatcccccagaacctgaccgagaagatcgtccagcgatatgccgtcggccttcctgaaggcaagcaggtccagagtggagattatgtttccattcgacccagccactgcatgacacacgacaactcatggcccgttgccaccaagttcaagggccttggagccaaggctgtcaaggacaaccggcaagtggtcatgactcttgatcacgatgtccagaacaagtctgagaagaacctagagaagtatgccaacatcgagaactttgccggagagcagggcatcgatttctaccccgccggccgaggtattggccaccaggttatggtcgaggagggctacgctttcccttacaacctcactgtcgcttctgactcacactcgaacatgtatggaggtatcggttgcctgggtacacccattgtccgaaccgacgctgcatccgtgtgggctactggacagacttggtggcagattccccctgttgctcgtgtcgagcttaagggccagcttcctgccggcgtgtttggtaaggacgtgattatcgctctctgtggtatcttcaacaacgacgaggttctcaaccacgccattgagtttgttggagacggtgttgagcacctgtctgtcgacgagcgactcactattgctaacatgaccaccgagtggggtgcccttactggtcttttccctgttgatgagactctccgacagtggtacgagtaccgtctgactcgacttcctcagcctcatgctcgagtgaatgacggcactgtcgctgctctcaaggacgctgttcaggccgataccgacgccaagtatgccaagaacctgaccattgatctgtctactctctctccattcctgtctggacccaactccgtcaaggtgtacaactccctggctgatctgtctgcccaggacatcaagatcaacaaggcctaccttgtgtcctgcaccaactctcgactgtccgatatcgaggctgctgccaacgtgatcaagaacaacaaggtcgctgaaggcgtcgagttctatgtcgccgctgcttcttcctttgtccagaaggacgccgaggcctctggagcctggcagactctcatcaatgccggagccaagcctctccctgccggctgtggcccctgcatcggtctcggaactggtcttctcgaagacggcgaggtcggtatctctgctaccaaccgaaacttcaagggccgaatgggctccaaggatgccttggcctacctggcctctcccgaggttgtcgctgcttctgctgttctcggtaagattggtttccccgaggaagtctacggctctcccgttcccggagctaagggtgtgtcttcctccatctcagttactgaggcagttgaggcagaggctgatgccgaagctgccgagtctgaccctgctcctagtggaggggtcctggatggattccccgcacagatcactggagaactcgtcctttgtgacgccgacaacatcaataccgacggtatctaccccggaaagtacacctaccaggacgacgtgccccgagagaagatggccgaggtgtgcatggagaactacgatcctgactttggctctaagaccggcgctggagacattattgtctctggtttcaactttggtaccggttcttcccgagagcaggccgccacctgtattctggcccgagacatgcaattggtcattgccggctcttttggaaacatcttctcccgaaactccatcaacaacgccttgctgactcttgagattcctgctctcatcaacaaactgagaaagcgatatgagggacagcccgctgagctgacccgacgaaccggctggttcgccacctgggatgtgcctgccgctactgtcaccgtcaccgacggcaagaacggacccgttattctcaagcagaaggtcggagagctcggacagaacctccaggagatcatcgtcaagggcggccttgagggatgggtcaaggctcagctttaa

SEQ ID NO: 103390 - protein, 687 aa, Yarrowia lipolytica
MFAFRNRAVTQTLLVRRYSTKRIPQNLTEKIVQRYAVGLPEGKQVQSGDYVSIRPSHCMTHDNSWPVATKFKGLGAKAVKDNRQVVMTLDHDVQNKSEKNLEKYANIENFAGEQGIDFYPAGRGIGHQVMVEEGYAFPYNLTVASDSHSNMYGGIGCLGTPIVRTDAASVWATGQTWWQIPPVARVELKGQLPAGVFGKDVIIALCGIFNNDEVLNHAIEFVGDGVEHLSVDERLTIANMTTEWGALTGLFPVDETLRQWYEYRLTRLPQPHARVNDGTVAALKDAVQADTDAKYAKNLTIDLSTLSPFLSGPNSVKVYNSLADLSAQDIKINKAYLVSCTNSRLSDIEAAANVIKNNKVAEGVEFYVAAASSFVQKDAEASGAWQTLINAGAKPLPAGCGPCIGLGTGLLEDGEVGISATNRNFKGRMGSKDALAYLASPEVVAASAVLGKIGFPEEVYGSPVPGAKGVSSSISVTEAVEAEADAEAAESDPAPSGGVLDGFPAQITGELVLCDADNINTDGIYPGKYTYQDDVPREKMAEVCMENYDPDFGSKTGAGDIIVSGFNFGTGSSREQAATCILARDMQLVIAGSFGNIFSRNSINNALLTLEIPALINKLRKRYEGQPAELTRRTGWFATWDVPAATVTVTDGKNGPVILKQKVGELGQNLQEIIVKGGLEGWVKAQL

SEQ ID NO: 103391 - DNA, 1545 bp, Oryza sativa
  CDS (1)..(1545)
atggcctccatctccgccgcctcccccgtcgctgggaaggccgccgccttcgcccacaagaacgagctcgccgccgccgccgtggcgccgtcgcagcagcagctgcagcggagggtgagtgggaggagggcgcgttcggggagggtccgcgccgtcgccacgcccgcccgcgccccccgcgccccgtcctccactggctcggtgaagagcgccatgacgatgacagagaagatcctggcgagggcgtcggagcgcgccagcttggagcccggggagaacgtgtgggtggacgtcgacgtgctgatgacgcacgacgtctgcggccctggcaccatcgggatcttcaagcgggagttcggggaggacgccaaggtttgggaccgagagaaggtggtcatcatcccggaccactacatcttcaccagcgatgagcgagcaaaccgaaatgttgatatcctcagggatttctgtatggagcagaacatcaagtacttctatgacatcaaggacctgagcaatttcaaagcaaatccagactacaagggtgtttgccacgttgctcttgctcaagagggtcattgcagaccaggcgaggttctccttggtactgattctcatacatgcaatgctggagcctttggccaatttgcaactggaattggaaacactgatgctggttttgtgatgggcactgggaaggctcttcttaaggtgcctccaactatcaggtttgtattagatggagaaatgccaccttatttacttgcaaaggatctgattttacaaattattggtgagatttctgtatctggcgcaacatacaaatccatggagtttgttggatcaactgtggaaagtctaaatatggaagagcgaatgacactgtgcaacatggttattgaagctggtggcaagaatggtgttgtgcctgccgatcaaactacatttaactatcttgagggcaagacatcagttgaatacgagcctgtctatagtgatgctcaggccagatttgttagtgactaccggtttgatgtatccaaattggagccagttattgccaagccacattcacctgacaaccgtgctctagcaagagagtgcaaagatgtcaagattgaccgggtctatatcggttcttgtactggaggtaaaactgaggacttctttgctgctgcgaaggtgttcttagcttcggggaagaaggttaaagttcccacttttctcgttccggcgacacaaaaggtgtggatggacatttatagcatccctgtaccaggagccggtggcaaaacttgctcacagatatttgaggaggctggttgtgatacaccagctagccctagttgtggtgcttgtttgggtggtcctcgtgatacatatgctcgcatgaatgaacctatggtgtgtgtgtcgacgacgaacaggaatttccccggcaggatggggcacaaggaagggcagatctacctggcttcgccgttcaccgcggcggcttcagccctcaccggatacgtcactgaccccagggacttcctgatgtaa

SEQ ID NO: 103392 - protein, 514 aa, Oryza sativa
MASISAASPVAGKAAAFAHKNELAAAAVAPSQQQLQRRVSGRRARSGRVRAVATPARAPRAPSSTGSVKSAMTMTEKILARASERASLEPGENVWVDVDVLMTHDVCGPGTIGIFKREFGEDAKVWDREKVVIIPDHYIFTSDERANRNVDILRDFCMEQNIKYFYDIKDLSNFKANPDYKGVCHVALAQEGHCRPGEVLLGTDSHTCNAGAFGQFATGIGNTDAGFVMGTGKALLKVPPTIRFVLDGEMPPYLLAKDLILQIIGEISVSGATYKSMEFVGSTVESLNMEERMTLCNMVIEAGGKNGVVPADQTTFNYLEGKTSVEYEPVYSDAQARFVSDYRFDVSKLEPVIAKPHSPDNRALARECKDVKIDRVYIGSCTGGKTEDFFAAAKVFLASGKKVKVPTFLVPATQKVWMDIYSIPVPGAGGKTCSQIFEEAGCDTPASPSCGACLGGPRDTYARMNEPMVCVSTTNRNFPGRMGHKEGQIYLASPFTAAASALTGYVTDPRDFLM

SEQ ID NO: 103393 - DNA, 1332 bp, Oryza sativa
  CDS (1)..(1332)
atgacgatgacagagaagatcctggcgagggcgtcggagcgcgccagcttggagcccggggagaacgtgtgggtggacgtcgacgtgctgatgacgcacgacgtctgcggccctggcaccatcgggatcttcaagcgggagttcggggaggacgccaaggtttgggaccgagagaaggtggtcatcatcccggaccactacatcttcaccagcgatgagcgagcaaaccgaaatgttgatatcctcagggatttctgtatggagcagaacatcaagtacttctatgacatcaaggacctgagcaatttcaaagcaaatccagactacaagggtgtttgccacgttgctcttgctcaagagggtcattgcagaccaggcgaggttctccttggtactgattctcatacatgcaatgctggagcctttggccaatttgcaactggaattggaaacactgatgctggttttgtgatgggcactgggaaggctcttcttaaggtgcctccaactatcaggtttgtattagatggagaaatgccaccttatttacttgcaaaggatctgattttacaaattattggtgagatttctgtatctggcgcaacatacaaatccatggagtttgttggatcaactgtggaaagtctaaatatggaagagcgaatgacactgtgcaacatggttattgaagctggtggcaagaatggtgttgtgcctgccgatcaaactacatttaactatcttgagggcaagacatcagttgaatacgagcctgtctatagtgatgctcaggccagatttgttagtgactaccggtttgatgtatccaaattggagccagttattgccaagccacattcacctgacaaccgtgctctagcaagagagtgcaaagatgtcaagattgaccgggtctatatcggttcttgtactggaggtaaaactgaggacttctttgctgctgcgaaggtgttcttagcttcggggaagaaggttaaagttcccacttttctcgttccggcgacacaaaaggtgtggatggacatttatagcatccctgtaccaggagccggtggcaaaacttgctcacagatatttgaggaggctggttgtgatacaccagctagccctagttgtggtgcttgtttgggtggtcctcgtgatacatatgctcgcatgaatgaacctatggtgtgtgtgtcgacgacgaacaggaatttccccggcaggatggggcacaaggaagggcagatctacctggcttcgccgttcaccgcggcggcttcagccctcaccggatacgtcactgaccccagggacttcctgatgtaa

SEQ ID NO: 103394 - protein, 443 aa, Oryza sativa
MTMTEKILARASERASLEPGENVWVDVDVLMTHDVCGPGTIGIFKREFGEDAKVWDREKVVIIPDHYIFTSDERANRNVDILRDFCMEQNIKYFYDIKDLSNFKANPDYKGVCHVALAQEGHCRPGEVLLGTDSHTCNAGAFGQFATGIGNTDAGFVMGTGKALLKVPPTIRFVLDGEMPPYLLAKDLILQIIGEISVSGATYKSMEFVGSTVESLNMEERMTLCNMVIEAGGKNGVVPADQTTFNYLEGKTSVEYEPVYSDAQARFVSDYRFDVSKLEPVIAKPHSPDNRALARECKDVKIDRVYIGSCTGGKTEDFFAAAKVFLASGKKVKVPTFLVPATQKVWMDIYSIPVPGAGGKTCSQIFEEAGCDTPASPSCGACLGGPRDTYARMNEPMVCVSTTNRNFPGRMGHKEGQIYLASPFTAAASALTGYVTDPRDFLM

SEQ ID NO: 103395 - DNA, 1518 bp, Brassica napus
  CDS (1)..(1518)
atggcttcctctgtaatctcttcatctcctttcctctgcaaatccgcccagcagaaggatttggggttccctaaatcgtcgcagatttcggttcacagatgtcagaagagagcgatttctcggaagatcgtctccgtcatggcgccgcagcgatcatccagcgccactggatcggtgaaaactgggatgacgatgacggagaagattcttgccaaggcagcagagaaatcacaagtggtgcctggtgataacatctgggttaacgttgacgttctcatgactcatgatgtctgtggccctggtgcttttggtatcttcaagagagagttcggtgaaaaagctaaggtttgggactcagagaagattgttgttattccagaccattacatcttcactactgataagcgtgccaaccgcaatgtcgacattatgagggaacattgcagggaacagaacatcaagtatttctatgatatcaccgaccttggagattttcgggctaatcctgactacaaaggtgtttgccatgtggcgcttgcacaagaaggtcattgcaggccaggagaggttttgttaggaacagactcgcacacatgtactgctggagcgtttggtcagtttgctacagggattggaaacaccgatgctggatttgtgttaggcactggcaaaatcctccttaaggttccaccaacaatgaggtttatcttggatggtgaaatgcccagttatctgcaagcaaaggatctgattttacaaatcattggagaaatatctgttgctggtgcaacttacaagacgatggagttcagtggaacaactattgaaagtctgactatggaagaaagaatgacattgtgcaacatggttgtggaagctgggggaaagaatggtgtcatccctcctgatgcgacgacatttaattacgttgagaacaggacatctgtaccctttgagcccgtatatagtgatggaaatgcaagctttattgcagattatcgatttgacgtgtcaaagctggaggctgtggtggctaagcctcattctcctgacaaccgggctctagcaagagaatgcaaagatgtcaaaattgacagagtatacattggttcttgtactggtgggaagactgaggattttatggctgcagctaaacttttccatgcagcaggaaagcaagtcaaagtcccaactttccttgtccccgctactcagaaggtgtggatggatgtgtatgccctccctgtgcctggagcaggtggaaagacgtgtgcgcagatattcgaagaagctggctgcgacacaccaaccagtcctagttgtggtgcctgccttggtggcccagctgacacctatgctcgcttgaatgaacctcaagtgtgtgtctcgacaacgaacagaaactttcctggtcggatgggacacaaagaagggcagatttacttggcttctccttacaccgctgcagcctcggctctgaccggccatgtcaccgacccaagagagttcttgcagtag

SEQ ID NO: 103396 - protein, 505 aa, Brassica napus
MASSVISSSPFLCKSAQQKDLGFPKSSQISVHRCQKRAISRKIVSVMAPQRSSSATGSVKTGMTMTEKILAKAAEKSQVVPGDNIWVNVDVLMTHDVCGPGAFGIFKREFGEKAKVWDSEKIVVIPDHYIFTTDKRANRNVDIMREHCREQNIKYFYDITDLGDFRANPDYKGVCHVALAQEGHCRPGEVLLGTDSHTCTAGAFGQFATGIGNTDAGFVLGTGKILLKVPPTMRFILDGEMPSYLQAKDLILQIIGEISVAGATYKTMEFSGTTIESLTMEERMTLCNMVVEAGGKNGVIPPDATTFNYVENRTSVPFEPVYSDGNASFIADYRFDVSKLEAVVAKPHSPDNRALARECKDVKIDRVYIGSCTGGKTEDFMAAAKLFHAAGKQVKVPTFLVPATQKVWMDVYALPVPGAGGKTCAQIFEEAGCDTPTSPSCGACLGGPADTYARLNEPQVCVSTTNRNFPGRMGHKEGQIYLASPYTAAASALTGHVTDPREFLQ

SEQ ID NO: 103397 - DNA, 1527 bp, Brassica napus
  CDS (1)..(1527)
atggcttcctctgtaatctcttcctctcccttcgtctgcaaatcccccgctaagaaggatttgggggtttcttcgttccgtaaagcatcgcagatttcgattcatggatgccagaggaaatcgatttctcggaagatcgtctccgtcatggctccgcagcgctcatcgtccacctcaggatcggtgaaaactgggatgacgatgacggagaagattctggcgaaggcagcagagaagtcacaagtggtccctggtgataacatttgggttaacgttgatgttcttatgactcatgatgtctgtggccctggcgcttttggtatcttcaaaagagagttcggtgataacgctaaggtttgggactcggagaagatcgttgttataccagaccattacatattcacatctgataagcgtgctaaccgcaacgtcgacattatgagggagcattgcagggaacagaacatcaagtatttctatgatatcaccgacctcggagattttagggctaatcctgactacaaaggtgtttgccatgttgcgcttgcacaagaaggtcattgcaggcctggagaggttttgttaggaacagactcacacacatgtactgctggagcatttggtcagtttgctacagggattggaaacactgatgcaggctttgtgttaggcactggaaaaatcctccttaaggttccaccaactatgaggtttatcttggatggtgaaatgcccagttatttgcaagcaaaggatctgattctgcagatcattggtgaaatatctgttgctggtgcaacttacaagacgatggagttcagtggtacaactattgaaagtctgactatggaagaacgaatgacattgtgcaacatggtggtggaagctgggggaaagaatggtgtcatccctcctgatgcgacgacatttaattacgttgagaataggacatctgtaccctttcagcctgtatatagtgatgcaaatgcaagctttgtggcagattatagatttgatgtgtcgaagctagagcctgtagtggctaagcctcattctcctgataatcgtgctctagcgagagaatgcaaagatgtgaaaattgacagagtatacatcggttcttgtactggtgggaagactgaggattttatggctgcagctaaacttttccatgcagcaggaaaacaagtcaaagttccaacttttcttgtcccggccactcagaaggtgtggatggacgtgtatgcactcccagtacctggagcaggtggaaagacgtgtgcgcagatattcgaagaagctggatgtgacacaccaaccagtcctagctgtggtgcctgccttggtggcccagcagacacctacgctcgtttgaatgaacctcaagtgtgtgtctcgacaacgaacaggaacttccccggtcggatgggacacaaggaagggcagatatacttggcttctccttacactgctgcagcctcggctctaaccggccatgtcaccgacccaagagagttcttgcagtag

SEQ ID NO: 103398 - protein, 508 aa, Brassica napus
MASSVISSSPFVCKSPAKKDLGVSSFRKASQISIHGCQRKSISRKIVSVMAPQRSSSTSGSVKTGMTMTEKILAKAAEKSQVVPGDNIWVNVDVLMTHDVCGPGAFGIFKREFGDNAKVWDSEKIVVIPDHYIFTSDKRANRNVDIMREHCREQNIKYFYDITDLGDFRANPDYKGVCHVALAQEGHCRPGEVLLGTDSHTCTAGAFGQFATGIGNTDAGFVLGTGKILLKVPPTMRFILDGEMPSYLQAKDLILQIIGEISVAGATYKTMEFSGTTIESLTMEERMTLCNMVVEAGGKNGVIPPDATTFNYVENRTSVPFQPVYSDANASFVADYRFDVSKLEPVVAKPHSPDNRALARECKDVKIDRVYIGSCTGGKTEDFMAAAKLFHAAGKQVKVPTFLVPATQKVWMDVYALPVPGAGGKTCAQIFEEAGCDTPTSPSCGACLGGPADTYARLNEPQVCVSTTNRNFPGRMGHKEGQIYLASPYTAAASALTGHVTDPREFLQ

SEQ ID NO: 103399 - DNA, 1533 bp, Linum usitatissimum
  CDS (1)..(1533)
atggcttcttctaccattgcctctccttccacatccttccttcccggcaaggaactgggtcgctcagttttcgcccaaccaccctcctctatctcggttcccaaatgcaggaattcgatctccaagaaaattgtttccgtcatggctccacatcaatcagagcgcaagccttcaactactggcacggtgaagactgctatgacaatgacagaaaaaatcttggctatggctgcagagaagtcccagttgagccccggtgaaaatgtttgggtcaatgttgatgtcttgatgacccatgatgtttgcggccctggttcttttgatatcttcaagaaagagtttgggcagaatgctaaggtttgggatcgtgagaagattgtggtgatacctgaacattacatattcaccaacgacaaacgtgcgaataggaatgtggatatcttgagagaattctgcacggagcaaaacattaagtacttctatgacattcaggaccgtgctaattttaaggctaaccctgattacaagggtgtctgccatattgcccttgcacaagagggtcactgccgacctggcgaggtcttgttgggtacagactcacacacctgtactgctggggcatttgggcaatttgccactggaattggcaacactgacgctggatttgtcttaggcactgggaaggccttgcttaaggtccccccaacattaaggttcgtaatggatggtgaaatgcctgactgtatacttgctaaggatttgattttgcaaatcattggtgaaatatctgtggcgggtgcaacatataaatcaatggagtttgtcggtacaactgttgagggtttaagtatggaagagcgtatgactttgtgtaacatggttatcgaagctggaggaaagaatggtgttgtgcctgctgacaacactacttttaattatcttgaggacaaggtatctgttccctatgagccagtttacagtgaccaacaagcaagatatttatcagagtatagatttgatgtttcaaaattggagccactagttgctaagccccattctcctgataaccgagctttagcaagagagtgcaaagatgtcaagattgacagagtatatattggatcttgtactggaggaaaaactgaggattttatggctgcggcaaaagtttttttagcttctggatataagaaggtcaaagcacccactttccttgtccctgctactcaaaaggtatggatggacgtttacagtctcccagtaccggggtctggtggtaagacatgctcccagattttcgaggaagtcggttgtgacacacctgcaagtcccagctgcggggcttgtttgggcggccctaaagatacttatggacgtttgaacgagcctaaggtctgtgtctcgacaacaaacaggaatttccccggacgaatgggacacaaagaaggagagatatatcttgcctcaccttatacagcagcagcttctgctttgactggctatgttaccgatccaagagagttcttgcattag

SEQ ID NO: 103400 - protein, 510 aa, Linum usitatissimum
MASSTIASPSTSFLPGKELGRSVFAQPPSSISVPKCRNSISKKIVSVMAPHQSERKPSTTGTVKTAMTMTEKILAMAAEKSQLSPGENVWVNVDVLMTHDVCGPGSFDIFKKEFGQNAKVWDREKIVVIPEHYIFTNDKRANRNVDILREFCTEQNIKYFYDIQDRANFKANPDYKGVCHIALAQEGHCRPGEVLLGTDSHTCTAGAFGQFATGIGNTDAGFVLGTGKALLKVPPTLRFVMDGEMPDCILAKDLILQIIGEISVAGATYKSMEFVGTTVEGLSMEERMTLCNMVIEAGGKNGVVPADNTTFNYLEDKVSVPYEPVYSDQQARYLSEYRFDVSKLEPLVAKPHSPDNRALARECKDVKIDRVYIGSCTGGKTEDFMAAAKVFLASGYKKVKAPTFLVPATQKVWMDVYSLPVPGSGGKTCSQIFEEVGCDTPASPSCGACLGGPKDTYGRLNEPKVCVSTTNRNFPGRMGHKEGEIYLASPYTAAASALTGYVTDPREFLH

SEQ ID NO: 103401 - DNA, 1515 bp, Brassica napus
  CDS (1)..(1515)
atggcttcctctgtaatctcttcatctcctttcctctgcaaatccgcccagaaggatttggggttccctaaaccgtcgcagatttcggttcacagatgtcagaagagagcgatttctcggaagatcgtctccgtcatggcgccgcagcgatcatccagcgccactggatcggtgaaaactgggatgacgatgacggagaagattcttgccaaggcagcagagaaatcacaagtggtgcctggtgataacatctgggttaacgttgacgttctcatgactcatgatgtctgtggccctggtgcttttggtatcttcaagagagagttcggtgaaaaagctaaggtttgggacccggagaagattgttgttattccagaccattacatcttcactactgataagcgtgccaaccgcaatgtcgacattatgagggaacattgcagggaacagaacatcaagtatttctatgatatcaccgaccttggagattttcgggctaatcctgactacaaaggtgtttgccatgtggcgcttgcacaagaaggtcattgcaggccaggagaggttttgttaggaacagactcgcacacatgtactgctggagcgtttggtcagtttgctacagggattggaaacaccgatgcaggatttgtgttaggcactggaaaaatcctccttaaggttccaccaacaatgaggtttatcttggatggtgaaatgcccagttatctgcaagcaaaggatctgattctacaaatcattggagaaatatctgttgctggtgcaacttacaagacgatggagttcagtggaacaactattgaaagtctaactatggaagaaagaatgacattgtgcaacatggttgtggaagctgggggaaagaatggtgtcatccctcctgatgcgacgacatttaattacgttgagaacaggacatctgtaccctttgagcccgtatatagtgatggaaatgcaagctttattgcagattatcgatttgacgtgtcaaagctggagcctgtggtggctaagcctcattctcctgacaacagggctctagcaagagaatgcaaagatgtgaaaattgacagagtatacattggttcttgtactggtgggaagactgaggattttatggctgcagctaaacttttccatgcagcaggaaagcaagtcaaagtcccaactttccttgtccccgctactcagaaggtgtggatggatgtgtatgccctccctgtgcctggagcaggtggaaagacgtgtgcgcagatattcaaagaagctggctgcgacacaccaaccagtcctagttgtggtgcctgccttggtggcccagctgacacctatgctcgcttgaatgaacctcaagtgtgtgtctcgacaacgaacagaaactttcctggtcggatgggacacaaagaagggcagatttacttggcttctccttacaccgctgcagcctcggctctgaccggccatgtcaccgacccaagagagttcttgcagtag

SEQ ID NO: 103402 - protein, 504 aa, Brassica napus
MASSVISSSPFLCKSAQKDLGFPKPSQISVHRCQKRAISRKIVSVMAPQRSSSATGSVKTGMTMTEKILAKAAEKSQVVPGDNIWVNVDVLMTHDVCGPGAFGIFKREFGEKAKVWDPEKIVVIPDHYIFTTDKRANRNVDIMREHCREQNIKYFYDITDLGDFRANPDYKGVCHVALAQEGHCRPGEVLLGTDSHTCTAGAFGQFATGIGNTDAGFVLGTGKILLKVPPTMRFILDGEMPSYLQAKDLILQIIGEISVAGATYKTMEFSGTTIESLTMEERMTLCNMVVEAGGKNGVIPPDATTFNYVENRTSVPFEPVYSDGNASFIADYRFDVSKLEPVVAKPHSPDNRALARECKDVKIDRVYIGSCTGGKTEDFMAAAKLFHAAGKQVKVPTFLVPATQKVWMDVYALPVPGAGGKTCAQIFKEAGCDTPTSPSCGACLGGPADTYARLNEPQVCVSTTNRNFPGRMGHKEGQIYLASPYTAAASALTGHVTDPREFLQ

SEQ ID NO: 103403 - DNA, 1515 bp, Brassica napus
  CDS (1)..(1515)
atggcttcctctgtaatctcttcatctcctttcctctgcaaatccgcccagaaggatttggggttccctaaaccgtcgcagatttcggttcacagatgtcagaagagagcgatttctcggaagatcgtctccgtcatggcgccgcagcgatcatccagcgccactggatcggtgaaaactgggatgacgatgacggagaagattcttgccaaggcagcagagaaatcacaagtggtgcctggtgataacatctgggttaacgttgacgttctcatgactcatgatgtctgtggccctggtgcttttggtatcttcaagagagagttcggtgaaaaagctaaggtttgggacccggagaagattgttgttattccagaccattacatcttcactgctgataagcgtgccaaccgcaatgtcgacattatgagggaacattgcagggaacagaacatcaagtatttctatgatatcaccgaccttggagattttcgggctaatcctgactacaaaggtgtttgccatgtggcgcttgcacaagaaggtcattgcaggccaggagaggttttgttaggaacagactcgcacacatgtactgctggagcgtttggtcagtttgctacagggattggaaacaccgatgctggatttgtgttaggcactggcaaaatcctccttaaggttccaccaacaatgaggtttatcttggatggtgaaatgcccagttatctgcaagcaaaggatctgattttacaaatcattggagaaatatctgttgctggtgcaacttacaagacgatggagttcagtggaacaactattgaaagtctaactatggaagaaagaatgacattgtgcaacatggttgtggaagctgggggaaagaatggtgtcatccctcctgatgcgacgacatttaattacgttgagaacaggacatctgtaccctttgagcccgtatatagtgatggaaatgcaagctttattgcagattatcgatttgacgtgtcaaagctggagcctgtggtggctaagcctcattctcctgacaacagggctctagcaagagaatgcaaagatgtgaaaattgacagagtatacattggttcttgtactggtgggaagactgaggattttatggctgcagctaaacttttccatgcagcaggaaagcaagtcaaagtcccaactttccttgtccccgctactcagaaggtgtggatggatgtgtatgccctccctgtgcctggagcaggtggaaagacgtgtgcgcagatattcaaagaagctggctgcgacacacccaccagtcctagttgtggtgcctgccttggtggcccagctgacacctatgctcgcttgaatgaacctcaagtgtgtgtctcgacaacgaacagaaactttcctggtcggatgggacacaaagaagggcagatttacttggcttctccttacaccgctgcagcctcggctctgaccggccatgtcaccgacccaagagagttcttgcagtag

SEQ ID NO: 103404 - protein, 504 aa, Brassica napus
MASSVISSSPFLCKSAQKDLGFPKPSQISVHRCQKRAISRKIVSVMAPQRSSSATGSVKTGMTMTEKILAKAAEKSQVVPGDNIWVNVDVLMTHDVCGPGAFGIFKREFGEKAKVWDPEKIVVIPDHYIFTADKRANRNVDIMREHCREQNIKYFYDITDLGDFRANPDYKGVCHVALAQEGHCRPGEVLLGTDSHTCTAGAFGQFATGIGNTDAGFVLGTGKILLKVPPTMRFILDGEMPSYLQAKDLILQIIGEISVAGATYKTMEFSGTTIESLTMEERMTLCNMVVEAGGKNGVIPPDATTFNYVENRTSVPFEPVYSDGNASFIADYRFDVSKLEPVVAKPHSPDNRALARECKDVKIDRVYIGSCTGGKTEDFMAAAKLFHAAGKQVKVPTFLVPATQKVWMDVYALPVPGAGGKTCAQIFKEAGCDTPTSPSCGACLGGPADTYARLNEPQVCVSTTNRNFPGRMGHKEGQIYLASPYTAAASALTGHVTDPREFLQ

SEQ ID NO: 103405 - DNA, 1515 bp, Zea mays
  CDS (1)..(1515)
atggcctcctccgtctccgccgccgccaaggccgccgcggcgttcgcgcacaaggtccagaaggagctggccgcgccggcgcagcgccgcgcgggcttgacccgccggaccaagccgtgcagcgtgcgcgccgtcgcttcgcccgcgcgcgccctgtcgtccaccggctcggtgaagagcgcgatgacgatgacggagaagatactggcgcgggcgtcggagcgcgcggcgctggagcccggggagaacgtgtgggtcgacgtcgacgtgctcatgacgcacgacgtctgcgggcccggcgccttcgacatcttcaagaaggagttcggggaggacgccagggtctgggaccgcgagaagctcgtcgtcatcccggaccactacatcttcaccagcgacggccgtgccaaacgcaacgtcgacatcctcagggacttctgtgcggagcagaacatcaagtacttctatgacatcaaggacctcagcgatttcagggctaatccggactacaaaggcgtctgccacatcgcacttgctcaggaaggccactgccgaccaggcgaggttctcttgggcactgattctcatacatgcaatgctggagcttttggtcagtttgcaactggaatcggaaacactgatgcaggttttgtgttgggcactggaaaggctcttctccaggtgccacctactatcaggtttatattagatggagagatgccgccttatttacttgcgaaggatctgattttgcaaattattggagagatttcagtatctggtgcgacctacaaatcaatggagtttgttggatcaactgtagaaagtctaaccatggaagagcgtatgacactatgcaacatggttattgaagctggtggaaagaacggtgttgtgcctgctgatgaaactacatttaaataccttgagggtaagacatcagtcgattatgaacctgtctacagtgatgctcaagccagattttttagcgactaccggtttgatgtatcaaaactggagccagtagttgccaagccacattcgcctgacaaccgtgctccagcaagagaatgcaaagatgtgaagatcgaccgagtctatattggttcttgcactggtggtaagaccgaggatttccttgctgctgcaaaggtgttcttagcctcgggaaagaaggttaaagttcccacatttcttgtccctgccacacaaaaggtgtggttggacatatatagcctccctgtaccaggatctggtggcaaaacttgctcccagatatttgaggaggctggttgtgacacaccagcaagtcctaattgtggtgcttgtttgggtggccctcgtgatacatatgcacggatgaatgaacctactgtctgcgtgtccaccacgaacaggaactttccgggcaggatgggccacaaggaagggcaaatctacctggcgtctccctacactgcggctgcctcagccctgacggggtatgttacggaccccagggacttcctcatgtaa

SEQ ID NO: 103406 - protein, 504 aa, Zea mays
MASSVSAAAKAAAAFAHKVQKELAAPAQRRAGLTRRTKPCSVRAVASPARALSSTGSVKSAMTMTEKILARASERAALEPGENVWVDVDVLMTHDVCGPGAFDIFKKEFGEDARVWDREKLVVIPDHYIFTSDGRAKRNVDILRDFCAEQNIKYFYDIKDLSDFRANPDYKGVCHIALAQEGHCRPGEVLLGTDSHTCNAGAFGQFATGIGNTDAGFVLGTGKALLQVPPTIRFILDGEMPPYLLAKDLILQIIGEISVSGATYKSMEFVGSTVESLTMEERMTLCNMVIEAGGKNGVVPADETTFKYLEGKTSVDYEPVYSDAQARFFSDYRFDVSKLEPVVAKPHSPDNRAPARECKDVKIDRVYIGSCTGGKTEDFLAAAKVFLASGKKVKVPTFLVPATQKVWLDIYSLPVPGSGGKTCSQIFEEAGCDTPASPNCGACLGGPRDTYARMNEPTVCVSTTNRNFPGRMGHKEGQIYLASPYTAAASALTGYVTDPRDFLM

SEQ ID NO: 103407 - DNA, 2706 bp, Glycine max; identical to SEQ ID NO: 67172
  CDS (1)..(2706)

SEQ ID NO: 103408 - protein, 901 aa, Glycine max; identical to SEQ ID NO: 67173

SEQ ID NO: 103409 - DNA, 2955 bp, Glycine max; identical to SEQ ID NO: 67174
  CDS (1)..(2955)

SEQ ID NO: 103410 - protein, 984 aa, Glycine max; identical to SEQ ID NO: 67175

SEQ ID NO: 103411 - DNA, 1506 bp, Glycine max
  CDS (1)..(1506)
atggcttcctctcttctctctccatcattcacttccttcccccgcataaagaaggatgtctctctctctgctttcacttctcagcgatgcttcaaagcgcttccaaggagaataatccgttgtgctgtggcggcgcctcagcgccaaccttccaccactggatcagtgaggactgcaatgaccatgactgacaagatactggccagagcttctgagaaggtacagctgacccctggcgataatgtttgggtcaatgttgatattttgatgacacatgatgtgtgtggccctggttctattgggattttcaagagggagtgtggtgacgatgccaaggtttgggaccgtgaaaagcttgtaataatacccgaccattatatattcacaagtgatgaacgtgccaatcgcaatgtagacatattaagagatttctgccatgagcagaatatcaagtacttttatgatattaaggatctcagtaattttaaggtaaatccagactataagggtgtttgccatgttgcccttgctcaggaaggtcattgtaggcctggagaggttctcttaggtactgattctcacacttgtactgctggagcatttggccaatttgctacagggattggtaatactgatgctggctttgtgctgggaactgggaaacttctgcttaaggtgcccccaactttgagatttgtaatggatggagaaatgcccgattatttgctttctaaggatttgattctgcaaattattggtgaaataactgtggctggggcaacatataaatcgatggagtttgtcggtacaactgttgaaagtttaactatggaagaacggatgacattgtgcaacatggttgttgaagctggtggaaagaatggtgttgttcctgctgacagcactacatttaaatatcttgagggcaagacatctctgccatatgaacctgtttatagtgacgatcaagcaagatttctcgcagagtatagatttgatgtctcaaaattggagccagtggtggccaagcctcattctccggataatcgtgctttggcaagggagtgcaaggatgtaaaaattgacagagtatacataggatcttgtacaggtggcaaaacggaggatttcatggctgcagcaaaagtttttctggcatcaggtaaacaggtcaaagttcctacatttcttgtgcctgcaacacaaaaggtttggatggacttatactccctccctgtccctggatctggtggtaagacgtgctcccagatatttgaagaagctgggtgtgacacaccagctagtcctagttgtggtgcttgtttgggtggcccgaaagatacttacgcacgcatgaatgaacctaaggtttgtgtttcaactacgaacaggaacttcccgggccgaatgggacacaaggaaggtcaaatctatttggcttccccatatacagctgctgcatctgcattgaccggttatgttactgatcctagagagttcttgtag

SEQ ID NO: 103412 - protein, 501 aa, Glycine max
MASSLLSPSFTSFPRIKKDVSLSAFTSQRCFKALPRRIIRCAVAAPQRQPSTTGSVRTAMTMTDKILARASEKVQLTPGDNVWVNVDILMTHDVCGPGSIGIFKRECGDDAKVWDREKLVIIPDHYIFTSDERANRNVDILRDFCHEQNIKYFYDIKDLSNFKVNPDYKGVCHVALAQEGHCRPGEVLLGTDSHTCTAGAFGQFATGIGNTDAGFVLGTGKLLLKVPPTLRFVMDGEMPDYLLSKDLILQIIGEITVAGATYKSMEFVGTTVESLTMEERMTLCNMVVEAGGKNGVVPADSTTFKYLEGKTSLPYEPVYSDDQARFLAEYRFDVSKLEPVVAKPHSPDNRALARECKDVKIDRVYIGSCTGGKTEDFMAAAKVFLASGKQVKVPTFLVPATQKVWMDLYSLPVPGSGGKTCSQIFEEAGCDTPASPSCGACLGGPKDTYARMNEPKVCVSTTNRNFPGRMGHKEGQIYLASPYTAAASALTGYVTDPREFL

SEQ ID NO: 103413 - DNA, 1506 bp, Glycine max
  CDS (1)..(1506)
atggcttcctctcttctctctccatcattcacttccttcccccgcataaagaaggatgtctctctctctgctttcacttctcagcgatgcttcaaagcgcttccaaggagaataatccgttgtgctgtggcggcgcctcagcgccaaccttccaccactggatcagtgaggactgcaatgaccatgactgagaagatactggccagagcttctgagaaggtacagctgacccctggcgataatgtttgggtcaatgttgatattttgatgacacatgatgtgtgtggccctggttctattgggattttcaagagggagtttggtgacgatgccaaggtttgggaccgtgaaaagcttgtaataatacccgaccattatatattcacaagtgatgaacgtgccaatcgcaatgtagacatattaagagatttctgccatgagcagaatatcaagtacttttatgatattaaggatctcagtaattttaaggtaaatccagactataagggtgtttgccatgttgcccttgctcaggaaggtcattgtaggcctggagaggttctcttaggtactgattctcacacttgtactgctggagcatttggccaatttgctacagggattggtaatactgatgccggctttgtgctgggaactgggaaacttctgctcaaggtgcccccaactttgagatttgtaatggatggagaaatgcccgattatttgctttctaaggatttgattctgcaaattattggtgaaataactgtggctggggcaacatataaatcgatggagtttgtcggtacaactgttgaaagtttaactatggaagaacggatgacattgtgcaacatggttgttgaagctggtggaaagaatggtgttgttcctgctgacagcactacatttaaatatcttgagggcaagacatctctgccatatgaacctgtttatagtgacgatcaagcaagatttctcgcagagtatagatttgatgtctcaaaattggagccagtggtggccaagcctcattctccggataatcgtgctttggcaagggagtgcaaggatgtaaaaattgacagagtatacataggatcttgtacaggtggcaaaacggaggatttcatggctgcagcaaaagtttttctggcatcaggtaaacaggtcaaagttcctacatttcttgtgcctgcaacacaaaaggtttggatggacttatactccctccctgtccctggatctggtggtaagacgtgctcccagatatttgaagaagctgggtgtgacacaccagctagtcctagttgtggtgcttgtttgggtggcccgaaagatacttacgcacgcatgaatgaacctaaggtttgtgtttcaactacgaacaggaacttcccgggccgaatgggacacaaggaaggtcaaatctatttggcttccccatatacagctgctgcatctgcattgaccggttatgttactgatcctagagagttcttgtag

SEQ ID NO: 103414 - protein, 501 aa, Glycine max
MASSLLSPSFTSFPRIKKDVSLSAFTSQRCFKALPRRIIRCAVAAPQRQPSTTGSVRTAMTMTEKILARASEKVQLTPGDNVWVNVDILMTHDVCGPGSIGIFKREFGDDAKVWDREKLVIIPDHYIFTSDERANRNVDILRDFCHEQNIKYFYDIKDLSNFKVNPDYKGVCHVALAQEGHCRPGEVLLGTDSHTCTAGAFGQFATGIGNTDAGFVLGTGKLLLKVPPTLRFVMDGEMPDYLLSKDLILQIIGEITVAGATYKSMEFVGTTVESLTMEERMTLCNMVVEAGGKNGVVPADSTTFKYLEGKTSLPYEPVYSDDQARFLAEYRFDVSKLEPVVAKPHSPDNRALARECKDVKIDRVYIGSCTGGKTEDFMAAAKVFLASGKQVKVPTFLVPATQKVWMDLYSLPVPGSGGKTCSQIFEEAGCDTPASPSCGACLGGPKDTYARMNEPKVCVSTTNRNFPGRMGHKEGQIYLASPYTAAASALTGYVTDPREFL

SEQ ID NO: 103415 - DNA, 2961 bp, Zea mays; identical to SEQ ID NO: 67176
  CDS (1)..(2961)

SEQ ID NO: 103416 - protein, 986 aa, Zea mays; identical to SEQ ID NO: 67177

SEQ ID NO: 103417 - DNA, 1509 bp, Glycine max
  CDS (1)..(1509)
atggcttcctctcttctctctccatcattcacttccttcccccgcataaagaaggatgtctctctctctgctttcacttctcagcgatgcttcaaagcgcttccaaggagaataatccgttgtgctgtggcggcgcctcagcgccaaccttccaccactggatcagtgaggactgcaatgaccatgactgagaagatactggccagagcttctgagaaggtacagctgacccctggcgataatgtttgggtcaatgttgatattttgatgacacatgatgtgtgtggccctggttctattgggattttcaagagggagtttggtgacgatgccaaggtttgggaccgtgaaaagcttgtaataatacccgaccattatatattcacaagtgatgaacgtgccaatcgcaatgtagacatattaagagatttctgccatgagcagaatatcaagtacttttatgatattaaggatctcagtaattttaaggtaaatccagactataagggtgtttgccatgttgcccttgctcaggaaggtcattgtaggcctggagaggttctcttaggtactgattctcacacttgtactgctggagcatttggccaatttgctacagggattggtaatactgatgctggctttgtgctgggaactgggaaacttctgcttaaggtgcccccaactttgagatttgtaatggatggagaaatgcctgattatttgctttctaaggatttgattctgcaaattattggtgaaataactgtggctggtgcaacatataaatcgatggagtttgtcggtacaactgttgaaagtttaactatggaagaacggatgacattgtgcaacatggttgttgaagctggtggaaagaatggtgttgttcctgctgacagcactacatttaaatatcttgagggcaagacatctctgccatatgaacctgtttatagtgacgatcaagcaagatttcttgctgagtatagatttgatgtctcaaaattggagccagtggtggccaagcctcattctccagataatcgtgctttggcaagggagtgcaaggatgtaaaaattgacagagtatacataggatcttgtacaggtggcaaaacggaggatttcatggctgctgcaaaagtttttctggcatcaggtaaacaggtcaaagttcctacatttcttgtgcctgcaacacaaaaggtttggatggacttatactcccttccagtccctggatctggtggtaagacgtgctcccagatatttgaagaagctgggtgtgacacaccagctagtcctagttgcggtgcttgtttgggtggcccgaaagatacttacgcacgcatgaatgaacctaaggtttgtgtttcaactacgaacaggaacttcccgggccgaatgggacacaaggaaggtcaaatctatttggcttccccatatacagctgctgcatctgcattgaccggttatgttactgatcctaaagagttcttgcagtag

SEQ ID NO: 103418 - protein, 502 aa, Glycine max
MASSLLSPSFTSFPRIKKDVSLSAFTSQRCFKALPRRIIRCAVAAPQRQPSTTGSVRTAMTMTEKILARASEKVQLTPGDNVWVNVDILMTHDVCGPGSIGIFKREFGDDAKVWDREKLVIIPDHYIFTSDERANRNVDILRDFCHEQNIKYFYDIKDLSNFKVNPDYKGVCHVALAQEGHCRPGEVLLGTDSHTCTAGAFGQFATGIGNTDAGFVLGTGKLLLKVPPTLRFVMDGEMPDYLLSKDLILQIIGEITVAGATYKSMEFVGTTVESLTMEERMTLCNMVVEAGGKNGVVPADSTTFKYLEGKTSLPYEPVYSDDQARFLAEYRFDVSKLEPVVAKPHSPDNRALARECKDVKIDRVYIGSCTGGKTEDFMAAAKVFLASGKQVKVPTFLVPATQKVWMDLYSLPVPGSGGKTCSQIFEEAGCDTPASPSCGACLGGPKDTYARMNEPKVCVSTTNRNFPGRMGHKEGQIYLASPYTAAASALTGYVTDPKEFLQ

SEQ ID NO: 103419 - DNA, 1518 bp, Zea mays
  CDS (1)..(1518)
atggcttcctccatctccgccgccgctaaggcctccgcggcctttgcccaaaagaaggagctggccgcgccggcgccgcaccgcgcgggctcgagccgtcggaccaagccgtgccgcgtgcgcgccgtcgcgtcgcccgcgcgcaccccccgcgccccgtcgtccaccggctcggtgaagaccgcgatgacgatgacggagaagatcctggcgagggcgtcggagcgcgcggcgctggagcccggggagaacgtgtgggtggacatcgacgtgctcatgacgcacgacgtctgcgggcccggcaccatcggcatcttcaagaaggagttcggggaggatgccaaggtctgggaccgcgagaaggtcgtcatcatccccgaccactacatcttcaccagcgacgagcgcgccaaccgcaacgtcgatatcctcagggacttctgtctggagcagaacatcaagtacttctatgatatcaaggacctcagcgatttcagggctaatccagactacaagggtgtctgccacattgcacttgctcaggaaggccactgccgaccaggcgaggttctcctgggtactgattctcatacgtgcaatgctggagcctttggtcaatttgcaaccggaattggaaacactgatgcaggttttgtgatgggcactggaaaggctcttctcaaggtgccacctactatcaggtttgtattagatggagaaatgccgccttatttacttgcgaaggatctgattttgcaaattattggtgagatttcagtatctggtgcaacctacaaatcgatggagtttgttggatcaactgtagaaagtctaaccatggaagaacgtatgacactatgcaacatggttgttgaagctggtggaaagaacggtgtcgtgcctgctgatgaaactacatttaaataccttgagggtaggacatcagttgattatcaacctgtctacagtgatgctgaggccagattttttagtgactaccggtttgatgtatcgaaactggagccagtagttgccaagccacattcgcctgacaaccgtgccctagcaagagaatgcaaagatgtcaagatcgaccgagtctatattggttcctgcactggtggcaagactgaggacttccttgctgccgcaaaggtgttcttagcctcgggaaagaaggttaaagttcccacattccttgtccctgccacacaaaaggtgtggatggacgtatatagccttcctgtaccaggatctggcggcaaaacttgcgcccagatattcgaggaggctggttgtgatacaccagcaagtcctaattgcggcgcttgtctgggtggccctcgcgatacgtatgcacggatgaatgaacctacggtctgcgtgtccaccacgaacaggaacttcccgggcaggatggggcacaaggaagggcagatctacctggcgtccccctacaccgctgcagcctcggccctgacggggtacgtcacggaccccagggacttcctcatgtga

SEQ ID NO: 103420 - protein, 505 aa, Zea mays
MASSISAAAKASAAFAQKKELAAPAPHRAGSSRRTKPCRVRAVASPARTPRAPSSTGSVKTAMTMTEKILARASERAALEPGENVWVDIDVLMTHDVCGPGTIGIFKKEFGEDAKVWDREKVVIIPDHYIFTSDERANRNVDILRDFCLEQNIKYFYDIKDLSDFRANPDYKGVCHIALAQEGHCRPGEVLLGTDSHTCNAGAFGQFATGIGNTDAGFVMGTGKALLKVPPTIRFVLDGEMPPYLLAKDLILQIIGEISVSGATYKSMEFVGSTVESLTMEERMTLCNMVVEAGGKNGVVPADETTFKYLEGRTSVDYQPVYSDAEARFFSDYRFDVSKLEPVVAKPHSPDNRALARECKDVKIDRVYIGSCTGGKTEDFLAAAKVFLASGKKVKVPTFLVPATQKVWMDVYSLPVPGSGGKTCAQIFEEAGCDTPASPNCGACLGGPRDTYARMNEPTVCVSTTNRNFPGRMGHKEGQIYLASPYTAAASALTGYVTDPRDFLM

SEQ ID NO: 103421 - DNA, 1515 bp, Zea mays
  CDS (1)..(1515)
atggcctcctccgtctccgccgccgccaaggccgccgcggcgttcgcgcacaaggtccagaaggagctggccgcgccggcgcagcgccgcgcgggcttgacccgccggaccaagccgtgcagcgtgcgcgccgtcgcttcgcccgcgcgcgccctgtcgtccaccggctcggtgaagagcgcgatgacgatgacggagaagatactggcgcgggcgtcggagcgcgcggcgctggagcccggggagaacgtgtgggtcgacgtcgacgtgctcatgacgcacgacgtctgcgggcccggcgccttcgacatcttcaagaaggagttcggggaggacgccagggtctgggaccgcgagaagctcgtcgtcatcccggaccactacatcttcaccagcgacggccgtgccaaacgcaacgtcgacatcctcagggacttctgtgcggagcagaacatcaagtacttctatgacatcaaggacctcagcgatttcagggctaatccggactacaaaggcgtctgccacatcgcacttgctcaggaagcccactgccgaccaggcgaggttctcttgggcactgattctcatacatgcaatgctggagcttttggtcagtttgcaactggaatcggaaacactgatgcaggttttgtgttgggcactggaaaggctcttctcaaggtgccacctactatcaggtttatattagatggagagatgccgccttatttacttgcgaaggatctgattttgcaaattattggagagatttcagtatctggtgcgacctacaaatcaatggagtttgttggatcaactgtagaaagtctaaccatggaagagcgtatgacactatgcaacatggttattgaagctggtggaaagaacggtgttgtgcctgctgatgaaactacatttaaataccttgagggtaagacatcagtcgattatgaacctgtctacagtgatgctcaagccagattttttagcgactaccggtttgatgtatcaaaactggagccagtagttgccaagccacattcgcctgacaaccgtgctccagcacgagaatgcaaagatgtgaagatcgaccgagtctatattggttcttgcactggtggtaagaccgaggatttccttgctgctgcaaaggtgttcttagcctcgggaaagaaggttaaagttcccacatttcttgtccctgccacacaaaaggtgtggttggacatatatagcctccctgtaccaggatctggtggcaaaacttgctcccagatatttgaggaggctggttgtgacacaccagcaagtcctaattgtggtgcttgtttgggtggccctcgtgatacatatgcacggatgaatgaacctactgtctgcgtgtccaccacgaacaggaactttccgggcaggatggggcacaaggaagggcaaatctacctggcgtctccctacactgcggctgcctcagccctgacggggtatgttacggaccccagggacttcctcatgtaa

SEQ ID NO: 103422 - protein, 504 aa, Zea mays
MASSVSAAAKAAAAFAHKVQKELAAPAQRRAGLTRRTKPCSVRAVASPARALSSTGSVKSAMTMTEKILARASERAALEPGENVWVDVDVLMTHDVCGPGAFDIFKKEFGEDARVWDREKLVVIPDHYIFTSDGRAKRNVDILRDFCAEQNIKYFYDIKDLSDFRANPDYKGVCHIALAQEAHCRPGEVLLGTDSHTCNAGAFGQFATGIGNTDAGFVLGTGKALLKVPPTIRFILDGEMPPYLLAKDLILQIIGEISVSGATYKSMEFVGSTVESLTMEERMTLCNMVIEAGGKNGVVPADETTFKYLEGKTSVDYEPVYSDAQARFFSDYRFDVSKLEPVVAKPHSPDNRAPARECKDVKIDRVYIGSCTGGKTEDFLAAAKVFLASGKKVKVPTFLVPATQKVWLDIYSLPVPGSGGKTCSQIFEEAGCDTPASPNCGACLGGPRDTYARMNEPTVCVSTTNRNFPGRMGHKEGQIYLASPYTAAASALTGYVTDPRDFLM

SEQ ID NO: 103423 - DNA, 2715 bp, Zea mays; identical to SEQ ID NO: 67178
  CDS (1)..(2715)

SEQ ID NO: 103424 - protein, 904 aa, Zea mays; identical to SEQ ID NO: 67179

SEQ ID NO: 103425 - DNA, 21 bp, Artificial sequence
  primer
atggccggcaaaacgctctac

SEQ ID NO: 103426 - DNA, 20 bp, Artificial sequence
  primer
tcaggcctggagcaattggc

SEQ ID NO: 103427 - protein, 589 aa, Artificial sequence
  consensus sequence
  Variant (2)..(4): Xaa in position 2 to 4 is any amino acid
  Variant (6)..(9): Xaa in position 6 to 9 is any amino acid
  Variant (11)..(23): Xaa in position 11 to 23 is any amino acid
  Variant (24)..(39): Xaa in position 24 to 39 is any or no amino acid
  Variant (41)..(44): Xaa in position 41 to 44 is any amino acid
  Variant (46)..(46): Xaa in position 46 is any amino acid
  Variant (49)..(49): Xaa in position 49 is any amino acid
  Variant (51)..(51): Xaa in position 51 is any amino acid
  Variant (53)..(65): Xaa in position 53 to 65 is any amino acid
  Variant (66)..(89): Xaa in position 66 to 89 is any or no amino acid
  Variant (92)..(92): Xaa in position 92 is any amino acid
  Variant (93)..(94): Xaa in position 93 to 94 is any or no amino acid
  Variant (96)..(106): Xaa in position 96 to 106 is any amino acid
  Variant (107)..(123): Xaa in position 107 to 123 is any or no amino acid
  Variant (125)..(140): Xaa in position 125 to 140 is any amino acid
  Variant (141)..(152): Xaa in position 141 to 152 is any or no amino acid
  Variant (154)..(155): Xaa in position 154 to 155 is any amino acid
  Variant (157)..(160): Xaa in position 157 to 160 is any amino acid
  Variant (162)..(162): Xaa in position 162 is any amino acid
  Variant (164)..(165): Xaa in position 164 to 165 is any amino acid
  Variant (166)..(178): Xaa in position 166 to 178 is any or no amino acid
  Variant (181)..(186): Xaa in position 181 to 186 is any amino acid
  Variant (191)..(191): Xaa in position 191 is any amino acid
  Variant (193)..(193): Xaa in position 193 is any amino acid
  Variant (196)..(196): Xaa in position 196 is any amino acid
  Variant (198)..(199): Xaa in position 198 to 199 is any amino acid
  Variant (201)..(201): Xaa in position 201 is any amino acid
  Variant (205)..(210): Xaa in position 205 to 210 is any amino acid
  Variant (212)..(212): Xaa in position 212 is any amino acid
  Variant (215)..(230): Xaa in position 215 to 230 is any amino acid
  Variant (232)..(239): Xaa in position 232 to 239 is any amino acid
  Variant (240)..(240): Xaa in position 240 is any or no amino acid
  Variant (243)..(244): Xaa in position 243 to 244 is any amino acid
  Variant (246)..(247): Xaa in position 246 to 247 is any amino acid
  Variant (249)..(254): Xaa in position 249 to 254 is any amino acid
  Variant (256)..(261): Xaa in position 256 to 261 is any amino acid
  Variant (263)..(264): Xaa in position 263 to 264 is any amino acid
  Variant (266)..(269): Xaa in position 266 to 269 is any amino acid
  Variant (270)..(272): Xaa in position 270 to 272 is any or no amino acid
  Variant (274)..(275): Xaa in position 274 to 275 is any amino acid
  Variant (277)..(277): Xaa in position 277 is any amino acid
  Variant (281)..(281): Xaa in position 281 is any amino acid
  Variant (285)..(285): Xaa in position 285 is any amino acid
  Variant (288)..(288): Xaa in position 288 is any amino acid
  Variant (291)..(292): Xaa in position 291 to 292 is any amino acid
  Variant (294)..(297): Xaa in position 294 to 297 is any amino acid
  Variant (299)..(300): Xaa in position 299 to 300 is any amino acid
  Variant (302)..(303): Xaa in position 302 to 303 is any amino acid
  Variant (305)..(315): Xaa in position 305 to 315 is any amino acid
  Variant (316)..(344): Xaa in position 316 to 344 is any or no amino acid
  Variant (346)..(346): Xaa in position 346 is any amino acid
  Variant (347)..(347): Xaa in position 347 is any or no amino acid
  Variant (349)..(361): Xaa in position 349 to 361 is any amino acid
  Variant (362)..(362): Xaa in position 362 is any or no amino acid
  Variant (364)..(364): Xaa in position 364 is any amino acid
  Variant (366)..(370): Xaa in position 366 to 370 is any amino acid
  Variant (372)..(388): Xaa in position 372 to 388 is any amino acid
  Variant (389)..(428): Xaa in position 389 to 428 is any or no amino acid
  Variant (435)..(435): Xaa in position 435 is any amino acid
  Variant (437)..(438): Xaa in position 437 to 438 is any amino acid
  Variant (440)..(442): Xaa in position 440 to 442 is any amino acid
  Variant (445)..(460): Xaa in position 445 to 460 is any amino acid
  Variant (461)..(471): Xaa in position 461 to 471 is any or no amino acid
  Variant (473)..(479): Xaa in position 473 to 479 is any amino acid
  Variant (480)..(487): Xaa in position 480 to 487 is any or no amino acid
  Variant (489)..(489): Xaa in position 489 is any amino acid
  Variant (490)..(491): Xaa in position 490 to 491 is any or no amino acid
  Variant (493)..(496): Xaa in position 493 to 496 is any amino acid
  Variant (498)..(499): Xaa in position 498 to 499 is any amino acid
  Variant (502)..(508): Xaa in position 502 to 508 is any amino acid
  Variant (509)..(509): Xaa in position 509 is any or no amino acid
  Variant (511)..(512): Xaa in position 511 to 512 is any amino acid
  Variant (515)..(518): Xaa in position 515 to 518 is any amino acid
  Variant (520)..(527): Xaa in position 520 to 527 is any amino acid
  Variant (528)..(555): Xaa in position 528 to 555 is any or no amino acid
  Variant (558)..(558): Xaa in position 558 is any amino acid
  Variant (563)..(563): Xaa in position 563 is any amino acid
  Variant (566)..(566): Xaa in position 566 is any amino acid
  Variant (567)..(567): Xaa in position 567 is any or no amino acid
  Variant (569)..(574): Xaa in position 569 to 574 is any amino acid
  Variant (575)..(575): Xaa in position 575 is any or no amino acid
  Variant (577)..(577): Xaa in position 577 is any amino acid
  Variant (580)..(581): Xaa in position 580 to 581 is any amino acid
  Variant (585)..(585): Xaa in position 585 is any amino acid
  Variant (587)..(588): Xaa in position 587 to 588 is any amino acid
TXXXKXXXXHXXXXXXXXXXXXXXXXXXXXXXXXXXXXXDXXXXHXVTXPXAXXXXXXXXXXXXXXXXXXXXXXXXXXXXXXXXXXXXXDHXXXTXXXXXXXXXXXXXXXXXXXXXXXXXXXXLXXXXXXXXXXXXXXXXXXXXXXXXXXXXGXXHXXXXEXGXXXXXXXXXXXXXXXPGXXXXXXDSHTXTXGAXGXXAXGIGXXXXXXVXATXXXXXXXXXXXXXXXXGXXXXXXXXXKDXXLXXIXXXXXXGXXXXXXEXXGXXXXXXXLXXEXRMTXCNMXIEXGAXXGXXXXDXXTXXYXXXXXXXXXXXXXXXXXXXXXXXXXXXXXXXXXXXXXXXXDXXAXXXXXXXXXXXXXXPXVXXXXXPXXXXXXXXXXXXXXXXXXXXXXXXXXXXXXXXXXXXXXXXXXXXXXXXXXXXXXXXXIGSCTNXRXXDXXXAAXXXXXXXXXXXXXXXXXXXXXXXXXXXPXXXXXXXXXXXXXXXAXXXGXXXXFXXAGXXXXXXXXCXXCLXXXXDXXXXXXXXXXXXXXXXXXXXXXXXXXXXXXXXXXXXSTXNRNFXGRXXGXXXXXXXLXSPXXAAAXAXXG

SEQ ID NO: 103428 - protein, 12 aa, Artificial sequence
  protein pattern
  Variant (2)..(3): Xaa in position 2 to 3 is Ser or Thr
  Variant (8)..(8): Xaa in position 8 is any amino acid
  Variant (11)..(11): Xaa in position 11 is any amino acid
SXXNRNFXGRXG

SEQ ID NO: 103429 - protein, 12 aa, Artificial sequence
  protein pattern
  Variant (2)..(2): Xaa in position 2 is Ala, Glu, Gly, Gln or Ser
  Variant (3)..(3): Xaa in position 3 is Arg or Ser
  Variant (4)..(4): Xaa in position 4 is Phe, Leu or Met
  Variant (5)..(5): Xaa in position 5 is Ser or Thr
  Variant (6)..(6): Xaa in position 6 is Ile, Leu, Met or Val
  Variant (7)..(7): Xaa in position 7 is Ala, Cys, Ser or Thr
  Variant (10)..(10): Xaa in position 10 is Ala, Ser, Thr or Val
  Variant (11)..(11): Xaa in position 11 is Ile or Val
EXXXXXXNMXXE

SEQ ID NO: 103430 - protein, 13 aa, Artificial sequence
  protein pattern
  Variant (2)..(2): Xaa in position 2 is any or no amino acid
  Variant (7)..(7): Xaa in position 7 is Ala, Cys or Ser
  Variant (9)..(9): Xaa in position 9 is any amino acid
  Variant (12)..(12): Xaa in position 12 is Phe, Leu or Met
  Variant (13)..(13): Xaa in position 13 is Ala, Gly or Thr
GXDSHTXTXGAXX

SEQ ID NO: 103431 - protein, 21 aa, Artificial sequence
  protein pattern
  Variant (2)..(6): Xaa in position 2 to 6 is any or no amino acid
  Variant (11)..(11): Xaa in position 11 is Gly or Asn
  Variant (12)..(12): Xaa in position 12 is Ala, Gly or Ser
  Variant (13)..(15): Xaa in position 13 to 15 is any amino acid
  Variant (17)..(17): Xaa in position 17 is Phe, Ile, Leu or Met
  Variant (18)..(19): Xaa in position 18 to 19 is any amino acid
IXXXXXGSCTXXXXXDXXXAA

SEQ ID NO: 103432 - protein, 21 aa, Artificial sequence
  protein pattern
  Variant (2)..(8): Xaa in position 2 to 8 is any amino acid
  Variant (9)..(9): Xaa in position 9 is Ala, Gly or Ser
  Variant (12)..(12): Xaa in position 12 is Phe, Ile, Leu, Met or Val
  Variant (13)..(13): Xaa in position 13 is any amino acid
  Variant (15)..(15): Xaa in position 15 is any amino acid
  Variant (16)..(16): Xaa in position 16 is any or no amino acid
  Variant (18)..(18): Xaa in position 18 is any amino acid
  Variant (19)..(20): Xaa in position 19 to 20 is any or no amino acid
GXXXXXXXXKDXXLXXIXXXG

SEQ ID NO: 103433 - DNA, 1530 bp, Zea mays; identical to SEQ ID NO: 8715
  CDS (1)..(1530)

SEQ ID NO: 103434 - protein, 509 aa, Zea mays; identical to SEQ ID NO: 8716

SEQ ID NO: 103435 - DNA, 1984 bp, Sorghum bicolor; identical to SEQ ID NO: 15538
  CDS (202)..(1710)

SEQ ID NO: 103436 - protein, 502 aa, Sorghum bicolor; identical to SEQ ID NO: 15539

SEQ ID NO: 103437 - DNA, 1875 bp, Triticum aestivum; identical to SEQ ID NO: 15546
  CDS (101)..(1630)

SEQ ID NO: 103438 - protein, 509 aa, Triticum aestivum; identical to SEQ ID NO: 15547

SEQ ID NO: 103439 - DNA, 1953 bp, Triticum aestivum; identical to SEQ ID NO: 15548
  CDS (152)..(1693)

SEQ ID NO: 103440 - protein, 513 aa, Triticum aestivum; identical to SEQ ID NO: 15549

SEQ ID NO: 103441 - DNA, 1883 bp, Brassica napus; identical to SEQ ID NO: 15560
  CDS (119)..(1651)

SEQ ID NO: 103442 - protein, 510 aa, Brassica napus; identical to SEQ ID NO: 8816

SEQ ID NO: 103443 - DNA, 1903 bp, Brassica napus; identical to SEQ ID NO: 16301
  CDS (122)..(1618)

SEQ ID NO: 103444 - protein, 498 aa, Brassica napus; identical to SEQ ID NO: 8854

SEQ ID NO: 103445 - DNA, 2063 bp, Glycine max; identical to SEQ ID NO: 15566
  CDS (192)..(1700)

SEQ ID NO: 103446 - protein, 502 aa, Glycine max; identical to SEQ ID NO: 8880

SEQ ID NO: 103447 - DNA, 2067 bp, Triticum aestivum; identical to SEQ ID NO: 15570
  CDS (115)..(1659)

SEQ ID NO: 103448 - protein, 514 aa, Triticum aestivum; identical to SEQ ID NO: 8828

SEQ ID NO: 103449 - DNA, 1825 bp, Helianthus annuus; identical to SEQ ID NO: 15574
  CDS (128)..(1624)

SEQ ID NO: 103450 - protein, 498 aa, Helianthus annuus; identical to SEQ ID NO: 8834

SEQ ID NO: 103451 - DNA, 2075 bp, Zea mays; identical to SEQ ID NO: 15576
  CDS (198)..(1739)

SEQ ID NO: 103452 - protein, 513 aa, Zea mays; identical to SEQ ID NO: 8894

SEQ ID NO: 103453 - DNA, 1413 bp, Klebsiella pneumoniae subsp. pneumoniae MGH 78578; identical to SEQ ID NO: 15584
  CDS (1)..(1413): transl_table=11

SEQ ID NO: 103454 - protein, 470 aa, Klebsiella pneumoniae subsp. pneumoniae MGH 78578; identical to SEQ ID NO: 15585

SEQ ID NO: 103455 - DNA, 1533 bp, Arabidopsis thaliana; identical to SEQ ID NO: 8391
  CDS (1)..(1533)

SEQ ID NO: 103456 - protein, 510 aa, Arabidopsis thaliana; identical to SEQ ID NO: 8392

SEQ ID NO: 103457 - DNA, 1494 bp, Arabidopsis thaliana; identical to SEQ ID NO: 8393
  CDS (1)..(1494)

SEQ ID NO: 103458 - protein, 497 aa, Arabidopsis thaliana; identical to SEQ ID NO: 8394

SEQ ID NO: 103459 - DNA, 1533 bp, Arabidopsis thaliana; identical to SEQ ID NO: 8395
  CDS (1)..(1533)

SEQ ID NO: 103460 - protein, 510 aa, Arabidopsis thaliana; identical to SEQ ID NO: 8396

SEQ ID NO: 103461 - DNA, 1479 bp, Arabidopsis thaliana; identical to SEQ ID NO: 8397
  CDS (1)..(1479)

SEQ ID NO: 103462 - protein, 492 aa, Arabidopsis thaliana; identical to SEQ ID NO: 8398

SEQ ID NO: 103463 - DNA, 1533 bp, Arabidopsis thaliana; identical to SEQ ID NO: 8399
  CDS (1)..(1533)

SEQ ID NO: 103464 - protein, 510 aa, Arabidopsis thaliana; identical to SEQ ID NO: 8400

SEQ ID NO: 103465 - DNA, 1740 bp, Arabidopsis thaliana; identical to SEQ ID NO: 8401
  CDS (1)..(1740)

SEQ ID NO: 103466 - protein, 579 aa, Arabidopsis thaliana; identical to SEQ ID NO: 8402

SEQ ID NO: 103467 - DNA, 1497 bp, Arabidopsis thaliana; identical to SEQ ID NO: 8403
  CDS (1)..(1497)

SEQ ID NO: 103468 - protein, 498 aa, Arabidopsis thaliana; identical to SEQ ID NO: 8404

SEQ ID NO: 103469 - DNA, 1533 bp, Arabidopsis thaliana; identical to SEQ ID NO: 8405
  CDS (1)..(1533)

SEQ ID NO: 103470 - protein, 510 aa, Arabidopsis thaliana; identical to SEQ ID NO: 8406

SEQ ID NO: 103471 - DNA, 1413 bp, Vibrio cholerae O1 biovar eltor str. N16961; identical to SEQ ID NO: 15602
  CDS (1)..(1413): transl_table=11

SEQ ID NO: 103472 - protein, 470 aa, Vibrio cholerae O1 biovar eltor str. N16961; identical to SEQ ID NO: 15603

SEQ ID NO: 103473 - DNA, 1755 bp, Bacillus halodurans C-125; identical to SEQ ID NO: 15604
  CDS (1)..(1755): transl_table=11

SEQ ID NO: 103474 - protein, 584 aa, Bacillus halodurans C-125; identical to SEQ ID NO: 15605

SEQ ID NO: 103475 - DNA, 1434 bp, Pseudomonas aeruginosa PAO1; identical to SEQ ID NO: 15608
  CDS (1)..(1434): transl_table=11

SEQ ID NO: 103476 - protein, 477 aa, Pseudomonas aeruginosa PAO1; identical to SEQ ID NO: 15609

SEQ ID NO: 103477 - DNA, 1473 bp, Neisseria meningitidis MC58; identical to SEQ ID NO: 26460
  CDS (1)..(1473): transl_table=11

SEQ ID NO: 103478 - protein, 490 aa, Neisseria meningitidis MC58; identical to SEQ ID NO: 26461

SEQ ID NO: 103479 - DNA, 1740 bp, Halobacterium sp. NRC-1; identical to SEQ ID NO: 8411
  CDS (1)..(1740): transl_table=11

SEQ ID NO: 103480 - protein, 579 aa, Halobacterium sp. NRC-1; identical to SEQ ID NO: 8412

SEQ ID NO: 103481 - DNA, 1443 bp, Escherichia coli O157:H7 EDL933; identical to SEQ ID NO: 15614
  CDS (1)..(1443): transl_table=11
  misc_feature (850)..(850): r is g or a

SEQ ID NO: 103482 - protein, 480 aa, Escherichia coli O157:H7 EDL933; identical to SEQ ID NO: 15615
  misc_feature (284)..(284): The Xaa at location 284 stands for Ala, or Thr.

SEQ ID NO: 103483 - DNA, 1428 bp, Mycoplasma pulmonis UAB CTIP
  CDS (1)..(1428): transl_table=4
atgtattcgataaaaaagaaatcaaaactaattgctacaattggaccttcttctgataactatgaagttttaaaagagttagtagaaaatggagtaacttgtgtaagggctaatttttcacatggagactatcaagaacaaaaaagaaaatttgatcttgccaaaaaagtaagccatgatttaaacacccccctttcattaatgttagatactaaaggacctgaaattagaattgggaaaatgaaagatggagttcaaaaaattgaggccaatcaaagtttaaaaatttgagtctcagaagaaaaatataaaaatttattaggaacctcagaagatattagcgtttcttataatatgtctcaagatttaaaaaagggcaatcaagttcttcttgatgatggaaaattagatactattgtagaaaaagtaacccctgagtatgttcaagtaagagcacttaattctcataatttaaaaacaaacaaaagaattaatcttcccggagtggctttttcacttccttttctaagtgaaaaagataaaaaagatatagcctttggagttgaaaatgatattaactatgttgcagcttcatttgttaattccaaagaaaatgtattagaacttagagctattttaaaatcactaaacgcagagcatgttcaaattatttcaaaaattgaatcaactttaggaattgaaaacattgatgaaataattgaacactcagatggaattatgatagcaagaggagatttaggtcttgagattccttattatgaagttccttattgacaaaaaacaattattagaaaatgtagaaatgtaggcaaagttgtaatagttgcaactcaaatgcttgatagtatggaacacaatactaatccaacaagagccgaagtcactgatgtttattttgcaactgagctaggcgctgatacaacaatgctctcaggagagacagctcaaggatcttttccagttgaagctgttaaggttatgtcaaaaattaaccaaagagctgaaaaagagttttatagcaaactttactataacgctcaacttgaatcaaatgcaaaattagccactaccaaaagagctaaaattgcctatgaagttgcaaaacagactcaatctggagattttaaatatacagtagtgctttcagctagtggtaatttattaaaaaaagtagctaactttagacctaatacttcaattatcggctttgttgaagacaaaaaactaattaatgcttttggaattgtctcttcagtgtttgtctctcttgagtctgttcaaaaatattttgaactaaaaaataatcctttagctgcaattagcacccttaaaaactatgatgctaggccaggggatagattcttaattgttcataatgaaaaaattacccaacacgttgttgagtaa

SEQ ID NO: 103484 - protein, 475 aa, Mycoplasma pulmonis UAB CTIP
MYSIKKKSKLIATIGPSSDNYEVLKELVENGVTCVRANFSHGDYQEQKRKFDLAKKVSHDLNTPLSLMLDTKGPEIRIGKMKDGVQKIEANQSLKIWVSEEKYKNLLGTSEDISVSYNMSQDLKKGNQVLLDDGKLDTIVEKVTPEYVQVRALNSHNLKTNKRINLPGVAFSLPFLSEKDKKDIAFGVENDINYVAASFVNSKENVLELRAILKSLNAEHVQIISKIESTLGIENIDEIIEHSDGIMIARGDLGLEIPYYEVPYWQKTIIRKCRNVGKVVIVATQMLDSMEHNTNPTRAEVTDVYFATELGADTTMLSGETAQGSFPVEAVKVMSKINQRAEKEFYSKLYYNAQLESNAKLATTKRAKIAYEVAKQTQSGDFKYTVVLSASGNLLKKVANFRPNTSIIGFVEDKKLINAFGIVSSVFVSLESVQKYFELKNNPLAAISTLKNYDARPGDRFLIVHNEKITQHVVE

SEQ ID NO: 103485 - DNA, 1440 bp, Agrobacterium tumefaciens str. C58; identical to SEQ ID NO: 8419
  CDS (1)..(1440): transl_table=11

SEQ ID NO: 103486 - protein, 479 aa, Agrobacterium tumefaciens str. C58; identical to SEQ ID NO: 8420

SEQ ID NO: 103487 - DNA, 1431 bp, Caulobacter crescentus CB15; identical to SEQ ID NO: 8423
  CDS (1)..(1431): transl_table=11

SEQ ID NO: 103488 - protein, 476 aa, Caulobacter crescentus CB15; identical to SEQ ID NO: 8424

SEQ ID NO: 103489 - DNA, 1758 bp, Listeria monocytogenes EGD-e; identical to SEQ ID NO: 8425
  CDS (1)..(1758): transl_table=11

SEQ ID NO: 103490 - protein, 585 aa, Listeria monocytogenes EGD-e; identical to SEQ ID NO: 8426

SEQ ID NO: 103491 - DNA, 1431 bp, Nostoc sp. PCC 7120; identical to SEQ ID NO: 15630
  CDS (1)..(1431): transl_table=11

SEQ ID NO: 103492 - protein, 476 aa, Nostoc sp. PCC 7120; identical to SEQ ID NO: 15631

SEQ ID NO: 103493 - DNA, 1437 bp, Brucella melitensis 16M; identical to SEQ ID NO: 8429
  CDS (1)..(1437): transl_table=11

SEQ ID NO: 103494 - protein, 478 aa, Brucella melitensis 16M; identical to SEQ ID NO: 8430

SEQ ID NO: 103495 - DNA, 1716 bp, Arabidopsis thaliana; identical to SEQ ID NO: 8433
  CDS (1)..(1716)

SEQ ID NO: 103496 - protein, 571 aa, Arabidopsis thaliana; identical to SEQ ID NO: 8434

SEQ ID NO: 103497 - DNA, 1584 bp, Arabidopsis thaliana; identical to SEQ ID NO: 8435
  CDS (1)..(1584)

SEQ ID NO: 103498 - protein, 527 aa, Arabidopsis thaliana; identical to SEQ ID NO: 8436

SEQ ID NO: 103499 - DNA, 1791 bp, Arabidopsis thaliana; identical to SEQ ID NO: 8437
  CDS (1)..(1791)

SEQ ID NO: 103500 - protein, 596 aa, Arabidopsis thaliana; identical to SEQ ID NO: 8438

SEQ ID NO: 103501 - DNA, 1584 bp, Arabidopsis thaliana; identical to SEQ ID NO: 8439
  CDS (1)..(1584)

SEQ ID NO: 103502 - protein, 527 aa, Arabidopsis thaliana; identical to SEQ ID NO: 8440

SEQ ID NO: 103503 - DNA, 1434 bp, Pyrococcus furiosus DSM 3638; identical to SEQ ID NO: 8441
  CDS (1)..(1434): transl_table=11

SEQ ID NO: 103504 - protein, 477 aa, Pyrococcus furiosus DSM 3638; identical to SEQ ID NO: 8442

SEQ ID NO: 103505 - DNA, 1428 bp, Fusobacterium nucleatum subsp. nucleatum ATCC 25586; identical to SEQ ID NO: 8443
  CDS (1)..(1428): transl_table=11

SEQ ID NO: 103506 - protein, 475 aa, Fusobacterium nucleatum subsp. nucleatum ATCC 25586; identical to SEQ ID NO: 8444

SEQ ID NO: 103507 - DNA, 1665 bp, Drosophila melanogaster; identical to SEQ ID NO: 15642
  CDS (1)..(1665)

SEQ ID NO: 103508 - protein, 554 aa, Drosophila melanogaster; identical to SEQ ID NO: 15643

SEQ ID NO: 103509 - DNA, 1752 bp, Thermoanaerobacter tengcongensis MB4; identical to SEQ ID NO: 8445
  CDS (1)..(1752): transl_table=11

SEQ ID NO: 103510 - protein, 583 aa, Thermoanaerobacter tengcongensis MB4; identical to SEQ ID NO: 8446

SEQ ID NO: 103511 - DNA, 1437 bp, Streptomyces coelicolor A3(2); identical to SEQ ID NO: 8447
  CDS (1)..(1437): transl_table=11

SEQ ID NO: 103512 - protein, 478 aa, Streptomyces coelicolor A3(2); identical to SEQ ID NO: 8448

SEQ ID NO: 103513 - DNA, 1431 bp, Streptomyces coelicolor A3(2); identical to SEQ ID NO: 8449
  CDS (1)..(1431): transl_table=11

SEQ ID NO: 103514 - protein, 476 aa, Streptomyces coelicolor A3(2); identical to SEQ ID NO: 8450

SEQ ID NO: 103515 - DNA, 1527 bp, Xanthomonas campestris pv. campestris str. ATCC 33913; identical to SEQ ID NO: 15652
  CDS (1)..(1527): transl_table=11

SEQ ID NO: 103516 - protein, 508 aa, Xanthomonas campestris pv. campestris str. ATCC 33913; identical to SEQ ID NO: 15653

SEQ ID NO: 103517 - DNA, 1785 bp, Thermosynechococcus elongatus BP-1; identical to SEQ ID NO: 8455
  CDS (1)..(1785): transl_table=11

SEQ ID NO: 103518 - protein, 594 aa, Thermosynechococcus elongatus BP-1; identical to SEQ ID NO: 8456

SEQ ID NO: 103519 - DNA, 1761 bp, Oceanobacillus iheyensis HTE831; identical to SEQ ID NO: 8457
  CDS (1)..(1761): transl_table=11

SEQ ID NO: 103520 - protein, 586 aa, Oceanobacillus iheyensis HTE831; identical to SEQ ID NO: 8458

SEQ ID NO: 103521 - DNA, 1413 bp, Shigella flexneri 2a str. 301; identical to SEQ ID NO: 15660
  CDS (1)..(1413): transl_table=11

SEQ ID NO: 103522 - protein, 470 aa, Shigella flexneri 2a str. 301; identical to SEQ ID NO: 15661

SEQ ID NO: 103523 - DNA, 1440 bp, Shewanella oneidensis MR-1; identical to SEQ ID NO: 8371
  CDS (1)..(1440): transl_table=11

SEQ ID NO: 103524 - protein, 479 aa, Shewanella oneidensis MR-1; identical to SEQ ID NO: 8372

SEQ ID NO: 103525 - DNA, 1539 bp, Drosophila melanogaster; identical to SEQ ID NO: 15666
  CDS (1)..(1539)

SEQ ID NO: 103526 - protein, 512 aa, Drosophila melanogaster; identical to SEQ ID NO: 15667

SEQ ID NO: 103527 - DNA, 1455 bp, Pseudomonas putida KT2440; identical to SEQ ID NO: 15668
  CDS (1)..(1455): transl_table=11

SEQ ID NO: 103528 - protein, 484 aa, Pseudomonas putida KT2440; identical to SEQ ID NO: 15669

SEQ ID NO: 103529 - DNA, 1416 bp, Pseudomonas putida KT2440; identical to SEQ ID NO: 15670
  CDS (1)..(1416): transl_table=11

SEQ ID NO: 103530 - protein, 471 aa, Pseudomonas putida KT2440; identical to SEQ ID NO: 15671

SEQ ID NO: 103531 - DNA, 1629 bp, Escherichia coli CFT073; identical to SEQ ID NO: 15672
  CDS (1)..(1629): transl_table=11

SEQ ID NO: 103532 - protein, 542 aa, Escherichia coli CFT073; identical to SEQ ID NO: 15673

SEQ ID NO: 103533 - DNA, 1413 bp, Vibrio vulnificus CMCP6; identical to SEQ ID NO: 15674
  CDS (1)..(1413): transl_table=11

SEQ ID NO: 103534 - protein, 470 aa, Vibrio vulnificus CMCP6; identical to SEQ ID NO: 15675

SEQ ID NO: 103535 - DNA, 1413 bp, Vibrio parahaemolyticus RIMD 2210633; identical to SEQ ID NO: 15682
  CDS (1)..(1413): transl_table=11

SEQ ID NO: 103536 - protein, 470 aa, Vibrio parahaemolyticus RIMD 2210633; identical to SEQ ID NO: 15683

SEQ ID NO: 103537 - DNA, 1758 bp, Enterococcus faecalis V583; identical to SEQ ID NO: 8473
  CDS (1)..(1758): transl_table=11

SEQ ID NO: 103538 - protein, 585 aa, Enterococcus faecalis V583; identical to SEQ ID NO: 8474

SEQ ID NO: 103539 - DNA, 1434 bp, Coxiella burnetii RSA 493; identical to SEQ ID NO: 8475
  CDS (1)..(1434): transl_table=11

SEQ ID NO: 103540 - protein, 477 aa, Coxiella burnetii RSA 493; identical to SEQ ID NO: 8476

SEQ ID NO: 103541 - DNA, 1431 bp, Streptomyces avermitilis MA-4680; identical to SEQ ID NO: 8477
  CDS (1)..(1431): transl_table=11

SEQ ID NO: 103542 - protein, 476 aa, Streptomyces avermitilis MA-4680; identical to SEQ ID NO: 8478

SEQ ID NO: 103543 - DNA, 1446 bp, Chlamydophila caviae GPIC; identical to SEQ ID NO: 15688
  CDS (1)..(1446): transl_table=11

SEQ ID NO: 103544 - protein, 481 aa, Chlamydophila caviae GPIC; identical to SEQ ID NO: 15689

SEQ ID NO: 103545 - DNA, 1431 bp, Rhodopirellula baltica SH 1; identical to SEQ ID NO: 15692
  CDS (1)..(1431): transl_table=11

SEQ ID NO: 103546 - protein, 476 aa, Rhodopirellula baltica SH 1; identical to SEQ ID NO: 15693

SEQ ID NO: 103547 - DNA, 1443 bp, Bordetella bronchiseptica RB50; identical to SEQ ID NO: 8485
  CDS (1)..(1443): transl_table=11

SEQ ID NO: 103548 - protein, 480 aa, Bordetella bronchiseptica RB50; identical to SEQ ID NO: 8486

SEQ ID NO: 103549 - DNA, 1818 bp, Prochlorococcus marinus str. MIT 9313
  CDS (1)..(1818): transl_table=11
atggtagtttccgcgatgtttcaggtcccgttgatggcccagattgatctgacacgacggaccaaaattgttgccaccataggtccggcaaccgagagcgccgaacgaatccgagaactcgttgaggtaggtgctaccaccttccggctgaatttctcacacggcgaccatgacgagcacgccaagcgcatctccaccatccgtcaggtttctgatgaattgggaatgcacatcggcattcttcaagacttgcaaggccccaaaattcgcctgggtcgttttgataaggggcctatcactctggccaatggcgattccttcgcactgacctccaaacaagttcaatgcaatcagtcagtggcaaccgtcacttacgacaagcttgcagacgaagtcacgaccggcagccgaatcttgcttgatgacggtcgagtggagatgaaagtcttaaaaatcgatcaaagcgaacaaaccttgcactgcatcgtcacggtgggaggggtgctctcaaataacaagggagtgaatttccctgatgtacagctttcggttcgcgcccttacagagaaagatcgccaagatctcgcctttggcctccagcaaggggtggactgggtcgcactgagctttgtgcgaaacccttcggacatgaaagagatccgcaaactcatccgcgatcatgggcacagcaccccagtgatcgcgaagatcgagaaatttgaggcgattgatcaaatcgattcaatccttcctctctgtgatggagtcatggttgcaaggggggacttaggcgttgagatgccagccgaagaagtgcctctactgcaaaaggatttgattcgcaaggccaacagccttggaattccaatcatcacagccacccagatgctcgactcgatggcctcaagcccgaggcccaccagagcagaagtcagtgatgtagcaaatgcgatccttgatggtactgatgcagtgatgctctcgaacgaaaccgctgtaggagactatccagtggaggcggttcaaacgatggccaccattgccagacggattgaacgggactatccacagcgtccaatcgaaacttatctagccagcaccatttccaacgcgattagttcagccgtaagcagcatcgccagtcatctcaacgcggcagcaatcgtgccactaactgaaagtggtgcaactgctcacaacgtcagtaaattccgcccagcagcgccaattttggccgtaaccaacaaattggctgtagcaagaaaacttcaattggcatggggtgttaccccactgcttgtcccaacccaaaaaagtaccactgcaaccttcagtgatgcaattgctgttgcccaggaattgggtcttctcaaagaaggagatctaacaattcaaactgcaggaacccttgctggcgtgagcgggtccacagatcttgtcaaagtaggaattgtcagtgcagtacttggccaagggatcggtattggcaatggaaccgttagcggcaaggtcagatttgctttctccccaaacgactcaacaaaaattgaaccaggcgagattctggtcattcatgaaacaagcgatgactatctcgatgcaatcagaaagtctgcaggagtgattacagaacaagaaggagaggaataccacgcagaaatgatctcaaaacgactagggattccgttcatcattgggatagcacatgccacgagaaacctgcttgaaggagaggtggtaacaatgcagctcagtaatggcaaagttcatcgcggcacaggcggcaagctgccaatgaagctcgactcaatggactga

SEQ ID NO: 103550 - protein, 605 aa, Prochlorococcus marinus str. MIT 9313
MVVSAMFQVPLMAQIDLTRRTKIVATIGPATESAERIRELVEVGATTFRLNFSHGDHDEHAKRISTIRQVSDELGMHIGILQDLQGPKIRLGRFDKGPITLANGDSFALTSKQVQCNQSVATVTYDKLADEVTTGSRILLDDGRVEMKVLKIDQSEQTLHCIVTVGGVLSNNKGVNFPDVQLSVRALTEKDRQDLAFGLQQGVDWVALSFVRNPSDMKEIRKLIRDHGHSTPVIAKIEKFEAIDQIDSILPLCDGVMVARGDLGVEMPAEEVPLLQKDLIRKANSLGIPIITATQMLDSMASSPRPTRAEVSDVANAILDGTDAVMLSNETAVGDYPVEAVQTMATIARRIERDYPQRPIETYLASTISNAISSAVSSIASHLNAAAIVPLTESGATAHNVSKFRPAAPILAVTNKLAVARKLQLAWGVTPLLVPTQKSTTATFSDAIAVAQELGLLKEGDLTIQTAGTLAGVSGSTDLVKVGIVSAVLGQGIGIGNGTVSGKVRFAFSPNDSTKIEPGEILVIHETSDDYLDAIRKSAGVITEQEGEEYHAEMISKRLGIPFIIGIAHATRNLLEGEVVTMQLSNGKVHRGTGGKLPMKLDSMD

SEQ ID NO: 103551 - DNA, 1455 bp, Synechococcus sp. WH 8102; identical to SEQ ID NO: 96220
  CDS (1)..(1455): transl_table=11

SEQ ID NO: 103552 - protein, 484 aa, Synechococcus sp. WH 8102; identical to SEQ ID NO: 96221

SEQ ID NO: 103553 - DNA, 1818 bp, Gloeobacter violaceus PCC 7421; identical to SEQ ID NO: 8487
  CDS (1)..(1818): transl_table=11

SEQ ID NO: 103554 - protein, 605 aa, Gloeobacter violaceus PCC 7421; identical to SEQ ID NO: 8488

SEQ ID NO: 103555 - DNA, 1410 bp, Photorhabdus luminescens subsp. laumondii TTO1; identical to SEQ ID NO: 15702
  CDS (1)..(1410): transl_table=11

SEQ ID NO: 103556 - protein, 469 aa, Photorhabdus luminescens subsp. laumondii TTO1; identical to SEQ ID NO: 15703

SEQ ID NO: 103557 - DNA, 1488 bp, Vibrio vulnificus YJ016; identical to SEQ ID NO: 15704
  CDS (1)..(1488): transl_table=11

SEQ ID NO: 103558 - protein, 495 aa, Vibrio vulnificus YJ016; identical to SEQ ID NO: 15705

SEQ ID NO: 103559 - DNA, 1341 bp, Onion yellows phytoplasma OY-M; identical to SEQ ID NO: 15706
  CDS (1)..(1341): transl_table=11

SEQ ID NO: 103560 - protein, 446 aa, Onion yellows phytoplasma OY-M; identical to SEQ ID NO: 15707

SEQ ID NO: 103561 - DNA, 1770 bp, Lactobacillus johnsonii NCC 533; identical to SEQ ID NO: 15708
  CDS (1)..(1770): transl_table=11

SEQ ID NO: 103562 - protein, 589 aa, Lactobacillus johnsonii NCC 533; identical to SEQ ID NO: 15709

SEQ ID NO: 103563 - DNA, 1758 bp, Bacillus cereus ATCC 10987; identical to SEQ ID NO: 15714
  CDS (1)..(1758): transl_table=11

SEQ ID NO: 103564 - protein, 585 aa, Bacillus cereus ATCC 10987; identical to SEQ ID NO: 15715

SEQ ID NO: 103565 - DNA, 1656 bp, Nasonia vitripennis; identical to SEQ ID NO: 15718
  CDS (1)..(1656)

SEQ ID NO: 103566 - protein, 551 aa, Nasonia vitripennis; identical to SEQ ID NO: 15719

SEQ ID NO: 103567 - DNA, 1587 bp, Magnaporthe grisea 70-15; identical to SEQ ID NO: 8497
  CDS (1)..(1587)

SEQ ID NO: 103568 - protein, 528 aa, Magnaporthe grisea 70-15; identical to SEQ ID NO: 8498

SEQ ID NO: 103569 - DNA, 1623 bp, Gibberella zeae PH-1; identical to SEQ ID NO: 8499
  CDS (1)..(1623)

SEQ ID NO: 103570 - protein, 540 aa, Gibberella zeae PH-1; identical to SEQ ID NO: 8500

SEQ ID NO: 103571 - DNA, 1554 bp, Apis mellifera; identical to SEQ ID NO: 15722
  CDS (1)..(1554)

SEQ ID NO: 103572 - protein, 517 aa, Apis mellifera; identical to SEQ ID NO: 15723

SEQ ID NO: 103573 - DNA, 1515 bp, Candida albicans SC5314; identical to SEQ ID NO: 8501
  CDS (1)..(1515): transl_table=12

SEQ ID NO: 103574 - protein, 504 aa, Candida albicans SC5314; identical to SEQ ID NO: 8502

SEQ ID NO: 103575 - DNA, 1587 bp, Ustilago maydis 521; identical to SEQ ID NO: 8503
  CDS (1)..(1587)

SEQ ID NO: 103576 - protein, 528 aa, Ustilago maydis 521; identical to SEQ ID NO: 8504

SEQ ID NO: 103577 - DNA, 1590 bp, Cryptococcus neoformans var. neoformans B-3501A; identical to SEQ ID NO: 15728
  CDS (1)..(1590)

SEQ ID NO: 103578 - protein, 529 aa, Cryptococcus neoformans var. neoformans B-3501A; identical to SEQ ID NO: 15729

SEQ ID NO: 103579 - DNA, 1719 bp, Cryptococcus neoformans var. neoformans B-3501A; identical to SEQ ID NO: 15730
  CDS (1)..(1719)

SEQ ID NO: 103580 - protein, 572 aa, Cryptococcus neoformans var. neoformans B-3501A; identical to SEQ ID NO: 15731

SEQ ID NO: 103581 - DNA, 1560 bp, Encephalitozoon cuniculi GB-M1; identical to SEQ ID NO: 15732
  CDS (1)..(1560)

SEQ ID NO: 103582 - protein, 519 aa, Encephalitozoon cuniculi GB-M1; identical to SEQ ID NO: 15733

SEQ ID NO: 103583 - DNA, 1539 bp, Tribolium castaneum; identical to SEQ ID NO: 15734
  CDS (1)..(1539)

SEQ ID NO: 103584 - protein, 512 aa, Tribolium castaneum; identical to SEQ ID NO: 15735

SEQ ID NO: 103585 - DNA, 1611 bp, Tribolium castaneum; identical to SEQ ID NO: 15736
  CDS (1)..(1611)

SEQ ID NO: 103586 - protein, 536 aa, Tribolium castaneum; identical to SEQ ID NO: 15737

SEQ ID NO: 103587 - DNA, 1608 bp, Tribolium castaneum
  CDS (1)..(1608)
atgggcgagaccacggtcgtccaaggcgtcggcaagtgccccaaactgccctggatggtggaattccactcaaccgccgacggaaaaatcttcaacaatcagctggacgcggcgttcgcgcccacgtttctggaacacttggcccgccttcaggagaaaagccgcgtgcggaggaagcgattgacccaattttcggtcataatcccgcccaggatttccatcgaacacatcgaggagttcctaaaggcgggaatgaccgtcgctttgatccgaatggactatttcaccgtggacgagatcgaggagatggtggcgatgatcaggaacgtggtggacgactttggcaaaaaaatcggacgggtctaccccattgccatcggcttggacgtctcggaacaggagatcaagaccgggaaactgctcaaaccactgaaagagattgaactggaaaaagggcaaaccaccaaaattgtggccaagcccgagttcgccaaccgggtcagcaaggagtttatttacgtcaattatgagaacattgccgatgttgtcaagcctggggatagtctgatcatcggtgatgataacattaggatgtcggcgattgaagttgccagggatattatcaattgtatcatcgagaaagctgggcttttaaccgacaatctctcggttaagttacccaacgttcccataactttacccaagactgaatcgcacgaaaagttgattcaaatcaaggaaaaatgcgaaattgatattgttttcgtgggaccgtctaaactggacatggttaaagaaactttaggccccactgtcctcattatcgccaaacttgagtacgcgtcctctgttgatttcttcgactctttggtgaaaaaatccgatggtgttataatcgacggcgagaaacttatggcaacgtccaaagaacgtgtttttttggtccaaaaatcagtcattgccaattgcaataaactgggcaagcctgtcctagcggcgatcaattgccacgcagtcaccaaatcgatagtcaacgacattgccaacaccgtaatcgacggaatcgacggcttgttgctacccccagaccccgacttaatcgagtccatttcactaatttgtaaagctgcagaaggtgccgtttaccagaaacgccttttcgatgacctggttagtctgaaaccgcctcccattgaaccaatcatctcaatagccatatcagccgtcgaagcttcgttcaaaagtaacgcggctgcgattattctgattacgacgacgggacgttcggcgaaattgatttcctccttcaggcccaggtgcccagtcatcgccctgaccaggttcgggcgcatcgccaaacagctcatgatctacaaaggcgtgatcccgattttctacgtccagaagacgggcgatacgttcaaggagaacgtggagaagagcatccagctggggatgacgtttggcaaagtgaacggctacatcaggatgggggacgcggtcgtggttgtgttcgggacgcggaataacgtggggttcaagaactgcatggaggtggtgttcgcgtctgaatacgacacgattcccgacgacgacgaagacttgtag

SEQ ID NO: 103588 - protein, 535 aa, Tribolium castaneum
MGETTVVQGVGKCPKLPWMVEFHSTADGKIFNNQLDAAFAPTFLEHLARLQEKSRVRRKRLTQFSVIIPPRISIEHIEEFLKAGMTVALIRMDYFTVDEIEEMVAMIRNVVDDFGKKIGRVYPIAIGLDVSEQEIKTGKLLKPLKEIELEKGQTTKIVAKPEFANRVSKEFIYVNYENIADVVKPGDSLIIGDDNIRMSAIEVARDIINCIIEKAGLLTDNLSVKLPNVPITLPKTESHEKLIQIKEKCEIDIVFVGPSKLDMVKETLGPTVLIIAKLEYASSVDFFDSLVKKSDGVIIDGEKLMATSKERVFLVQKSVIANCNKLGKPVLAAINCHAVTKSIVNDIANTVIDGIDGLLLPPDPDLIESISLICKAAEGAVYQKRLFDDLVSLKPPPIEPIISIAISAVEASFKSNAAAIILITTTGRSAKLISSFRPRCPVIALTRFGRIAKQLMIYKGVIPIFYVQKTGDTFKENVEKSIQLGMTFGKVNGYIRMGDAVVVVFGTRNNVGFKNCMEVVFASEYDTIPDDDEDL

SEQ ID NO: 103589 - DNA, 1674 bp, Tribolium castaneum; identical to SEQ ID NO: 15738
  CDS (1)..(1674)

SEQ ID NO: 103590 - protein, 557 aa, Tribolium castaneum; identical to SEQ ID NO: 15739

SEQ ID NO: 103591 - DNA, 1593 bp, Tribolium castaneum; identical to SEQ ID NO: 15740
  CDS (1)..(1593)

SEQ ID NO: 103592 - protein, 530 aa, Tribolium castaneum; identical to SEQ ID NO: 15741

SEQ ID NO: 103593 - DNA, 1761 bp, Clostridium difficile 630; identical to SEQ ID NO: 8505
  CDS (1)..(1761): transl_table=11

SEQ ID NO: 103594 - protein, 586 aa, Clostridium difficile 630; identical to SEQ ID NO: 8506

SEQ ID NO: 103595 - DNA, 1437 bp, Burkholderia vietnamiensis G4; identical to SEQ ID NO: 8509
  CDS (1)..(1437): transl_table=11

SEQ ID NO: 103596 - protein, 478 aa, Burkholderia vietnamiensis G4; identical to SEQ ID NO: 8510

SEQ ID NO: 103597 - DNA, 1455 bp, Dichelobacter nodosus VCS1703A; identical to SEQ ID NO: 8377
  CDS (1)..(1455): transl_table=11

SEQ ID NO: 103598 - protein, 484 aa, Dichelobacter nodosus VCS1703A; identical to SEQ ID NO: 8378

SEQ ID NO: 103599 - DNA, 1461 bp, Leptospira interrogans serovar Copenhageni str. Fiocruz L1-130; identical to SEQ ID NO: 70200
  CDS (1)..(1461): transl_table=11

SEQ ID NO: 103600 - protein, 486 aa, Leptospira interrogans serovar Copenhageni str. Fiocruz L1-130; identical to SEQ ID NO: 70201

SEQ ID NO: 103601 - DNA, 1425 bp, Thermus thermophilus HB27; identical to SEQ ID NO: 8511
  CDS (1)..(1425): transl_table=11

SEQ ID NO: 103602 - protein, 474 aa, Thermus thermophilus HB27; identical to SEQ ID NO: 8512

SEQ ID NO: 103603 - DNA, 1797 bp, Candidatus Protochlamydia amoebophila UWE25; identical to SEQ ID NO: 8513
  CDS (1)..(1797): transl_table=11

SEQ ID NO: 103604 - protein, 598 aa, Candidatus Protochlamydia amoebophila UWE25; identical to SEQ ID NO: 8514

SEQ ID NO: 103605 - DNA, 1413 bp, Erwinia carotovora subsp. atroseptica SCRI1043; identical to SEQ ID NO: 15756
  CDS (1)..(1413): transl_table=11

SEQ ID NO: 103606 - protein, 470 aa, Erwinia carotovora subsp. atroseptica SCRI1043; identical to SEQ ID NO: 15757

SEQ ID NO: 103607 - DNA, 1434 bp, Propionibacterium acnes KPA171202; identical to SEQ ID NO: 8521
  CDS (1)..(1434): transl_table=11

SEQ ID NO: 103608 - protein, 477 aa, Propionibacterium acnes KPA171202; identical to SEQ ID NO: 8522

SEQ ID NO: 103609 - DNA, 1467 bp, Leifsonia xyli subsp. xyli str. CTCB07; identical to SEQ ID NO: 8523
  CDS (1)..(1467): transl_table=11

SEQ ID NO: 103610 - protein, 488 aa, Leifsonia xyli subsp. xyli str. CTCB07; identical to SEQ ID NO: 8524

SEQ ID NO: 103611 - DNA, 1746 bp, Desulfotalea psychrophila LSv54; identical to SEQ ID NO: 8525
  CDS (1)..(1746): transl_table=11

SEQ ID NO: 103612 - protein, 581 aa, Desulfotalea psychrophila LSv54; identical to SEQ ID NO: 8526

SEQ ID NO: 103613 - DNA, 1755 bp, Symbiobacterium thermophilum IAM 14863; identical to SEQ ID NO: 8529
  CDS (1)..(1755): transl_table=11

SEQ ID NO: 103614 - protein, 584 aa, Symbiobacterium thermophilum IAM 14863; identical to SEQ ID NO: 8530

SEQ ID NO: 103615 - DNA, 1758 bp, Bacillus licheniformis ATCC 14580; identical to SEQ ID NO: 15768
  CDS (1)..(1758): transl_table=11

SEQ ID NO: 103616 - protein, 585 aa, Bacillus licheniformis ATCC 14580; identical to SEQ ID NO: 15769

SEQ ID NO: 103617 - DNA, 1581 bp, Mannheimia succiniciproducens MBEL55E; identical to SEQ ID NO: 8531
  CDS (1)..(1581): transl_table=11

SEQ ID NO: 103618 - protein, 526 aa, Mannheimia succiniciproducens MBEL55E; identical to SEQ ID NO: 8532

SEQ ID NO: 103619 - DNA, 1467 bp, Methylococcus capsulatus str. Bath; identical to SEQ ID NO: 8535
  CDS (1)..(1467): transl_table=11

SEQ ID NO: 103620 - protein, 488 aa, Methylococcus capsulatus str. Bath; identical to SEQ ID NO: 8536

SEQ ID NO: 103621 - DNA, 1446 bp, Silicibacter pomeroyi DSS-3; identical to SEQ ID NO: 16485
  CDS (1)..(1446): transl_table=11

SEQ ID NO: 103622 - protein, 481 aa, Silicibacter pomeroyi DSS-3; identical to SEQ ID NO: 16486

SEQ ID NO: 103623 - DNA, 1755 bp, Bacillus clausii KSM-K16; identical to SEQ ID NO: 8537
  CDS (1)..(1755): transl_table=11

SEQ ID NO: 103624 - protein, 584 aa, Bacillus clausii KSM-K16; identical to SEQ ID NO: 8538

SEQ ID NO: 103625 - DNA, 1434 bp, Corynebacterium glutamicum ATCC 13032; identical to SEQ ID NO: 8543
  CDS (1)..(1434): transl_table=11

SEQ ID NO: 103626 - protein, 477 aa, Corynebacterium glutamicum ATCC 13032; identical to SEQ ID NO: 8544

SEQ ID NO: 103627 - DNA, 1437 bp, Haemophilus influenzae 86-028NP; identical to SEQ ID NO: 8545
  CDS (1)..(1437): transl_table=11

SEQ ID NO: 103628 - protein, 478 aa, Haemophilus influenzae 86-028NP; identical to SEQ ID NO: 8546

SEQ ID NO: 103629 - DNA, 1452 bp, Colwellia psychrerythraea 34H; identical to SEQ ID NO: 8547
  CDS (1)..(1452): transl_table=11

SEQ ID NO: 103630 - protein, 483 aa, Colwellia psychrerythraea 34H; identical to SEQ ID NO: 8548

SEQ ID NO: 103631 - DNA, 1419 bp, Dechloromonas aromatica RCB
  CDS (1)..(1419): transl_table=11
atgcaccgtaaccgtaatgccaaaattgtcgccaccctcggcccagccagttctgatcgcgacacgatccagaagctttacttgaatggggccgatatctttcgtcttaacttcagccacggtacccatgaggatcacaaaagaagcctggaaaccatccgtgatgtcgagcgagaagccggtcgtccaattggcgtgctccttgatcttcagggcccaaagctgcgcctcggcaaatttgccaatggccccatcactttggccgaaggcgacaagttccgcctcgacctggactgtgacaggccgggcgatcaaacccgggcccccatgccgcacccggagattttcaaggcgctgagcgtacagtccagcctcctgattgacgatggccgcattcgcctgttcgtcgaaaaatgcgggcccgacttcgccgaaaccagagttgttgccgggggaacactatctgaccgcaagggcgtcaatgtccccggatcacttattccgatgtcggcaatgaccgacaaggatcgcgcggacctcgattttggtttaaccctgggagtagattgggttgcgctctcctttgtgcaacgagccgaggacatactggaaatcaagaaaatcatcgatggccgtgccggtgttatcgccaaactggagaagccagcggcaatcgagcgtctcgaggccatcgtcaatgtcagcgacgccatcatggttgctcgtggcgacctgggcgtcgaaatgccaccggaacaagtgccagcgattcaaaagcggatcattcgtgcctgcagaagcgccggcaagccggttattgtggcaacgcagatgcttgattccatggtcgctgcaccggtgccgacccgcgccgaagcatccgatgtagcaacagcgatctacgatggtgccgatgccgtcatgctttccgctgaatcggcctctggaaaatatccagttgcagcagtaaagatgatggacagcatcatcagcagaaccgagtccgatccctactatcgggtagccatcgacgcgtcacaaccaccggcacgggccaacaaggcggatgccatcggttctgctgtacgccatgtcgccgatctgctgcatattgccgtgaccgttgcctataccagttcgggcacgtctgcattgagcatggcgcgagaacgacccaaggccccgatcatcgccctgacgccacgactggccacggcccgtcgactgtctctggcctggggtttgcatgccgtcatgtgccatgacgttgtcgatgtgactgaaatgactgacctggcctgcgaaacggccagaaggcagcattttgcttcacgagggcaaagcgttgtgatctcggctggcatgcctttcggtaggtctggcacgaccaatttgctgcgcatcgccgaacttagctga

SEQ ID NO: 103632 - protein, 472 aa, Dechloromonas aromatica RCB
MHRNRNAKIVATLGPASSDRDTIQKLYLNGADIFRLNFSHGTHEDHKRSLETIRDVEREAGRPIGVLLDLQGPKLRLGKFANGPITLAEGDKFRLDLDCDRPGDQTRAPMPHPEIFKALSVQSSLLIDDGRIRLFVEKCGPDFAETRVVAGGTLSDRKGVNVPGSLIPMSAMTDKDRADLDFGLTLGVDWVALSFVQRAEDILEIKKIIDGRAGVIAKLEKPAAIERLEAIVNVSDAIMVARGDLGVEMPPEQVPAIQKRIIRACRSAGKPVIVATQMLDSMVAAPVPTRAEASDVATAIYDGADAVMLSAESASGKYPVAAVKMMDSIISRTESDPYYRVAIDASQPPARANKADAIGSAVRHVADLLHIAVTVAYTSSGTSALSMARERPKAPIIALTPRLATARRLSLAWGLHAVMCHDVVDVTEMTDLACETARRQHFASRGQSVVISAGMPFGRSGTTNLLRIAELS

SEQ ID NO: 103633 - DNA, 1458 bp, Prochlorococcus marinus str. NATL2A; identical to SEQ ID NO: 16501
  CDS (1)..(1458): transl_table=11

SEQ ID NO: 103634 - protein, 485 aa, Prochlorococcus marinus str. NATL2A; identical to SEQ ID NO: 16502

SEQ ID NO: 103635 - DNA, 1434 bp, Methanosarcina barkeri str. Fusaro; identical to SEQ ID NO: 8553
  CDS (1)..(1434): transl_table=11

SEQ ID NO: 103636 - protein, 477 aa, Methanosarcina barkeri str. Fusaro; identical to SEQ ID NO: 8554

SEQ ID NO: 103637 - DNA, 1434 bp, Thiobacillus denitrificans ATCC 25259; identical to SEQ ID NO: 8555
  CDS (1)..(1434): transl_table=11

SEQ ID NO: 103638 - protein, 477 aa, Thiobacillus denitrificans ATCC 25259; identical to SEQ ID NO: 8556

SEQ ID NO: 103639 - DNA, 1431 bp, Anabaena variabilis ATCC 29413; identical to SEQ ID NO: 15790
  CDS (1)..(1431): transl_table=11

SEQ ID NO: 103640 - protein, 476 aa, Anabaena variabilis ATCC 29413; identical to SEQ ID NO: 15791

SEQ ID NO: 103641 - DNA, 1446 bp, Rhodobacter sphaeroides 2.4.1; identical to SEQ ID NO: 8559
  CDS (1)..(1446): transl_table=11

SEQ ID NO: 103642 - protein, 481 aa, Rhodobacter sphaeroides 2.4.1; identical to SEQ ID NO: 8560

SEQ ID NO: 103643 - DNA, 1437 bp, Rhodospirillum rubrum ATCC 11170; identical to SEQ ID NO: 8567
  CDS (1)..(1437): transl_table=11

SEQ ID NO: 103644 - protein, 478 aa, Rhodospirillum rubrum ATCC 11170; identical to SEQ ID NO: 8568

SEQ ID NO: 103645 - DNA, 1749 bp, Moorella thermoacetica ATCC 39073; identical to SEQ ID NO: 8569
  CDS (1)..(1749): transl_table=11

SEQ ID NO: 103646 - protein, 582 aa, Moorella thermoacetica ATCC 39073; identical to SEQ ID NO: 8570

SEQ ID NO: 103647 - DNA, 1428 bp, Syntrophus aciditrophicus SB; identical to SEQ ID NO: 8571
  CDS (1)..(1428): transl_table=11

SEQ ID NO: 103648 - protein, 475 aa, Syntrophus aciditrophicus SB; identical to SEQ ID NO: 8572

SEQ ID NO: 103649 - DNA, 1455 bp, Novosphingobium aromaticivorans DSM 12444; identical to SEQ ID NO: 8575
  CDS (1)..(1455): transl_table=11

SEQ ID NO: 103650 - protein, 484 aa, Novosphingobium aromaticivorans DSM 12444; identical to SEQ ID NO: 8576

SEQ ID NO: 103651 - DNA, 1443 bp, Methylobacillus flagellatus KT; identical to SEQ ID NO: 8583
  CDS (1)..(1443): transl_table=11

SEQ ID NO: 103652 - protein, 480 aa, Methylobacillus flagellatus KT; identical to SEQ ID NO: 8584

SEQ ID NO: 103653 - DNA, 1437 bp, Burkholderia xenovorans LB400; identical to SEQ ID NO: 16531
  CDS (1)..(1437): transl_table=11

SEQ ID NO: 103654 - protein, 478 aa, Burkholderia xenovorans LB400; identical to SEQ ID NO: 16532

SEQ ID NO: 103655 - DNA, 1467 bp, Ralstonia metallidurans CH34; identical to SEQ ID NO: 16533
  CDS (1)..(1467): transl_table=11

SEQ ID NO: 103656 - protein, 488 aa, Ralstonia metallidurans CH34; identical to SEQ ID NO: 16534

SEQ ID NO: 103657 - DNA, 1530 bp, Acidobacteria bacterium Ellin345; identical to SEQ ID NO: 8587
  CDS (1)..(1530): transl_table=11

SEQ ID NO: 103658 - protein, 509 aa, Acidobacteria bacterium Ellin345; identical to SEQ ID NO: 8588

SEQ ID NO: 103659 - DNA, 1434 bp, Myxococcus xanthus DK 1622; identical to SEQ ID NO: 8591
  CDS (1)..(1434): transl_table=11

SEQ ID NO: 103660 - protein, 477 aa, Myxococcus xanthus DK 1622; identical to SEQ ID NO: 8592

SEQ ID NO: 103661 - DNA, 1413 bp, Cytophaga hutchinsonii ATCC 33406; identical to SEQ ID NO: 8597
  CDS (1)..(1413): transl_table=11

SEQ ID NO: 103662 - protein, 470 aa, Cytophaga hutchinsonii ATCC 33406; identical to SEQ ID NO: 8598

SEQ ID NO: 103663 - DNA, 1764 bp, Trichodesmium erythraeum IMS101; identical to SEQ ID NO: 8603
  CDS (1)..(1764): transl_table=11

SEQ ID NO: 103664 - protein, 587 aa, Trichodesmium erythraeum IMS101; identical to SEQ ID NO: 8604

SEQ ID NO: 103665 - DNA, 1785 bp, Synechococcus sp. CC9311
  CDS (1)..(1785): transl_table=11
atggcccagatcgatctaacccgtagaaccaagatcgtggccaccatcgggcccgcaacggaaagtcctgaacggatccgtgaactcatccaagccggagcgaccacgtttcgactgaatttctcccatggagatcacagcgagcatgctgaaagaatcgccacgattcggcaggtggcccacgaattgggagcccacatcggcattcttcaggatttacagggtccgaagatccgcttaggccgcttcgaagaaggtccgatcacgctcgccaaaggtgatcaattcgcactcacggctaagcaggtgcgatgcaaccagacggttgcaactgtcacctacgacaagctggccgaagaagtgactgctggcagtcgcatccttcttgatgacggccgcgtcgagatgaaagttgagcgtgtggatggagtcgatcagacccttcactgctcggtcacggttcctggcgtgctgtccaataacaagggggtgaatttccccgatgtgcagctctctgtgagagcgctcaccacaaaagatcgtcaagatctggcttttggtcttcagcagggtgtggactgggtagcgctgagcttcgtgcgcaatccctctgacatgcaggagatcagagaactgattcggaagcacggatacagcactcccgtcgttgcaaaaatcgaaaagttcgaggcgatcgatcaaatcgacgcgattttgccgctttgtgatggcgtgatggtggcacgaggtgatctgggggtggaaatgcctgcagaagaagtccctcttcttcaaaaagatctgatccacaaagccaacagccttgggattccgatcatcacggcgacccagatgctcgattccatggcctcgagccctaggcctactcgtgctgaggtcagtgacgttgccaacgccatccttgatggcactgatgcggtcatgctgtccaacgagaccgctgttggtgactttcctgttgaggctgttgaaacgatggccacgatcgccagacggatcgagcgggattacccacaacggccaattgacacccatctgccgagcacgatcccgaatgcgattagtggggccgtgagcagcattgctcggcaactcaacgcagcggcaatcctgccgttaacaaaaagcggtgctaccgcccataacgtcagtaagttccggccgtccactccgatacttgcgattaccagcgaggtcaacgtggcgcgcaagcttcagttggtttggggtgtgacaccactgctaatagaaactcagaagagcaccaccgccaccttcacgttggcaatggcttacgcccaagagatcggtgtggtcaaagacggtgatctttgcgtgcaaacggcaggaacgctcgctggaattagtggttctactgacctgatcaaagtcgggatcgtgagtgctgtgctcggccgaggtacgggctttggcagtggctcagtcagtggaaaggttcgaattgcgatttcggctagtgattgcgcccgacttgaaccaggagacattcttgtggctcgggatacgtcagccgactacctcgacggaattcgcgacgctgctgccgttatcacagaacaaccaggggaggattcacacgctgctgtcatcgccaaacgcttgggtgttcccgtgattactggggtagtcaatgccacacaggatctcagagaaggcgaagttgtgaccttgcatgtgaaagatggtgtggttcatcggggaaccggcagcaacttggcgatgaaattagacaccatgctctga

SEQ ID NO: 103666 - protein, 594 aa, Synechococcus sp. CC9311
MAQIDLTRRTKIVATIGPATESPERIRELIQAGATTFRLNFSHGDHSEHAERIATIRQVAHELGAHIGILQDLQGPKIRLGRFEEGPITLAKGDQFALTAKQVRCNQTVATVTYDKLAEEVTAGSRILLDDGRVEMKVERVDGVDQTLHCSVTVPGVLSNNKGVNFPDVQLSVRALTTKDRQDLAFGLQQGVDWVALSFVRNPSDMQEIRELIRKHGYSTPVVAKIEKFEAIDQIDAILPLCDGVMVARGDLGVEMPAEEVPLLQKDLIHKANSLGIPIITATQMLDSMASSPRPTRAEVSDVANAILDGTDAVMLSNETAVGDFPVEAVETMATIARRIERDYPQRPIDTHLPSTIPNAISGAVSSIARQLNAAAILPLTKSGATAHNVSKFRPSTPILAITSEVNVARKLQLVWGVTPLLIETQKSTTATFTLAMAYAQEIGVVKDGDLCVQTAGTLAGISGSTDLIKVGIVSAVLGRGTGFGSGSVSGKVRIAISASDCARLEPGDILVARDTSADYLDGIRDAAAVITEQPGEDSHAAVIAKRLGVPVITGVVNATQDLREGEVVTLHVKDGVVHRGTGSNLAMKLDTML

SEQ ID NO: 103667 - DNA, 1434 bp, Oenococcus oeni PSU-1; identical to SEQ ID NO: 8617
  CDS (1)..(1434): transl_table=11

SEQ ID NO: 103668 - protein, 477 aa, Oenococcus oeni PSU-1; identical to SEQ ID NO: 8618

SEQ ID NO: 103669 - DNA, 1710 bp, Magnetococcus sp. MC-1; identical to SEQ ID NO: 15840
  CDS (1)..(1710): transl_table=11

SEQ ID NO: 103670 - protein, 569 aa, Magnetococcus sp. MC-1; identical to SEQ ID NO: 15841

SEQ ID NO: 103671 - DNA, 1437 bp, Acidovorax sp. JS42; identical to SEQ ID NO: 8627
  CDS (1)..(1437): transl_table=11

SEQ ID NO: 103672 - protein, 478 aa, Acidovorax sp. JS42; identical to SEQ ID NO: 8628

SEQ ID NO: 103673 - DNA, 1440 bp, Haemophilus somnus 2336; identical to SEQ ID NO: 26698
  CDS (1)..(1440): transl_table=11

SEQ ID NO: 103674 - protein, 479 aa, Haemophilus somnus 2336; identical to SEQ ID NO: 26699

SEQ ID NO: 103675 - DNA, 1401 bp, Actinobacillus pleuropneumoniae serovar 1 str. 4074; identical to SEQ ID NO: 8629
  CDS (1)..(1401): transl_table=11

SEQ ID NO: 103676 - protein, 466 aa, Actinobacillus pleuropneumoniae serovar 1 str. 4074; identical to SEQ ID NO: 8630

SEQ ID NO: 103677 - DNA, 1428 bp, Fusobacterium nucleatum subsp. vincentii ATCC 49256; identical to SEQ ID NO: 15846
  CDS (1)..(1428): transl_table=11

SEQ ID NO: 103678 - protein, 475 aa, Fusobacterium nucleatum subsp. vincentii ATCC 49256; identical to SEQ ID NO: 15847

SEQ ID NO: 103679 - DNA, 1776 bp, Crocosphaera watsonii WH 8501; identical to SEQ ID NO: 8631
  CDS (1)..(1776): transl_table=11

SEQ ID NO: 103680 - protein, 591 aa, Crocosphaera watsonii WH 8501; identical to SEQ ID NO: 8632

SEQ ID NO: 103681 - DNA, 1569 bp, Kineococcus radiotolerans SRS30216; identical to SEQ ID NO: 8633
  CDS (1)..(1569): transl_table=11

SEQ ID NO: 103682 - protein, 522 aa, Kineococcus radiotolerans SRS30216; identical to SEQ ID NO: 8634

SEQ ID NO: 103683 - DNA, 1467 bp, Xylella fastidiosa Ann-1; identical to SEQ ID NO: 15852
  CDS (1)..(1467): transl_table=11

SEQ ID NO: 103684 - protein, 488 aa, Xylella fastidiosa Ann-1; identical to SEQ ID NO: 15853

SEQ ID NO: 103685 - DNA, 1437 bp, Oceanospirillum sp. MED92; identical to SEQ ID NO: 8649
  CDS (1)..(1437): transl_table=11

SEQ ID NO: 103686 - protein, 478 aa, Oceanospirillum sp. MED92; identical to SEQ ID NO: 8650

SEQ ID NO: 103687 - DNA, 1431 bp, Rickettsiella grylli; identical to SEQ ID NO: 8657
  CDS (1)..(1431): transl_table=11

SEQ ID NO: 103688 - protein, 476 aa, Rickettsiella grylli; identical to SEQ ID NO: 8658

SEQ ID NO: 103689 - DNA, 1437 bp, Alteromonadales bacterium TW-7; identical to SEQ ID NO: 8661
  CDS (1)..(1437): transl_table=11

SEQ ID NO: 103690 - protein, 478 aa, Alteromonadales bacterium TW-7; identical to SEQ ID NO: 8662

SEQ ID NO: 103691 - DNA, 1437 bp, marine gamma proteobacterium HTCC2143; identical to SEQ ID NO: 8663
  CDS (1)..(1437): transl_table=11

SEQ ID NO: 103692 - protein, 478 aa, marine gamma proteobacterium HTCC2143; identical to SEQ ID NO: 8664

SEQ ID NO: 103693 - DNA, 1455 bp, marine gamma proteobacterium HTCC2080; identical to SEQ ID NO: 8665
  CDS (1)..(1455): transl_table=11

SEQ ID NO: 103694 - protein, 484 aa, marine gamma proteobacterium HTCC2080; identical to SEQ ID NO: 8666

SEQ ID NO: 103695 - DNA, 1416 bp, Pseudomonas putida GB-1; identical to SEQ ID NO: 8667
  CDS (1)..(1416): transl_table=11

SEQ ID NO: 103696 - protein, 471 aa, Pseudomonas putida GB-1; identical to SEQ ID NO: 8668

SEQ ID NO: 103697 - DNA, 1455 bp, Pseudomonas putida GB-1; identical to SEQ ID NO: 8669
  CDS (1)..(1455): transl_table=11

SEQ ID NO: 103698 - protein, 484 aa, Pseudomonas putida GB-1; identical to SEQ ID NO: 8670

SEQ ID NO: 103699 - DNA, 1449 bp, Marinobacter sp. ELB17; identical to SEQ ID NO: 8671
  CDS (1)..(1449): transl_table=11

SEQ ID NO: 103700 - protein, 482 aa, Marinobacter sp. ELB17; identical to SEQ ID NO: 8672

SEQ ID NO: 103701 - DNA, 1413 bp, Moritella sp. PE36; identical to SEQ ID NO: 15884
  CDS (1)..(1413): transl_table=11

SEQ ID NO: 103702 - protein, 470 aa, Moritella sp. PE36; identical to SEQ ID NO: 15885

SEQ ID NO: 103703 - DNA, 1446 bp, Magnetospirillum gryphiswaldense; identical to SEQ ID NO: 8679
  CDS (1)..(1446): transl_table=11

SEQ ID NO: 103704 - protein, 481 aa, Magnetospirillum gryphiswaldense; identical to SEQ ID NO: 8680

SEQ ID NO: 103705 - DNA, 1503 bp, Vitis vinifera; identical to SEQ ID NO: 15892
  CDS (1)..(1503)

SEQ ID NO: 103706 - protein, 500 aa, Vitis vinifera; identical to SEQ ID NO: 15893

SEQ ID NO: 103707 - DNA, 1743 bp, Vitis vinifera; identical to SEQ ID NO: 15894
  CDS (1)..(1743)
  misc_feature (200)..(200): y is t or c
  misc_feature (1338)..(1338): y is t or c

SEQ ID NO: 103708 - protein, 580 aa, Vitis vinifera; identical to SEQ ID NO: 15895
  misc_feature (67)..(67): The Xaa at location 67 stands for Met, or Thr.

SEQ ID NO: 103709 - DNA, 1866 bp, Vitis vinifera; identical to SEQ ID NO: 15896
  CDS (1)..(1866)

SEQ ID NO: 103710 - protein, 621 aa, Vitis vinifera; identical to SEQ ID NO: 15897

SEQ ID NO: 103711 - DNA, 1755 bp, Bacillus subtilis; identical to SEQ ID NO: 8681
  CDS (1)..(1755): transl_table=11

SEQ ID NO: 103712 - protein, 584 aa, Bacillus subtilis; identical to SEQ ID NO: 8682

SEQ ID NO: 103713 - DNA, 1428 bp, Zymomonas mobilis; identical to SEQ ID NO: 8683
  CDS (1)..(1428): transl_table=11

SEQ ID NO: 103714 - protein, 475 aa, Zymomonas mobilis; identical to SEQ ID NO: 8684

SEQ ID NO: 103715 - DNA, 2100 bp, Ostreococcus tauri; identical to SEQ ID NO: 8685
  CDS (1)..(2100)

SEQ ID NO: 103716 - protein, 699 aa, Ostreococcus tauri; identical to SEQ ID NO: 8686

SEQ ID NO: 103717 - DNA, 1692 bp, Crassostrea gigas; identical to SEQ ID NO: 15908
  CDS (1)..(1692)

SEQ ID NO: 103718 - protein, 563 aa, Crassostrea gigas; identical to SEQ ID NO: 15909

SEQ ID NO: 103719 - DNA, 1533 bp, Arabidopsis thaliana; identical to SEQ ID NO: 8689
  CDS (1)..(1533)

SEQ ID NO: 103720 - protein, 510 aa, Arabidopsis thaliana; identical to SEQ ID NO: 8690

SEQ ID NO: 103721 - DNA, 1437 bp, Spiroplasma citri; identical to SEQ ID NO: 15910
  CDS (1)..(1437): transl_table=4

SEQ ID NO: 103722 - protein, 478 aa, Spiroplasma citri; identical to SEQ ID NO: 15911

SEQ ID NO: 103723 - DNA, 1536 bp, Capsicum annuum; identical to SEQ ID NO: 8691
  CDS (1)..(1536)

SEQ ID NO: 103724 - protein, 511 aa, Capsicum annuum; identical to SEQ ID NO: 8692

SEQ ID NO: 103725 - DNA, 1590 bp, Medicago truncatula; identical to SEQ ID NO: 15916
  CDS (1)..(1590)

SEQ ID NO: 103726 - protein, 529 aa, Medicago truncatula; identical to SEQ ID NO: 15917

SEQ ID NO: 103727 - DNA, 1437 bp, Nitrosovibrio sp; identical to SEQ ID NO: 16635
  CDS (1)..(1437): transl_table=11

SEQ ID NO: 103728 - protein, 478 aa, Nitrosovibrio sp; identical to SEQ ID NO: 16636

SEQ ID NO: 103729 - DNA, 1632 bp, Phaeodactylum tricornutum; identical to SEQ ID NO: 8701
  CDS (1)..(1632)

SEQ ID NO: 103730 - protein, 543 aa, Phaeodactylum tricornutum; identical to SEQ ID NO: 8702

SEQ ID NO: 103731 - DNA, 1542 bp, Phaeodactylum tricornutum; identical to SEQ ID NO: 8703
  CDS (1)..(1542)

SEQ ID NO: 103732 - protein, 513 aa, Phaeodactylum tricornutum; identical to SEQ ID NO: 8704

SEQ ID NO: 103733 - DNA, 1998 bp, Phaeodactylum tricornutum; identical to SEQ ID NO: 8705
  CDS (1)..(1998)

SEQ ID NO: 103734 - protein, 665 aa, Phaeodactylum tricornutum; identical to SEQ ID NO: 8706

SEQ ID NO: 103735 - DNA, 1533 bp, Solanum tuberosum; identical to SEQ ID NO: 8707
  CDS (1)..(1533)

SEQ ID NO: 103736 - protein, 510 aa, Solanum tuberosum; identical to SEQ ID NO: 8708

SEQ ID NO: 103737 - DNA, 1533 bp, Citrus sinensis; identical to SEQ ID NO: 8709
  CDS (1)..(1533)

SEQ ID NO: 103738 - protein, 510 aa, Citrus sinensis; identical to SEQ ID NO: 8710

SEQ ID NO: 103739 - DNA, 1740 bp, Arabidopsis thaliana; identical to SEQ ID NO: 8711
  CDS (1)..(1740)

SEQ ID NO: 103740 - protein, 579 aa, Arabidopsis thaliana; identical to SEQ ID NO: 8712

SEQ ID NO: 103741 - DNA, 1509 bp, Glycine max; identical to SEQ ID NO: 8713
  CDS (1)..(1509)

SEQ ID NO: 103742 - protein, 502 aa, Glycine max; identical to SEQ ID NO: 8714

SEQ ID NO: 103743 - DNA, 1521 bp, Saccharomyces bayanus; identical to SEQ ID NO: 8719
  CDS (1)..(1521)

SEQ ID NO: 103744 - protein, 506 aa, Saccharomyces bayanus; identical to SEQ ID NO: 8720

SEQ ID NO: 103745 - DNA, 1584 bp, Arabidopsis thaliana; identical to SEQ ID NO: 8721
  CDS (1)..(1584)

SEQ ID NO: 103746 - protein, 527 aa, Arabidopsis thaliana; identical to SEQ ID NO: 8722

SEQ ID NO: 103747 - DNA, 1533 bp, Glycine max; identical to SEQ ID NO: 8723
  CDS (1)..(1533)

SEQ ID NO: 103748 - protein, 510 aa, Glycine max; identical to SEQ ID NO: 8724

SEQ ID NO: 103749 - DNA, 1536 bp, Glycine max; identical to SEQ ID NO: 8725
  CDS (1)..(1536)

SEQ ID NO: 103750 - protein, 511 aa, Glycine max; identical to SEQ ID NO: 8726

SEQ ID NO: 103751 - DNA, 1791 bp, Arabidopsis thaliana; identical to SEQ ID NO: 8727
  CDS (1)..(1791)

SEQ ID NO: 103752 - protein, 596 aa, Arabidopsis thaliana; identical to SEQ ID NO: 8728

SEQ ID NO: 103753 - DNA, 1584 bp, Arabidopsis thaliana; identical to SEQ ID NO: 8729
  CDS (1)..(1584)

SEQ ID NO: 103754 - protein, 527 aa, Arabidopsis thaliana; identical to SEQ ID NO: 8730

SEQ ID NO: 103755 - DNA, 1665 bp, Drosophila melanogaster; identical to SEQ ID NO: 15948
  CDS (1)..(1665)

SEQ ID NO: 103756 - protein, 554 aa, Drosophila melanogaster; identical to SEQ ID NO: 15949

SEQ ID NO: 103757 - DNA, 1740 bp, Arabidopsis thaliana; identical to SEQ ID NO: 8731
  CDS (1)..(1740)

SEQ ID NO: 103758 - protein, 579 aa, Arabidopsis thaliana; identical to SEQ ID NO: 8732

SEQ ID NO: 103759 - DNA, 1581 bp, Aspergillus oryzae; identical to SEQ ID NO: 8733
  CDS (1)..(1581)

SEQ ID NO: 103760 - protein, 526 aa, Aspergillus oryzae; identical to SEQ ID NO: 8734

SEQ ID NO: 103761 - DNA, 1545 bp, Arabidopsis thaliana; identical to SEQ ID NO: 8739
  CDS (1)..(1545)

SEQ ID NO: 103762 - protein, 514 aa, Arabidopsis thaliana; identical to SEQ ID NO: 8740

SEQ ID NO: 103763 - DNA, 1704 bp, Arabidopsis thaliana; identical to SEQ ID NO: 8741
  CDS (1)..(1704)

SEQ ID NO: 103764 - protein, 567 aa, Arabidopsis thaliana; identical to SEQ ID NO: 8742

SEQ ID NO: 103765 - DNA, 1533 bp, Lilium longiflorum; identical to SEQ ID NO: 8743
  CDS (1)..(1533)

SEQ ID NO: 103766 - protein, 510 aa, Lilium longiflorum; identical to SEQ ID NO: 8744

SEQ ID NO: 103767 - DNA, 1413 bp, Vibrio marinus; identical to SEQ ID NO: 8745
  CDS (1)..(1413): transl_table=11

SEQ ID NO: 103768 - protein, 470 aa, Vibrio marinus; identical to SEQ ID NO: 8746

SEQ ID NO: 103769 - DNA, 1782 bp, Nicotiana tabacum; identical to SEQ ID NO: 8749
  CDS (1)..(1782)

SEQ ID NO: 103770 - protein, 593 aa, Nicotiana tabacum; identical to SEQ ID NO: 8750

SEQ ID NO: 103771 - DNA, 1494 bp, Arabidopsis thaliana; identical to SEQ ID NO: 8751
  CDS (1)..(1494)

SEQ ID NO: 103772 - protein, 497 aa, Arabidopsis thaliana; identical to SEQ ID NO: 8752

SEQ ID NO: 103773 - DNA, 1533 bp, Solanum tuberosum; identical to SEQ ID NO: 8753
  CDS (1)..(1533)

SEQ ID NO: 103774 - protein, 510 aa, Solanum tuberosum; identical to SEQ ID NO: 8754

SEQ ID NO: 103775 - DNA, 1536 bp, Glycine max; identical to SEQ ID NO: 8755
  CDS (1)..(1536)

SEQ ID NO: 103776 - protein, 511 aa, Glycine max; identical to SEQ ID NO: 8756

SEQ ID NO: 103777 - DNA, 1527 bp, Nicotiana tabacum; identical to SEQ ID NO: 15976
  CDS (1)..(1527)

SEQ ID NO: 103778 - protein, 508 aa, Nicotiana tabacum; identical to SEQ ID NO: 8758

SEQ ID NO: 103779 - DNA, 1689 bp, Nicotiana tabacum; identical to SEQ ID NO: 8759
  CDS (1)..(1689)

SEQ ID NO: 103780 - protein, 562 aa, Nicotiana tabacum; identical to SEQ ID NO: 8760

SEQ ID NO: 103781 - DNA, 1425 bp, Agrobacterium vitis; identical to SEQ ID NO: 8761
  CDS (1)..(1425): transl_table=11

SEQ ID NO: 103782 - protein, 474 aa, Agrobacterium vitis; identical to SEQ ID NO: 8762

SEQ ID NO: 103783 - DNA, 1506 bp, Candida glabrata; identical to SEQ ID NO: 8763
  CDS (1)..(1506)

SEQ ID NO: 103784 - protein, 501 aa, Candida glabrata; identical to SEQ ID NO: 8764

SEQ ID NO: 103785 - DNA, 1413 bp, Escherichia coli O157; identical to SEQ ID NO: 8765
  CDS (1)..(1413): transl_table=11

SEQ ID NO: 103786 - protein, 470 aa, Escherichia coli O157; identical to SEQ ID NO: 8766

SEQ ID NO: 103787 - DNA, 1413 bp, Salmonella typhi; identical to SEQ ID NO: 15984
  CDS (1)..(1413): transl_table=11

SEQ ID NO: 103788 - protein, 470 aa, Salmonella typhi; identical to SEQ ID NO: 15985

SEQ ID NO: 103789 - DNA, 1413 bp, Salmonella typhimurium; identical to SEQ ID NO: 8767
  CDS (1)..(1413): transl_table=11

SEQ ID NO: 103790 - protein, 470 aa, Salmonella typhimurium; identical to SEQ ID NO: 8768

SEQ ID NO: 103791 - DNA, 1503 bp, Saccharomyces cerevisiae; identical to SEQ ID NO: 8769
  CDS (1)..(1503)

SEQ ID NO: 103792 - protein, 500 aa, Saccharomyces cerevisiae; identical to SEQ ID NO: 8770

SEQ ID NO: 103793 - DNA, 1527 bp, Candida glabrata; identical to SEQ ID NO: 8771
  CDS (1)..(1527)

SEQ ID NO: 103794 - protein, 508 aa, Candida glabrata; identical to SEQ ID NO: 8772

SEQ ID NO: 103795 - DNA, 1443 bp, Escherichia coli; identical to SEQ ID NO: 8363
  CDS (1)..(1443): transl_table=11

SEQ ID NO: 103796 - protein, 480 aa, Escherichia coli; identical to SEQ ID NO: 8364

SEQ ID NO: 103797 - DNA, 1443 bp, Salmonella typhimurium; identical to SEQ ID NO: 8773
  CDS (1)..(1443): transl_table=11

SEQ ID NO: 103798 - protein, 480 aa, Salmonella typhimurium; identical to SEQ ID NO: 8774

SEQ ID NO: 103799 - DNA, 1521 bp, Saccharomyces cerevisiae; identical to SEQ ID NO: 8775
  CDS (1)..(1521)

SEQ ID NO: 103800 - protein, 506 aa, Saccharomyces cerevisiae; identical to SEQ ID NO: 8776

SEQ ID NO: 103801 - DNA, 1599 bp, Agaricus bisporus; identical to SEQ ID NO: 16002
  CDS (1)..(1599)

SEQ ID NO: 103802 - protein, 532 aa, Agaricus bisporus; identical to SEQ ID NO: 16003

SEQ ID NO: 103803 - DNA, 1506 bp, Ashbya gossypii; identical to SEQ ID NO: 8777
  CDS (1)..(1506)

SEQ ID NO: 103804 - protein, 501 aa, Ashbya gossypii; identical to SEQ ID NO: 8778

SEQ ID NO: 103805 - DNA, 1581 bp, Aspergillus niger; identical to SEQ ID NO: 8779
  CDS (1)..(1581)

SEQ ID NO: 103806 - protein, 526 aa, Aspergillus niger; identical to SEQ ID NO: 8780

SEQ ID NO: 103807 - DNA, 1758 bp, Bacillus licheniformis; identical to SEQ ID NO: 8781
  CDS (1)..(1758): transl_table=11

SEQ ID NO: 103808 - protein, 585 aa, Bacillus licheniformis; identical to SEQ ID NO: 8782

SEQ ID NO: 103809 - DNA, 1761 bp, Bacillus psychrophilus; identical to SEQ ID NO: 16010
  CDS (1)..(1761): transl_table=11

SEQ ID NO: 103810 - protein, 586 aa, Bacillus psychrophilus; identical to SEQ ID NO: 8784

SEQ ID NO: 103811 - DNA, 1764 bp, Bacillus stearothermophilus; identical to SEQ ID NO: 8785
  CDS (1)..(1764): transl_table=11

SEQ ID NO: 103812 - protein, 587 aa, Bacillus stearothermophilus; identical to SEQ ID NO: 8786

SEQ ID NO: 103813 - DNA, 1758 bp, Bacillus subtilis; identical to SEQ ID NO: 8787
  CDS (1)..(1758): transl_table=11

SEQ ID NO: 103814 - protein, 585 aa, Bacillus subtilis; identical to SEQ ID NO: 8788

SEQ ID NO: 103815 - DNA, 1428 bp, Corynebacterium glutamicum; identical to SEQ ID NO: 16020
  CDS (1)..(1428): transl_table=11

SEQ ID NO: 103816 - protein, 475 aa, Corynebacterium glutamicum; identical to SEQ ID NO: 16021

SEQ ID NO: 103817 - DNA, 1515 bp, Debaryomyces hansenii; identical to SEQ ID NO: 8793
  CDS (1)..(1515)

SEQ ID NO: 103818 - protein, 504 aa, Debaryomyces hansenii; identical to SEQ ID NO: 8794

SEQ ID NO: 103819 - DNA, 1602 bp, Drosophila melanogaster; identical to SEQ ID NO: 16024
  CDS (1)..(1602)

SEQ ID NO: 103820 - protein, 533 aa, Drosophila melanogaster; identical to SEQ ID NO: 16025

SEQ ID NO: 103821 - DNA, 1581 bp, Emericella nidulans; identical to SEQ ID NO: 8795
  CDS (1)..(1581)

SEQ ID NO: 103822 - protein, 526 aa, Emericella nidulans; identical to SEQ ID NO: 8796

SEQ ID NO: 103823 - DNA, 1506 bp, Kluyveromyces lactis; identical to SEQ ID NO: 8797
  CDS (1)..(1506)

SEQ ID NO: 103824 - protein, 501 aa, Kluyveromyces lactis; identical to SEQ ID NO: 8798

SEQ ID NO: 103825 - DNA, 1770 bp, Lactobacillus delbrueckii subsp; identical to SEQ ID NO: 16030
  CDS (1)..(1770): transl_table=11

SEQ ID NO: 103826 - protein, 589 aa, Lactobacillus delbrueckii subsp; identical to SEQ ID NO: 16031

SEQ ID NO: 103827 - DNA, 1419 bp, Mycobacterium intracellulare
  CDS (1)..(1419): transl_table=11
gtgagtagacgcgggaagatcgtctgcacccttgggcctgcgaccaattcggacgagttgatcttggcgctggttgaggcgggaatggacgtcgcccggttgaacttcagccacggtgattacgccgatcacaaagcggcctacgaacgggtccgggtggcctccgacgccaccggccgtgccgtcggcgtgctcgccgatttgcagggccccaagatcaggctgggacgcttcgcgaccggcccaacctactgggccgacggtgagaccgtccggatcaccgtcgccgactgcgagggcagccacgaccgggtgtcgaccacctacaagaaactggccgaggacgccgccgtcggtgaccgggttctggtcgacgacggcaaggtctgcctggtggtcgatggcatcgagggcgacgacgtcatctgcacggtcgtcgagggcggcccggtcagcaacaacaagggaatctcgttgccgggcatgaacgtgtcggcaccggccttgtcggagaaggacatcgaggacctcaccttcgccctggacctcggcgtcgacctggtcgccctgtccttcgtgcgctcgccggccgacgtcgagctggtgcacgaggtgatggaccgggtcgggcgacgggttccggtgatcgccaagctggaaaagcccgaagccgtcgacaatctggaaaccatcgtgctggccttcgacgccatcatggtggcccgcggcgacctcggcgtcgagctgccactggaagaggttccgctggtgcagaagcgggccatccagatggcccgggagaacgcgaaaccggtcatcgtggccacccagatgctcgattccatgatcgagaactcacgcccgacccgcgccgaggcctccgacgtcgccaacgccgtcctcgacggcgccgacgcggtgatgctgtccggggagacgtcggtgggcaagtatccgatggctgccgtgcggaccatgtcgcgcatcatctgcgcggtcgaggacaattccacggccgccccgccgctgacccacgtgccgcgcaccaaacgcggcgtgatctcctatgcggcccgcgacatcggcgagcggctcgacgccaaagccctggtcgccttcacccaatccggcgacacggtcaagcggctcgcgcgcctgcacaccccgctgccgctgctggccttcaccgcctggcccgaggtgcgcagccagctcgccatgacctggggcaccgaaacgttcatcgtcccgatgatgacctccacgggcggcatgatccgccaggtcgacaagtcactgctcgaactcggtcgctacaagcgcggcgacctggtggtcatcgtcgccggcgcgccacctggcacagtagggtcgaccaacctgatccacgtgcaccggatcggggaggacgacgtctaa

SEQ ID NO: 103828 - protein, 472 aa, Mycobacterium intracellulare
MSRRGKIVCTLGPATNSDELILALVEAGMDVARLNFSHGDYADHKAAYERVRVASDATGRAVGVLADLQGPKIRLGRFATGPTYWADGETVRITVADCEGSHDRVSTTYKKLAEDAAVGDRVLVDDGKVCLVVDGIEGDDVICTVVEGGPVSNNKGISLPGMNVSAPALSEKDIEDLTFALDLGVDLVALSFVRSPADVELVHEVMDRVGRRVPVIAKLEKPEAVDNLETIVLAFDAIMVARGDLGVELPLEEVPLVQKRAIQMARENAKPVIVATQMLDSMIENSRPTRAEASDVANAVLDGADAVMLSGETSVGKYPMAAVRTMSRIICAVEDNSTAAPPLTHVPRTKRGVISYAARDIGERLDAKALVAFTQSGDTVKRLARLHTPLPLLAFTAWPEVRSQLAMTWGTETFIVPMMTSTGGMIRQVDKSLLELGRYKRGDLVVIVAGAPPGTVGSTNLIHVHRIGEDDV

SEQ ID NO: 103829 - DNA, 1506 bp, Saccharomyces castellii; identical to SEQ ID NO: 8801
  CDS (1)..(1506)

SEQ ID NO: 103830 - protein, 501 aa, Saccharomyces castellii; identical to SEQ ID NO: 8802

SEQ ID NO: 103831 - DNA, 1506 bp, Saccharomyces kluyveri; identical to SEQ ID NO: 8803
  CDS (1)..(1506)

SEQ ID NO: 103832 - protein, 501 aa, Saccharomyces kluyveri; identical to SEQ ID NO: 8804

SEQ ID NO: 103833 - DNA, 1530 bp, Schizosaccharomyces pombe; identical to SEQ ID NO: 8805
  CDS (1)..(1530)

SEQ ID NO: 103834 - protein, 509 aa, Schizosaccharomyces pombe; identical to SEQ ID NO: 8806

SEQ ID NO: 103835 - DNA, 1758 bp, Staphylococcus epidermidis; identical to SEQ ID NO: 16042
  CDS (1)..(1758): transl_table=11

SEQ ID NO: 103836 - protein, 585 aa, Staphylococcus epidermidis; identical to SEQ ID NO: 16043

SEQ ID NO: 103837 - DNA, 1617 bp, Trichoderma reesei; identical to SEQ ID NO: 8807
  CDS (1)..(1617)

SEQ ID NO: 103838 - protein, 538 aa, Trichoderma reesei; identical to SEQ ID NO: 8808

SEQ ID NO: 103839 - DNA, 1533 bp, Oryza sativa; identical to SEQ ID NO: 8809
  CDS (1)..(1533)

SEQ ID NO: 103840 - protein, 510 aa, Oryza sativa; identical to SEQ ID NO: 8810

SEQ ID NO: 103841 - DNA, 1752 bp, Oryza sativa; identical to SEQ ID NO: 8811
  CDS (1)..(1752)

SEQ ID NO: 103842 - protein, 583 aa, Oryza sativa; identical to SEQ ID NO: 8812

SEQ ID NO: 103843 - DNA, 1347 bp, Oryza sativa; identical to SEQ ID NO: 16773
  CDS (1)..(1347)

SEQ ID NO: 103844 - protein, 448 aa, Oryza sativa; identical to SEQ ID NO: 16774

SEQ ID NO: 103845 - DNA, 1647 bp, Oryza sativa; identical to SEQ ID NO: 8379
  CDS (1)..(1647)

SEQ ID NO: 103846 - protein, 548 aa, Oryza sativa; identical to SEQ ID NO: 8380

SEQ ID NO: 103847 - DNA, 1536 bp, Oryza sativa; identical to SEQ ID NO: 8381
  CDS (1)..(1536)

SEQ ID NO: 103848 - protein, 511 aa, Oryza sativa; identical to SEQ ID NO: 8382

SEQ ID NO: 103849 - DNA, 1737 bp, Oryza sativa; identical to SEQ ID NO: 16058
  CDS (1)..(1737)

SEQ ID NO: 103850 - protein, 578 aa, Oryza sativa; identical to SEQ ID NO: 16059

SEQ ID NO: 103851 - DNA, 1713 bp, Oryza sativa; identical to SEQ ID NO: 8383
  CDS (1)..(1713)

SEQ ID NO: 103852 - protein, 570 aa, Oryza sativa; identical to SEQ ID NO: 8384

SEQ ID NO: 103853 - DNA, 1584 bp, Oryza sativa; identical to SEQ ID NO: 8385
  CDS (1)..(1584)

SEQ ID NO: 103854 - protein, 527 aa, Oryza sativa; identical to SEQ ID NO: 8386

SEQ ID NO: 103855 - DNA, 1584 bp, Oryza sativa; identical to SEQ ID NO: 8813
  CDS (1)..(1584)

SEQ ID NO: 103856 - protein, 527 aa, Oryza sativa; identical to SEQ ID NO: 8814

SEQ ID NO: 103857 - DNA, 1584 bp, Oryza sativa; identical to SEQ ID NO: 8387
  CDS (1)..(1584)

SEQ ID NO: 103858 - protein, 527 aa, Oryza sativa; identical to SEQ ID NO: 8388

SEQ ID NO: 103859 - DNA, 1584 bp, Oryza sativa; identical to SEQ ID NO: 16068
  CDS (1)..(1584)

SEQ ID NO: 103860 - protein, 527 aa, Oryza sativa; identical to SEQ ID NO: 16069

SEQ ID NO: 103861 - DNA, 1716 bp, Brassica napus; identical to SEQ ID NO: 8817
  CDS (1)..(1716)

SEQ ID NO: 103862 - protein, 571 aa, Brassica napus; identical to SEQ ID NO: 8818

SEQ ID NO: 103863 - DNA, 1584 bp, Brassica napus; identical to SEQ ID NO: 8819
  CDS (1)..(1584)

SEQ ID NO: 103864 - protein, 527 aa, Brassica napus; identical to SEQ ID NO: 8820

SEQ ID NO: 103865 - DNA, 1584 bp, Brassica napus; identical to SEQ ID NO: 8823
  CDS (1)..(1584)

SEQ ID NO: 103866 - protein, 527 aa, Brassica napus; identical to SEQ ID NO: 8824

SEQ ID NO: 103867 - DNA, 1581 bp, Glycine max; identical to SEQ ID NO: 16795
  CDS (1)..(1581)

SEQ ID NO: 103868 - protein, 526 aa, Glycine max; identical to SEQ ID NO: 15541

SEQ ID NO: 103869 - DNA, 1581 bp, Glycine max; identical to SEQ ID NO: 8825
  CDS (1)..(1581)

SEQ ID NO: 103870 - protein, 526 aa, Glycine max; identical to SEQ ID NO: 8826

SEQ ID NO: 103871 - DNA, 1584 bp, Triticum aestivum; identical to SEQ ID NO: 8829
  CDS (1)..(1584)

SEQ ID NO: 103872 - protein, 527 aa, Triticum aestivum; identical to SEQ ID NO: 8830

SEQ ID NO: 103873 - DNA, 1584 bp, Brassica napus; identical to SEQ ID NO: 8835
  CDS (1)..(1584)

SEQ ID NO: 103874 - protein, 527 aa, Brassica napus; identical to SEQ ID NO: 8836

SEQ ID NO: 103875 - DNA, 1743 bp, Brassica napus; identical to SEQ ID NO: 8837
  CDS (1)..(1743)

SEQ ID NO: 103876 - protein, 580 aa, Brassica napus; identical to SEQ ID NO: 8838

SEQ ID NO: 103877 - DNA, 1743 bp, Brassica napus; identical to SEQ ID NO: 8839
  CDS (1)..(1743)

SEQ ID NO: 103878 - protein, 580 aa, Brassica napus; identical to SEQ ID NO: 8840

SEQ ID NO: 103879 - DNA, 1764 bp, Brassica napus; identical to SEQ ID NO: 8841
  CDS (1)..(1764)

SEQ ID NO: 103880 - protein, 587 aa, Brassica napus; identical to SEQ ID NO: 8842

SEQ ID NO: 103881 - DNA, 1533 bp, Brassica napus; identical to SEQ ID NO: 8843
  CDS (1)..(1533)

SEQ ID NO: 103882 - protein, 510 aa, Brassica napus; identical to SEQ ID NO: 8844

SEQ ID NO: 103883 - DNA, 1497 bp, Brassica napus; identical to SEQ ID NO: 8845
  CDS (1)..(1497)

SEQ ID NO: 103884 - protein, 498 aa, Brassica napus; identical to SEQ ID NO: 8846

SEQ ID NO: 103885 - DNA, 1584 bp, Brassica napus; identical to SEQ ID NO: 8847
  CDS (1)..(1584)

SEQ ID NO: 103886 - protein, 527 aa, Brassica napus; identical to SEQ ID NO: 8848

SEQ ID NO: 103887 - DNA, 1533 bp, Brassica napus; identical to SEQ ID NO: 8849
  CDS (1)..(1533)

SEQ ID NO: 103888 - protein, 510 aa, Brassica napus; identical to SEQ ID NO: 8850

SEQ ID NO: 103889 - DNA, 1584 bp, Brassica napus; identical to SEQ ID NO: 21831
  CDS (1)..(1584)

SEQ ID NO: 103890 - protein, 527 aa, Brassica napus; identical to SEQ ID NO: 8822

SEQ ID NO: 103891 - DNA, 1584 bp, Brassica napus; identical to SEQ ID NO: 8851
  CDS (1)..(1584)

SEQ ID NO: 103892 - protein, 527 aa, Brassica napus; identical to SEQ ID NO: 8852

SEQ ID NO: 103893 - DNA, 1497 bp, Brassica napus; identical to SEQ ID NO: 8855
  CDS (1)..(1497)

SEQ ID NO: 103894 - protein, 498 aa, Brassica napus; identical to SEQ ID NO: 8856

SEQ ID NO: 103895 - DNA, 1584 bp, Zea mays; identical to SEQ ID NO: 8857
  CDS (1)..(1584)

SEQ ID NO: 103896 - protein, 527 aa, Zea mays; identical to SEQ ID NO: 8858

SEQ ID NO: 103897 - DNA, 1728 bp, Glycine max; identical to SEQ ID NO: 8859
  CDS (1)..(1728)

SEQ ID NO: 103898 - protein, 575 aa, Glycine max; identical to SEQ ID NO: 8860

SEQ ID NO: 103899 - DNA, 1584 bp, Glycine max; identical to SEQ ID NO: 8861
  CDS (1)..(1584)

SEQ ID NO: 103900 - protein, 527 aa, Glycine max; identical to SEQ ID NO: 8862

SEQ ID NO: 103901 - DNA, 1584 bp, Glycine max; identical to SEQ ID NO: 8863
  CDS (1)..(1584)

SEQ ID NO: 103902 - protein, 527 aa, Glycine max; identical to SEQ ID NO: 8864

SEQ ID NO: 103903 - DNA, 1638 bp, Glycine max; identical to SEQ ID NO: 8865
  CDS (1)..(1638)

SEQ ID NO: 103904 - protein, 545 aa, Glycine max; identical to SEQ ID NO: 8866

SEQ ID NO: 103905 - DNA, 1638 bp, Glycine max; identical to SEQ ID NO: 8867
  CDS (1)..(1638)

SEQ ID NO: 103906 - protein, 545 aa, Glycine max; identical to SEQ ID NO: 8868

SEQ ID NO: 103907 - DNA, 1728 bp, Glycine max; identical to SEQ ID NO: 8869
  CDS (1)..(1728)

SEQ ID NO: 103908 - protein, 575 aa, Glycine max; identical to SEQ ID NO: 8870

SEQ ID NO: 103909 - DNA, 1749 bp, Glycine max; identical to SEQ ID NO: 8871
  CDS (1)..(1749)

SEQ ID NO: 103910 - protein, 582 aa, Glycine max; identical to SEQ ID NO: 8872

SEQ ID NO: 103911 - DNA, 1584 bp, Glycine max; identical to SEQ ID NO: 8873
  CDS (1)..(1584)

SEQ ID NO: 103912 - protein, 527 aa, Glycine max; identical to SEQ ID NO: 8874

SEQ ID NO: 103913 - DNA, 1749 bp, Glycine max; identical to SEQ ID NO: 8875
  CDS (1)..(1749)

SEQ ID NO: 103914 - protein, 582 aa, Glycine max; identical to SEQ ID NO: 8876

SEQ ID NO: 103915 - DNA, 1728 bp, Glycine max; identical to SEQ ID NO: 8877
  CDS (1)..(1728)

SEQ ID NO: 103916 - protein, 575 aa, Glycine max; identical to SEQ ID NO: 8878

SEQ ID NO: 103917 - DNA, 1749 bp, Glycine max; identical to SEQ ID NO: 8881
  CDS (1)..(1749)

SEQ ID NO: 103918 - protein, 582 aa, Glycine max; identical to SEQ ID NO: 8882

SEQ ID NO: 103919 - DNA, 1542 bp, Hordeum vulgare; identical to SEQ ID NO: 8883
  CDS (1)..(1542)

SEQ ID NO: 103920 - protein, 513 aa, Hordeum vulgare; identical to SEQ ID NO: 8884

SEQ ID NO: 103921 - DNA, 1584 bp, Oryza sativa; identical to SEQ ID NO: 8885
  CDS (1)..(1584)

SEQ ID NO: 103922 - protein, 527 aa, Oryza sativa; identical to SEQ ID NO: 8886

SEQ ID NO: 103923 - DNA, 1803 bp, Zea mays; identical to SEQ ID NO: 8887
  CDS (1)..(1803)

SEQ ID NO: 103924 - protein, 600 aa, Zea mays; identical to SEQ ID NO: 8888

SEQ ID NO: 103925 - DNA, 1698 bp, Triticum aestivum; identical to SEQ ID NO: 8889
  CDS (1)..(1698)

SEQ ID NO: 103926 - protein, 565 aa, Triticum aestivum; identical to SEQ ID NO: 8890

SEQ ID NO: 103927 - DNA, 1584 bp, Zea mays; identical to SEQ ID NO: 8891
  CDS (1)..(1584)

SEQ ID NO: 103928 - protein, 527 aa, Zea mays; identical to SEQ ID NO: 8892

SEQ ID NO: 103929 - DNA, 1728 bp, Zea mays; identical to SEQ ID NO: 8895
  CDS (1)..(1728)

SEQ ID NO: 103930 - protein, 575 aa, Zea mays; identical to SEQ ID NO: 8896

SEQ ID NO: 103931 - DNA, 1707 bp, Zea mays; identical to SEQ ID NO: 8897
  CDS (1)..(1707)

SEQ ID NO: 103932 - protein, 568 aa, Zea mays; identical to SEQ ID NO: 8898

SEQ ID NO: 103933 - DNA, 1629 bp, Zea mays; identical to SEQ ID NO: 8899
  CDS (1)..(1629)

SEQ ID NO: 103934 - protein, 542 aa, Zea mays; identical to SEQ ID NO: 8900

SEQ ID NO: 103935 - DNA, 1548 bp, Zea mays; identical to SEQ ID NO: 8901
  CDS (1)..(1548)

SEQ ID NO: 103936 - protein, 515 aa, Zea mays; identical to SEQ ID NO: 8902

SEQ ID NO: 103937 - DNA, 1542 bp, Zea mays; identical to SEQ ID NO: 8905
  CDS (1)..(1542)

SEQ ID NO: 103938 - protein, 513 aa, Zea mays; identical to SEQ ID NO: 8906

SEQ ID NO: 103939 - DNA, 1530 bp, Zea mays; identical to SEQ ID NO: 8903
  CDS (1)..(1530)

SEQ ID NO: 103940 - protein, 509 aa, Zea mays; identical to SEQ ID NO: 8904

SEQ ID NO: 103941 - DNA, 1707 bp, Zea mays; identical to SEQ ID NO: 8831
  CDS (1)..(1707)

SEQ ID NO: 103942 - protein, 568 aa, Zea mays; identical to SEQ ID NO: 8832

SEQ ID NO: 103943 - DNA, 1584 bp, Zea mays; identical to SEQ ID NO: 8907
  CDS (1)..(1584)

SEQ ID NO: 103944 - protein, 527 aa, Zea mays; identical to SEQ ID NO: 8908

SEQ ID NO: 103945 - DNA, 1554 bp, Zea mays; identical to SEQ ID NO: 8909
  CDS (1)..(1554)

SEQ ID NO: 103946 - protein, 517 aa, Zea mays; identical to SEQ ID NO: 8910

SEQ ID NO: 103947 - DNA, 1707 bp, Zea mays; identical to SEQ ID NO: 8911
  CDS (1)..(1707)

SEQ ID NO: 103948 - protein, 568 aa, Zea mays; identical to SEQ ID NO: 8912

SEQ ID NO: 103949 - DNA, 1728 bp, Zea mays; identical to SEQ ID NO: 8913
  CDS (1)..(1728)

SEQ ID NO: 103950 - protein, 575 aa, Zea mays; identical to SEQ ID NO: 8914

SEQ ID NO: 103951 - DNA, 21 bp, Artificial sequence
  primer
atggcggcgggcggtgagttg

SEQ ID NO: 103952 - DNA, 22 bp, Artificial sequence
  primer
ctacttcacagtaagaagcttg

SEQ ID NO: 103953 - protein, 445 aa, Artificial sequence
  consensus sequence
  Variant (4)..(5): Xaa in position 4 to 5 is any amino acid
  Variant (7)..(7): Xaa in position 7 is any amino acid
  Variant (10)..(17): Xaa in position 10 to 17 is any amino acid
  Variant (18)..(23): Xaa in position 18 to 23 is any or no amino acid
  Variant (25)..(28): Xaa in position 25 to 28 is any amino acid
  Variant (29)..(29): Xaa in position 29 is any or no amino acid
  Variant (31)..(31): Xaa in position 31 is any amino acid
  Variant (33)..(33): Xaa in position 33 is any amino acid
  Variant (37)..(40): Xaa in position 37 to 40 is any amino acid
  Variant (42)..(62): Xaa in position 42 to 62 is any amino acid
  Variant (63)..(69): Xaa in position 63 to 69 is any or no amino acid
  Variant (71)..(72): Xaa in position 71 to 72 is any amino acid
  Variant (73)..(76): Xaa in position 73 to 76 is any or no amino acid
  Variant (79)..(80): Xaa in position 79 to 80 is any amino acid
  Variant (82)..(93): Xaa in position 82 to 93 is any amino acid
  Variant (94)..(100): Xaa in position 94 to 100 is any or no amino acid
  Variant (102)..(127): Xaa in position 102 to 127 is any amino acid
  Variant (128)..(138): Xaa in position 128 to 138 is any or no amino acid
  Variant (140)..(146): Xaa in position 140 to 146 is any amino acid
  Variant (147)..(152): Xaa in position 147 to 152 is any or no amino acid
  Variant (154)..(158): Xaa in position 154 to 158 is any amino acid
  Variant (160)..(179): Xaa in position 160 to 179 is any amino acid
  Variant (180)..(186): Xaa in position 180 to 186 is any or no amino acid
  Variant (188)..(190): Xaa in position 188 to 190 is any amino acid
  Variant (191)..(202): Xaa in position 191 to 202 is any or no amino acid
  Variant (204)..(207): Xaa in position 204 to 207 is any amino acid
  Variant (210)..(211): Xaa in position 210 to 211 is any amino acid
  Variant (213)..(221): Xaa in position 213 to 221 is any amino acid
  Variant (222)..(222): Xaa in position 222 is any or no amino acid
  Variant (224)..(227): Xaa in position 224 to 227 is any amino acid
  Variant (230)..(234): Xaa in position 230 to 234 is any amino acid
  Variant (236)..(245): Xaa in position 236 to 245 is any amino acid
  Variant (246)..(259): Xaa in position 246 to 259 is any or no amino acid
  Variant (261)..(261): Xaa in position 261 is any amino acid
  Variant (263)..(272): Xaa in position 263 to 272 is any amino acid
  Variant (273)..(275): Xaa in position 273 to 275 is any or no amino acid
  Variant (277)..(280): Xaa in position 277 to 280 is any amino acid
  Variant (282)..(283): Xaa in position 282 to 283 is any amino acid
  Variant (292)..(292): Xaa in position 292 is any amino acid
  Variant (294)..(294): Xaa in position 294 is any amino acid
  Variant (296)..(302): Xaa in position 296 to 302 is any amino acid
  Variant (305)..(314): Xaa in position 305 to 314 is any amino acid
  Variant (316)..(316): Xaa in position 316 is any amino acid
  Variant (318)..(319): Xaa in position 318 to 319 is any amino acid
  Variant (322)..(322): Xaa in position 322 is any amino acid
  Variant (324)..(325): Xaa in position 324 to 325 is any amino acid
  Variant (328)..(330): Xaa in position 328 to 330 is any amino acid
  Variant (332)..(332): Xaa in position 332 is any amino acid
  Variant (338)..(339): Xaa in position 338 to 339 is any amino acid
  Variant (345)..(346): Xaa in position 345 to 346 is any amino acid
  Variant (349)..(349): Xaa in position 349 is any amino acid
  Variant (351)..(352): Xaa in position 351 to 352 is any amino acid
  Variant (356)..(356): Xaa in position 356 is any amino acid
  Variant (358)..(358): Xaa in position 358 is any amino acid
  Variant (360)..(360): Xaa in position 360 is any amino acid
  Variant (362)..(363): Xaa in position 362 to 363 is any amino acid
  Variant (365)..(367): Xaa in position 365 to 367 is any amino acid
  Variant (369)..(370): Xaa in position 369 to 370 is any amino acid
  Variant (372)..(372): Xaa in position 372 is any amino acid
  Variant (373)..(378): Xaa in position 373 to 378 is any or no amino acid
  Variant (380)..(400): Xaa in position 380 to 400 is any amino acid
  Variant (401)..(426): Xaa in position 401 to 426 is any or no amino acid
  Variant (428)..(430): Xaa in position 428 to 430 is any amino acid
  Variant (432)..(433): Xaa in position 432 to 433 is any amino acid
  Variant (435)..(436): Xaa in position 435 to 436 is any amino acid
  Variant (438)..(442): Xaa in position 438 to 442 is any amino acid
  Variant (443)..(444): Xaa in position 443 to 444 is any or no amino acid
TKIXXTXGPXXXXXXXXXXXXXXGXXXXXRXNXSHGXXXXHXXXXXXXXXXXXXXXXXXXXXXXXXXXXDXXXXXXGPXXRXXXXXXXXXXXXXXXXXXXGXXXXXXXXXXXXXXXXXXXXXXXXXXXXXXXXXXXXXGXXXXXXXXXXXXXGXXXXXVXXXXXXXXXXXXXXXXXXXXXXXXXXXNXXXXXXXXXXXXXXXPXXXXKDXXDXXXXXXXXXXDXXXXSFXXXXXDXXXXXXXXXXXXXXXXXXXXXXXXKXEXXXXXXXXXXXXXIXXXXDXXMVARGDLGXEXPXXXXXXXQKXXXXXXXXXXKXVXXATXMXXSMXXXPXPTRAEXXDVANAXXDGXDXXMLSXEXAXGXXPXXXVXXMXXXXXXXEXXXXXXXXXXXXXXXXXXXXXXXXXXXXXXXXXXXXXXXXXXXXXXXIXXXTXXGXXAXXXXXXXP

SEQ ID NO: 103954 - protein, 34 aa, Artificial sequence
  protein pattern
  Variant (5)..(6): Xaa in position 5 to 6 is any amino acid
  Variant (9)..(9): Xaa in position 9 is Ala, Gly or Ser
  Variant (10)..(10): Xaa in position 10 is Glu, Asn or Thr
  Variant (12)..(12): Xaa in position 12 is Ile or Val
  Variant (13)..(13): Xaa in position 13 is any amino acid
  Variant (14)..(14): Xaa in position 14 is Asp, Glu or Gln
  Variant (15)..(15): Xaa in position 15 is any amino acid
  Variant (16)..(16): Xaa in position 16 is Ala, Ser, Thr or Val
  Variant (18)..(19): Xaa in position 18 to 19 is any amino acid
  Variant (20)..(20): Xaa in position 20 is Leu, Met or Val
  Variant (22)..(22): Xaa in position 22 is Ala, Gly, Ser or Thr
  Variant (23)..(23): Xaa in position 23 is Ala, Glu, Gly or Asn
  Variant (25)..(25): Xaa in position 25 is Ser or Thr
  Variant (26)..(27): Xaa in position 26 to 27 is any amino acid
  Variant (29)..(30): Xaa in position 29 to 30 is any amino acid
  Variant (32)..(33): Xaa in position 32 to 33 is any amino acid
  Variant (34)..(34): Xaa in position 34 is Ala, Cys, Ser, Thr or Val
TRAEXXDVXXAXXXXXDXXXLXXEXXXGXXPXXX

SEQ ID NO: 103955 - protein, 12 aa, Artificial sequence
  protein pattern
  Variant (2)..(2): Xaa in position 2 is any amino acid
  Variant (3)..(3): Xaa in position 3 is Cys, Asp, Asn, Ser or Thr
  Variant (4)..(5): Xaa in position 4 to 5 is any amino acid
  Variant (7)..(7): Xaa in position 7 is Phe, Ile, Leu, Met or Val
  Variant (9)..(9): Xaa in position 9 is any amino acid
GXXXXRXNXSHG

SEQ ID NO: 103956 - protein, 18 aa, Artificial sequence
  protein pattern
  Variant (2)..(4): Xaa in position 2 to 4 is any amino acid
  Variant (5)..(5): Xaa in position 5 is any or no amino acid
  Variant (7)..(7): Xaa in position 7 is Ala, Gly or Val
  Variant (8)..(8): Xaa in position 8 is any amino acid
  Variant (10)..(10): Xaa in position 10 is Ile or Val
  Variant (15)..(15): Xaa in position 15 is Leu or Met
  Variant (16)..(16): Xaa in position 16 is Ala or Gly
  Variant (17)..(17): Xaa in position 17 is any amino acid
  Variant (18)..(18): Xaa in position 18 is Glu or Gln
IXXXXDXXMXARGDXXXX

SEQ ID NO: 103957 - protein, 14 aa, Artificial sequence
  protein pattern
  Variant (3)..(3): Xaa in position 3 is Ala, Glu, Asn or Gln
  Variant (5)..(5): Xaa in position 5 is Leu or Met
  Variant (6)..(6): Xaa in position 6 is any amino acid
  Variant (9)..(11): Xaa in position 9 to 11 is any amino acid
  Variant (12)..(13): Xaa in position 12 to 13 is any or no amino acid
ATXMXXSMXXXXXP

SEQ ID NO: 103958 - DNA, 378 bp, Escherichia coli
  CDS (1)..(378): transl_table=11
atgatcaattcgccccgagtgtgtattcaggttcaaagcgtctacattgaggctcaatcttcacctgataatgaacgttacgtttttgcttataccgtaaccatacgcaatctggggcgagcgccagtgcagttgttggggcgttactggctgatcaccaatggcaatggccgtgaaaccgaagtccagggcgaaggagtggttggcgtccagccacttatcgcgcctggcgaagagtaccagtacaccagcggtgcaatcattgaaaccccgctgggcaccatgcagggtcactacgaaatgatcgatgaaaatggcgtccctttcagcatcgacattcccgtattccgactcgccgttcccacactcattcattaa

SEQ ID NO: 103959 - protein, 125 aa, Escherichia coli
MINSPRVCIQVQSVYIEAQSSPDNERYVFAYTVTIRNLGRAPVQLLGRYWLITNGNGRETEVQGEGVVGVQPLIAPGEEYQYTSGAIIETPLGTMQGHYEMIDENGVPFSIDIPVFRLAVPTLIH

SEQ ID NO: 103960 - DNA, 1342 bp, Sorghum bicolor
  CDS (174)..(1046)
taagggcgccgcacgtgggcggcggggaggggtagcgaagcctgggcagccactcgccggcctccaagaaaccgtcacgatctgttcatctgattgccgccgactttggtttcattattttctgttttcgcggggaaccaattcgatttagtttccggagaaggaagagtaggatgcagtgggcgggtctaaggtcgcaggcgccggttcccacggcggcgtggacggggccgaggccaagaatcgcgaggtggccgcagggtagattcactgcagcgcgccgggcgctggtggcgtcagcagcggcctcggacgctaattcgagctcgaattcgccggggagggacgaggagagggaggaggtggtgcagagggagaagaaggagaaggcggtcgcgtcgctgctgatgaggagccagaagtacgccatgctaaagcagcagctcgccgtggccgcccaatttgaggattacaaggaagcagcgaggctgagggactcgctgaggtcgttcgaggaggaggagcccgtgctgcgcctccgcaggttgatgaagaaggccattgacgaggagaggtttgaggatgctgctaaatacagagatgaattaatgattttggctccacactccctcctcaaatgttccagcgatgcaactactttgggcataagagttcaagtcaggagcgtctatattgaaagccggagccagccattgaaaggccaattcttttttgcttatagaattagaatcacaaataattctcagcgccctgttcagcttctcagaagacactggattgttacagatggaaatggaaggacggaaaatatttggggagttggagtagtgggagaacaacctgtcattttcccgaagactggttttgagtactcttctgcatgcccattgagcactccaaatgggagaatggaaggtgactttgagatgaagcacatcgacaaggctggatcatcaacattcaatgtcgcaatcgcgccattctctctgtcaattcttggggacgacaatgatgttctgctctaaaccacactgagatttaaactagacacgcaaacacaaatagttactgttagcgatgtagttttgagtgtgcaaggtacaggtgaaactactagggttgaccgatggctggagccaagtgccctggtgcaaggtcaggcacagtttgctggaatgtagaatctggaccatgcgagtgtcaattatagaggcacaataggatatcctatcaattgtacagcgtggaactatagagcttgctatcatgtaattcctctgttccaaattacaaggtattttgtttttttctcagataaaaa

SEQ ID NO: 103961 - protein, 290 aa, Sorghum bicolor
MQWAGLRSQAPVPTAAWTGPRPRIARWPQGRFTAARRALVASAAASDANSSSNSPGRDEEREEVVQREKKEKAVASLLMRSQKYAMLKQQLAVAAQFEDYKEAARLRDSLRSFEEEEPVLRLRRLMKKAIDEERFEDAAKYRDELMILAPHSLLKCSSDATTLGIRVQVRSVYIESRSQPLKGQFFFAYRIRITNNSQRPVQLLRRHWIVTDGNGRTENIWGVGVVGEQPVIFPKTGFEYSSACPLSTPNGRMEGDFEMKHIDKAGSSTFNVAIAPFSLSILGDDNDVLL

SEQ ID NO: 103962 - DNA, 903 bp, Oryza sativa (japonica cultivar-group)
  CDS (1)..(903)
atgcagtgggcggcgctgagctcgccgccggcaccggcggcgccggcggcggtgtggatggggcggagggcaagaaccgcgaggttgccgtcgccggggccgcgccgggtggtgctggccgccgcggcgtcgtcgtcgtcgccgtcgccggatgcgaactcgagctcgaactcgaactcgccggggagtggtggcggcggcgaggaggtggaggaggagagggaggacgcggcgcggatggagaaggcggcggccttcctgatgcggagccagaagtacgccatgctcaagcagcagctcgccgtggccgcccagttcgaggattacaaggaggcggcgaggctgagggattcgctcaagtcattcgaggaggaggagccagttcttcgtctccgccgatcgctcaagaaggcggttgaggaggagaggttcgaggatgctgctaagtacagagatgaactgaagattttggctccacacgccctcctaaaatgttctagtgatgctactaccctggggattagagttcaagtcaggagtgtttatattgaaagccggagccagcctttgaagggccagttcttctttgcctacagaatcagaatcacaaataattctcagcgccctgttcagcttctcagaagacattggattgtcactgatgcaaatggaaggacggagaacatttggggtgtaggtgttgtgggagagcaacctgtcatatttccaaggactggttttgagtactcatctgcatgcccattaaacacaccaaatgggagaatggaaggtgattttgagatgaagcacatcgacaaagctgggtcgtctacattcaatgtcgcaattgcaccattctctctgtcaatccttggagatgacaacgatgatgttctcctctaa

SEQ ID NO: 103963 - protein, 300 aa, Oryza sativa (japonica cultivar-group)
MQWAALSSPPAPAAPAAVWMGRRARTARLPSPGPRRVVLAAAASSSSPSPDANSSSNSNSPGSGGGGEEVEEEREDAARMEKAAAFLMRSQKYAMLKQQLAVAAQFEDYKEAARLRDSLKSFEEEEPVLRLRRSLKKAVEEERFEDAAKYRDELKILAPHALLKCSSDATTLGIRVQVRSVYIESRSQPLKGQFFFAYRIRITNNSQRPVQLLRRHWIVTDANGRTENIWGVGVVGEQPVIFPRTGFEYSSACPLNTPNGRMEGDFEMKHIDKAGSSTFNVAIAPFSLSILGDDNDDVLL

SEQ ID NO: 103964 - DNA, 402 bp, Agrobacterium tumefaciens str. C58
  CDS (1)..(402): transl_table=11
gtggcgcgtatgtatcgtgctctgacaagggatatcgaggtgacggtcgatccgtattatctcgaggaacaatccgacccggatgacgatcgttacgtctggggctataaagtcgtgatcgcgaacaattccgatgtccccgtaaaactcgtcaaccgttattggcatatcaccgatcagaacggacaggtggacgaggtctacgggccgggcgtcgtgggtgaacagccgcagctcaaaccaggcgacagctatgaatattcctcgggctgcccgctggatacgccttcaggcctgatgttcggccattatgagatggaaacggaaaatggcgaggtgttcaatgtcaccatacccgccttttcgctggattcacccggcctgatgcgcgtcctgaactga

SEQ ID NO: 103965 - protein, 133 aa, Agrobacterium tumefaciens str. C58
MARMYRALTRDIEVTVDPYYLEEQSDPDDDRYVWGYKVVIANNSDVPVKLVNRYWHITDQNGQVDEVYGPGVVGEQPQLKPGDSYEYSSGCPLDTPSGLMFGHYEMETENGEVFNVTIPAFSLDSPGLMRVLN

SEQ ID NO: 103966 - DNA, 465 bp, Caulobacter crescentus CB15
  CDS (1)..(465): transl_table=11
gtgcgctcgatcaggcgtgagacctccccgcccatgcaacgcatgagacgccgccggggcagcgacagcgccgcctatgaggcccgcacgcgcgacatcgtcgtgcgcgtcttccccacctatgcggccgaggaaagctcgcccgagcagggcctctatctgtggtcctacacggtcgagatcgagaaccacggcgaagagacggtcaccctgatcgcgcgccgctggacgatcaccgacggcttcaaccgggtgaacgaggtcgagggcagcggcgtggtcggcgaacagcccgagctgaagccgcgcgaggcgttccgctatgtctccaactgccctctgcctacgccgtcgggcgcgatgcgggggagctaccagatggtcaccgacgcgggcgacctgttcgacgtggcgatcccggagttctcgctgcacctgccgggcgcggcgatgaagctcaactga

SEQ ID NO: 103967 - protein, 154 aa, Caulobacter crescentus CB15
MRSIRRETSPPMQRMRRRRGSDSAAYEARTRDIVVRVFPTYAAEESSPEQGLYLWSYTVEIENHGEETVTLIARRWTITDGFNRVNEVEGSGVVGEQPELKPREAFRYVSNCPLPTPSGAMRGSYQMVTDAGDLFDVAIPEFSLHLPGAAMKLN

SEQ ID NO: 103968 - DNA, 1233 bp, Drosophila melanogaster
  CDS (1)..(1233)
atgagcttgttggtgcaagtgttcaagtgggaccagcgatgtcccatgctccacagggtggacatcctgctgcggcgtggcgtcaagaagcaggcggtgtatccgaccaaactggctgaggtgggtcgcctggtggatgcccgcgacgaccggtacgagacgggccaactattcctgcaccgcatcttcggctaccgcggcgttatactcttcccctggacagcccgcgtctacgaccgggatctgcacaatcctggcaagattagcgccaccacgactacgagcgccaatccgacgcagcagaaccgcaccaaagaggcttcgctccgcgtgaaggccaacacctccgcttccccaacggctgctaccgctcagagcgccgatgcccccacctcgaccgcctttgagacgaacgcggctgaaagtacaggcaccacaaacctgggtaccacctcccaagtggatcccaaagaggtcaagggcaaggtgcaaaccttttatcaggtgctcatagacacccgcgattgcccgtacattcgcgcccagaccgaggcggtcacctttctcggcaaccaggactccaaccgcagcctctacgccatccccgggctggactacgtggcccacgaggacatcatgccttacagctccagcgagaagagtccgctgcagcacgagctgttcgataagttccttacgcacgctccggacgcggacccgccatttgtgggccaggacactctgaaggcgtggcaggagaagaaccatccctggctggacatgagcgatgtacacaaggagaccacggagaacgtgcgcattaccgtgattcccttctacatgggttgccgggagacgcctgctagttcggtctactggtggcgctactgcatccgactggagaacctcggcgagctgagcgtgcagctgcgcgagcgccactggcgcattttctcactgtctggaaccctggagacggtgcgcggaagaggagtggtgggccaggagcccattctgagcccccggctgcccgcctttcagtacagcagccatgtgagcctgcaggctcccagcggccatatgtggggcaccttccggctggagcgcgaagacggatactccttcgattgcaagattccgcccttctcactggagagcaagccggacgacctagggacgcccacaccggccacgcccagtgcccacgataaaaagcgcgacgatagcgattaa

SEQ ID NO: 103969 - protein, 410 aa, Drosophila melanogaster
MSLLVQVFKWDQRCPMLHRVDILLRRGVKKQAVYPTKLAEVGRLVDARDDRYETGQLFLHRIFGYRGVILFPWTARVYDRDLHNPGKISATTTTSANPTQQNRTKEASLRVKANTSASPTAATAQSADAPTSTAFETNAAESTGTTNLGTTSQVDPKEVKGKVQTFYQVLIDTRDCPYIRAQTEAVTFLGNQDSNRSLYAIPGLDYVAHEDIMPYSSSEKSPLQHELFDKFLTHAPDADPPFVGQDTLKAWQEKNHPWLDMSDVHKETTENVRITVIPFYMGCRETPASSVYWWRYCIRLENLGELSVQLRERHWRIFSLSGTLETVRGRGVVGQEPILSPRLPAFQYSSHVSLQAPSGHMWGTFRLEREDGYSFDCKIPPFSLESKPDDLGTPTPATPSAHDKKRDDSD

SEQ ID NO: 103970 - DNA, 1296 bp, Drosophila melanogaster
  CDS (1)..(1296)
atgcgccgcgatgagcttgttggtgcaagtgttcaagtgggaccagcgatgtcccatgctccacagggtggacatcctgctgcggcgtggcgtcaagaagcaggcggtgtatccgaccaagtgagtggggtcctgaatcctcctgaaaattgcataacacgtcatttgtacagactggctgaggtgggtcgcctggtggatgcccgcgacgaccggtacgagacgggccaactattcctgcaccgcatcttcggctaccgcggcgttatactcttcccctggacagcccgcgtctacgaccgggatctgcacaatcctggcaagattagcgccaccacgactacgagcgccaatccgacgcagcagaaccgcaccaaagaggcttcgctccgcgtgaaggccaacacctccgcttccccaacggctgctaccgctcagagcgccgatgcccccacctcgaccgcctttgagacgaacgcggctgaaagtacaggcaccacaaacctgggtaccacctcccaagtggatcccaaagaggtcaagggcaaggtgcaaaccttttatcaggtgctcatagacacccgcgattgcccgtacattcgcgcccagaccgaggcggtcacctttctcggcaaccaggactccaaccgcagcctctacgccatccccgggctggactacgtggcccacgaggacatcatgccttacagctccagcgagaagagtccgctgcagcacgagctgttcgataagttccttacgcacgctccggacgcggacccgccatttgtgggccaggacactctgaaggcgtggcaggagaagaaccatccctggctggacatgagcgatgtacacaaggagaccacggagaacgtgcgcattaccgtgattcccttctacatgggttgccgggagacgcctgctagttcggtctactggtggcgctactgcatccgactggagaacctcggcgagctgagcgtgcagctgcgcgagcgccactggcgcattttctcactgtctggaaccctggagacggtgcgcggaagaggagtggtgggccaggagcccattctgagcccccggctgcccgcctttcagtacagcagccatgtgagcctgcaggctcccagcggccatatgtggggcaccttccggctggagcgcgaagacggatactccttcgattgcaagattccgcccttctcactggagagcaagccggacgacctagggacgcccacaccggccacgcccagtgcccacgataaaaagcgcgacgatagcgattaa

SEQ ID NO: 103971 - protein, 431 aa, Drosophila melanogaster
MRRDELVGASVQVGPAMSHAPQGGHPAAAWRQEAGGVSDQVSGVLNPPENCITRHLYRLAEVGRLVDARDDRYETGQLFLHRIFGYRGVILFPWTARVYDRDLHNPGKISATTTTSANPTQQNRTKEASLRVKANTSASPTAATAQSADAPTSTAFETNAAESTGTTNLGTTSQVDPKEVKGKVQTFYQVLIDTRDCPYIRAQTEAVTFLGNQDSNRSLYAIPGLDYVAHEDIMPYSSSEKSPLQHELFDKFLTHAPDADPPFVGQDTLKAWQEKNHPWLDMSDVHKETTENVRITVIPFYMGCRETPASSVYWWRYCIRLENLGELSVQLRERHWRIFSLSGTLETVRGRGVVGQEPILSPRLPAFQYSSHVSLQAPSGHMWGTFRLEREDGYSFDCKIPPFSLESKPDDLGTPTPATPSAHDKKRDDSD

SEQ ID NO: 103972 - DNA, 375 bp, Bordetella bronchiseptica RB50
  CDS (1)..(375): transl_table=11
gtgaaaccctatgatctgaccgtatccgtgaccccgcgttatgtgccggagcagtccgatcccagtcagcagcaatacgtgtttgcctacacggtgcgcatcaccaataccggttcgcacccggcccaggtcatcagccgccactggatcatcaccgacggcgaggagcgcgtgcaggaagtgcgcggccttggcgtggtgggccagcaaccgctgctggcgccgggcgagaccttcgaatacaccagcggctgtccgcttccgacccccatcggcacgatgcggggtacctaccattgcgtcggcgaaaacggcattccgttcgaggtgccgatcgcggagttcctgctggccatgccgcgtacactgcactga

SEQ ID NO: 103973 - protein, 124 aa, Bordetella bronchiseptica RB50
MKPYDLTVSVTPRYVPEQSDPSQQQYVFAYTVRITNTGSHPAQVISRHWIITDGEERVQEVRGLGVVGQQPLLAPGETFEYTSGCPLPTPIGTMRGTYHCVGENGIPFEVPIAEFLLAMPRTLH

SEQ ID NO: 103974 - DNA, 429 bp, Bdellovibrio bacteriovorus HD100
  CDS (1)..(429): transl_table=11
ttgacgtttttcacggtcaaatttattctgaatgtcactatggcaatgcaaaaaacttcaatccctgatttccagatcaccgcgaaagtcgtctacgtaccgtctgagtcgcgtcctgatgaaggctaccatttctttgcctataaaattactatcaccaacacaggatcaacccctgcccaactgatgagccgtcactgggtcatcaccgatgcgttgggtaaaaaagaagaagtccgcggccctggtgttgtcggattacagcctaaaattcaacctggtcagacctttgaatacgacagcgcctgcccactgacaacctccaccggcagcatggtgggacgctatttcttcgtgggcgaaagtggcgaaagcttctctgtggaagttcccgagttctatctgattgcccctttggcactgcattaa

SEQ ID NO: 103975 - protein, 142 aa, Bdellovibrio bacteriovorus HD100
MTFFTVKFILNVTMAMQKTSIPDFQITAKVVYVPSESRPDEGYHFFAYKITITNTGSTPAQLMSRHWVITDALGKKEEVRGPGVVGLQPKIQPGQTFEYDSACPLTTSTGSMVGRYFFVGESGESFSVEVPEFYLIAPLALH

SEQ ID NO: 103976 - DNA, 1047 bp, Strongylocentrotus purpuratus
  CDS (1)..(1047)
atggcagtaacaaaaatgacgactattttcttgaggaggaaacacgctattctgtgtgtggcagctcaaaattgtttcaggaatgaacgtagaacactagcgtcaaaaaaactacagacagttggaaaactagaaacacctaagcaacatggaaaatatatcactggacagttatttttgcatagaatttttggctatcgaggcatcctacttttcccatggcttgctagactgtatgacagagatatagctggaaacaaacaagacagcaggcctacagagaagatagatggaatgcctttagataccaacaaagaagtgaaaggaaaaacacatgtctactatcaagtgctaatagattcaagagattgccctttcattagggcacaaacagaagcagtcacctttcttggtaaccaagataacaacagatctctatatgcaataccaggtcttgactatgtagcccatgaagatgtcttaccatactcctcttctggtgaagccagtcctatcagtcatgagctctttgataaattcttagaattcaatcctggccaagatccccacttcagccctaaagacaccctgcgggcgtggcaggagaagaaccatccctggttagagttatcagatgtccatcgggagactactgatggcatcagagttactgttataccattctacatgggtgctagggtttcacaggattcaagtgtgtattggtggaggtactgcataaggcttgagaatcttggagatgaaacggtacagctgagagaaagacattggagaatcttcagtctgtcaggaacgttagagacagtgagaggaagaggagtggtgggacaggaacccatcttatctaaggagcaaccagccttccagtatagcagtcatgtatcattacaagcaccgagtggacacatgtgggggacattccgcatggagaagagcgacggtcagacatttgactgtcgaatcccacctttcaccttagagagcaagcaagatgatcactccagtccacatagcttcttctggtga

SEQ ID NO: 103977 - protein, 348 aa, Strongylocentrotus purpuratus
MAVTKMTTIFLRRKHAILCVAAQNCFRNERRTLASKKLQTVGKLETPKQHGKYITGQLFLHRIFGYRGILLFPWLARLYDRDIAGNKQDSRPTEKIDGMPLDTNKEVKGKTHVYYQVLIDSRDCPFIRAQTEAVTFLGNQDNNRSLYAIPGLDYVAHEDVLPYSSSGEASPISHELFDKFLEFNPGQDPHFSPKDTLRAWQEKNHPWLELSDVHRETTDGIRVTVIPFYMGARVSQDSSVYWWRYCIRLENLGDETVQLRERHWRIFSLSGTLETVRGRGVVGQEPILSKEQPAFQYSSHVSLQAPSGHMWGTFRMEKSDGQTFDCRIPPFTLESKQDDHSSPHSFFW

SEQ ID NO: 103978 - DNA, 1017 bp, Nasonia vitripennis
  CDS (1)..(1017)
atggaactgtcgcgcgtcgttctcggtaaccggctgaggaagacgctgctcgacgtgacgaacaaaattttcagcgtgcaagtcgccaagtacataagattggcagaagtcggaaaattggagactccgaaactgcagggcaagtacgaaactggacagctgatattgcacagggtctttggctacaggggagtcattctttttccatggctggctagagtttatgacagagatttgcccaacagacgcgaaggcactgaagatggaaacttcaatggagttgggaaagaagtgaaaggacgaacacacactttttatcaagttttaattgaccagagagattgtccttacattagggcacaaacagaagctgtgacctttcttggaaaccatgaaagcagtaggagtctttatgccataccaggactagactatgttgcacatgaagatattttaccatacaccaccaatgaaaaaccagccttacagcatgagttgtttgataaatttctctcctaccattcggacagagaccccccgtttgcagctcaagaaacactacgagcatggcaaaagaaaaatcatccttggctagagctatcagatgttcacaaagaaacgacagaaaacataagagtcactgttatcccattttatatgggctgtagggaaagtcagaccacatcagtatattggtggcgctactgcatcaggctagagaatcttggcgatttaagtgtacaattaagagaaaggcattggagaatattcagcttatcaggcacaattagaaacagtaagaggacggggtgttgtgggcccaagaaaccagtgctctcaaagaccttaccagccttccagtacagcagtcatgttagtctacaggctcctagtggacacatgtggggaacatttagaatggaaagagaagatggttatgcctttgactgtcgaattccgcccttttctttagaatcgaaagcagacgaacccacgactcctaacgcaaacacgtga

SEQ ID NO: 103979 - protein, 338 aa, Nasonia vitripennis
MELSRVVLGNRLRKTLLDVTNKIFSVQVAKYIRLAEVGKLETPKLQGKYETGQLILHRVFGYRGVILFPWLARVYDRDLPNRREGTEDGNFNGVGKEVKGRTHTFYQVLIDQRDCPYIRAQTEAVTFLGNHESSRSLYAIPGLDYVAHEDILPYTTNEKPALQHELFDKFLSYHSDRDPPFAAQETLRAWQKKNHPWLELSDVHKETTENIRVTVIPFYMGCRESQTTSVYWWRYCIRLENLGDLSVQLRERHWRIFSLSGTIRNSKRTGCCGPKKPVLSKTLPAFQYSSHVSLQAPSGHMWGTFRMEREDGYAFDCRIPPFSLESKADEPTTPNANT

SEQ ID NO: 103980 - DNA, 783 bp, Strongylocentrotus purpuratus
  CDS (1)..(783)
atggtcaggcctacagagaagatagatggaatgcctttagataccaacaaagaagtgaaaggaaaaacacatgtctactatcaagtgctaatagattcaagagattgccctttcattagggcacaaacagaagcagtcacctttcttggtaaccaagataacaacagatctctatatgcaataccaggtcttgactatgtagcccatgaagatgtcttaccatactcctcttctggtgaagccagtcctatcagtcatgagctctttgataaattcttagaattcaatcctggccaagatccccacttcagccctaaagacaccctgcgggcgtggcaggagaagaaccatccctggttagagttatcagatgtccatcgggagactactgatggcatcagagttactgttataccattctacatgggtgctagggtttcacaggattcaagtgtgtattggtggaggtactgcataaggcttgagaatcttggagatgaaacggtacagctgagagaaagacattggagaatcttcagtctgtcaggaacgttagagacagtgagaggaagaggagtggtgggacaggaacccatcttatctaaggagcaaccagccttccagtatagcagtcatgtatcattacaagcaccgagtggacacatgtgggggacattccgcatggagaagagcgacggtcagacatttgactgtcgaatcccacctttcaccttagagagcaagcaagatgatcactccagtccacatagcttcttctggtga

SEQ ID NO: 103981 - protein, 260 aa, Strongylocentrotus purpuratus
MVRPTEKIDGMPLDTNKEVKGKTHVYYQVLIDSRDCPFIRAQTEAVTFLGNQDNNRSLYAIPGLDYVAHEDVLPYSSSGEASPISHELFDKFLEFNPGQDPHFSPKDTLRAWQEKNHPWLELSDVHRETTDGIRVTVIPFYMGARVSQDSSVYWWRYCIRLENLGDETVQLRERHWRIFSLSGTLETVRGRGVVGQEPILSKEQPAFQYSSHVSLQAPSGHMWGTFRMEKSDGQTFDCRIPPFTLESKQDDHSSPHSFFW

SEQ ID NO: 103982 - DNA, 999 bp, Tribolium castaneum
  CDS (1)..(999)
atggaagtgttgcgggccgttttgaacactaatttggtgaaaattccggtgtgtttgaccgtccacaaccgctcgtatgccaggttggcggaggtcgggcgtttggacgccccaaaaatcaccgggaagtacgagacgggccagttgatcctccaccgggtgtttgggtaccgtggggtggtgctgttcccgtggctggcccgtgtgtacgaccgcgatttgccccagcaccggtcgggggacgtggagcccaacccgggggttggcaaggaggtgcgggggcgcacgcacaccttttatcaagttttgatcgatcagagagactgtccttatattagagctcaaaccgaagctgtgaccttcttaggtaatcaggactcgtccaggagcttgtatgccatccctggactggattacgtggcgcatgaagatattattccatacactagtgcggaaaaatcgccgctgcatcatgagctgtttgataaattcctggcttatgatcccgataaagatccgccgtttgtggctcaggagactctccgagcctggcaaaacaagaaccacccttggctagaactgtccgatgtccataaagaaacaactgaaaatattagagtgactgtgattccattttatatgggttttagggaatcccactccacctcagtctattggtggaggtattgtataagattagaaaatttaggttctctcagtgtccagttgcgtgaacgtcactggcgtattttttccttgtctggtactttggaaacagtacgtgggcgtggtgtagtaggccaggaaccagcgcttactaggacattaccagcctttcaatacagtagtcacgtcagtctccaagcgcctagcggccacatgtgggggactttcaggatggagcgtgaggatgggtacactttcgattgtcgaatcccgccattttcgctcgagagcaagccggacataacaccagcagcgccccctggagctctatag

SEQ ID NO: 103983 - protein, 332 aa, Tribolium castaneum
MEVLRAVLNTNLVKIPVCLTVHNRSYARLAEVGRLDAPKITGKYETGQLILHRVFGYRGVVLFPWLARVYDRDLPQHRSGDVEPNPGVGKEVRGRTHTFYQVLIDQRDCPYIRAQTEAVTFLGNQDSSRSLYAIPGLDYVAHEDIIPYTSAEKSPLHHELFDKFLAYDPDKDPPFVAQETLRAWQNKNHPWLELSDVHKETTENIRVTVIPFYMGFRESHSTSVYWWRYCIRLENLGSLSVQLRERHWRIFSLSGTLETVRGRGVVGQEPALTRTLPAFQYSSHVSLQAPSGHMWGTFRMEREDGYTFDCRIPPFSLESKPDITPAAPPGAL

SEQ ID NO: 103984 - DNA, 375 bp, Herminiimonas arsenicoxydans
  CDS (1)..(375): transl_table=11
atggcatcctacgaatttaccgtgaccgtcaatacacagtacctggaagagcaatccgatccggcgcactccaattatgtattcgcgtacgcagtcaccatcaagaataccgggcaggtagcggcgcaacttatttcgcgccattgggtcattaccgatgccaacaaccatattgaagaggtgcgcggcctgggtgtagtcggcaatcagcctttgctgcagccgggcgaacagtttgaatacaccagcggcacctcgatggccacgccgcaaggctcgatggccggcgaatatttctgcgtggcggaagatggcgagcaattcgaggcgaaaattcctgaattcgtcctgtccctgccacgcaccttgcattaa

SEQ ID NO: 103985 - protein, 124 aa, Herminiimonas arsenicoxydans
MASYEFTVTVNTQYLEEQSDPAHSNYVFAYAVTIKNTGQVAAQLISRHWVITDANNHIEEVRGLGVVGNQPLLQPGEQFEYTSGTSMATPQGSMAGEYFCVAEDGEQFEAKIPEFVLSLPRTLH

SEQ ID NO: 103986 - DNA, 408 bp, Burkholderia vietnamiensis G4
  CDS (1)..(408): transl_table=11
atggcgcgggcggttacctacagcggaaacaccatgagtcagtatcagttcaccgtttcggtgaaaaccagttacttgccggaacaatccgacccggatcgacgtcaatacgcattcgcgtacacgctgaccatccgcaatacggggcaggttgcagcgcaactgatcgcccgtcactggatcatcacggacagcgaaaatcacgtgcaggaagtgaaggggctcggcgtcgtcgggcaccagccgctgctgcagccgggcgaacatttcgagtacacgagctgggccgtgatcgcgacgccggtcggcacgatgcgcggtgcgtatttctgtgtggcggaagacggtgagcggttcgaggcgcccgtcgaagaatttgcgctgcacatgccgcgcacgctgcattga

SEQ ID NO: 103987 - protein, 135 aa, Burkholderia vietnamiensis G4
MARAVTYSGNTMSQYQFTVSVKTSYLPEQSDPDRRQYAFAYTLTIRNTGQVAAQLIARHWIITDSENHVQEVKGLGVVGHQPLLQPGEHFEYTSWAVIATPVGTMRGAYFCVAEDGERFEAPVEEFALHMPRTLH

SEQ ID NO: 103988 - DNA, 393 bp, Bradyrhizobium sp. ORS278
  CDS (1)..(393): transl_table=11
atgtaccgtgccgtgactcgccacatcgaagtgaccgtcgagccgaacttcctgccagagaagtcgtcggtcgccgatggccgctggttctggtcctacaccgtggtcatcaccaatagcggcgcggagacggtacagctgcgcagccggcactgggtcatcaccgacggtgccggccggcagcaggaggtccgcggcgagggcgtcgtcggcgagcagccggttctcgcaccgggcgagcgcttcgaatacacctccggcgtcccgctctccaccgcctccggcttcatgtccggctcctaccagatggagagcgccagcggcgagcagttcgacatcgtggtgcctgcgttctcgctggacagccccgatggcaagcgggtgttgaactag

SEQ ID NO: 103989 - protein, 130 aa, Bradyrhizobium sp. ORS278
MYRAVTRHIEVTVEPNFLPEKSSVADGRWFWSYTVVITNSGAETVQLRSRHWVITDGAGRQQEVRGEGVVGEQPVLAPGERFEYTSGVPLSTASGFMSGSYQMESASGEQFDIVVPAFSLDSPDGKRVLN

SEQ ID NO: 103990 - DNA, 378 bp, Erwinia carotovora subsp. atroseptica SCRI1043
  CDS (1)..(378): transl_table=11
atgattaatgcgccccgtgtttgtgtacaaattcagagcttctatgtggaatcacaatcagagcctgatgaagaacgtttcgtgtttgcttacacggttacggttcgcaatctggggcgtcatgaagtccagcttttggggcgttattggctgatcaccaacggtaatggccgtcagactgaagttcagggtgaaggcgtagtcggtgaacagccgattatcgagcctggcggcgagttccaatataccagcggtgcagtcatggaaacgcccctcggcacaatggaaggccactaccatatggttgaccatcagagtaaagcgtttcaggtcccaatccccgtcttccgactggcaatcccctcactgatacattaa

SEQ ID NO: 103991 - protein, 125 aa, Erwinia carotovora subsp. atroseptica SCRI1043
MINAPRVCVQIQSFYVESQSEPDEERFVFAYTVTVRNLGRHEVQLLGRYWLITNGNGRQTEVQGEGVVGEQPIIEPGGEFQYTSGAVMETPLGTMEGHYHMVDHQSKAFQVPIPVFRLAIPSLIH

SEQ ID NO: 103992 - DNA, 378 bp, Yersinia pseudotuberculosis IP 32953
  CDS (1)..(378): transl_table=11
atgattgaacagccccgtatttgtgtgcaggtacaaagtatctatgtggaaacgcaatcgatacccgaagaggagcgtttcgtcttcgcctataccgttactgttcgtaatttagggcgttcaaacgtgcaactgcttggccgctattggttaattaccaatagcaatggccgccagactgaagttcagggagaaggggttatcggcgaacaaccacttatcctgccaggtaatgaatttcaatacaccagcggtgccgttctggaaaccccgctgggtactatggaaggacattatgaaatgattgatcaccttggacaggccttccgtactgtaattccggtattccgcttagcgatcccagccctgatccattaa

SEQ ID NO: 103993 - protein, 125 aa, Yersinia pseudotuberculosis IP 32953
MIEQPRICVQVQSIYVETQSIPEEERFVFAYTVTVRNLGRSNVQLLGRYWLITNSNGRQTEVQGEGVIGEQPLILPGNEFQYTSGAVLETPLGTMEGHYEMIDHLGQAFRTVIPVFRLAIPALIH

SEQ ID NO: 103994 - DNA, 381 bp, Methylococcus capsulatus str. Bath
  CDS (1)..(381): transl_table=11
atgcgacgtaaaccctatgaactgaaagtcgaagtcaaggccgtctatctgcgggagcactcccggcccgatgctcatcagtacaccttcgcctacaccgtgaccatggagaacaccggcaccgttcccgccaagctcctgggccggcgctggatcatcaccgatgccaacggcaagacggtggaggtggtcggggagggcgtcgtcggcgagcatccgtatctccggcccggcgaggctttcgagtacaccagcgccgcgaccatcgccaccccggtcggcagtatgcacggcagctatcagctgatcgccgacgacgggatgccattcgaggcgcccatcgccgcgttcagcctcgcaatcccgcgccggctgcactga

SEQ ID NO: 103995 - protein, 126 aa, Methylococcus capsulatus str. Bath
MRRKPYELKVEVKAVYLREHSRPDAHQYTFAYTVTMENTGTVPAKLLGRRWIITDANGKTVEVVGEGVVGEHPYLRPGEAFEYTSAATIATPVGSMHGSYQLIADDGMPFEAPIAAFSLAIPRRLH

SEQ ID NO: 103996 - DNA, 453 bp, Anaplasma marginale str. St. Maries
  CDS (1)..(453): transl_table=11
gtggaccgcgcgtttgttttacgaagttgtggggtgtgctgcgctatgacgacgcctagatgtggcggtgcgactggtctgatagaagttgaggtaacaccgagctacctcgaggagcattcgatgccgcacgagaattgctacatatggctttacagcgtcaagatcaaaaatgtcagcaattctacggtacagctgctgaagcgtagctggaaaataatagattccaaaggcatggtgaacgaggtaagcggatctggtgttgtgggccgtcagcctgtgctaaagcccggggggtttttcgagtacactagtggcacatgcctcagtacgccgtccggggttatgaacgggtggtatcaatttgtggatgaagacaaggcgcaggtgttctacgtagatgtgcctaccttttcgctcgatagcccgtacgatattgtgaggcttaactag

SEQ ID NO: 103997 - protein, 150 aa, Anaplasma marginale str. St. Maries
MDRAFVLRSCGVCCAMTTPRCGGATGLIEVEVTPSYLEEHSMPHENCYIWLYSVKIKNVSNSTVQLLKRSWKIIDSKGMVNEVSGSGVVGRQPVLKPGGFFEYTSGTCLSTPSGVMNGWYQFVDEDKAQVFYVDVPTFSLDSPYDIVRLN

SEQ ID NO: 103998 - DNA, 384 bp, Azoarcus sp. EbN1
  CDS (1)..(384): transl_table=11
atgagcgaatccgaaaaatatcgcatcgaggtggaagccatcgccgagttcgtaccgggacaatccgacccggacgaaaaccgctacgtttttgcataccacatcacgctgacgaacaccggcgaagtgcccgcccagttgatcagccggcactgggtcatcaccgacggcgcgggcaaggtccaggaagttcgcggcctcggagtgatcggcgaacagccgatgctcgcgccgggacagcagttcagctattcgagcgggtctgtcctcgaaaccccggtcggcacgatgcagggcagctaccagatggcggccgaggacggccaccgtttcgacgccgaaatcccggccttcatgctggcgatgccgcgcgtgctgcactga

SEQ ID NO: 103999 - protein, 127 aa, Azoarcus sp. EbN1
MSESEKYRIEVEAIAEFVPGQSDPDENRYVFAYHITLTNTGEVPAQLISRHWVITDGAGKVQEVRGLGVIGEQPMLAPGQQFSYSSGSVLETPVGTMQGSYQMAAEDGHRFDAEIPAFMLAMPRVLH

SEQ ID NO: 104000 - DNA, 381 bp, Pseudomonas fluorescens Pf-5
  CDS (1)..(381): transl_table=11
atgtccgatcctcgttaccaggtcgacgtcagcgtcgtcactcgctttctggcagaccaatcgcaacccgagcagaaccgcttcgctttcgcctacaccatcaccgtgcagaacaatggctcgcttccagccaagctgctgtcccggcactgggtgatcaccgatggcgacgggcatgtcgaagaggtccgtggtgccggcgtggtgggccagcaaccgctgatcgccgcaggcaaaagccacacctacagcagcggcacggtaatgaccacccgggttggcaacatgcagggcagctatcagatgctcgccgaggatggcaaacagttcgacgccgtcattgcgcccttccgcctggccgtgcccggagccttgcactga

SEQ ID NO: 104001 - protein, 126 aa, Pseudomonas fluorescens Pf-5
MSDPRYQVDVSVVTRFLADQSQPEQNRFAFAYTITVQNNGSLPAKLLSRHWVITDGDGHVEEVRGAGVVGQQPLIAAGKSHTYSSGTVMTTRVGNMQGSYQMLAEDGKQFDAVIAPFRLAVPGALH

SEQ ID NO: 104002 - DNA, 435 bp, Pseudomonas syringae pv. phaseolicola 1448A
  CDS (1)..(435): transl_table=11
ttgtctacctgccgcacacgcccttttttcgctatggatttcaaggcctattgcatgcccgattctcgttacaaggtcgacgtcagcgtcgtcacacgctttctctcggaacagtctcaacccgagcagaatcgcttcgctttcgcctataccatcaccgtgcacaacaacggtgaattacctgccaaactgctgtcgcgtcactgggtcattaccgacggcgacggccatgtcgaagaggtgcgcggcgagggcgtggtcggtcagcaaccgttgatcgaggtcggtaaaagccatacctacagcagcggtacggtaatgaccacccgcgtgggcaatatgcagggttcttatcagatgctggctgaagacggtaaacgctttgatgcggtcataaagccctttcgtctggccgtcccgggttcgctgcactga

SEQ ID NO: 104003 - protein, 144 aa, Pseudomonas syringae pv. phaseolicola 1448A
MSTCRTRPFFAMDFKAYCMPDSRYKVDVSVVTRFLSEQSQPEQNRFAFAYTITVHNNGELPAKLLSRHWVITDGDGHVEEVRGEGVVGQQPLIEVGKSHTYSSGTVMTTRVGNMQGSYQMLAEDGKRFDAVIKPFRLAVPGSLH

SEQ ID NO: 104004 - DNA, 384 bp, Dechloromonas aromatica RCB
  CDS (1)..(384): transl_table=11
atgtccgacaccaacaagtaccgaatcgaagtgcaacccatgccgcagttcattccggagcaatccgacccggaaaacgaccgctacatctttgcctacaccatcaccatcaagaatatcggcgaagtaccggcccaactggtttcccggcactggatcatcaccgatggcaacaacgaggtacaggaagtgcgcggccttggcgtcgtcggcaagcagccgctgctccagcccggcgaaagttttcagtacaccagtggctcctcgctgacgaccgcaatcggcaccatgaaagggacttaccagatggtggccgaggacggcacccacttcgaagccgaaatcccggagtttgttctggccagtccgcgcgccctgcattga

SEQ ID NO: 104005 - protein, 127 aa, Dechloromonas aromatica RCB
MSDTNKYRIEVQPMPQFIPEQSDPENDRYIFAYTITIKNIGEVPAQLVSRHWIITDGNNEVQEVRGLGVVGKQPLLQPGESFQYTSGSSLTTAIGTMKGTYQMVAEDGTHFEAEIPEFVLASPRALH

SEQ ID NO: 104006 - DNA, 414 bp, Ralstonia eutropha JMP134
  CDS (1)..(414): transl_table=11
atgcgcctacccttgagccggatcccgcagaccagacaaatgagcgagtacgccttttccgtggcggtacgtacccagtacctgcccgaccagtcagaccccgagcgcgggcgccacgccttcgcctacaccatcacgatccacaatacaggcgaggttgcggcgcagctgatctcgcgccactggatcatcaccgacagcgacaatgcgtcgcaggaagtctcgggcctgggcgttgtcggccatcagccgctgctcaagccgggcgagcatttcgaatacacgagctgggccacgatttcgacgccggtcggctcgatgaagggcgaatatttctgcgtggccgaagacgggcaccgcttcgaggtgccgattcccgaattcgcgctggtactgccgcgcatgctgcactga

SEQ ID NO: 104007 - protein, 137 aa, Ralstonia eutropha JMP134
MRLPLSRIPQTRQMSEYAFSVAVRTQYLPDQSDPERGRHAFAYTITIHNTGEVAAQLISRHWIITDSDNASQEVSGLGVVGHQPLLKPGEHFEYTSWATISTPVGSMKGEYFCVAEDGHRFEVPIPEFALVLPRMLH

SEQ ID NO: 104008 - DNA, 405 bp, Ehrlichia canis str. Jake
  CDS (1)..(405): transl_table=11
atgacgttgcaatattacagcatgactaagcttattgaagttaaagtcgttccaagttacttagaagaacagtctgctccacatgagaattgttatatctggttatataacattagggttaaaaatagaagtaattctacagtacagctcttgagaagaagttggaaaatcattgattcaactggtattattaatgaagttacaggtcttggtgtgatagggaagcagcctattttgaagcctggagagttctttgagtatactagtggtgcatatttaagtactccatctgggatgatgcatggagagtatcaatttatggatgaggatgcagctcaggttttctatgttaatataccggtgttttcactagatagtccttatgttaatacaaaaccgcattag

SEQ ID NO: 104009 - protein, 134 aa, Ehrlichia canis str. Jake
MTLQYYSMTKLIEVKVVPSYLEEQSAPHENCYIWLYNIRVKNRSNSTVQLLRRSWKIIDSTGIINEVTGLGVIGKQPILKPGEFFEYTSGAYLSTPSGMMHGEYQFMDEDAAQVFYVNIPVFSLDSPYVNTKPH

SEQ ID NO: 104010 - DNA, 384 bp, Thiobacillus denitrificans ATCC 25259
  CDS (1)..(384): transl_table=11
gtggccgaaggcaagaaataccagataaacatcagcgtcaacacggcttatctggcggagcagagcgacccgtcggccgaccgttacgtgttcgcctacaccatcacgatcgaaaacgtcggcacggtcgccgcgcagctgatctcgcgtcactgggtgatcaccgacgccgacgacgtcgtgcaggaagtcaagggcctcggcgtcgtcggcgagcagccgctgctgcgccccggcgagaccttcgaatacagcagcggggcagcgctcgcgacgccggtcggaaccatgcagggcagctatcagatggtggccgaggacggcaacaagttcgacgccgagattccccgcttcacgctggccatgccgcgcgtgctgcactga

SEQ ID NO: 104011 - protein, 127 aa, Thiobacillus denitrificans ATCC 25259
MAEGKKYQINISVNTAYLAEQSDPSADRYVFAYTITIENVGTVAAQLISRHWVITDADDVVQEVKGLGVVGEQPLLRPGETFEYSSGAALATPVGTMQGSYQMVAEDGNKFDAEIPRFTLAMPRVLH

SEQ ID NO: 104012 - DNA, 381 bp, Pseudomonas fluorescens PfO-1
  CDS (1)..(381): transl_table=11
atgtccgatcctcgctaccaggtcgatgtcagtgtcgttacccactatctggcagaccaatcgcaacccgagcacgagcgctttgccttcgcctacaccatcaccgtgcagaacaatggcgagcaaccggcccgcctgatgtcgcgccactgggtgataaccgatggcgacgggcatgtcgaagaagtgcgcggcgccggcgtggttggccagcaaccgttgatcggcgctggcaaaagccacacctacagcagcggcacggtgatgaccaccaaggtcggcaccatgcaaggcagttacgaaatggtcgccgacgacggcaagcacttcgatgcgatcatcaagcccttccgcctcgccgttcccggagccctgcactga

SEQ ID NO: 104013 - protein, 126 aa, Pseudomonas fluorescens PfO-1
MSDPRYQVDVSVVTHYLADQSQPEHERFAFAYTITVQNNGEQPARLMSRHWVITDGDGHVEEVRGAGVVGQQPLIGAGKSHTYSSGTVMTTKVGTMQGSYEMVADDGKHFDAIIKPFRLAVPGALH

SEQ ID NO: 104014 - DNA, 408 bp, Rhodospirillum rubrum ATCC 11170
  CDS (1)..(408): transl_table=11
atgaccgacgaaaccgtctatgagcgaacgaccgaagggatcaccgtgcgcgtgcttccaatcttcctcgacgagcaatccgagcccgagcgcggccattatctgtgggcctatcaggttctgatcgtcaaccgcggggcgcggaccgtgcaactgatgcgccgacactggatcgtgaccgacgccttcggccgggttcaggaagtggaaggcgaaggcgtggtcggcgagcagccgattctcgcgcccggggcgcagtttgattacacctcgggcacgccgctgcccacgccctcgggattcatgggcggcagctatctgatgcgcgacgacaccggccgcgagttgaccgtcgccattcccaccttcagcctcaacagcccggaatcggcggggcatctgcactga

SEQ ID NO: 104015 - protein, 135 aa, Rhodospirillum rubrum ATCC 11170
MTDETVYERTTEGITVRVLPIFLDEQSEPERGHYLWAYQVLIVNRGARTVQLMRRHWIVTDAFGRVQEVEGEGVVGEQPILAPGAQFDYTSGTPLPTPSGFMGGSYLMRDDTGRELTVAIPTFSLNSPESAGHLH

SEQ ID NO: 104016 - DNA, 420 bp, Novosphingobium aromaticivorans DSM 12444
  CDS (1)..(420): transl_table=11
atgtgcgatagtttgggggacatgaagcagcttttccagcatgccgcgataacggatggagtgacggtgcgggtcgccgtcagtttcctgccggaacagtcacgcgtcgacgccggcaagtggttctgggtctatcacatccggatcgagaacgatgccgcccagccgatccagcttctttcccggcactggcgcatcaccgacgggcgcgggatggtcaatttcgtcgacggggacggtgtggtgggcgagcagcccgtgctccagccggggcagtctcacgattatgtctcgggctgcccgctgggcacccatcacggcagcatggaaggccattacacgatgcagcgtgccgatggggcgctgttcgacgtggcgattccgttctttcctctggcggcaccggctccggcaaactaa

SEQ ID NO: 104017 - protein, 139 aa, Novosphingobium aromaticivorans DSM 12444
MCDSLGDMKQLFQHAAITDGVTVRVAVSFLPEQSRVDAGKWFWVYHIRIENDAAQPIQLLSRHWRITDGRGMVNFVDGDGVVGEQPVLQPGQSHDYVSGCPLGTHHGSMEGHYTMQRADGALFDVAIPFFPLAAPAPAN

SEQ ID NO: 104018 - DNA, 408 bp, Anaplasma phagocytophilum HZ
  CDS (1)..(408): transl_table=11
atgacagtgttagagtgtggcaaagaagcaggactaatagaggtagaagtaaccccaagttatttagaagagcattctataccgcatgagaactgttacatatggctatatagtgtacggataaacaatagaagtgattctacagttcagctgcttaagcgcagttggaagatcatagattccaaaggagtcgtgaatgaggtcagcggatccggagtagctggcagtcagccggtactgaagccgggagcttttttcgagtatacaagtggtacgtgtttaagtactccttcgggagtgatgaacggctggtatcagtttgtggatgaggataaggcacaggtgttttatgtggatgtgccggcattttcattagatagcccctacgatagtttgaggctgaactaa

SEQ ID NO: 104019 - protein, 135 aa, Anaplasma phagocytophilum HZ
MTVLECGKEAGLIEVEVTPSYLEEHSIPHENCYIWLYSVRINNRSDSTVQLLKRSWKIIDSKGVVNEVSGSGVAGSQPVLKPGAFFEYTSGTCLSTPSGVMNGWYQFVDEDKAQVFYVDVPAFSLDSPYDSLRLN

SEQ ID NO: 104020 - DNA, 405 bp, Ehrlichia chaffeensis str. Arkansas
  CDS (1)..(405): transl_table=11
atgacactacaatattatagtatgaccaaacttattgaagttaaagttgttccaagttacttagaagagcaatctgctccacatgaaaattgttatatatggttgtataacatcagagttaagaataaaagtaattctacagtccagctcttgaggagaagttggaaaatcattgattcaacaggtgttattaatgaagtaacaggtttaggagtaataggtaaacagcctgtattaaaacctggagagttttttgagtatactagtggtgcatatttaagtactccatctggtatgatgcatggggaatatcaatttatggatgaagatgctgcacaggttttttatgttagtataccgatgttctcgctagatagtccttatgttaatacaaagccacattaa

SEQ ID NO: 104021 - protein, 134 aa, Ehrlichia chaffeensis str. Arkansas
MTLQYYSMTKLIEVKVVPSYLEEQSAPHENCYIWLYNIRVKNKSNSTVQLLRRSWKIIDSTGVINEVTGLGVIGKQPVLKPGEFFEYTSGAYLSTPSGMMHGEYQFMDEDAAQVFYVSIPMFSLDSPYVNTKPH

SEQ ID NO: 104022 - DNA, 372 bp, Saccharophagus degradans 2-40
  CDS (1)..(372): transl_table=11
atgccacacgcaataaatatagaagtaaaaaccaaataccttagcgaacagtcccgcccagcggaaaataaatacgtgttcgcctacaccattacaattaccaaccaaggcgaccaacccgcacagctcgttggccgctactggcgcatagtggatgcaaacagccaaatacaagaagtacaggggataggcgtggtaggtgaacaaccgcacctcgcaccgagcgaaagctatacctacaccagcggcgcggtattgcaaacacctaccggcacaatggaaggccactacgaaatgcagggggaaggcggcgaaacctttaacgcaaccattcccgcctttgcattagtgaagccctctttattacactag

SEQ ID NO: 104023 - protein, 123 aa, Saccharophagus degradans 2-40
MPHAINIEVKTKYLSEQSRPAENKYVFAYTITITNQGDQPAQLVGRYWRIVDANSQIQEVQGIGVVGEQPHLAPSESYTYTSGAVLQTPTGTMEGHYEMQGEGGETFNATIPAFALVKPSLLH

SEQ ID NO: 104024 - DNA, 384 bp, Methylobacillus flagellatus KT
  CDS (1)..(384): transl_table=11
atgaccaaggacaagcgctatgcattttcagtgaaggtagagacagcgtttgtgcctgaccaatcagacgtggaacagaaccgctacgtcttcacctatacggtccatatcgagaataccggcaacgtggcggcgcaattgatcagccgccactggatcattaccgatgccaccggcaagacgcaggaagtgcgcggtcttggggtcatcggccagcaacccctgctccagcctggcgagcgctttcaatataccagtggcactatgttgaacacgcctgtgggcgagatgcgcggcttctaccacatcacggcagaagacggtacgcagttcgatagcgagatcgcgcctttccagctcaacatgccacgcgtactgcactga

SEQ ID NO: 104025 - protein, 127 aa, Methylobacillus flagellatus KT
MTKDKRYAFSVKVETAFVPDQSDVEQNRYVFTYTVHIENTGNVAAQLISRHWIITDATGKTQEVRGLGVIGQQPLLQPGERFQYTSGTMLNTPVGEMRGFYHITAEDGTQFDSEIAPFQLNMPRVLH

SEQ ID NO: 104026 - DNA, 375 bp, Burkholderia xenovorans LB400
  CDS (1)..(375): transl_table=11
atgagccagtacgaattcagcgtctcgacgcaggtgcaatatctgcccgaagagtcggacccggagcgccgccagtatgcattcgcatacacgctgactatccgtaacaccggccaggtgcccgcgcagttgatcgcgcggcattgggtcatcacagacagcgacaagaacgtgcaggaagtgaagggtcttggcgtggtcggccatcagccgctgctcaaaccgggcgagcatttcgagtacacgagttgggcggtgatcgccacaccggtcggcaccatgcgcggagaatacttctgtgtggccgaggacggcgagcggttcgatgcgccggtgccggagttcatcctgcgcatgccgcgtacgttgcattga

SEQ ID NO: 104027 - protein, 124 aa, Burkholderia xenovorans LB400
MSQYEFSVSTQVQYLPEESDPERRQYAFAYTLTIRNTGQVPAQLIARHWVITDSDKNVQEVKGLGVVGHQPLLKPGEHFEYTSWAVIATPVGTMRGEYFCVAEDGERFDAPVPEFILRMPRTLH

SEQ ID NO: 104028 - DNA, 375 bp, Ralstonia metallidurans CH34
  CDS (1)..(375): transl_table=11
atgagcgagtacgcattttccgtggccgtgcgcacgcagtacatgccggaccaatcggacccagaccgtggacgctacgcgttcgcctacaccatcacgatccacaacaccggcgaagtcgccgcgcagctgatctcgcgccactggatcatcaccgacagcgacaactcgacgcaggaagtctcgggcctgggcgtggtcggccatcagccgctgctcaagccgggcgagcacttcgagtattcgagctgggcgacgatctccaccccggtgggatcgatgaagggcgattatttctgcgtggccgaagacggccaccgtttcgaggtgccgattcccgaattcgcgctggtgctgccccgaatgctgcactga

SEQ ID NO: 104029 - protein, 124 aa, Ralstonia metallidurans CH34
MSEYAFSVAVRTQYMPDQSDPDRGRYAFAYTITIHNTGEVAAQLISRHWIITDSDNSTQEVSGLGVVGHQPLLKPGEHFEYSSWATISTPVGSMKGDYFCVAEDGHRFEVPIPEFALVLPRMLH

SEQ ID NO: 104030 - DNA, 387 bp, Myxococcus xanthus DK 1622
  CDS (1)..(387): transl_table=11
atgtcctccagcgccatcaccgacggcatccgcatcaccgtgaagcccgcctactggccggagcgcagcgctccggagtccgggcagttcgccttcatgtacacggtggagattgccaacgagggcgacgcgccggcgcagctcaaggcgcgccattgggtcatcaccgatgccacgggcaaggtggaagaggtgaggggcgagggcgtggtgggccgccagccccacctggggcccggagagcggttcgagtacacgagttgggccatgctgcgcacgcccttcggcaccatgcgcggcacctatgacatggtgcggccggacggcacgcacttcgaagcgcgcatcgccgagttcgcgctcacccttcccaactccctgcactga

SEQ ID NO: 104031 - protein, 128 aa, Myxococcus xanthus DK 1622
MSSSAITDGIRITVKPAYWPERSAPESGQFAFMYTVEIANEGDAPAQLKARHWVITDATGKVEEVRGEGVVGRQPHLGPGERFEYTSWAMLRTPFGTMRGTYDMVRPDGTHFEARIAEFALTLPNSLH

SEQ ID NO: 104032 - DNA, 435 bp, Mesorhizobium sp. BNC1
  CDS (1)..(435): transl_table=11
atgctcccttcgtgccggcataacggccttaaagagcggaccatgtatcgagcgatcacccaaggcatagaggtttgtgtcgaacccttcttcctgccggagcactccgatccggaggaaagcaaatatgtctgggcttatcaggtaacgatcgccaattattctccgcaggcggtgaagctgctctcgcgttactggcatatcacggacgggatgggccgggtgcaggaagtgcgcggagaaggcgttgtgggcgaacaacccgaaatcgaaccgggcgacacctatcgctatacatcgggctgcccccttaccacctcctccgggatcatggttggccgatacaccatgcagactgaacgaggcgacatgctggaggtggacatccctgccttctcgctcgattttcccggcaacagcgtattgctgaattag

SEQ ID NO: 104033 - protein, 144 aa, Mesorhizobium sp. BNC1
MLPSCRHNGLKERTMYRAITQGIEVCVEPFFLPEHSDPEESKYVWAYQVTIANYSPQAVKLLSRYWHITDGMGRVQEVRGEGVVGEQPEIEPGDTYRYTSGCPLTTSSGIMVGRYTMQTERGDMLEVDIPAFSLDFPGNSVLLN

SEQ ID NO: 104034 - DNA, 387 bp, Cytophaga hutchinsonii ATCC 33406
  CDS (1)..(387): transl_table=11
atgatttcaaaaattaccgaaggtgtacgggttagcattgtaacagactatcagcaggaatactccagtccgttacagtcgcactatgtatttacctatcgtatattaattgaaaactacagcgaacatactgtacgcctgttacgcaggcattggttcatctttgacgcaaatggtgtaatccgtgaggtagaaggcgaaggcgttgttggtgtacagccaacgcttgaaccgggtgcttctcatgaatatgtttccggatgcaatttaaaaacagagatgggtaaaatgcgcggtacttacttaatggaacgcattgttgatggaaatcaatttacggttgtgattcccgaatttatgctcatagcaccttttaaattaaattga

SEQ ID NO: 104035 - protein, 128 aa, Cytophaga hutchinsonii ATCC 33406
MISKITEGVRVSIVTDYQQEYSSPLQSHYVFTYRILIENYSEHTVRLLRRHWFIFDANGVIREVEGEGVVGVQPTLEPGASHEYVSGCNLKTEMGKMRGTYLMERIVDGNQFTVVIPEFMLIAPFKLN

SEQ ID NO: 104036 - DNA, 381 bp, Shewanella sp. MR-4
  CDS (1)..(381): transl_table=11
atgagcgcattggatgactcaatccgagtcgaagtcaaaaccgaatacattgaacaacagtcctcgcccgaggatcagaaatacctctttagctacactatcaccatagttaacctcggtgagcaagccgccaaacttgaaacccgccactggattattaccgacgccaacggcaaaatcagtgaagtgcaaggcgcaggcgtcgtcggcgaaaccccaacgattccccccaataccgcctaccaatatactagcggcaccgtactcgatacgccccttggcattatgtatggcacttatggtatggtcagcgaatctggcgaacgttttaaggcgacgattaagcccttccgtttagcactccccggtttattacactga

SEQ ID NO: 104037 - protein, 126 aa, Shewanella sp. MR-4
MSALDDSIRVEVKTEYIEQQSSPEDQKYLFSYTITIVNLGEQAAKLETRHWIITDANGKISEVQGAGVVGETPTIPPNTAYQYTSGTVLDTPLGIMYGTYGMVSESGERFKATIKPFRLALPGLLH

SEQ ID NO: 104038 - DNA, 381 bp, Shewanella sp. MR-7
  CDS (1)..(381): transl_table=11
atgagcgcattggatgactcaatccgagtcgaagtcaaaaccgaatacattgaacaacagtcctcgcccgaggatcagaaatacctctttagctacactatcaccatagttaacctcggtgagcaagccgccaaactcgaaacccgccactggattattaccgacgccaacggcaaaatcactgaagtacaaggcgcaggcgttgtcggcgaaaccccaacgatcccccccaataccgcctatcaatataccagcggtaccgtactcgatacgccccttggcattatgtatggcacttatggtatggtcagcgaatctggcgaacgttttaaggcgacgattaagcccttccgtttagcactccccggtttattacactga

SEQ ID NO: 104039 - protein, 126 aa, Shewanella sp. MR-7
MSALDDSIRVEVKTEYIEQQSSPEDQKYLFSYTITIVNLGEQAAKLETRHWIITDANGKITEVQGAGVVGETPTIPPNTAYQYTSGTVLDTPLGIMYGTYGMVSESGERFKATIKPFRLALPGLLH

SEQ ID NO: 104040 - DNA, 387 bp, Alkalilimnicola ehrlichei MLHE-1
  CDS (1)..(387): transl_table=11
atgagcgacgagcaggagcgctactgcatcgaggtggacgtggatccggcctacgtggcggatcagtctgatccggccgaggaccgctacgtcttctcctataccatcaccatcaagaacctgggcgcggtgaccgcccaggtggtcagccgccactgggtgatcaccgacggcagcggtcacgagcgcgaggtgcgtggcgagggtgtggtcggcgagcagccccgcatcaagcccggcgagggctttcgctacaccagcggggccatcctggagacgccggtgggcagcatgcacggcagctaccacctggtggccgaagacggcacggtcttcaacgccgatattcccgcctttaccctggctgtgccgcacacgctgcattaa

SEQ ID NO: 104041 - protein, 128 aa, Alkalilimnicola ehrlichei MLHE-1
MSDEQERYCIEVDVDPAYVADQSDPAEDRYVFSYTITIKNLGAVTAQVVSRHWVITDGSGHEREVRGEGVVGEQPRIKPGEGFRYTSGAILETPVGSMHGSYHLVAEDGTVFNADIPAFTLAVPHTLH

SEQ ID NO: 104042 - DNA, 417 bp, Hyphomonas neptunium ATCC 15444
  CDS (1)..(417): transl_table=11
atggcaagacgccccgctcctccacagtatgaggccatcaccgatggcgtgcgcattcgtgtgcgccccaaattcctgcacgacgaatccgagccgacgcgggccaagttcatgtggcagtatacggtggaggtcgagaatgagagcgaccggacctggaccatcatccgccggcattggcggatcgtggattcggccgggcggcttcaggcggtcgatggcgaaggcgtgatcgggcagacgccgacggtcgggccggggcagcgtttcagctatacatccggcgcgccgctggcgacgccttcgggcatgatgacgggcacctatgacctcgtcgatgacgcgggcgaagagatggtggcgatgatccccgccttctcgctcgacagcccgtacgatacgtcgcggccgagctga

SEQ ID NO: 104043 - protein, 138 aa, Hyphomonas neptunium ATCC 15444
MARRPAPPQYEAITDGVRIRVRPKFLHDESEPTRAKFMWQYTVEVENESDRTWTIIRRHWRIVDSAGRLQAVDGEGVIGQTPTVGPGQRFSYTSGAPLATPSGMMTGTYDLVDDAGEEMVAMIPAFSLDSPYDTSRPS

SEQ ID NO: 104044 - DNA, 411 bp, Rhizobium leguminosarum bv. viciae 3841
  CDS (1)..(411): transl_table=11
ttgactaaggtgcaaggcatgtatcgcgccctcacaagagagatcgaagtagttgtcgagccgttctatctggaggagcaatccgatccggaagacgatcgctatgtctggggttaccggattgtcatcagcaacaattccggcatagccgttcggctggtcaaccgttactggaacatcaccgaccagaacggccaggtggacgaggtgaccggccccggcgttgttggcgaacagccgcggctcagccccggcgacacctacgaatattcctccggctgcccgctcgacacgccctcaggactgatgttcggccattaccagatggaaacggatgaaggcgagatgttcgatgtcgacatccctgccttctcgctggattcgcctgggctgctgcgcgtgctcaattga

SEQ ID NO: 104045 - protein, 136 aa, Rhizobium leguminosarum bv. viciae 3841
MTKVQGMYRALTREIEVVVEPFYLEEQSDPEDDRYVWGYRIVISNNSGIAVRLVNRYWNITDQNGQVDEVTGPGVVGEQPRLSPGDTYEYSSGCPLDTPSGLMFGHYQMETDEGEMFDVDIPAFSLDSPGLLRVLN

SEQ ID NO: 104046 - DNA, 408 bp, Solibacter usitatus Ellin6076
  CDS (1)..(408): transl_table=11
atgcctgatcttcgttcggagcccactccgacgtccgaagcggtcaccaacaacattcgcgtcgaggtgattgcacgctacgcccccgagaacgcacagcagggcgaattcgtctttcaatatacggtccgcatcaccaacgaggggaccgagagcgtacagctgcgcagccgctactggatcatcacggatgcgctggaccacgtggaagaggtgcgcggtccgggggtggtgggcgagcagcctgcgctggctcccggccaatctttcaagtattcctcgtggtgcccgctcaaaacgccgaccggcacgatgcgcggcacgtttcaaatggtaggggctaatggagccgaattcgacgtcgaaatcgccccgtttgccctccgtgcgcgagtcacaattcactga

SEQ ID NO: 104047 - protein, 135 aa, Solibacter usitatus Ellin6076
MPDLRSEPTPTSEAVTNNIRVEVIARYAPENAQQGEFVFQYTVRITNEGTESVQLRSRYWIITDALDHVEEVRGPGVVGEQPALAPGQSFKYSSWCPLKTPTGTMRGTFQMVGANGAEFDVEIAPFALRARVTIH

SEQ ID NO: 104048 - DNA, 381 bp, Magnetococcus sp. MC-1
  CDS (1)..(381): transl_table=11
atggctaacgaaaaataccaagtggatgtccaggtaaacgcgacctatctgccggatcaatccttgcctgcacataatcaatatgtgtttgcttacaccgtgaccctccttaatcgtggcagtatgggggccaaactgctctcgcgtcactggattattagtgatgccaacgggggtgagcaagaggtgcggggtgagggtgtggtgggggaacagccccatttaaatcccggggagagttttcaatataccagcggtacccccctaacgacgcctatgggtagcatgcggggcagctaccagatggtggccgacgatggaacctattttgaggccaccattccaccctttgccctgtttggaccggccactctgcactag

SEQ ID NO: 104049 - protein, 126 aa, Magnetococcus sp. MC-1
MANEKYQVDVQVNATYLPDQSLPAHNQYVFAYTVTLLNRGSMGAKLLSRHWIISDANGGEQEVRGEGVVGEQPHLNPGESFQYTSGTPLTTPMGSMRGSYQMVADDGTYFEATIPPFALFGPATLH

SEQ ID NO: 104050 - DNA, 414 bp, Acidovorax sp. JS42
  CDS (1)..(414): transl_table=11
atgccgaaataccagttccaggtgcaggtgcaggtgcaaccgcagtaccttcccgaccagtccgcgcccgacgaaggcgtatacagctttgcctacaccatcacgatcaccaacacgggcgacgtgaccgcgcagctgatttcacgccactggatcatctccgacgccaatggccacaccgagcaggtcaagggcctgggcgtggtgggccaacaaccgctgctcaagcccggcgaggcatttcagtacaccagcggctgccgcctgcgcaccgccagcggcagcatgcacggcagctatttctgcgtggccgaggatggtgagccgttcacctgtccgatcgagctgttcgtgctggaggccttctcgcccggccaaccgggccagcccatggcggcaagggtgctgcattga

SEQ ID NO: 104051 - protein, 137 aa, Acidovorax sp. JS42
MPKYQFQVQVQVQPQYLPDQSAPDEGVYSFAYTITITNTGDVTAQLISRHWIISDANGHTEQVKGLGVVGQQPLLKPGEAFQYTSGCRLRTASGSMHGSYFCVAEDGEPFTCPIELFVLEAFSPGQPGQPMAARVLH

SEQ ID NO: 104052 - DNA, 393 bp, Magnetospirillum magnetotacticum MS-1
  CDS (1)..(393): transl_table=11
atgtacagccagaccacccgagacgtcgaggtcagcgtcaagcccttctacctggacgaccagtcctcgcccgaagacaatcacttcgtctgggcctatcgcgtgcgcatcatcaacaaggggacccgtaccgtccagctcatgcgccgccactgggtcatcaccgacgccatcggccgggtacaggaagtcaagggaccgggagtggtgggcgaacagcccgttctgcgccccggcgatgcctatgaatacacgtccggcacgcccttgcccacgccgtccggcatcatggtcggcacctacgagatggaggacgaggacggctcggccttcgacatcgccatccccgctttttccctcgacagcccccatgagaaacccagactgaattag

SEQ ID NO: 104053 - protein, 130 aa, Magnetospirillum magnetotacticum MS-1
MYSQTTRDVEVSVKPFYLDDQSSPEDNHFVWAYRVRIINKGTRTVQLMRRHWVITDAIGRVQEVKGPGVVGEQPVLRPGDAYEYTSGTPLPTPSGIMVGTYEMEDEDGSAFDIAIPAFSLDSPHEKPRLN

SEQ ID NO: 104054 - DNA, 384 bp, Xylella fastidiosa Ann-1
  CDS (1)..(384): transl_table=11
atggaaaacaatcccaattcaaagattgaggtcgctgtctcgtcccgcttcctcgaccagcaatctaatcgtaatgaaggccgctacgtcttcgcctacaccatccggatctacaatgctggaaatgtccctgcacgactgatcgcgcgccactggcagattaccgatgcaaacggcaaagtcgaatacgtcactggtgaaggagtcattggagaacaaccacggctgcgtcccggcgaagaatttcgctacacctctggggtcgtgttgggaaccgaacagggccagatgcaaggacattacgacatgatggccgatgacggtaccgaattcaccgccacaatctccccattcgtactcagtgtgccgcgaacactacactga

SEQ ID NO: 104055 - protein, 127 aa, Xylella fastidiosa Ann-1
MENNPNSKIEVAVSSRFLDQQSNRNEGRYVFAYTIRIYNAGNVPARLIARHWQITDANGKVEYVTGEGVIGEQPRLRPGEEFRYTSGVVLGTEQGQMQGHYDMMADDGTEFTATISPFVLSVPRTLH

SEQ ID NO: 104056 - DNA, 414 bp, Erythrobacter sp. NAP1
  CDS (1)..(414): transl_table=11
atgaaggaacttttccaacacgcagccgtcaccgaaggcatcaccgtgcgcgtcgcggtcaacttcctgcccgagcaatcacaccccgacacgggcaagtggttctgggtctatcacatccgcatcgagaacggatcgcatgagcagatccagctcatcacccgccactggcgcatcaccgatgcgcgcgggatggtgaaccatgtcgatggcgagggcgtcgttggcgaacagcctgtcctcgctccgggtgaaagccacgattacgtctccggctgcccgctgacgacgacgcacggatcgatggaaggcttctacaccttccacaagccggacggctcaccgatggaagtgcgcatcccgttcttcccgctcgccgcgcctgagactgcggacggacagtcgcgcgcctga

SEQ ID NO: 104057 - protein, 137 aa, Erythrobacter sp. NAP1
MKELFQHAAVTEGITVRVAVNFLPEQSHPDTGKWFWVYHIRIENGSHEQIQLITRHWRITDARGMVNHVDGEGVVGEQPVLAPGESHDYVSGCPLTTTHGSMEGFYTFHKPDGSPMEVRIPFFPLAAPETADGQSRA

SEQ ID NO: 104058 - DNA, 390 bp, Pseudoalteromonas tunicata D2
  CDS (1)..(390): transl_table=11
atgacaacaagcagtaatttaggctctccgattaaagttcaggtagaaacgttctacattgaaggccaatcggaaccagacagaaataagtttgtatttgcttatactatcacgataagaaaccacagcctttgtagtgcaaaactactaagccgttattggttaattactgatgcagatggcaaagaaaccgaagttgaaggcgaaggtgtaattggcgaacagccaaatattgcaccaggtgaaagctatacctacagcagcggcgcagtactcgatacaccacttggcaccatgcaaggtcattattgtatgcgtaatgagtttggtactgaattcaacgcacctatccctgtgtttcgtttaagtactccaaacctcgttcattaa

SEQ ID NO: 104059 - protein, 129 aa, Pseudoalteromonas tunicata D2
MTTSSNLGSPIKVQVETFYIEGQSEPDRNKFVFAYTITIRNHSLCSAKLLSRYWLITDADGKETEVEGEGVIGEQPNIAPGESYTYSSGAVLDTPLGTMQGHYCMRNEFGTEFNAPIPVFRLSTPNLVH

SEQ ID NO: 104060 - DNA, 384 bp, Photobacterium sp. SKA34
  CDS (1)..(384): transl_table=11
gtgagtatcacttctaccccaaccatcaaatgtcatgtcgttactcattacctcgatgatcaatccgagcctgaggatagtcgctatgtgttttcctataccatcactattcataaccttggtcgaggtcaagcacaattacttaagcgccactggttgatcaccgatgccaatggtaaaaagctagtgattgatggtgatggtgttgtgggtaaacaacccattattcaagcaagtgatgactatacctacaccagtggtacaattattgataccccgcttggtgtgatgcaagggcattacattatggaagacggggacggtaatagctttaaagttgacattgccccttttcgtttggctgtgcctaacattatccactag

SEQ ID NO: 104061 - protein, 127 aa, Photobacterium sp. SKA34
MSITSTPTIKCHVVTHYLDDQSEPEDSRYVFSYTITIHNLGRGQAQLLKRHWLITDANGKKLVIDGDGVVGKQPIIQASDDYTYTSGTIIDTPLGVMQGHYIMEDGDGNSFKVDIAPFRLAVPNIIH

SEQ ID NO: 104062 - DNA, 387 bp, Oceanospirillum sp. MED92
  CDS (1)..(387): transl_table=11
atggaaaaccttcagcttggtaacaatgtagatatcaatgtggaaacctcatatcaggctaagcagtccgatcctgagagtaaacgctttgtgttctcttatcgaattacgattaccaaccacaacgagacacccgtgcagcttcttaatcgtcattggctaattactgatggcaaccagcacatccaggaagtcaatggtgaaggcgtggtcggagagcagcccgttatcaaaccccaggacagctatacttacacaagcggcgctgtactcgcgaccagcgtaggcagcatgcaaggccattatgagatgtctactgaagatggcgagacgtttaaagcccctattcaagctttcacgcttgcacaacccaatgcaattcactaa

SEQ ID NO: 104063 - protein, 128 aa, Oceanospirillum sp. MED92
MENLQLGNNVDINVETSYQAKQSDPESKRFVFSYRITITNHNETPVQLLNRHWLITDGNQHIQEVNGEGVVGEQPVIKPQDSYTYTSGAVLATSVGSMQGHYEMSTEDGETFKAPIQAFTLAQPNAIH

SEQ ID NO: 104064 - DNA, 393 bp, Xanthobacter autotrophicus Py2
  CDS (1)..(393): transl_table=11
atgtaccgcgccatcactcggaatattcaggtgaccgcgacgccgcgttatgtggcggagcgatcggagcccgaccagggccgtcatttttgggcttataccgtcgaggtggccaatttgggccaggagaccgtgcaactgaagggtcgccactgggtcattaccgacgccaacgggcacaccgaggaggtccacggcgccggtgtcgtgggcgaggagcccaccctgccgcccggcggccgattcgaatacaccagcggcgtgccgctcaacacctccaccgggatcatgagcgggcactacgagatgctggccgacaacggcgagaccttctccatcgagatccccgccttctcgctggatgtgccggacgtgcgccgcgtcctgaactga

SEQ ID NO: 104065 - protein, 130 aa, Xanthobacter autotrophicus Py2
MYRAITRNIQVTATPRYVAERSEPDQGRHFWAYTVEVANLGQETVQLKGRHWVITDANGHTEEVHGAGVVGEEPTLPPGGRFEYTSGVPLNTSTGIMSGHYEMLADNGETFSIEIPAFSLDVPDVRRVLN

SEQ ID NO: 104066 - DNA, 375 bp, gamma proteobacterium HTCC2207
  CDS (1)..(375): transl_table=11
atgagcgtcgaagctatcaccgtaaaagtcaaaaccgaatatctgttgcaacagtcaaagcctgatcaggctcagtttgccttcgcctaccacatcaccatacacaatcagagcgacatcccagcgcaactactaggacgccactggataatcaccgatgccaatgaagctaagcaggaagttcgcggtgccggtgttgtcggcgagcaacctttgatcgccccgggacagtcctacaagtacagcagcggtgtgatgctcgacacacccatcggcactatgcagggctgctataagatgcgcgatgatgagggctgcgagtttgacgccaccatagagcccttcttactttcaacgccccacgccgtgaactaa

SEQ ID NO: 104067 - protein, 124 aa, gamma proteobacterium HTCC2207
MSVEAITVKVKTEYLLQQSKPDQAQFAFAYHITIHNQSDIPAQLLGRHWIITDANEAKQEVRGAGVVGEQPLIAPGQSYKYSSGVMLDTPIGTMQGCYKMRDDEGCEFDATIEPFLLSTPHAVN

SEQ ID NO: 104068 - DNA, 378 bp, Oceanobacter sp. RED65
  CDS (1)..(378): transl_table=11
atggctaatccaaacgtccgagtcgatgtcatccctcgctacctcgttgaagaatccagtgacgagaaaaaacgttatgtatttagttacaccgtcaccattcacaacgagggtgagcgcactgcccaactattaagccgccattggattatcaccaacggcgaaaccttaaagacacaagaagttcgcggcgatggcgtcatcggtaagcaacccacaatattacccggtgaaagctacacctacaccagtggtaccgttatggaaacaccggtaggcaccatgcaaggtagttaccgcatgattgatgacgaagggatatacttcgatgtaccaattccagttttcactttagccgcaacccacagcgtgcactaa

SEQ ID NO: 104069 - protein, 125 aa, Oceanobacter sp. RED65
MANPNVRVDVIPRYLVEESSDEKKRYVFSYTVTIHNEGERTAQLLSRHWIITNGETLKTQEVRGDGVIGKQPTILPGESYTYTSGTVMETPVGTMQGSYRMIDDEGIYFDVPIPVFTLAATHSVH

SEQ ID NO: 104070 - DNA, 381 bp, Vibrio sp. Ex25
  CDS (1)..(381): transl_table=11
atggacgtcattcaaccttgcatcaaaattcaagttcacaccaaatacatcgaagaacagtccaatcctgagctacaacgctacgttttcgcctataccatcaccatcaaaaaccttagccaacaaaccgtgcagttagtgagccgtcgctggttaatcacagactcgaatggcaagcaaatgacggttgaaggtgatggtgtggtgggtcaacaaccttttattccaagcaatgatgaatacacgtacagtagcggaaccgcgttagaaacccctgtcggcgttatgcaagggcactacaaaatgctggatgaaaaaggacaggagttcatcaccgaaattgaaccatttcgtcttgctgttccaaatgttttaaattag

SEQ ID NO: 104071 - protein, 126 aa, Vibrio sp. Ex25
MDVIQPCIKIQVHTKYIEEQSNPELQRYVFAYTITIKNLSQQTVQLVSRRWLITDSNGKQMTVEGDGVVGQQPFIPSNDEYTYSSGTALETPVGVMQGHYKMLDEKGQEFITEIEPFRLAVPNVLN

SEQ ID NO: 104072 - DNA, 390 bp, Alteromonadales bacterium TW-7
  CDS (1)..(390): transl_table=11
atgacaaagagcagtaatattggatcacctgtaaaggtgtctgtagagacattttatgttgaaggtcaatcacagcctgaaatcgaaaagtacgtatttgcctactctgtaacaataaaaaatcatagtttatgtagtgctaagttattgcatcgttattggttaattacagacgcaaacggcaaagaagttgaagttgaaggcgaaggcgttgttggcgaaacccccacgattggcccaggtgagagttacaaatacaccagtggtgctatcctagatacacctgttggtacaatgcaaggccactacacgctacgcaacgagtttggtgcagagtttgaagcacctattaatgtatttcgtttagcttgccctaatattttgcattag

SEQ ID NO: 104073 - protein, 129 aa, Alteromonadales bacterium TW-7
MTKSSNIGSPVKVSVETFYVEGQSQPEIEKYVFAYSVTIKNHSLCSAKLLHRYWLITDANGKEVEVEGEGVVGETPTIGPGESYKYTSGAILDTPVGTMQGHYTLRNEFGAEFEAPINVFRLACPNILH

SEQ ID NO: 104074 - DNA, 381 bp, Pseudomonas putida GB-1
  CDS (1)..(381): transl_table=11
atgtccgacccccgctatcaaatcgacgtcagcgtcgtgacccgctacctgaaagaacaatccgaccccgaaaacagtcgtttcgctttcgcctacaccattaccgtgcagaacaacggctcgctcaaagccaagctgctgtcacgccactggctgatcaccaacggtgacggcgaagtcgaggaagtgcgcggtgccggcgtggtcggccaacagcccaacatcgacccgggccagagccacacctacagcagcggcgccgtcatcagtacccgcgtgggcaccatgcagggcagctaccagatgtttgccgaagacggtaaacgcttcgacgccgagatcgccccgttccgcctggcggtaccgggggcgctgcactga

SEQ ID NO: 104075 - protein, 126 aa, Pseudomonas putida GB-1
MSDPRYQIDVSVVTRYLKEQSDPENSRFAFAYTITVQNNGSLKAKLLSRHWLITNGDGEVEEVRGAGVVGQQPNIDPGQSHTYSSGAVISTRVGTMQGSYQMFAEDGKRFDAEIAPFRLAVPGALH

SEQ ID NO: 104076 - DNA, 393 bp, Magnetospirillum gryphiswaldense
  CDS (1)..(393): transl_table=11
atgtattcgcaaaccacccgcggcatcgtggtgacggtacgccccgattacctggacgaccaatcggcgccggcggaaaatcattacgtctgggcctatcacgtccgcatcgagaaccagggcgccgacaccgtgcaactgaaaagccggcactggaagatcaccgacgccctgggtcgccggcaagaggtgcaaggcgccggcgtggtcggcgaacagccggtgctggggccgggtgaatcgttcgagtataccagcggtacgccgctgtcgacgccgtcgggcatcatggtcggcacttatcagatgcaggggccggatggcagcatcttcgacgtttccatccccgccttctcgctggacagcccgcatcagcccgtacggttgaattga

SEQ ID NO: 104077 - protein, 130 aa, Magnetospirillum gryphiswaldense
MYSQTTRGIVVTVRPDYLDDQSAPAENHYVWAYHVRIENQGADTVQLKSRHWKITDALGRRQEVQGAGVVGEQPVLGPGESFEYTSGTPLSTPSGIMVGTYQMQGPDGSIFDVSIPAFSLDSPHQPVRLN

SEQ ID NO: 104078 - DNA, 381 bp, Vibrio harveyi
  CDS (1)..(381): transl_table=11
atggacgtcattcaaccctgcatcaaaattcaagttcataccaaatacattgaagaacagtccaaccctgaactgcaacgctacgtttttgcttacgtcattacgataaaaaacctcagccaacaaaccgtgcaattaatcagccgacgctggttgattaccgattccaatggcaagcaaatgaccgtagaaggcgaaggtgtcgtcggtcagcaaccttttatttccggtagcgacgaatacacctacagtagtggcaccgcactggagacgccggttggagtaatgcaaggacactacattctgctggatgaaaagggcaatgaatttatcaccgagatcgacccgttccgtttggcgataccaaacgtgttaaattaa

SEQ ID NO: 104079 - protein, 126 aa, Vibrio harveyi
MDVIQPCIKIQVHTKYIEEQSNPELQRYVFAYVITIKNLSQQTVQLISRRWLITDSNGKQMTVEGEGVVGQQPFISGSDEYTYSSGTALETPVGVMQGHYILLDEKGNEFITEIDPFRLAIPNVLN

SEQ ID NO: 104080 - DNA, 402 bp, Agrobacterium tumefaciens; identical to SEQ ID NO: 103964
  CDS (10)..(402): transl_table=11

SEQ ID NO: 104081 - protein, 130 aa, Agrobacterium tumefaciens
MYRALTRDIEVTVDPYYLEEQSDPDDDRYVWGYKVVIANNSDVPVKLVNRYWHITDQNGQVDEVYGPGVVGEQPQLKPGDSYEYSSGCPLDTPSGLMFGHYEMETENGEVFNVTIPAFSLDSPGLMRVLN

SEQ ID NO: 104082 - DNA, 429 bp, Bdellovibrio bacteriovorus; identical to SEQ ID NO: 103974
  CDS (46)..(429): transl_table=11

SEQ ID NO: 104083 - protein, 127 aa, Bdellovibrio bacteriovorus
MQKTSIPDFQITAKVVYVPSESRPDEGYHFFAYKITITNTGSTPAQLMSRHWVITDALGKKEEVRGPGVVGLQPKIQPGQTFEYDSACPLTTSTGSMVGRYFFVGESGESFSVEVPEFYLIAPLALH

SEQ ID NO: 104084 - DNA, 405 bp, Bradyrhizobium japonicum
  CDS (13)..(405): transl_table=11
atgatggcagccatgtaccgcgccgtgacccgccagatcgaagtgaccgtcgagccgaactttgttccggaacagtcgtcggccgaccgctcccgctacttctggtcctacaccatcgtcatcaccaattcgggcgaggagaccgtgcagctcaagacgcggcactggatcatcaccgacgccaccggccgccagcaggaggtgaagggcgagggcgtggtcggcgagcagccgaccctggcccccggcgagcgcttcgaatacacctccggcgtgccgctctcgaccgcctccggcttcatgaccggccgctaccagatggtcagcgaaagcggcgaacgcttcgagatcgacgtgccgacgttttcgctggatagcccggacaacaagcgggtgttgaactag

SEQ ID NO: 104085 - protein, 130 aa, Bradyrhizobium japonicum
MYRAVTRQIEVTVEPNFVPEQSSADRSRYFWSYTIVITNSGEETVQLKTRHWIITDATGRQQEVKGEGVVGEQPTLAPGERFEYTSGVPLSTASGFMTGRYQMVSESGERFEIDVPTFSLDSPDNKRVLN

SEQ ID NO: 104086 - DNA, 393 bp, Brucella melitensis
  CDS (1)..(393): transl_table=11
atgtatagtgcggtaacacgcgggatcgaagttacggtcgagcccttttatctggaagtccaatccgagccggaagaaaaccgttatgtatggggttatcgcgtcacgatcgtgaacaattcatccgaaacggtgcagctttgctcgcgctactggcagatcaccgacgccaacggccatgtgcaagaagtgcgcggttcaggcgtggtcggcaagcagcctgttctcgatccgggcgattcataccagtattcttccggttgcccgctcacaacctcgtcaggcgtgatggtcgggcgctaccagatgaagggcgaagacggcgcacaattcgagatcgagattcccgccttttcactcgacgtacccgaacagcgccgcacgctgaactga

SEQ ID NO: 104087 - protein, 130 aa, Brucella melitensis
MYSAVTRGIEVTVEPFYLEVQSEPEENRYVWGYRVTIVNNSSETVQLCSRYWQITDANGHVQEVRGSGVVGKQPVLDPGDSYQYSSGCPLTTSSGVMVGRYQMKGEDGAQFEIEIPAFSLDVPEQRRTLN

SEQ ID NO: 104088 - DNA, 465 bp, Caulobacter crescentus; identical to SEQ ID NO: 103966
  CDS (43)..(465): transl_table=11

SEQ ID NO: 104089 - protein, 140 aa, Caulobacter crescentus
MRRRRGSDSAAYEARTRDIVVRVFPTYAAEESSPEQGLYLWSYTVEIENHGEETVTLIARRWTITDGFNRVNEVEGSGVVGEQPELKPREAFRYVSNCPLPTPSGAMRGSYQMVTDAGDLFDVAIPEFSLHLPGAAMKLN

SEQ ID NO: 104090 - DNA, 381 bp, Chromobacterium violaceum
  CDS (1)..(381): transl_table=11
atggccgataaactctaccagatggaggtgcaggcggagccacaatacgtggccgaacagtccagcgtcgccaacgacgtctacgtgttcgcctaccgcgtccgcatcaccaataccggcagcgagccggcgcagctgatcagccgccactggatcatcaccgacgccaatcagcaggtgcaggaggtgcgcggcatgggcgtggtgggcgagcagccgcatctcgacccgggccaggtgttcgagtactccagcgcggcccacatcaccacgccgtacggcagcatgaagggcgcctaccagatgatggcggacgacggtcggcgcttcgaggcgtccattcccgagatgacgctggtggcgccccgggtgctgcactaa

SEQ ID NO: 104091 - protein, 126 aa, Chromobacterium violaceum
MADKLYQMEVQAEPQYVAEQSSVANDVYVFAYRVRITNTGSEPAQLISRHWIITDANQQVQEVRGMGVVGEQPHLDPGQVFEYSSAAHITTPYGSMKGAYQMMADDGRRFEASIPEMTLVAPRVLH

SEQ ID NO: 104092 - DNA, 387 bp, Deinococcus radiodurans
  CDS (1)..(387): transl_table=11
atgacctcttctcccgacatcaccgtgtccgtacaggtccaccacctgcccgcgcagagcaccccgcaacgccaattgttcgcgtatttcatcaccatcgaaaacaacaccgacgacagctggaaactgctcagccgccactggaccatcaccagcggcgacggccagcagttcacggtggagggtgaaggcgtcgtcggggagcagccgctgctcgcgccgggcgcccagtacacctacaactcgttcgtgacggtagacgcgctgccgggccgcatggaaggccactacgtgatgggcgacgcctgggggcagacggcgcaggtgccgattccgcctttccgcttggacatcgcgcccgaaagcggcgaacggctgctgaactga

SEQ ID NO: 104093 - protein, 128 aa, Deinococcus radiodurans
MTSSPDITVSVQVHHLPAQSTPQRQLFAYFITIENNTDDSWKLLSRHWTITSGDGQQFTVEGEGVVGEQPLLAPGAQYTYNSFVTVDALPGRMEGHYVMGDAWGQTAQVPIPPFRLDIAPESGERLLN

SEQ ID NO: 104094 - DNA, 384 bp, Nitrosomonas europaea
  CDS (1)..(384): transl_table=11
atggaaaacgaacgaaaatatagcatcaaggtggaagtacgcacaatttatttaccagatcagtctgatcccgaggcggagcggtacgtgtttgcttataccattacgatcaacaataccggcagtgtggcttcacaactggtgagccgccactggatcatcaccagcggggatggcgttacgcgtgaagtgcgcgggctgggcgtagtcggcgagcaacccttgctcaaacccggtgaaacctttgaatataccagcggaaccgcgatttcatcgattgccggttcgatgaagggctcctatcagatggtggctgaagacggttttcatttttcggtggaaattcctgaattcatcctgagcgtgccgcgcgtgctgcactga

SEQ ID NO: 104095 - protein, 127 aa, Nitrosomonas europaea
MENERKYSIKVEVRTIYLPDQSDPEAERYVFAYTITINNTGSVASQLVSRHWIITSGDGVTREVRGLGVVGEQPLLKPGETFEYTSGTAISSIAGSMKGSYQMVAEDGFHFSVEIPEFILSVPRVLH

SEQ ID NO: 104096 - DNA, 381 bp, Pseudomonas aeruginosa
  CDS (1)..(381): transl_table=11
atgagcgatacccagcaccaggtcaacgtcagggtcgacacccgctaccttccggaacagtccgccccggagcagaaccgtttcgccttcgcctacacggtgaccatcgagaaccagggcgaggttccggcccaactgctgtcgcgccactggatcatcaccgacggcgacggccgtacccaggaagttcgcggcgccggcgtggtcggcgagcaaccgctgatcgcccccggcgcgcaacacacctacaccagcggcacggtgctggcgacccgggtcggcagcatgcgcggcagctatcagatgctcggcagcgacggaatcgccttcgacgccgcgatcccggtgtttcgcctggccgtaccgggagcgctgcactga

SEQ ID NO: 104097 - protein, 126 aa, Pseudomonas aeruginosa
MSDTQHQVNVRVDTRYLPEQSAPEQNRFAFAYTVTIENQGEVPAQLLSRHWIITDGDGRTQEVRGAGVVGEQPLIAPGAQHTYTSGTVLATRVGSMRGSYQMLGSDGIAFDAAIPVFRLAVPGALH

SEQ ID NO: 104098 - DNA, 375 bp, Ralstonia solanacearum
  CDS (1)..(375): transl_table=11
atgtcccgctacgaactcaccgtccaggtccggacgcgctacctgcctgagcaatccgagccctcgcaggaccagtacgcctttgcctacaccatcactatccgcaatacgggcgaggtaccgagccagctggtctcgcggcactgggtcatcaccgacgcggagagccacgtgcaggaggtcgccggcctcggcgtggtcggccaccagccgctgctgccgccgggcgaatcgttcgagtacaccagctgggcgaccatcaagacgccggtgggcaccatgcgcggcgaatacttctgcgtggccgaggacggccatcgcttcgaggcgccgattcccgagtttgcgctggcgatgccgcgcatgctgcattga

SEQ ID NO: 104099 - protein, 124 aa, Ralstonia solanacearum
MSRYELTVQVRTRYLPEQSEPSQDQYAFAYTITIRNTGEVPSQLVSRHWVITDAESHVQEVAGLGVVGHQPLLPPGESFEYTSWATIKTPVGTMRGEYFCVAEDGHRFEAPIPEFALAMPRMLH

SEQ ID NO: 104100 - DNA, 405 bp, Rhizobium etli
  CDS (13)..(405): transl_table=11
atggtgcaaggcatgtatcgcgccctcacaagagatatcgaagtcgtggtcgaaccgttctatctggaggagcaatccgatccggaggacgatcgctatgtctggggttaccggatcgtcatcagcaacaattccggcgtcgccgttcgtctggtcaaccgctactggaacatcaccgaccagaacggccaggtagacgaggtgaccggccccggcgtcgtcggcgaacagccgcggctcagccccggcgatacctacgaatattcctccggctgcccgctcgacaccccgtccgcggtgatgttcggccattaccagatggaaacggatgaaggcgagcttttcgacgtcgacatccccgccttctcgctggattcaccggggctgctgcgcgtgctgaattga

SEQ ID NO: 104101 - protein, 130 aa, Rhizobium etli
MYRALTRDIEVVVEPFYLEEQSDPEDDRYVWGYRIVISNNSGVAVRLVNRYWNITDQNGQVDEVTGPGVVGEQPRLSPGDTYEYSSGCPLDTPSAVMFGHYQMETDEGELFDVDIPAFSLDSPGLLRVLN

SEQ ID NO: 104102 - DNA, 393 bp, Rhizobium loti
  CDS (1)..(393): transl_table=11
atgtaccgcgccgtcacgcgcaacatcgaagtgcaggtcaggccgttctacctcgaggatcgctccgatccttccgagaaccgctatgtctggggctatcagataacgatcgacaatcagtcggacgaattcgtgcagcttctgtcacgctactggcacatcaccgacggcgccggccgggtcgaggaagtgcgcggcccgggcgtcgtcggcgaccagcccgaactcaatcccggcgacagctatcaatatacgtctggctgcccgctctcgacgccatcaggcatcatggtcgggcactacacgatgcgcaacaagcgtggcgagaccttcgacatcgccatcccggcgttctcgctggacctgccggggaccagacggacggtgaattag

SEQ ID NO: 104103 - protein, 130 aa, Rhizobium loti
MYRAVTRNIEVQVRPFYLEDRSDPSENRYVWGYQITIDNQSDEFVQLLSRYWHITDGAGRVEEVRGPGVVGDQPELNPGDSYQYTSGCPLSTPSGIMVGHYTMRNKRGETFDIAIPAFSLDLPGTRRTVN

SEQ ID NO: 104104 - DNA, 393 bp, Rhizobium meliloti
  CDS (1)..(393): transl_table=11
atgtaccgcgcgctgacacgcgacatcgaagtgacggtcgagccgtactacctggaagaacagtcggatcccgacgacagccgctatgtctggggctatcgcatcatcatagcgaaccattccggactcgcggtccggctgatgacccgctactggcacattaccgacgagaacggtcaggtggacgaggtgagcggccccggcgtgatcggcgagcagccgctgctcaatcccggcgatacctacgagtactcctccggctgcccgctggatacaccctccggcgtgatgttcggccattacagcatggaggcggaaggcggggagactttcgatgtcgccatccccgccttctcgctcgattcgccgggcctcgtccgcacgcttaattga

SEQ ID NO: 104105 - protein, 130 aa, Rhizobium meliloti
MYRALTRDIEVTVEPYYLEEQSDPDDSRYVWGYRIIIANHSGLAVRLMTRYWHITDENGQVDEVSGPGVIGEQPLLNPGDTYEYSSGCPLDTPSGVMFGHYSMEAEGGETFDVAIPAFSLDSPGLVRTLN

SEQ ID NO: 104106 - DNA, 393 bp, Rhodopseudomonas palustris
  CDS (1)..(393): transl_table=11
atgtaccgcgccgtcacccgccggatcgaagtgaccgttgaacccaattatctgccggagcgttcctcggcggagaaccgccagtatttctggtcctacaccgtggtgatcaccaattcgggcgaggaaaccgtcaagctgcgcacccggcattgggtgatcaccgacgcctccggccggacccaggaagtgcgcggcgaaggcgtggtcggcgaacagccggttctcgcgccgggcgagcggttcgaatataccagcggcgtccccctcccgaccgcctccggcttcatggccggccgctatcagatggaaaccgaagcgggcgaaaaattcgagatcgacgttccgccgttttcgctcgatagcccggaagggaagcggacactgaactaa

SEQ ID NO: 104107 - protein, 130 aa, Rhodopseudomonas palustris
MYRAVTRRIEVTVEPNYLPERSSAENRQYFWSYTVVITNSGEETVKLRTRHWVITDASGRTQEVRGEGVVGEQPVLAPGERFEYTSGVPLPTASGFMAGRYQMETEAGEKFEIDVPPFSLDSPEGKRTLN

SEQ ID NO: 104108 - DNA, 378 bp, Salmonella typhimurium
  CDS (1)..(378): transl_table=11
atgatcaattcgcccagagtgtgtattcaggtgcaaagcgtctacattgaggcgcaatcctcacctgacgatgaacgttacgtttttgcctataccgtaaccatccgcaatctgggccgggcgccagtgcagctattgggccgctactggctgattaccaatggtcatggccgtgaaaccgaagtccagggcgaaggtgtggttggcgtccagccgcgcattgcgcctggcgaagagtaccagtacaccagcggcgcggtaattgaaacgccgctgggcaccatgcagggtcattacgaaatgatcgatgaaaatggcgacgcctttaccatcgacatccccgtgtttcgactcgccgtccctacactcattcactaa

SEQ ID NO: 104109 - protein, 125 aa, Salmonella typhimurium
MINSPRVCIQVQSVYIEAQSSPDDERYVFAYTVTIRNLGRAPVQLLGRYWLITNGHGRETEVQGEGVVGVQPRIAPGEEYQYTSGAVIETPLGTMQGHYEMIDENGDAFTIDIPVFRLAVPTLIH

SEQ ID NO: 104110 - DNA, 381 bp, Vibrio cholerae
  CDS (1)..(381): transl_table=11
atggatgtttcgctgccctgtatcaaaattcaggttcaaactcgctacattgaggaacaatcaaatcctgagtatcagcgctttgtgttcgcctatctcatcaccatcaaaaatctcagctcccagaccgtccaactgatgagtcggcgctggttgatcacggatgccgatggcaaacagaccgtggttgaaggcgatggcgttgtgggagagcaacctcgcatcaaagctaacgatgaatatacctacagcagtggcacggccttagatactcccgtcggtgtgatgcaggggcaatatttgatgatcgatgaacaaggtgagtctttcacggttgagattgaaccatttcgtttagccgttccgcatgtattgaattaa

SEQ ID NO: 104111 - protein, 126 aa, Vibrio cholerae
MDVSLPCIKIQVQTRYIEEQSNPEYQRFVFAYLITIKNLSSQTVQLMSRRWLITDADGKQTVVEGDGVVGEQPRIKANDEYTYSSGTALDTPVGVMQGQYLMIDEQGESFTVEIEPFRLAVPHVLN

SEQ ID NO: 104112 - DNA, 402 bp, Wolbachia pipientis wMel
  CDS (1)..(402): transl_table=11
atgatagaatacacactaactaccaactttgttgaagttacagttttaccaatttatattgaagagcaatccattccttatgaaaattgctatgtatggatgtataacgttaagataaaaaacaaaagccaatcaactattcaattgttaagtcgtcattggcaaataatagattataagggaaaagtaaatgaaattgccggagttggtgttatcggagaacaacctgtgataaaatctggagaggtatttaaatacacaagtggaacatacttaaatgtaccgtcaggaataatgcagggtaagtatgaatttctgaatgaagaaagcataaaagtttttgaagttatgataccacccttttctttggatagtccatacatcaaaactagaccccattaa

SEQ ID NO: 104113 - protein, 133 aa, Wolbachia pipientis wMel
MIEYTLTTNFVEVTVLPIYIEEQSIPYENCYVWMYNVKIKNKSQSTIQLLSRHWQIIDYKGKVNEIAGVGVIGEQPVIKSGEVFKYTSGTYLNVPSGIMQGKYEFLNEESIKVFEVMIPPFSLDSPYIKTRPH

SEQ ID NO: 104114 - DNA, 384 bp, Xanthomonas axonopodis pv
  CDS (1)..(384): transl_table=11
atgcaagatgatccgcgctaccgggtcgaggtcgaggtatcgccccgcttcctcgcccatcaatccaccccggacgaaggccgctatgcctttgcctacagcatccgcatccagaatgcgggcgcggtgcctgcgcgcctggtcgcgcgccattggcagatcaccgatggcaacggacgcaccgagcaggtggatggcgaaggggtggtcggcgaacagccgtggctgcgcccgggcgaagcgttccattacacctctggcgtactgctggagaccgagcagggacagatgcaaggccactacgacatggtggccgacgatggcaccgaatttatcgccccgatcgccgccttcgtgctgagcgtgcccaggacgctgcactga

SEQ ID NO: 104115 - protein, 127 aa, Xanthomonas axonopodis pv
MQDDPRYRVEVEVSPRFLAHQSTPDEGRYAFAYSIRIQNAGAVPARLVARHWQITDGNGRTEQVDGEGVVGEQPWLRPGEAFHYTSGVLLETEQGQMQGHYDMVADDGTEFIAPIAAFVLSVPRTLH

SEQ ID NO: 104116 - DNA, 384 bp, Xanthomonas campestris pv
  CDS (1)..(384): transl_table=11
atgcaagatgatccgcgctaccgggtcgaggtcgaggtgtcaccacgcttcctcgcccatcaatcgactccggaagaaggccgctacgccttcgcttacagcattcgcatccagaacgccggcgccgtgccagcgcgactgattgcgcgccactggaaaatcaccgacgccaacggccgcaccgagcaggtggacggcgaaggtgtggtcggcgagcagccgcggttgcgtccgggcgaggccttccactacacctccggtgtgctgctggaaaccgaacaggggcagatgcagggctactacgacatggtggccgacgatggcaccgaattcaccgcgccaatcgccgccttcgtgctgagcgtgccgaggacgctgcactga

SEQ ID NO: 104117 - protein, 127 aa, Xanthomonas campestris pv
MQDDPRYRVEVEVSPRFLAHQSTPEEGRYAFAYSIRIQNAGAVPARLIARHWKITDANGRTEQVDGEGVVGEQPRLRPGEAFHYTSGVLLETEQGQMQGYYDMVADDGTEFTAPIAAFVLSVPRTLH

SEQ ID NO: 104118 - DNA, 384 bp, Xylella fastidiosa
  CDS (1)..(384): transl_table=11
atggaaaacaatcccagttcaaagattgaggtcgctgtctcgtcccgcttcctcgaccagcaatctaatcgtaatgaaggccgctacgtcttcgcctacaccatccggatctacaatgctggaaatgtccctgcacgactgatcgcgcgccactggcagattaccgatgcaaacggcaaagtcgaatacgtcactggtgaaggagtcattggagaacaaccacggctgcgtcccggcgaagaatttcgctacacctctggggtcgtgttgggaaccgaacagggccagatgcaaggacattacgacatgatggccgatgacggtaccgaattcaccgccacaatctccccattcgtactcagtgtgccgcgaacactacactga

SEQ ID NO: 104119 - protein, 127 aa, Xylella fastidiosa
MENNPSSKIEVAVSSRFLDQQSNRNEGRYVFAYTIRIYNAGNVPARLIARHWQITDANGKVEYVTGEGVIGEQPRLRPGEEFRYTSGVVLGTEQGQMQGHYDMMADDGTEFTATISPFVLSVPRTLH

SEQ ID NO: 104120 - DNA, 378 bp, Yersinia pestis
  CDS (1)..(378): transl_table=11
atgattgaacagccccgtatttgtgtgcaggtacacagtatctatgtggaaacgcaatcgatacccgaagaggaacgtttcgtcttcgcctataccgttaccgttcgtaatttagggcgttcaaacgtgcaactgcttggccgctattggttaattaccaatagcaatggccgccagactgaagttcagggagaaggggttatcggcgaacaaccacttatcctgccaggtaatgaatttcaatacaccagcggtgccgttctggaaactccgctgggtactatggaaggacattatgaaatgattgatcaccttggacaggccttccgtactgtaattccggtattccgcttagcgatcccagccctgatccactaa

SEQ ID NO: 104121 - protein, 125 aa, Yersinia pestis
MIEQPRICVQVHSIYVETQSIPEEERFVFAYTVTVRNLGRSNVQLLGRYWLITNSNGRQTEVQGEGVIGEQPLILPGNEFQYTSGAVLETPLGTMEGHYEMIDHLGQAFRTVIPVFRLAIPALIH

SEQ ID NO: 104122 - DNA, 798 bp, Glycine max
  CDS (1)..(798)
atgcaatccttatcgttaagtatgagtctgaggagtagtagtttagcgaattttctgttgctgagttcagagacgagagtgagaagaagaagaaggagtgtcatcgtagcgtgtgctttggagggagacagtggtagcagtagcacaagctcctttctctctcggacccaaacctacgcccttcttaagcaacaattgcaagtggctgctaaatctgaggattacaaggaagcagctagaattcgagactcgttgaagcaatttgaggacgaggagcctgttttgcgtctgaggagactattgaaggaagcaattgctgaagagagattccaggatgctgctagttaccgtgatgagctaaacaatattgccccacactctcttttaaaatgttgcagcgatgctacaacattgggaatcagggttcaagttaggagtgtatatatagagggcagaagtcagccttcaaaggggctatacttctttgcatatagaataagaattaccaataactcagaccaccctgttcaacttcttagaaggcattggattataactgatgctaatgggagaacggaaaatgtctggggaattggagttgttggtgaacagccattaatacttcctggaaatagttttgaatactcttcagcatgcccactgaacacaccaaatggtagaatggaaggtgattatgagatgatccattttgaaagagtaggctcacgatcattcaatgtggccattgccccgttttctctctctctgcttggagatgatgaaggttgtgttatttga

SEQ ID NO: 104123 - protein, 265 aa, Glycine max
MQSLSLSMSLRSSSLANFLLLSSETRVRRRRRSVIVACALEGDSGSSSTSSFLSRTQTYALLKQQLQVAAKSEDYKEAARIRDSLKQFEDEEPVLRLRRLLKEAIAEERFQDAASYRDELNNIAPHSLLKCCSDATTLGIRVQVRSVYIEGRSQPSKGLYFFAYRIRITNNSDHPVQLLRRHWIITDANGRTENVWGIGVVGEQPLILPGNSFEYSSACPLNTPNGRMEGDYEMIHFERVGSRSFNVAIAPFSLSLLGDDEGCVI

SEQ ID NO: 104124 - DNA, 444 bp, Hordeum vulgare
  CDS (1)..(444)
atgattttggctccgcactccctcctcaaatgttctagtgatgctacaactctggggataagggtacaagtcaggagtgtctatattgaaagccggagccaacccttaaaggggaaattcttttttgcctacagaatcagaattacaaataattctcaacgtgctgtacagcttctcagacgacactggattgtcaccgatgcgaatggaaggacagagaatgtttggggtgttggtgtagtgggagagcaacctgtaatattcccaaagactggttttgagtactcatctgcatgcccactaaacacgccaaatgggagaatggaaggagattttgagatgaagcacattgacaaggttggatcctcaacattcaatatcgccatcgcaccattctctctgtcaatcctcggggacgacaatgacgctcccctcagaaggtga

SEQ ID NO: 104125 - protein, 147 aa, Hordeum vulgare
MILAPHSLLKCSSDATTLGIRVQVRSVYIESRSQPLKGKFFFAYRIRITNNSQRAVQLLRRHWIVTDANGRTENVWGVGVVGEQPVIFPKTGFEYSSACPLNTPNGRMEGDFEMKHIDKVGSSTFNIAIAPFSLSILGDDNDAPLRR

SEQ ID NO: 104126 - DNA, 873 bp, Zea mays
  CDS (1)..(873)
atgcagtgggcgggtctgagatcgcaggcgccggttcccacggcggcgtggacggggccgaggccaagaaccgcgaggtgcccgcagggtagattccccacagcgcgccgggcgctggtggcgtcggcagcggcctcggacgctaattcgagctcgaattcgccggggaaggacgaggagggggaggaggtggtgcgaagggagaaggaggagaaggcggtcgcgtcgcttctgatgagaagccagaagtacgccatgctaaagcagcagctcgccgtggccgcccaatttgaggattacaaggaagcagcgaggttgagggactcgctgaggtccttcgaggagaaggagcctgtgttgtgcctccgccggttgatgaagaaggccattgaggaggagaggtttgaggatgctgctaaatacagagatgaattaaagattttggctccacactccctcctcaaatgttctagcgatgcaactactttggggataagagttcaagtcaggagcgtctatattgaaagccggagccaaccattgaaagggcaattcttttttgcttatagaattagaattacgaatagttctcagcgccctgttcagcttctcaaaaggcactggattgttacagatggaaatggaaggacagaaaatatttggggagttggagtagtgggagaacaacctgtcatattcccaaagactggttttgagtactcttctgcatgcccattgagcactccaaatgggagaatggaaggtgactttgagatgaagcacatcgacaaggctggatcatcaacattcaatgttgcaattgcaccattctctctgtcaattcttggtgacgataatgatgttctgctatga

SEQ ID NO: 104127 - protein, 290 aa, Zea mays
MQWAGLRSQAPVPTAAWTGPRPRTARCPQGRFPTARRALVASAAASDANSSSNSPGKDEEGEEVVRREKEEKAVASLLMRSQKYAMLKQQLAVAAQFEDYKEAARLRDSLRSFEEKEPVLCLRRLMKKAIEEERFEDAAKYRDELKILAPHSLLKCSSDATTLGIRVQVRSVYIESRSQPLKGQFFFAYRIRITNSSQRPVQLLKRHWIVTDGNGRTENIWGVGVVGEQPVIFPKTGFEYSSACPLSTPNGRMEGDFEMKHIDKAGSSTFNVAIAPFSLSILGDDNDVLL

SEQ ID NO: 104128 - DNA, 23 bp, Artificial sequence
  primer
atgatcaattcgccccgagtgtg

SEQ ID NO: 104129 - DNA, 24 bp, Artificial sequence
  primer
ttaatgaatgagtgtgggaacggc

SEQ ID NO: 104130 - protein, 130 aa, Artificial sequence
  consensus sequence
  Variant (2)..(2): Xaa in position 2 is any amino acid
  Variant (4)..(6): Xaa in position 4 to 6 is any amino acid
  Variant (8)..(11): Xaa in position 8 to 11 is any amino acid
  Variant (13)..(13): Xaa in position 13 is any amino acid
  Variant (15)..(20): Xaa in position 15 to 20 is any amino acid
  Variant (21)..(22): Xaa in position 21 to 22 is any or no amino acid
  Variant (24)..(28): Xaa in position 24 to 28 is any amino acid
  Variant (30)..(36): Xaa in position 30 to 36 is any amino acid
  Variant (38)..(39): Xaa in position 38 to 39 is any amino acid
  Variant (41)..(41): Xaa in position 41 is any amino acid
  Variant (43)..(43): Xaa in position 43 is any amino acid
  Variant (47)..(48): Xaa in position 47 to 48 is any amino acid
  Variant (50)..(53): Xaa in position 50 to 53 is any amino acid
  Variant (54)..(54): Xaa in position 54 is any or no amino acid
  Variant (56)..(56): Xaa in position 56 is any amino acid
  Variant (58)..(58): Xaa in position 58 is any amino acid
  Variant (63)..(63): Xaa in position 63 is any amino acid
  Variant (64)..(64): Xaa in position 64 is any or no amino acid
  Variant (67)..(69): Xaa in position 67 to 69 is any amino acid
  Variant (71)..(75): Xaa in position 71 to 75 is any amino acid
  Variant (76)..(76): Xaa in position 76 is any or no amino acid
  Variant (78)..(78): Xaa in position 78 is any amino acid
  Variant (80)..(84): Xaa in position 80 to 84 is any amino acid
  Variant (86)..(87): Xaa in position 86 to 87 is any amino acid
  Variant (89)..(89): Xaa in position 89 is any amino acid
  Variant (91)..(91): Xaa in position 91 is any amino acid
  Variant (93)..(93): Xaa in position 93 is any amino acid
  Variant (95)..(100): Xaa in position 95 to 100 is any amino acid
  Variant (101)..(102): Xaa in position 101 to 102 is any or no amino acid
  Variant (104)..(105): Xaa in position 104 to 105 is any amino acid
  Variant (106)..(106): Xaa in position 106 is any or no amino acid
  Variant (108)..(110): Xaa in position 108 to 110 is any amino acid
  Variant (112)..(113): Xaa in position 112 to 113 is any amino acid
  Variant (115)..(115): Xaa in position 115 is any amino acid
  Variant (117)..(118): Xaa in position 117 to 118 is any amino acid
  Variant (119)..(129): Xaa in position 119 to 129 is any or no amino acid
VXVXXXYXXXXSXPXXXXXXXXYXXXXXNXXXXXXXLXXRXWXITDXXGXXXXXVXGXGVVGXXQPXXXPXXXXXXYXSXXXXXTXXGXMXGXYXXXXXXXXGXXXFXXXIXXFXLXXXXXXXXXXXXXP

SEQ ID NO: 104131 - protein, 26 aa, Artificial sequence
  protein pattern
  Variant (2)..(2): Xaa in position 2 is any amino acid
  Variant (3)..(3): Xaa in position 3 is Ile, Leu or Val
  Variant (4)..(4): Xaa in position 4 is any amino acid
  Variant (5)..(5): Xaa in position 5 is Ile, Leu or Val
  Variant (6)..(6): Xaa in position 6 is any amino acid
  Variant (8)..(8): Xaa in position 8 is any amino acid
  Variant (9)..(9): Xaa in position 9 is Ala, Gly, Asn, Ser or Thr
  Variant (10)..(14): Xaa in position 10 to 14 is any amino acid
  Variant (15)..(15): Xaa in position 15 is Leu or Val
  Variant (16)..(17): Xaa in position 16 to 17 is any amino acid
  Variant (19)..(19): Xaa in position 19 is any amino acid
  Variant (21)..(21): Xaa in position 21 is any or no amino acid
  Variant (23)..(23): Xaa in position 23 is any or no amino acid
  Variant (25)..(25): Xaa in position 25 is Asp, Asn or Ser
  Variant (26)..(26): Xaa in position 26 is Ala, Glu, Gly, Gln or Ser
YXXXXXNXXXXXXXXXXRXWXIXTXX

SEQ ID NO: 104132 - protein, 18 aa, Artificial sequence
  protein pattern
  Variant (2)..(2): Xaa in position 2 is Ser, Thr or Val
  Variant (4)..(4): Xaa in position 4 is any amino acid
  Variant (5)..(5): Xaa in position 5 is Ala, Cys, Ser, Thr or Val
  Variant (6)..(6): Xaa in position 6 is any amino acid
  Variant (7)..(7): Xaa in position 7 is Ile, Leu or Met
  Variant (8)..(8): Xaa in position 8 is any amino acid
  Variant (10)..(11): Xaa in position 10 to 11 is any amino acid
  Variant (13)..(13): Xaa in position 13 is any amino acid
  Variant (15)..(15): Xaa in position 15 is any amino acid
  Variant (17)..(17): Xaa in position 17 is any amino acid
YXSXXXXXTXXGXMXGXY

SEQ ID NO: 104133 - protein, 15 aa, Artificial sequence
  protein pattern
  Variant (2)..(2): Xaa in position 2 is any or no amino acid
  Variant (4)..(4): Xaa in position 4 is any amino acid
  Variant (6)..(6): Xaa in position 6 is any amino acid
  Variant (9)..(9): Xaa in position 9 is Ile or Val
  Variant (11)..(11): Xaa in position 11 is any amino acid
  Variant (12)..(12): Xaa in position 12 is Glu, Gln or Thr
  Variant (14)..(14): Xaa in position 14 is any amino acid
  Variant (15)..(15): Xaa in position 15 is Ile or Leu
EXVXGXGVXGXXPXX

SEQ ID NO: 104134 - DNA, 1269 bp, Escherichia coli
  CDS (1)..(1269): transl_table=11
atgtttgccctctgtgatgtaaacgcgttttatgccagctgtgagacggtgtttcgccctgatttatggggtaaaccggtggttgtgctatcgaataatgacggttgcgttatcgcccgaaacgctgaggcaaaggcgcttggcgttaaaatgggcgatccctggttcaaacaaaaagatctgtttcgtcgctgtggcgtggtttgctttagcagcaattatgagctttacgcagacatgagcaatcgggtgatgtcgacgctggaagagctatcgccccgcgtcgagatttacagtattgatgaggcattctgcgatctgacaggtgtgcgtaattgtcgcgatctgactgattttggcagagaaattcgcgcaacggtgctacaacgtacccatcttactgttggtgtggggatcgcccagaccaaaacgctggctaagcttgccaatcatgcggcaaaaaaatggcagcggcagacgggtggggtggtggatttatcaaatctggaacgccagcgtaaattaatgtctgctctccccgtggatgacgtctgggggattggacggcggatcagcaaaaaactggacgcgatggggatcaaaaccgttctcgatttggcggatacagatatccggtttatccgtaaacattttaatgtcgtgctcgaaagaacggtgcgtgaactgcgcggcgaaccctgtttgcaactggaagagtttgcaccgacgaagcaggaaattatctgttcccgctcgtttggtgaacgcatcacggattatccgtcgatgcggcaggccatttgtagttacgctgcccgggcggcggaaaaacttcgcagcgagcatcaatattgtcggtttatctccacgtttattaagacgtcaccatttgcgctcaatgaaccttattacggcaatagcgcgtcggtaaaactgctgacgcccactcaggacagcagggatatcattaacgctgctacgcgatctctggatgccatctggcaagcgggccatcgttaccaaaaagcgggcgtgatgctgggggatttcttcagtcagggagtcgcgcagctcaatttattcgatgacaacgcaccgcgccccgggagtgagcaattgatgacggtaatggatacactgaatgctaaagagggcagaggaacactctattttgccgggcaggggatccagcaacaatggcagatgaagcgagccatgctttcaccacgttatacaacgcgaagttctgatttactgagggtcaaataa

SEQ ID NO: 104135 - protein, 422 aa, Escherichia coli [sequence omitted]

SEQ ID NO: 104136 - DNA, 1266 bp, Klebsiella pneumoniae subsp. pneumoniae MGH 78578
  CDS (1)..(1266): transl_table=11
atgttcgcgcattgtgatgtgaacgccttctatgccagctgtcagaccgccttccggccagacctgaaggggcggccggtggtggtgctgtcgaacaacgacggctgcgtgatcgcccgctcggcggaggcgaagccgtttgtgaaaatgggcgaaccctactttaagcagaaggctgcgtttcttcgccacggcgtcgtggcgtttagcagtaattatgagctgtatgccgacatgtccagccgggtgatggccaccctggaagagctcaccccgcgctgcgaaatttacagtatcgatgaggccttttgcgatgtcagcggtgtgcgtcattgcagagatctgaccgattttggccgcgaaatccgcgccacggtgctgcagcgtacccatctgacgctgggcgttggcatcgcccagaccaaaaccctggcgaagctggccaaccacgcggcgaagcagtggccgcggcagacgggcggggtagtggacttgtcctgcccgcagcggcagcgaaagctgatggcgctgctgccggtgagcgaggtctggggcatcgggcggcggatcggcaaaaagcttgaagcgatggggatcggcacggtactccagctggcggagagcgatatccgctttatccgcaagcacttcacggtagtgctcgaacgaacggtacgggagctgcgcggcgagccttgcctggcgctggaggagtttgcccccgctaagcaggaaattatctgcagccgctcgttcggggatcggattacggcctatgaggatatgcgccaggcgatctgcagctatgccgcgcgggcagcagaaaagctgcgcggtgagcatcagtactgccggttcgtctccgcctttgtcaaaaccagccccttcgcgctgaatgaaccctattacggcaacagcgcctcgctaaagctgctgacgccgacccaggactcccgggatattatcgccgcggcgacgagctgtctggatgccatctggaaagcggggcatcgctatcagaaggccggcgtgatgctcggcgatttctacagccagggcgtcgcccagctgaatctgttcgacgagcttgctccgcggcacaacagcgccagactgatgcaggttctcgaccagctgaatgcgaaaaacggcaggggggcgctctattttgccggccaggggatccagcagcagtggcagatgaagcgggagatgctctcgccgcgctacaccacgcgatacggcgacctgctccgcgtcagataa

SEQ ID NO: 104137 - protein, 421 aa, Klebsiella pneumoniae subsp. pneumoniae MGH 78578
MFAHCDVNAFYASCQTAFRPDLKGRPVVVLSNNDGCVIARSAEAKPFVKMGEPYFKQKAAFLRHGVVAFSSNYELYADMSSRVMATLEELTPRCEIYSIDEAFCDVSGVRHCRDLTDFGREIRATVLQRTHLTLGVGIAQTKTLAKLANHAAKQWPRQTGGVVDLSCPQRQRKLMALLPVSEVWGIGRRIGKKLEAMGIGTVLQLAESDIRFIRKHFTVVLERTVRELRGEPCLALEEFAPAKQEIICSRSFGDRITAYEDMRQAICSYAARAAEKLRGEHQYCRFVSAFVKTSPFALNEPYYGNSASLKLLTPTQDSRDIIAAATSCLDAIWKAGHRYQKAGVMLGDFYSQGVAQLNLFDELAPRHNSARLMQVLDQLNAKNGRGALYFAGQGIQQQWQMKREMLSPRYTTRYGDLLRVR

SEQ ID NO: 104138 - DNA, 1272 bp, Klebsiella pneumoniae subsp. pneumoniae MGH 78578
  CDS (1)..(1272): transl_table=11
atgttcgccctggctgacgtcaactccttctacgccagttgcgagaaggttttcaggccggatttgcgcggcaaacctgtcgtcgttctcagtaacaacgatggctgcgttattgcccggagtgctgaagccaaactgctgggtataaagatgggaaccccctggttccagctcaaagaggcgcagtttcctgaaaaattgtacgttttttccagcaactacgagctctacgcgagcctgagtaaccgtgtggtcgccctgctggaagagctgtcgccccgcgtcgaacaatactcaattgacgaatgtttcctggatgcccggggaattggccactgtatggatctggaggattttggcaggcagctgcgtgggcatgttctcagtggaaccggactgacgatcggtgtcggcttcggcgccacaaaaacactggccaaatcggcgcagtgggcgtcaaaggaatggccacaattcaggggggtactggcgctgtcgcccgaaaatccacgcagaacggcaaaattactcagcctgcagccggtggaagaaatctggggcgtggggaaccggatagcgaaaaagctgcacgttatggggatcaccaccgccctgcagctgtcgctgacgaaccccacatttatccggaaaaacttcaacgtagtgctggagcgcacggtacgtgagctgaacggcgagagttgcatttcactggaggaagcgccgccgccgaaacagcagattgtctgcagtcgtagcttcgggcagcggatcaccacctacgaagaaatgcgccaggccgtctgccagtatgccgagcgcgcgtcggaaaagttgcgcggtgagcgacagtactgccggcatatcagcaccttcatcaagacatccccttttgcggttaatgagccgtattacggtaacgtggccacggaaaaactgaacacccctacccgtgacacccgggacattatcgcggcagcggtcaggtctctggacaggatctggctcgatggccaccgctacgcaaaagcggggataatgctcaatgatttcagtccgaacggcgtcgcgcagctgaatctgttcgatgacgtgcagccacggccgcacagcgatgcgctgatgaaggtactcgacggcattaatcattccggactcgggaaagtctggtttgccggacggggtattgcgccggactggcagatgaaacgggagatgctgtcaccggcatataccacccgctggaaggagctgccggttgcccgtttctga

SEQ ID NO: 104139 - protein, 423 aa, Klebsiella pneumoniae subsp. pneumoniae MGH 78578
MFALADVNSFYASCEKVFRPDLRGKPVVVLSNNDGCVIARSAEAKLLGIKMGTPWFQLKEAQFPEKLYVFSSNYELYASLSNRVVALLEELSPRVEQYSIDECFLDARGIGHCMDLEDFGRQLRGHVLSGTGLTIGVGFGATKTLAKSAQWASKEWPQFRGVLALSPENPRRTAKLLSLQPVEEIWGVGNRIAKKLHVMGITTALQLSLTNPTFIRKNFNVVLERTVRELNGESCISLEEAPPPKQQIVCSRSFGQRITTYEEMRQAVCQYAERASEKLRGERQYCRHISTFIKTSPFAVNEPYYGNVATEKLNTPTRDTRDIIAAAVRSLDRIWLDGHRYAKAGIMLNDFSPNGVAQLNLFDDVQPRPHSDALMKVLDGINHSGLGKVWFAGRGIAPDWQMKREMLSPAYTTRWKELPVARF

SEQ ID NO: 104140 - DNA, 1272 bp, Klebsiella pneumoniae subsp. pneumoniae MGH 78578
  CDS (1)..(1272): transl_table=11
atgtttgccctggccgatgtgaacagcttctatgccagctgtgaacgtgttttccgcccggatttgaaaggaaagccgatagtcgtcctgagcaacaacgacgggaacgtaatcgctcgcagtgccgaggcgaagccctggatcaaaatgggaactccgtggtttcagataaaaaacgaaaggtacccggaaaaaatatatgcgttttcaagtaattatgaactttacgcctcgatgtcggcgcgcgtgatgaactgcctggaggaactggcccccagggtggaacagtattccattgatgagatgttcctcgacctgaccggcgtggagcactgtatggggcttgaggacttcggccggcagctgcgtcagcacgtgtatgactgtacccgcctgaccattggcgtgggcgccggaccaacgaaaaccctcgcaaaatcagcccagtgggcctcaaaagagtggaaacagtttcgtggcgtactcgcgctgaccaggggaaatccgcaaaggacgcggaaactgctttcactgcagccggttgaagaaatctggggggtgggtaaccgtattgcacgcaagctaaatgtgctgggcataaaaaccgcgctcgatctggctctgacgaacccggccttcatccgcaaaaatttttctgtggtccttgagcgaacggtacgggaactgaactgggaaagctgcctttcgcttgaggaagcccctccgacgaaacagcaaattgtctgcagccgcagttttggcgtgaagatcacggagtacgagtcactccgtcaggctatctgtcagcacgcagagcgggcctctgaaaaactgcgtaaagagcaccagtattgccggcatatttccgttttcatcaaaacgtctccgttcgccattaaagggccttactacggcaacgtggctacggaaaaacttcttacacccactcaggacaccagggacatcattgcagccgctacaacggctctggagcgtatctggagggatgggcaccggtatgccaaagccggagttatgctgaatgacttcaccggctccggcgtttcgcagctgcagctgttcgacgaacgcccgccacgccctcacagtgctgagctgatgagggttctggacgggatcaacaactcagggctgggtaaagtatggtttgcggggcggggtatggcctcggaatggcagatgaaacgggagatgctttctcctgcttatacgacacgatggtcagatattcctgcagcgaaactggcgtga

SEQ ID NO: 104141 - protein, 423 aa, Klebsiella pneumoniae subsp. pneumoniae MGH 78578
MFALADVNSFYASCERVFRPDLKGKPIVVLSNNDGNVIARSAEAKPWIKMGTPWFQIKNERYPEKIYAFSSNYELYASMSARVMNCLEELAPRVEQYSIDEMFLDLTGVEHCMGLEDFGRQLRQHVYDCTRLTIGVGAGPTKTLAKSAQWASKEWKQFRGVLALTRGNPQRTRKLLSLQPVEEIWGVGNRIARKLNVLGIKTALDLALTNPAFIRKNFSVVLERTVRELNWESCLSLEEAPPTKQQIVCSRSFGVKITEYESLRQAICQHAERASEKLRKEHQYCRHISVFIKTSPFAIKGPYYGNVATEKLLTPTQDTRDIIAAATTALERIWRDGHRYAKAGVMLNDFTGSGVSQLQLFDERPPRPHSAELMRVLDGINNSGLGKVWFAGRGMASEWQMKREMLSPAYTTRWSDIPAAKLA

SEQ ID NO: 104142 - DNA, 1275 bp, Salmonella enterica subsp. enterica serovar Choleraesuis
  CDS (1)..(1275): transl_table=11
atgttcgctttggctgacgtcaactcgttctatgccagttgcgaaaaggtctttcgccccgatttgcgtgacaggtctgtggtggtcctgagtaacaacgatggttgtgtaattccgcgcagcgctgaagcaaaaaaactgggcataaaaatgggggtgccgtggtttcaactgaggtcggcgaaatttccggagccggttatcgcgttctccagtaattacgccctctacgcatcaatgtcgaacagggtcatggttcaccaggaagagctggcgccacgcgttgagcagtactccattgacgagatgtttctggatattcgcggtatagacagttgcatcgatttcgaggatttcggccgacagctgcgtgagcacgttcgttccggcacagggctgaccatcggcgtcggaatgggaccgaccaaaacgctggctaaaagcgcgcaatgggcatcgaaagaatggtcacagttcggaggcatgcttgccctgacgttacacaatcagaaacgaacggagaaactgctgtcactgcaaccggtggaggaaatctggggtgtgggccgcaggatctcaaagaagctgaacacaatggggatcaccacagcactgcagctggcccgcgcgaatccaacgttcatcaggaaaaactttaatgtggttctggagagaacggtccgggaactcaatggagaaagctgtatttccctggaggaagcaccgccccccaaacagcagatagtctgcagcagaagctttggagaacgagtcacgacttatgaagcgatgcggcaggcagtctgtcagcacgctgaacgtcgcgccgaaaagctgcgtggggaacggcagttctgcaggcatattgccgtgtttgtgaaaacatcgccgttcgccgtaactgagccctactacggtaatctggccagtgaaaaactgctcatccccacgcaggatacacgggacatcattgccgctgccgtcagagctctggacaggatctgggtggatggtcaccgttacgcaaaggcaggctgtatgctgaacgatttcacgccaaccagggtatcgcagcttaatttgtttgatgaagtacagccgcgggaacggagcgagcagctgatgcaagtcctagatgggattaaccatccgggcaaggggaaaatatggttcgccggtcgggggattgcccccgagtggcagatgaaaagggaactactttcgccagcttatacgacacgttgggcagatattcctgcagcgaaattgacttga

SEQ ID NO: 104143 - protein, 424 aa, Salmonella enterica subsp. enterica serovar Choleraesuis
MFALADVNSFYASCEKVFRPDLRDRSVVVLSNNDGCVIPRSAEAKKLGIKMGVPWFQLRSAKFPEPVIAFSSNYALYASMSNRVMVHQEELAPRVEQYSIDEMFLDIRGIDSCIDFEDFGRQLREHVRSGTGLTIGVGMGPTKTLAKSAQWASKEWSQFGGMLALTLHNQKRTEKLLSLQPVEEIWGVGRRISKKLNTMGITTALQLARANPTFIRKNFNVVLERTVRELNGESCISLEEAPPPKQQIVCSRSFGERVTTYEAMRQAVCQHAERRAEKLRGERQFCRHIAVFVKTSPFAVTEPYYGNLASEKLLIPTQDTRDIIAAAVRALDRIWVDGHRYAKAGCMLNDFTPTRVSQLNLFDEVQPRERSEQLMQVLDGINHPGKGKIWFAGRGIAPEWQMKRELLSPAYTTRWADIPAAKLT

SEQ ID NO: 104144 - DNA, 1269 bp, Escherichia coli O157:H7 EDL933
  CDS (1)..(1269): transl_table=11
  misc_feature (510)..(510): w is a or t
  misc_feature (511)..(511): y is t or c
atgtttgccctctgtgatgtaaacgcgttttatgccagctgtgagacggtgtttcgccctgagttatggggtaaaccggtggttgtgctatcgaataatgacggttgcgttatcgcccgaaacgctgaggcaaaggcgcttggcgttaaaatgggcgatccctggttcaaacaaaaagatctgtttcgtcgctgtggcgtggtttgctttagcagcaattatgagctttacgcagacatgagcaatcgggtgatgtcgacgctggaagaactatcgccccgcgtcgagatttacagtattgatgaggcattctgcgatctgacaggtgtgcgtaattgtcgcgatctgactgactttggcagagaaattcgcgcaacggtgctacaacgtacccatcttactgttggtgtggggatcgcccagaccaaaacgctggctaagcttgccaatcatgcggcaaaaaaatggcagcggcagacgggtggggtggtggatttatcaaatctggawygccagcgtaaattaatgtctgctctccccgtggatgacgtctgggggattggacggcggatcagcaaaaaactggacgcgatggggatcaaaaccgttctcgatttggcggatacagatatccggtttatccgtaaacattttaatgtcgtgctcgaaagaacggtgcgtgaactgcgcggtgaaccctgtttgcaactggaagaatttgcaccgacaaagcaggaaattatctgttcccgctcgtttggtgaacgcatcacggattatacgtcgatgcggcaggccatttgtagttacgctgcccgggcggcggaaaaacttcgcagtgagcatcaatattgtcggtttatctccacatttattaagacgtcaccatttgcgctcaatgaaccttattacggcaatagcgcgtcggtaaaactgctgacgcccactcaggacagcagggatatcattaacgccgctacgcgatctctggatgccatctggcaagcgggccatcgctaccaaaaagcgggcgtgatgctgggggatttcttcagtcagggagtcgcgcagctcaatttattcgatgacaacgctccgcgccccgggagtgagcaattgatggcggtaatggatacactgaatgctaaagagggcagaggaacactctattttgccgggcaggggatccagcaacaatggcagatgaagcgagccatgctttcaccacgttatacaacgcgaagttctgatttactgcgggtcaaataa

SEQ ID NO: 104145 - protein, 422 aa, Escherichia coli O157:H7 EDL933
  misc_feature (170)..(170): The Xaa at location 170 stands for Asp, or Glu.
  misc_feature (171)..(171): The Xaa at location 171 stands for Arg, or Cys.
MFALCDVNAFYASCETVFRPELWGKPVVVLSNNDGCVIARNAEAKALGVKMGDPWFKQKDLFRRCGVVCFSSNYELYADMSNRVMSTLEELSPRVEIYSIDEAFCDLTGVRNCRDLTDFGREIRATVLQRTHLTVGVGIAQTKTLAKLANHAAKKWQRQTGGVVDLSNLXXQRKLMSALPVDDVWGIGRRISKKLDAMGIKTVLDLADTDIRFIRKHFNVVLERTVRELRGEPCLQLEEFAPTKQEIICSRSFGERITDYTSMRQAICSYAARAAEKLRSEHQYCRFISTFIKTSPFALNEPYYGNSASVKLLTPTQDSRDIINAATRSLDAIWQAGHRYQKAGVMLGDFFSQGVAQLNLFDDNAPRPGSEQLMAVMDTLNAKEGRGTLYFAGQGIQQQWQMKRAMLSPRYTTRSSDLLRVK

SEQ ID NO: 104146 - DNA, 1269 bp, Salmonella enterica subsp. enterica serovar Typhi str. CT18
  CDS (1)..(1269): transl_table=11
atgttcgcgctctgcgatgttaatagcttttacgcctcctgcgaaacggtctttcgtcctgatttatgtggccgaccggtggtggtgttatcaaacaatgatggctgcgttatcgcgtgtagcgccgaggcgaaacaactcggtatcgcagcaggtgagccatacttcaaacagaaagaacgcttccggcgatccggtgttgtttgcttcagcagtaattacgagctttacgctgatatgtcgaaccaggtaatgaccacactagaggagatggtgccgcgggtagaaatttacagcattgatgaggctttttgtgatctgacgggggtacgaaactgccgggatctgacagatttcgggcacgagataagagcgacggtcctgaagcgcacgcacctgactgtcggtgtaggcattgcccagacgaaaacccttgccaagctggctaaccatgctgcgaaaaagtggcagcgccagaccgacggggtggttgacctgtcgaacatcgatcgccagcgtcggctgctggccctgatacccgtagaggatgtctggggtgtcggcagacgcatcagtaagaagctcaatgccctgggcatcaagactgctctcgatctctctgaacaaagtacctggatcatcaggaaacacttcaatgtcgtgctggagcgtaccgtgagagagcttcgcggagagccatgtctggagcttgaagagtttgcgccggcaaagcaggaaatcgtttgtagccgctctttcggcgagcgggtcacagactatgaggaaatgcgccaggctgtttacagctacgctgcgcgcgcggcagaaaaactccgcggcgagcaccagtactgctgtttcatttcaacattcgtcaaaacatcaccctttgccctgaacgagccctactacggtaacagcgccgcggtgacgcttctcacccccacgcaggattcacgtgacattatcaatgcggctgtgaaatgtctggataaaatctggcgcgacggccatcgctaccagaaagcgggggtgatgctgggtggcttcttcagccagggcgtagcgcaactcaaccttttcgacgataacgcgccgcgcgccggtagtgcgaagttgatggaagtactggaccatcttaacgcaaaagacgggaaggggacgctgtacttcgccgggcaggggatgtcgcaacagtgggctatgaagcgagaaatgctttcgcctcggtacaccacaagatactctgatctactgcgtgttaagtaa

SEQ ID NO: 104147 - protein, 422 aa, Salmonella enterica subsp. enterica serovar Typhi str. CT18
MFALCDVNSFYASCETVFRPDLCGRPVVVLSNNDGCVIACSAEAKQLGIAAGEPYFKQKERFRRSGVVCFSSNYELYADMSNQVMTTLEEMVPRVEIYSIDEAFCDLTGVRNCRDLTDFGHEIRATVLKRTHLTVGVGIAQTKTLAKLANHAAKKWQRQTDGVVDLSNIDRQRRLLALIPVEDVWGVGRRISKKLNALGIKTALDLSEQSTWIIRKHFNVVLERTVRELRGEPCLELEEFAPAKQEIVCSRSFGERVTDYEEMRQAVYSYAARAAEKLRGEHQYCCFISTFVKTSPFALNEPYYGNSAAVTLLTPTQDSRDIINAAVKCLDKIWRDGHRYQKAGVMLGGFFSQGVAQLNLFDDNAPRAGSAKLMEVLDHLNAKDGKGTLYFAGQGMSQQWAMKREMLSPRYTTRYSDLLRVK

SEQ ID NO: 104148 - DNA, 1275 bp, Salmonella enterica subsp. enterica serovar Typhi str. CT18
  CDS (1)..(1275): transl_table=11
atgttcgccctggctgacgtcaacagcttctacgcgagctgtgaaaaagtatttcgtcccgatttacgtaatacacctgttgtggtgctcagtaacaacgatggatgtgttatcgcgcgttcaaaagaagcgaagcaactgggcattaaaatgggggttccgtggtttcaactgaaaacaaccgaatttcctgtacctgtcgttgcgttctcgagtaactacgaactctacgcgtcgatgtcgaaccgtgttatggcgcatctcgaagaactggcacctcgcgttgagcagtattctatcgacgaaatgtttcttgatgtgcgcaatattgacagttgtatcgattttgaagacttcggccggcagttgcgcgagcatgtacattcaggaaccggactgaccatcggagttgggatgggaccgaccaagacactggcaaaaagcgcacaatgggcgtctaaggaatggcggcagtttgagggcgtgcttgctctgacttcaggcaatccaaagcgaacggagaaactattgtcactgcagccagtagacgaaatctggggggttggtcgccggatctcgaagaaactgcacacaatggggataacaactgcactgcagctggcgcgcgcgaacccaacatttatcaggaaaaatttcagtgttgttctcgagagaactgtccgtgaactgaacggggaaagctgtatttcactggaggaggctccgccacccaagcagcagattgtctgcagccgatcctttggggagcgcgtcacaacatatgaagccatgcgccaggcagtctgtcagtatgctgagcgtgcagctgaaaagctgcgcggcgagcggcaattctgcagacatgttgctgtatttgtgaagacgtcaccgttcgctgtgaacgaaccgtattacgggaatgtggccagtgagaaactgacgactcccacgcaggataccagggacatcatagccgcagcggtgaaagcactggatcggatctgggtgaaagggcatagatatgcaaaagcgggttgcatgctcaatgatttcacaccaaccgggatttctcagttaaatctttttgatgaagtgcagccgcacgaacgaagtgagcagttgatgaaagttctcgacagtatcaaccattcaggtatgggaaaagtgtggtttgccggaagagggatagcccctgagtggcagatgaaaagagagctactctctccagcttataccactcgctgggctgaattacctgttgcacgattgcgctga

SEQ ID NO: 104149 - protein, 424 aa, Salmonella enterica subsp. enterica serovar Typhi str. CT18
MFALADVNSFYASCEKVFRPDLRNTPVVVLSNNDGCVIARSKEAKQLGIKMGVPWFQLKTTEFPVPVVAFSSNYELYASMSNRVMAHLEELAPRVEQYSIDEMFLDVRNIDSCIDFEDFGRQLREHVHSGTGLTIGVGMGPTKTLAKSAQWASKEWRQFEGVLALTSGNPKRTEKLLSLQPVDEIWGVGRRISKKLHTMGITTALQLARANPTFIRKNFSVVLERTVRELNGESCISLEEAPPPKQQIVCSRSFGERVTTYEAMRQAVCQYAERAAEKLRGERQFCRHVAVFVKTSPFAVNEPYYGNVASEKLTTPTQDTRDIIAAAVKALDRIWVKGHRYAKAGCMLNDFTPTGISQLNLFDEVQPHERSEQLMKVLDSINHSGMGKVWFAGRGIAPEWQMKRELLSPAYTTRWAELPVARLR

SEQ ID NO: 104150 - DNA, 1275 bp, Salmonella typhimurium LT2
  CDS (1)..(1275): transl_table=11
atgttcgctttggctgacgtcaactcgttctatgccagttgcgaaaaggtctttcgccccgatttgcgtgacaggtctgtggtggtcctgagtaacaacgatggttgtgtaatcgcgcgcagcgctgaagcaaaaaaactgggcataaaaatgggggtgccgtggtttcaactgaggtcggcgaaatttccggagccggttatcgcgttctccagtaattacgccctctacgcatcaatgtcgaacagggtcatggttcacctggaagagctggcgccacgcgttgagcagtactccattgacgagatgtttctggatattcgcggtatagacagttgcatcgatttcgaggatttcggccgacagctgcgtgagcacgttcgttccggcacagggctgaccatcggcgtcggaatgggaccgaccaaaacgctggctaaaagcgcgcaatgggcatcgaaagaatggtcacagttcggaggcgtgcttgccctgacgttacacaatcagaaacgaacggagaaactgctgtcactgcaaccggtggaggaaatctggggtgtgggccgcaggatctcaaagaagctgaacacaatggggatcaccacagcactgcagctggcccgcgcgaatccaacgttcatcaggaaaaactttaatgtggttctggagagaacggtccgggaactcaatggagaaagctgtatttccctggaggaagcaccgccccccaaacagcagatagtctgcagcagaagctttggagaacgagtcacgacttatgaagcgatgcggcaggcagtctgtcagcacgctgaacgtgccgccgaaaagctgcgtggggaacggcagttctgcaggcatattgccgtgtttgtgaaaacatcgccgttcgccgtaactgagccctactacggtaatctggccagtgaaaaactgctcatccccacgcaggatacacgggacatcattgccgctgccgtcagagctctggacaggatctgggtggatggtcaccgttacgcaaaggcaggctgtatgctgaacgatttcacgccaaccggggtatcgcagcttaatttgtttgatgaagtacagccgcgggaacggagcgagcagctgatgcaagtcctggatgggattaaccatccgggcaaggggaaaatatggttcgccggtcgggggattgcccccgagtggcagatgaaaagggaactactttcgccagcttatacgacacgttgggcagatattcctgcagcgaaattgacttga

SEQ ID NO: 104151 - protein, 424 aa, Salmonella typhimurium LT2
MFALADVNSFYASCEKVFRPDLRDRSVVVLSNNDGCVIARSAEAKKLGIKMGVPWFQLRSAKFPEPVIAFSSNYALYASMSNRVMVHLEELAPRVEQYSIDEMFLDIRGIDSCIDFEDFGRQLREHVRSGTGLTIGVGMGPTKTLAKSAQWASKEWSQFGGVLALTLHNQKRTEKLLSLQPVEEIWGVGRRISKKLNTMGITTALQLARANPTFIRKNFNVVLERTVRELNGESCISLEEAPPPKQQIVCSRSFGERVTTYEAMRQAVCQHAERAAEKLRGERQFCRHIAVFVKTSPFAVTEPYYGNLASEKLLIPTQDTRDIIAAAVRALDRIWVDGHRYAKAGCMLNDFTPTGVSQLNLFDEVQPRERSEQLMQVLDGINHPGKGKIWFAGRGIAPEWQMKRELLSPAYTTRWADIPAAKLT

SEQ ID NO: 104152 - DNA, 1209 bp, Pseudomonas putida
  CDS (1)..(1209): transl_table=11
atgtgttctaaagaccctcgaccgatttttgggttggtggatgtcaactcgttctactgcagctgcgaacgcatcttccggcctgagttgaggcaccgccctgtcgtcgttctttcgaattcggatggttgcattgtggcccgtacgaacgaagcaaaagccctcggcttgaagatgggcgacccctacttcaaggtgcggaatttcctggagcaaaacggcgtagcggtgttcagcagcaactacaccttgtacggggaattgagccaccgcgtaggtgtggccatcgcctccctggtccctgagtgggagcagtattccatcgatgaactgttcgtgaacctcgatggcctgcccgaaccgatcatcgatgttggccgtgcgatacaagcccgcgtgctgcagtggacagcgcttccggttggtgtcggcataggtcacacgaaaacattggcaaaggcagcgcagcacgcatcgaaggtatggcgggagaagacaggaggggtggtcgacctccgcaagccggatgcagtcgaatggctgctccggcgaatgccggtcgatgaggtatggggcatcggcagtcgcatgcgtgacaacctggcccgcgacgggatcaccacggcatgggagctgtcgcaagcggatgcgcgggcaatgggccgcaaatacagcgtcgtactggaacgtacgatacgggagctgcagggtgaatcctgcatggacctggagcagacggtagcgccaaagcaaacgatctgctctagcaaaatgttcggccagcgtgttcacacgctccagggcctgcaagaagcattggcgacgtacattcaccgcgcagcggagaagctgcgcctgcagcgctcgctgtgcggtgccatgcgcatcggcattcagacctcgtttcacggggatggtccgaaatacgccaacgccgccacgtgcatacctgcctatccaacagacgacgtacgccagctgaccaaatacgccctgcaggctgcagagcagatctaccggccaggcttcgcgtacagcaaagccgaggtgctgctgttggatctgcgcaagcgcggggagtacacgcaagatttgttcagcccgagccagcctgagcgctccgacgcgctcatggccacgatggacaagatcaaccggcgatgggggcatgactgcctgcgaactgcagcgggtgccactgacccctga

SEQ ID NO: 104153 - protein, 402 aa, Pseudomonas putida
MCSKDPRPIFGLVDVNSFYCSCERIFRPELRHRPVVVLSNSDGCIVARTNEAKALGLKMGDPYFKVRNFLEQNGVAVFSSNYTLYGELSHRVGVAIASLVPEWEQYSIDELFVNLDGLPEPIIDVGRAIQARVLQWTALPVGVGIGHTKTLAKAAQHASKVWREKTGGVVDLRKPDAVEWLLRRMPVDEVWGIGSRMRDNLARDGITTAWELSQADARAMGRKYSVVLERTIRELQGESCMDLEQTVAPKQTICSSKMFGQRVHTLQGLQEALATYIHRAAEKLRLQRSLCGAMRIGIQTSFHGDGPKYANAATCIPAYPTDDVRQLTKYALQAAEQIYRPGFAYSKAEVLLLDLRKRGEYTQDLFSPSQPERSDALMATMDKINRRWGHDCLRTAAGATDP

SEQ ID NO: 104154 - DNA, 1287 bp, Xanthomonas campestris pv. campestris str. ATCC 33913
  CDS (1)..(1287): transl_table=11
atgttcgcgctgatcgacggcaataacttctacgctagctgcgagcgcgtgttccagcccgagctgcgtggcaggccgttggtcgtgctcagcaacaacgatggctgcgctattgctcgatcggacgaggccaaagccctaggtgtcacgatgggccagccgatccacaaggtgccaccgcagatccgtcgccggctagcgctgcgctccgcaaatttcggtctctacggcgacatcgcttctcgcattggcgtcatcctgcgtcaggccgcgccacgcgtggaggtgtattcgatcgacgagtcgttcctcgacctggccggcatccgcgattgccggcagctggcggtcgacctgcgcgagcgagttcaccaatggacgggcatccccaactgcattggcatcgcgccgaccaagaccttggccaagctggccaaccgggtcgccaaggatgcagcgcgtaagccgggcagctacccagctagtctggccggcgtctgtgacctggctgcgctcagcgccagtgagctcgatgcggtgctgcgagccacggcggttggcgacctctggggcgttggcaggcgctggggcgcgaggctgcaggcacgcggcgtctttacggcagccgatctgcgagacgccgctgcagacgacttgctagcggagttcggtgtggtcatggcgcgcacgcaacgggagttgcagggccatgcatgcctgcagctggaggaagtcgagcccgaccgtcagcagatcatggtcagccggtcgttcgggacctgggtgaccgatccacaagatatggcggaggcgctggcaacttttgccatgcgcgccaccgagaagctgcgcgcacgcgggctgaccacatgcgccattggcatctttgccgagacggattcgttcaagcccggtgtgccgcagcacaacccatcacgcaccgcgccacttgcctcggctacatccgacagccgcgtggtgctcacggttgtgcgccggctgctccagggcttcatgcgcgatggcttcacctacaagaaggccggcgtgtgcctaatggatctcgccgcgcccgaggatctgcagggcgacctcttcaccccggcacgcataggcgacgacaagctgatgagcaccctggatgccatcaaccggcggttcggtcgcggcacggccgggctgggtgcaagcggctggcagaagtcccccgaatgggcatcgcggcaagatctgctatcgggccgcttcaccacatcgctagctgacctccctcgcgcctcctgctag

SEQ ID NO: 104155 - protein, 428 aa, Xanthomonas campestris pv. campestris str. ATCC 33913
MFALIDGNNFYASCERVFQPELRGRPLVVLSNNDGCAIARSDEAKALGVTMGQPIHKVPPQIRRRLALRSANFGLYGDIASRIGVILRQAAPRVEVYSIDESFLDLAGIRDCRQLAVDLRERVHQWTGIPNCIGIAPTKTLAKLANRVAKDAARKPGSYPASLAGVCDLAALSASELDAVLRATAVGDLWGVGRRWGARLQARGVFTAADLRDAAADDLLAEFGVVMARTQRELQGHACLQLEEVEPDRQQIMVSRSFGTWVTDPQDMAEALATFAMRATEKLRARGLTTCAIGIFAETDSFKPGVPQHNPSRTAPLASATSDSRVVLTVVRRLLQGFMRDGFTYKKAGVCLMDLAAPEDLQGDLFTPARIGDDKLMSTLDAINRRFGRGTAGLGASGWQKSPEWASRQDLLSGRFTTSLADLPRASC

SEQ ID NO: 104156 - DNA, 1269 bp, Proteus vulgaris
  CDS (1)..(1269): transl_table=11
gtgatgctgtgtctcgcagatattaattcgttctactgttcgtgtgaggcggcatttaacccacggcttgcaggtttacctatcgttgtgttggcaaataatgatcacattgtcatatcgcgctcaaaagaagcaaaagccctgggcatcaaaatgggggcgctgtactttgagaatatcaacttctttaaatatcataatgttcaggtgtttagttcaaattattcgctttatcaaaacgtgtctgaccgtgttatgtctgtattagctggcttctcaatcggtatggaagtgtattcaattgacgaggcctttctaactgtgccggatagaatacctaactcaagccttgaagattttggtcgcgcgatacagcaagacatattacagatcactcacgtcccggtaggcgtaggctttggccccacaaaaacgctcgcaaaactggctaatcacgcggctaagtcctggtcaaaaacgggcggggtggtggatttgagccaaaaaacgcgacaaagaaaattgatggcgttattaccggtgggtgatgtgtggggagttggaaggcgcatcgccgcgaagttaaaggtcatgggtattcataccattttagacttggccgacgctgatattgcgatgatcagaaaaacctttggggttgttgttgaaaggaccgtgcgggagcttaacggggacgcttgtatcgaattggaggaagtccggaaagttaaggagcagatcatctcgtctaaatcgttcggtaagaaagttgagcggtatgatgatatgcaccaggcggtatgcagctacgctgagcgagctagcatgaagttaagagaagaagaccagctgtgcagtgtggtctccgtgtttgtgagtaccagccactattctcccggctcaatgtacagcaatcgtgccatcgagcgcttggtgtatcccagcgccgatacgcgggatattatcaatgccgcagtcagggcgttgaatgcaatttggcgagacggccaccagtatcacaaagccggaattatgttgtcggacttcaccgattccaagataactcagttcgatttatttaatgaagtacagccattcaaaagaagtgaagagctcatgcgaatgctggatgacatgaaccggtcgggaaaattcaacattggctttgcaggaaagggttgcgatcctacctggcaaatgaggcggggaatgttgtctcctgaatacacaacaaacgtcaacgagatccctattgctaaggtgcgttga

SEQ ID NO: 104157 - protein, 422 aa, Proteus vulgaris
MMLCLADINSFYCSCEAAFNPRLAGLPIVVLANNDHIVISRSKEAKALGIKMGALYFENINFFKYHNVQVFSSNYSLYQNVSDRVMSVLAGFSIGMEVYSIDEAFLTVPDRIPNSSLEDFGRAIQQDILQITHVPVGVGFGPTKTLAKLANHAAKSWSKTGGVVDLSQKTRQRKLMALLPVGDVWGVGRRIAAKLKVMGIHTILDLADADIAMIRKTFGVVVERTVRELNGDACIELEEVRKVKEQIISSKSFGKKVERYDDMHQAVCSYAERASMKLREEDQLCSVVSVFVSTSHYSPGSMYSNRAIERLVYPSADTRDIINAAVRALNAIWRDGHQYHKAGIMLSDFTDSKITQFDLFNEVQPFKRSEELMRMLDDMNRSGKFNIGFAGKGCDPTWQMRRGMLSPEYTTNVNEIPIAKVR

SEQ ID NO: 104158 - DNA, 1269 bp, Shigella flexneri 2a str. 301
  CDS (1)..(1269): transl_table=11
atgtttgccctctgtgatgtaaacgcgttttatgccagctgtgagacggtgtttcgccctgatttatggggtaaaccggtggttgtgctatcgaataatgacggttgcgttatcgcccgaaacgctgaggcaaaggcgctgggcgttaaaatgggcgatccctggttcaaacaaaaagatctgtttcgtcgctgtggtgtggtttgctttagcagcaattatgagctttacgcagacatgagcaatcgggtgatgtcgacgctggaagaactatcgccccgcgtcgagatttacagtattgatgaagcattctgcgatctgacaggtgtgcgtaattgtcgcgatctgactgattttggcagagaaattcgcgcaacggtgctacaacgtacccatcttactgttggtgtggggatcgcccagaccaaaacgttggctaagcttgccaatcatgcggcaaaaaaatggcagcggcagacgggtggggtggtggatttatcaaatctggaacgccagcgtaaattaatgtctgctctccccgtggatgacgtctgggggattggacggcggatcagcaaaaaactggacgcgatggggatcaaaaccgttctcgatttggcggatacagatatccggtttatccgtaaacattttaatgtcatgctcgaaagaacggtgcgtgaactgcgcggcgaaccctgtttgcaactggaagagtttgcaccgacgaagcaggaaattatctgttcccgctcgtttggtgaacgcatcacggattatacgtcgatgcggcaggccatttgtagttacgctgcccgggcggcggaaaaacttcgcagtgagcatcaatattgtcggtttatctccacatttattaagacgtcaccatttgcgctcaatgaaccttattacggcaatagcgcgtcggtaaaactgctgacgcccactcaggacagcagggatatcattaacgctgctacgcgatctctggatgccatctggcaagcgggccatcgctaccaaaaagcgggcgtgatgctgggggatttcttcagtcagggagtcgcgcagctcaatttattcgatgacaacgcaccgcgccccgggagtgagcaattgatggcggtaatggatactctgaatgctaaagagggcagaggaacactctattttgccgggcaggggatccaacaacaatggcagatgaagcgagctatgctttcaccacgttatacaacgcgaagttctgatttactgcgggtcaaataa

SEQ ID NO: 104159 - protein, 422 aa, Shigella flexneri 2a str. 301
MFALCDVNAFYASCETVFRPDLWGKPVVVLSNNDGCVIARNAEAKALGVKMGDPWFKQKDLFRRCGVVCFSSNYELYADMSNRVMSTLEELSPRVEIYSIDEAFCDLTGVRNCRDLTDFGREIRATVLQRTHLTVGVGIAQTKTLAKLANHAAKKWQRQTGGVVDLSNLERQRKLMSALPVDDVWGIGRRISKKLDAMGIKTVLDLADTDIRFIRKHFNVMLERTVRELRGEPCLQLEEFAPTKQEIICSRSFGERITDYTSMRQAICSYAARAAEKLRSEHQYCRFISTFIKTSPFALNEPYYGNSASVKLLTPTQDSRDIINAATRSLDAIWQAGHRYQKAGVMLGDFFSQGVAQLNLFDDNAPRPGSEQLMAVMDTLNAKEGRGTLYFAGQGIQQQWQMKRAMLSPRYTTRSSDLLRVK

SEQ ID NO: 104160 - DNA, 1269 bp, Escherichia coli CFT073
  CDS (1)..(1269): transl_table=11
atgtttgccctctgtgatgtaaacgcgttttatgccagctgtgagacggtgtttcgccctgatttatggggtaaaccggtggttgtgctatcgaataatgacggttgcgttatcgcccgaaacgctgaggcaaaggcgctgggcgttaaaatgggcgatccctggttcaaacaaaaagatctgtttcgtcgctgtggcgtggtttgctttagcagcaattatgagctttacgcagacatgagtaatcgggtgatgtcgacgctggaagaactatcgccccgcgtcgagatttacagtattgatgaggcattctgcgatctgacaggtgtgcataattgtcgcgatctgactgattttggcagagaaattcgcgcaacggtgctacaacgtacccatcttactgttggtgtggggatcgcccagaccaaaacgctggctaagcttgccaattatgcggcaaaaaaatggcagcggcagacgggcggggtggtggatttatcaaatctggaacgccagcgtaaattaatgtctgctctccccgtggatgaagtctgggggattggacggcggatcagcaaaaaactggacgcgatggggatcaaaaccgttctcgatttggcggattcagatatccggtttatccgtaaacattttaatgtcgtgctcgaaagaacggtgcgtggactgcgcggtgaaccctgtttgcaactggaagagtttgcaccgacgaagcaggaaattatctgttcccgctcgtttggtgaacgcatcacggattatccgtcgatgcggcaggccatttgtagttacgctgcccgggcggcggaaaaacttcgcagcgagcatcaatattgtcggtttatctccacgtttattaagacgtcaccatttgcgttcaatgaaccttattacggcaatagcgcatcggtaaaactgctgacgcccactcaggacagcagggatatcattaacgccgctacgcgatctctggatgccatctggcaagcgggccatcgctaccaaaaagcgggcgtgatgctgggggatttcttcagtcagggagtcgcgcagctcaatttattcgatgacaacgcaccgcgccccgggagtgagcaattgatggcggtaatggatacgctgaatgctaaagagggcagaggaacactctattttgccgggcaggggatccagcaacaatggcagatgaagcgtgccatgctttcaccatgttatacaacgcgaagttctgatttactgcgggtcaaataa

SEQ ID NO: 104161 - protein, 422 aa, Escherichia coli CFT073
MFALCDVNAFYASCETVFRPDLWGKPVVVLSNNDGCVIARNAEAKALGVKMGDPWFKQKDLFRRCGVVCFSSNYELYADMSNRVMSTLEELSPRVEIYSIDEAFCDLTGVHNCRDLTDFGREIRATVLQRTHLTVGVGIAQTKTLAKLANYAAKKWQRQTGGVVDLSNLERQRKLMSALPVDEVWGIGRRISKKLDAMGIKTVLDLADSDIRFIRKHFNVVLERTVRGLRGEPCLQLEEFAPTKQEIICSRSFGERITDYPSMRQAICSYAARAAEKLRSEHQYCRFISTFIKTSPFAFNEPYYGNSASVKLLTPTQDSRDIINAATRSLDAIWQAGHRYQKAGVMLGDFFSQGVAQLNLFDDNAPRPGSEQLMAVMDTLNAKEGRGTLYFAGQGIQQQWQMKRAMLSPCYTTRSSDLLRVK

SEQ ID NO: 104162 - DNA, 1257 bp, Vibrio vulnificus CMCP6
  CDS (1)..(1257): transl_table=11
atgtttgccctagttgatgctaattccttttattgtagtgctgagcaaatttttagacccgagtggagaggtaagcccgtaatcgttctgtcgaataatgatggctgtgtcgttgcagctaatcgtcaagctaaagaagcaggtatagcaaagtttaaaccttactttgaagtcaaagcgttgtgtgagttgaaaggtgtaattgctctatcatctaattatgaactttacgcagatttgtcgtccaaaatgatggatgttatcgggcggtttgcgcctgagcaatatatatactccattgatgaatcatttctttcctttcatcgctgctttcctgccattaaagacttacgagaacatggctctttaatccgacgagccgtttggaaagagtgtcgattaccagtatgtataggtatgggaacaacgctaaccctcgccaaaattgccaatcatgcagctaaaaaaattcaaggctgtaagggcgtttgcgttatcgacaatgaacatcagcgtacctctatattaaagcagctagaagttggtgatgtatggggggtgggcaaaaaaatatcaacacgattaaaacatatggggattaactcggcttatgatttgtctcagtatgccccagaacaagcacgtcgagaattttcagtcgaagttgaaagaaccgttcgtgaattaaatggtgtcgcttgcaagggctgggacacagctagagctgataaaaagcagatttactcaactcgtagtgttggaacaagaatcaccgaccttgaactactgaagcaagcactaagtaaacacgccgctatagcagcacataaagcacgaaatcaaaagtcgctgtgtaaagctatgctctgctttgcttccaattcaccattcgatgataaacctcagagcttccgtatagttcatcattttgcttatccaactgctgactcaatgcagttggtcaaaattgctacacaggcagcaacacaattgttcaaacctggtgtacgttattacaaaattggcatcggcttgatcgatctagttaatgggcagcacgaacaattagatctgttaaatcaaactccgagtaatgataagttaatgaaagtgtttgatagtcttaataatcggtatggcactgatacgctttttgttggttcccaaggcatagagcagaaatggagcatgcggagagaaatgcttactccgcaatatacaaccaactggctagatatacctaaagtaaggtgttaa

SEQ ID NO: 104163 - protein, 418 aa, Vibrio vulnificus CMCP6
MFALVDANSFYCSAEQIFRPEWRGKPVIVLSNNDGCVVAANRQAKEAGIAKFKPYFEVKALCELKGVIALSSNYELYADLSSKMMDVIGRFAPEQYIYSIDESFLSFHRCFPAIKDLREHGSLIRRAVWKECRLPVCIGMGTTLTLAKIANHAAKKIQGCKGVCVIDNEHQRTSILKQLEVGDVWGVGKKISTRLKHMGINSAYDLSQYAPEQARREFSVEVERTVRELNGVACKGWDTARADKKQIYSTRSVGTRITDLELLKQALSKHAAIAAHKARNQKSLCKAMLCFASNSPFDDKPQSFRIVHHFAYPTADSMQLVKIATQAATQLFKPGVRYYKIGIGLIDLVNGQHEQLDLLNQTPSNDKLMKVFDSLNNRYGTDTLFVGSQGIEQKWSMRREMLTPQYTTNWLDIPKVRC

SEQ ID NO: 104164 - DNA, 1305 bp, Citrobacter freundii
  CDS (1)..(1305): transl_table=11
atggggtgtggttacgttcactgttatgagtcaccgcccgtgtacgccttaatcgacgtcaattcgatgtactgcagctgcgaagaggcgttccgccctgatttgcgggggcgccctgtggtcgtcctcagcaacaacgacggggcgcttgttgcggtcaatcgcgcggcgaaagcgctgggagtgcgccgcggggaaccctatttccgctgccgtcgcctgctggaacagcataacgtcgccgtattcagttccaactacaccctttacgcctcattctccgccagatttgcaaccgtagtggaaagtctggcgccgcggacgtttgtttactcaattgatgagctctttgcggatgcgtctcacatggagggcgtgatgtcgccgcaggcgtttggccagcttttgcgggctgaagtgctgcgccagacaacgctcacctgtggagtgggcgtcgcgccaacgaagacgctggccaagctgtgcaaccacgccgcaaagacgtggcctgccaccgggggggttgtggcgctcagtgatcctgtgagactgaaaaggctgatgagcctggtgtcggccggcgatgtgtggggggttggccatcgtaccgaaaaagggctggcgacaatggggatcaaaacggcgctggcgctcgcagagatggatatccgacttgcacgccggctgtacggtgtgacgctggaacggaccatccgtgagctgcgtggcgaggcctgctttgccctggaagaaggtaccggcgcgaaacagcagcttgttgtatcccgctcgtttggatcgcgggtcacgcaactggcgcagatgcagcaggcggtgactaaatatgccacacgggcaggggaaaagttgcgccaggaaaaccgtctggcgaaggtggtaacggtctttatccgcagcagtgcttatgacgccggcggtgtgccctacagtaaccaggctacggaagtgctttccgtgccaagccaggatacccgcgacatcatcgccgcggcgcagctggggctgtcgcgtatctggcgtgagggtgtgcggtatgcaaaagccggcgtgatgctcagcgatctgcagggacatgaaacccagctggatctgtttgcgccggctgcagtgcggccgggcagcgaaaaactgatggccaccatcgacaaaataaacagggaaggaaggtcaagggtcttcttcgccggggaaggtattgatccggaatatgccatgcgccgtgaaatgttgtctccggcctacaccacgcagtggaaggatattcccgcggcgtttatgcgataa

SEQ ID NO: 104165 - protein, 434 aa, Citrobacter freundii
MGCGYVHCYESPPVYALIDVNSMYCSCEEAFRPDLRGRPVVVLSNNDGALVAVNRAAKALGVRRGEPYFRCRRLLEQHNVAVFSSNYTLYASFSARFATVVESLAPRTFVYSIDELFADASHMEGVMSPQAFGQLLRAEVLRQTTLTCGVGVAPTKTLAKLCNHAAKTWPATGGVVALSDPVRLKRLMSLVSAGDVWGVGHRTEKGLATMGIKTALALAEMDIRLARRLYGVTLERTIRELRGEACFALEEGTGAKQQLVVSRSFGSRVTQLAQMQQAVTKYATRAGEKLRQENRLAKVVTVFIRSSAYDAGGVPYSNQATEVLSVPSQDTRDIIAAAQLGLSRIWREGVRYAKAGVMLSDLQGHETQLDLFAPAAVRPGSEKLMATIDKINREGRSRVFFAGEGIDPEYAMRREMLSPAYTTQWKDIPAAFMR

SEQ ID NO: 104166 - DNA, 1272 bp, Prochlorococcus marinus subsp. marinus str. CCMP1375
  CDS (1)..(1272): transl_table=11
atgtctatagctctaattgatagtaataatttttatgcttcatgcgaagagagcatggatccttccataaggaatcatcctttaatagtgctttctaataacgatggttgcgttatagctcgtaacgcagaagccaaggcccttgggatcgctatgggacaaccctatttcaaggtacgtcgcaagctaaaagatcttggagtaaaaatacgaagttcaaactacgcactttatgctgacatgagtcggcgcttaatgagtctcatagaagcaaactgtgaagagctggaaatttattctattgacgaagcattcgtaaaaatcaaccgtcctcatgactacgatctcaatccctgggcatatcgactacgcacaacaatatatcaaagtctaagcttaccaattgctattggaattggaactaccaaaagccaatcaaagcttgctaaccacttagcaaaaacaacagcaagccatgcagggatctttgatttcgaagcctccgatgatcaagaccattggcttaagcaagttgcaatagaaaacgtttggggcattggaagaaaattagcctactggtgtcgaatgcacggaattaataatgctcgacaattacgagacactcccagtaatgaactaaggcaaaaattcggtgttacaggcatacgtttacaacatgaattaagaggggaaaaatgtctcaacctcttaataaaatctattcccaaaaaagaaacatgcgtcagcagaagctttagccgtcctgtaagtaacatagaagagctgcgacaagcaatagcaaatcatgcagtacgtgcaagtgaaaaattacgcaaacagcatcaacatgctactgcagttacagtatttactcgtactagtttatatacgtcacctttttatagccaatcagcgacacagcgtctaagtttacctagtaataatactagagttattctttcaacaactctctctttaacagaaaaaatattctgctccaattgtttattaataaaagcaggtgtaattatgcaaggacttgtaaacgaagactatcttcaactatctttattttcactaactaatcccaaggaaatatccagacacaaaagcttaatgaaatcaattgactacctaaatacgcgatatggtaaggacacaatacaatgggctgtttgtggcatcaatcaacaagaatgggaaatgtgccgaagaaacttaagtccttcagcaacaacacttttcaaagaaatccctattgtaaaagcctaa

SEQ ID NO: 104167 - protein, 423 aa, Prochlorococcus marinus subsp. marinus str. CCMP1375
MSIALIDSNNFYASCEESMDPSIRNHPLIVLSNNDGCVIARNAEAKALGIAMGQPYFKVRRKLKDLGVKIRSSNYALYADMSRRLMSLIEANCEELEIYSIDEAFVKINRPHDYDLNPWAYRLRTTIYQSLSLPIAIGIGTTKSQSKLANHLAKTTASHAGIFDFEASDDQDHWLKQVAIENVWGIGRKLAYWCRMHGINNARQLRDTPSNELRQKFGVTGIRLQHELRGEKCLNLLIKSIPKKETCVSRSFSRPVSNIEELRQAIANHAVRASEKLRKQHQHATAVTVFTRTSLYTSPFYSQSATQRLSLPSNNTRVILSTTLSLTEKIFCSNCLLIKAGVIMQGLVNEDYLQLSLFSLTNPKEISRHKSLMKSIDYLNTRYGKDTIQWAVCGINQQEWEMCRRNLSPSATTLFKEIPIVKA

SEQ ID NO: 104168 - DNA, 1275 bp, Prochlorococcus marinus str. MIT 9313
  CDS (1)..(1275): transl_table=11
atgtctcgggtcacagccctgatcgacggcaacaatttctatgcctcctgtgagcaaagccttgacgcctcgctgatcggtcgtcctctggtcgtgctctccaacaacgatggctgcattgttgctcgcagctccgaagcgcgtgctctcggaatcagcatgggcacgccctatttcaaggtccgtcacaaattggaccgacttggcgttgtcgtgcgcagctccaactacgccctctacggcgatatgagccaacgactgatgagcttgctggaagcccattgtgaggagctggagatttactcgattgatgaagcctttgcttacatcaatggtccctctgatgacaacctaaagccctgggcccgtcaactacgggccctggtgcatcgcaacctgggcctaccgatagcaatcggacttggcgccagtaaaggtcaggccaaactcgccaaccacctggccaaggccataccggctcacgctggagtgttcaacctactcaccgctagtgatccagatacatggcttgagagcgtcgctatcgaaaatgtatgggggatcggtcgcaagttggcccattggtgccgacttagaggcgtaaccaatgcccggcaattgcgcgatatgccacgtagccaacttcatgcccgctgcggcgttgtaggcatacgcctacaacgagaattacaaggttatgcctgccttcctctagccctagccccaacatcaaaacaggaaacctgcgttagccgcagttttagccgaccaatcgccaacctagaggaattacgccaggcaatcgcaacctacgtggtgcgcgccagtgaaaaactgcgacgacaacagcaacgggccgggatcctcaccgtattcacacgtaccagcccatttgcaccatcgttttacagccaagccgctaccattcaactggatttgccaagcaacgacactgcaatcttgctagcagcagccttgccactagtcgagcgaatctaccggccccatcgccgcttaaacaaagccggggtgctgatgcaaaacctacagagcgcagaccatctgcaacaacacctgttggtagcagttcatgccgatgagcagcatcgtagcgatcgactaatgaacaccgtcgaccgacttaatcaccgttacggcagcggaaccgtgagttgggctgtttgtggcatgcagccaggatggagcatgcgtcgtcatcaactcagccgcgcggccacaactcgcctcaatgacgtgccgttggtgctggcctga

SEQ ID NO: 104169 - protein, 424 aa, Prochlorococcus marinus str. MIT 9313
MSRVTALIDGNNFYASCEQSLDASLIGRPLVVLSNNDGCIVARSSEARALGISMGTPYFKVRHKLDRLGVVVRSSNYALYGDMSQRLMSLLEAHCEELEIYSIDEAFAYINGPSDDNLKPWARQLRALVHRNLGLPIAIGLGASKGQAKLANHLAKAIPAHAGVFNLLTASDPDTWLESVAIENVWGIGRKLAHWCRLRGVTNARQLRDMPRSQLHARCGVVGIRLQRELQGYACLPLALAPTSKQETCVSRSFSRPIANLEELRQAIATYVVRASEKLRRQQQRAGILTVFTRTSPFAPSFYSQAATIQLDLPSNDTAILLAAALPLVERIYRPHRRLNKAGVLMQNLQSADHLQQHLLVAVHADEQHRSDRLMNTVDRLNHRYGSGTVSWAVCGMQPGWSMRRHQLSRAATTRLNDVPLVLA

SEQ ID NO: 104170 - DNA, 1299 bp, Porphyromonas gingivalis W83
  CDS (1)..(1299): transl_table=11
atgtatgccctcttagactgcaacaacttcttcgtcagttgcgaaagggtgttcgacccctcgctccgaaacaggccggtcgttgtcctctccaataacgatggttgtatcatcgctcgcagcaatgaagccaaagcattggggatagggatgggacaacctttcttcaaggtgcaggacttgattcgccggcacaatgtggcattcttcagctcgaacttcattctctacggcgatatgtcccgacgaatcatgtcgcttgtatcggaacttgtacctcggatgtcgatctattcgatagacgagtgtttcatggatttgagaggagtgaaagattatatgtcgctatgccacatgatagtcgatagagtccgccaatgtacgggtataccggtgagtataggtgtagccgatacgatgaccctgtccaaagtggcagacaaatatgccaagaggtatgcgggttacaagggcgtatgcgccatagactccgaagaaaagaggagaaaggctctgcaaacgttcgatgtaagcgatgtatggggaatagggcgcagactatctcgcaagctatactattatggtatcaatacggcagccgactttgcttcgatgagagaaggtcgggtatatcgtttggccggcacttcgggcgtcaggacatggcaggagcttaggggcgaagcctgcaaagagatgaaattgccacagcctcgccaaagtgtctgcaccacgcgctctttcggccatccatgccgagattttgactcccttctcaggcatttggctgttttcgccgatagttgctgtacgaagatacgtgaagaaaagagcagggcacgccgtttgagtatctttataagctgtagccgatttgatcaggagaacgactattccggccggaatgagatgctccttcccgtagctacttctgacccttcagaactgatcccaaagattcgcaccctgctacaagagatttatcgaccaaatctgccctacaaacaggcaggggtgatcttgtccgacttggtagcggaggcctatcagctcaatcttttcgacccgatcgatcgcatgcggcaggagcgtttcttatcctctgtggatgcgatccgccagcgtttcggaagagatagtctgaccgttgctacccaagaaacagaagctatagcatctgtctcttcgatcaagcatcgttcgcgcagatatacgaccgatatgaacgaggtcatagatgtcgttctgcccgatcagcgaaaaagcggagaaaaaaaatcgacgatcaacagccggtag

SEQ ID NO: 104171 - protein, 432 aa, Porphyromonas gingivalis W83
MYALLDCNNFFVSCERVFDPSLRNRPVVVLSNNDGCIIARSNEAKALGIGMGQPFFKVQDLIRRHNVAFFSSNFILYGDMSRRIMSLVSELVPRMSIYSIDECFMDLRGVKDYMSLCHMIVDRVRQCTGIPVSIGVADTMTLSKVADKYAKRYAGYKGVCAIDSEEKRRKALQTFDVSDVWGIGRRLSRKLYYYGINTAADFASMREGRVYRLAGTSGVRTWQELRGEACKEMKLPQPRQSVCTTRSFGHPCRDFDSLLRHLAVFADSCCTKIREEKSRARRLSIFISCSRFDQENDYSGRNEMLLPVATSDPSELIPKIRTLLQEIYRPNLPYKQAGVILSDLVAEAYQLNLFDPIDRMRQERFLSSVDAIRQRFGRDSLTVATQETEAIASVSSIKHRSRRYTTDMNEVIDVVLPDQRKSGEKKSTINSR

SEQ ID NO: 104172 - DNA, 1299 bp, Pseudomonas syringae pv. syringae
  CDS (1)..(1299): transl_table=11
atggcgtcacaagctttgagtaacaagccagcgccggtctttgcgctggtcgattgcaattcgttctacgccagctgtgagcgcgttttccgacctgacttggccaaggagcctattgtggtgctcagcaataacgatggctgcgttattgcccgcagctacgatgcaaaaccttacgtgaaaatgggcgcgccttattttcagatcaaagatattttgcgccggcacggaatccaggtgttcagcagtaatttttcgctctatggcgatttaagccagcgcgtgatggccatcattgaatccatggtccctgctgttgaggtttatagcatcgatgaggcgtttgcagacctgaccggcttgcctggcaatctgaccgagttgggaaggtcaattcgatccaaagtctaccgctgcaccggcattcccgtgggtgtggggattgcaccgactaagacactggccaagctggccaaccacacggcaaagcgtcttcaggcgcacaccggcggggtcgttgacatctgtgaccctgtaaaacgcgattgggtgctgcgcaatacttctgtcggagaggtctggggcataggtcgaaagatgaaagcgcacctggaaggcatgcagatccggtcggccaaggacttggccatggccgatccttggatgctgcgcaaaacattcagtgttgtgatcgagaaaacggcacgcgagctggcgggcaccgcgtgcctggagctggacgaagtcgaaccaccacgtcaggagatctgctgcagcagaatgtttggtaagcggttgaccgagctggggccgatcaaagaggcggtggccacctacgtgatgcgtgcctctgaaaaattacgcgcccagggatcggtgtgtaaaaagatccgggtgagcattcgcaccggcatgttcaatcctgacgaagccaagtatgcaaacggcgctctggtccagctgccctaccccaccaacgatgtgagggtgatgacccagttcgcgaccgaggcggtttcgcggatttttcgaccaggcttcaggtacagcaaagcagaagtcttgctgatggatatctgccagccaggcgaattcaccgacgatctgttcaccatcgatcagccggcgagtgcagatcgactgatggctactttggacataatcaacggcaagtggggacgcgggacgctgcgtacaggatcagtaccagtcgttccggattgggggatgcgccgtgagctgatgagccagagctacacgacgcgacttgatcagctgtgggttgtaaaggctaactga

SEQ ID NO: 104173 - protein, 432 aa, Pseudomonas syringae pv. syringae
MASQALSNKPAPVFALVDCNSFYASCERVFRPDLAKEPIVVLSNNDGCVIARSYDAKPYVKMGAPYFQIKDILRRHGIQVFSSNFSLYGDLSQRVMAIIESMVPAVEVYSIDEAFADLTGLPGNLTELGRSIRSKVYRCTGIPVGVGIAPTKTLAKLANHTAKRLQAHTGGVVDICDPVKRDWVLRNTSVGEVWGIGRKMKAHLEGMQIRSAKDLAMADPWMLRKTFSVVIEKTARELAGTACLELDEVEPPRQEICCSRMFGKRLTELGPIKEAVATYVMRASEKLRAQGSVCKKIRVSIRTGMFNPDEAKYANGALVQLPYPTNDVRVMTQFATEAVSRIFRPGFRYSKAEVLLMDICQPGEFTDDLFTIDQPASADRLMATLDIINGKWGRGTLRTGSVPVVPDWGMRRELMSQSYTTRLDQLWVVKAN

SEQ ID NO: 104174 - DNA, 1254 bp, Serratia marcescens
  CDS (1)..(1254): transl_table=11
atgcacgttgatattaacggagcctatgcggcatttgagtgtgcgatggatcccaagctgtcaaaaaagccgctcatcatagccagcaataacgattcgtccgtcattgcaatgaataaactggctaaaagcgttggtattaagcgtgggaccccaatttttaagtgcagggatttgattcagcaacaccggatcgaagtccggagctctaactttactttgtatgaagactactcaaatcgcttccatgaaacgctggaaagcttcgcgcctcaatcgagtcgatatagcatagatgaaaatttcatgttattgaaaaacatgaacaagataatagattatgaagattacggccggttgatcagaagtacacttcttcataatctgtcccttacctgtggtgtgggttgttcaagcaccaaaaccctcgctaaattatgcacctatgcgagcaaacgatgggcagctacaggcggggttgtagttttgactgatcaggccaggatcaggaagctcctgagcctgatcagtaccagagaaatatggggtattggtcgaaagattagtgaacgcctgtcggctttcgggatcatcactgccggtgatttttataatagcgacgttcgctttttacgtaaaagctttggcgttgaaatcgagcgtacctggcgggaactgcatggcgaaccatgtttccggctgcacgagtctcctcctgtcaggcaacagattatcgtttccagaagttttggtcagcgccttaatgagataggcaagctacatgaggcagtttcattttttaccgcccgggcggcagagcagctgcgcaaggatggctcgtggacccgtcaaatcacagtcttcattcagagtagcaattatgcgcaaggtgaaaaccgctacagcaattgtggtatcgagccgcttaccgctacacaggacacccgcgatctggttgatgcagccatgaccatcctgaaccgcatttacagacccgggatagcgtatgcgaaagcaggggtaatgctctccgctatgactgacggcacagagcaactcagcctgtttgatactcgcccggccaggcctggcagtcaggcactgatgaaagttatggaccggttcaataaagaaaagcgcggagctctgtttttactgggggaaggcattcaacaggattttcgtatgaagcaggccatgctatcaccgagatatacgacccgctgggatgaattactcgttgtaaaagcgtag

SEQ ID NO: 104175 - protein, 417 aa, Serratia marcescens
MHVDINGAYAAFECAMDPKLSKKPLIIASNNDSSVIAMNKLAKSVGIKRGTPIFKCRDLIQQHRIEVRSSNFTLYEDYSNRFHETLESFAPQSSRYSIDENFMLLKNMNKIIDYEDYGRLIRSTLLHNLSLTCGVGCSSTKTLAKLCTYASKRWAATGGVVVLTDQARIRKLLSLISTREIWGIGRKISERLSAFGIITAGDFYNSDVRFLRKSFGVEIERTWRELHGEPCFRLHESPPVRQQIIVSRSFGQRLNEIGKLHEAVSFFTARAAEQLRKDGSWTRQITVFIQSSNYAQGENRYSNCGIEPLTATQDTRDLVDAAMTILNRIYRPGIAYAKAGVMLSAMTDGTEQLSLFDTRPARPGSQALMKVMDRFNKEKRGALFLLGEGIQQDFRMKQAMLSPRYTTRWDELLVVKA

SEQ ID NO: 104176 - DNA, 1305 bp, Erwinia amylovora
  CDS (1)..(1305): transl_table=11
atggggtgtggttacgttcactgtcatgagacaccgcccgtgtacgccttaatcgacgtcaattcgatgtactgcagctgcgaagaggcgttccgccctgatttacgaggtcgccctgtggtcgttctcagcaacaacgacggggcgcttgttgcggtcaatcgcgcggcgaaagcgctgggcgtgcgccgcggggagccttatttccgctgccgccgcctgctggaacagcataacgttgccgtattcagttccaactacaccctttacgcctcattctccgccagatttgcaaccgtggtggaaagtctggcgccgcggacatttgtttactcaattgatgagctctttgcggatgcctctcatatggagggagtgatgacgccgcaggcgtttggccagcttttgcgggctgaagtgctgcgccagacaacgctcacctgtggagtcggcgtcgcgccaacgaagacgctggccaagctgtgcaaccacgccgcaaagacgtggcctgccaccgggggggttgtggcgctcagtgatgctgtaagactgaaaaagctgatgagcctggtgtcggccggcgatgtgtggggcgttggccatcgtaccgaaaaagggctggcggcaatggggatcaaaacggcgctggcgctcgcagagatggatatccgtcttgcacgccggctgtacggtgtgacgctggaacggaccattcgtgagctgcgtggcgaggcctgctttgccctggaggaaggtaccggcgcgaaacagcagcttgttgtatcccgttcgtttggagcacgggtcacgcaactggcgcagatgcagcaggcggtgactaaatatgccacacgggcaggggaaaagttgcgccaggaaaaccgcctggcgaaggtggtaacggtctttatccgcagcagtgcttatgacgccggcggtgtgccctacagtaaccaggctacggaagtgcttcccgtgccaagccaggatacccgcgacatcatcgccgcggcgcagctggggctgtcgcgtatctggcgtgagggcgtgcggtatgcaaaagccggcgtgatgctcagcgatctgcagggatatgaaacccagctggatctgttttcgccggctgcagtgcggccgggcagcgaaaaactgatggccaccatcgacaaaataaacagggaaggaaggtcaaggatcttcttcgccggagaaggtattgatccggaatatgccatgcgccgtgaaatgttgtccccggcctacaccacgcagtggaaggatattcccgcggcgtttatgcgataa

SEQ ID NO: 104177 - protein, 434 aa, Erwinia amylovora
MGCGYVHCHETPPVYALIDVNSMYCSCEEAFRPDLRGRPVVVLSNNDGALVAVNRAAKALGVRRGEPYFRCRRLLEQHNVAVFSSNYTLYASFSARFATVVESLAPRTFVYSIDELFADASHMEGVMTPQAFGQLLRAEVLRQTTLTCGVGVAPTKTLAKLCNHAAKTWPATGGVVALSDAVRLKKLMSLVSAGDVWGVGHRTEKGLAAMGIKTALALAEMDIRLARRLYGVTLERTIRELRGEACFALEEGTGAKQQLVVSRSFGARVTQLAQMQQAVTKYATRAGEKLRQENRLAKVVTVFIRSSAYDAGGVPYSNQATEVLPVPSQDTRDIIAAAQLGLSRIWREGVRYAKAGVMLSDLQGYETQLDLFSPAAVRPGSEKLMATIDKINREGRSRIFFAGEGIDPEYAMRREMLSPAYTTQWKDIPAAFMR

SEQ ID NO: 104178 - DNA, 1230 bp, Geobacter sulfurreducens PCA
  CDS (1)..(1230): transl_table=11
atgagcaatcatcgaaccattctccatctggacatgaacgccttttttgcctcggttgagcaacaagcagacccatccctccaaggaaagccagttgcggtcatcgggtcaggcgcgcgcaccatcatcactaccgcatcctacgaggcacgcgcccacggggtcggcacgggcatgacaacccacgaagcaaaacggctctgcccggaattgatcctcgttatcggcaacaaccgggaatacacccgtatttcaaaactgatcttcgaaatgctcgggcaattcaccccccttgtggaagtcttttccattgacgaagcctttctcgacttgaccggttcgcttcgacttttcggccgcgccgacgtgattgcccgcgagatcaaagcccgcataagggaccgattcggcctcacctgctccatcggcatcgctcccaacaagcttttggcaaagctggcctcggacatgcaaaagcccgatggtctcaccatcatcccccccgaaaacgtggcttcactcatgaaaacgaccccgatccgcagcctctgcggaataggcccatccactgaacaacgactgaaatacctcggcatttcaacctgtaacgatctgggacacttcagctccaagatacttacccgacatttcggtgccatgggagcacgactcaaacagatgggacagggcattgacgactctcccgtaataccgaccacaacggaagaagaagttaaaagcgtcagccacagtacaaccctggaccacgacctcaccaacaaggacgacatacataagtacctgcttatgttatcggagatggtaggacgccgcgcgcgccgctacaaaaccaaagggaaaacagttaccctaacaatacggtatgccgatttcaccacgttcagccgccaggaaaccctcccctccccattgaatcgaagcggcgacatttatcgagccgtcactgcactgctcgacacactccaattaacgcaaccaatacgactcctgggcgttgccatcagcaaccttgtacatgcctcggaacagctccccctcttcccggaagaacggcggctcacaaccctctcgcaagccatggatcaagtcaatgaccggttcggagaaaccaccatcacctttggcaccttgctgggacaagacaactgctcgcacgttatcgcccctgcctggagacccgctggcatacgtgacgtaaaagtaaaataa

SEQ ID NO: 104179 - protein, 409 aa, Geobacter sulfurreducens PCA
MSNHRTILHLDMNAFFASVEQQADPSLQGKPVAVIGSGARTIITTASYEARAHGVGTGMTTHEAKRLCPELILVIGNNREYTRISKLIFEMLGQFTPLVEVFSIDEAFLDLTGSLRLFGRADVIAREIKARIRDRFGLTCSIGIAPNKLLAKLASDMQKPDGLTIIPPENVASLMKTTPIRSLCGIGPSTEQRLKYLGISTCNDLGHFSSKILTRHFGAMGARLKQMGQGIDDSPVIPTTTEEEVKSVSHSTTLDHDLTNKDDIHKYLLMLSEMVGRRARRYKTKGKTVTLTIRYADFTTFSRQETLPSPLNRSGDIYRAVTALLDTLQLTQPIRLLGVAISNLVHASEQLPLFPEERRLTTLSQAMDQVNDRFGETTITFGTLLGQDNCSHVIAPAWRPAGIRDVKVK

SEQ ID NO: 104180 - DNA, 1299 bp, Arthrobacter nitroguajacolicus
  CDS (1)..(1299): transl_table=11
atgtctaagccggcactgatgcgccggatgcaggagatcgcgcacgtcgacgtcaattgcttctacgcgtccgccgagcgggccttcaatcccgcattggagggcaaaccggtgatcgtgctgtccaacaacgacggctgcgctgtgaccagatcgagcgaggccaaggccctgggcatcgccatgggcgagccgtggttcaagctggcaccccgcgccaaggaatgggggctcattgccctctccagcaactatgagctctatggcgatgtcagctcgcgcgtcatggagctcctgggccggtactcggcatgggttgagatctacagcatcgatgaggcattcctcggcgtgaagggcagccccgacgagctgctgcagctcggacgcgccatgaaggaggcgtgccggcgacacgtcggcgtacccgtctgtgtcggcattgccagaaccaaaaccctcgccaaactctgcaacaagtgggcgaaaaacaacccggccttcaagggcgtctgccgatgggattctgtacccgtagagcagcgcgaagcactcatggaacggctgtcagtgatcgaaatctggggcgtggccacccgcctcaccaagcgattgaacgccatggggatcttctcgatcctggacctcactcgcgccaatcccgtagcgatccgggacaagttctccatcgtcatgatgcgcaccgtcctggaactgcaaggaacaccctgcatccccatggaggaggaacggatcggacgagaccaactcatcttctcccgctccttctcgaccccgatcaccacggccgccggcctgcgccaggtcatgagcgtctacgcccaaatggccagcgcccgcctggccaaacacgatctccaagcaaaactgcttacagcgttcgctgcgacgtcgcactacaacccgaatgagaaatctttcccctcggtctgcgttgccctgccgatgcccaccgcggatcccgtgctgttaaccaaggcagcccacgcactgctcccccaggtctacgaaggcgtcaagtacgtccgggccgggatcatggtcaccgacctgcgcccgtccggcaaccagaaacccctggaaatcttcgaaaacgcgcatgaagaacgcggcatcggaaccctcttggaagacgtcagcaagcgctacggccgcggatccatcggcctgggccacgccggcatcaaaggcggcccggactggaccatgaaacgcgacatgctctcccccagatacaccacccactgggatgaactccccctcgtcaaagccgcctaa

SEQ ID NO: 104181 - protein, 432 aa, Arthrobacter nitroguajacolicus
MSKPALMRRMQEIAHVDVNCFYASAERAFNPALEGKPVIVLSNNDGCAVTRSSEAKALGIAMGEPWFKLAPRAKEWGLIALSSNYELYGDVSSRVMELLGRYSAWVEIYSIDEAFLGVKGSPDELLQLGRAMKEACRRHVGVPVCVGIARTKTLAKLCNKWAKNNPAFKGVCRWDSVPVEQREALMERLSVIEIWGVATRLTKRLNAMGIFSILDLTRANPVAIRDKFSIVMMRTVLELQGTPCIPMEEERIGRDQLIFSRSFSTPITTAAGLRQVMSVYAQMASARLAKHDLQAKLLTAFAATSHYNPNEKSFPSVCVALPMPTADPVLLTKAAHALLPQVYEGVKYVRAGIMVTDLRPSGNQKPLEIFENAHEERGIGTLLEDVSKRYGRGSIGLGHAGIKGGPDWTMKRDMLSPRYTTHWDELPLVKAA

SEQ ID NO: 104182 - DNA, 1296 bp, Legionella pneumophila subsp. pneumophila str. Philadelphia 1
  CDS (1)..(1296): transl_table=11
ttggggagtcgtcactcatgttattcatacggtattgtgatgtttgcgctggtcgattgtaataatttttatgtctcgtgtgagcgtttatttaaaccagccttagcgaataaacccattttggtcttgtctaataatgatggttgtgtgattgcgcgatctaatgaagtaaaagctttgggtgttcaaatgggagtgccttattttgcagtcaaagcattatgtaagcagcataaagtgcatgtgttttcatccaattacacattgtatgctgatatgtcacgccgggttatgtcagttcttgaagacaattggccagcaatagagatttactccattgatgaagcttttcttgatttgaatactttgccccaatctgaacatgatgagttttgccgcaagttacaaaaaattgttttgcgccataccggtattcccgtatccataggcataggggcaaccaaaaccctggctaaactcgcaaaccatattgcgaaaaaggaattaagaacccctgtatttaacattgaaaatcaatatcattggctagctaaaatagttgttggcgaggtatgggggataggacggcaatggggtaaaaagttagtacaacaggggatttatacagctcatgacttggctggtatggatttgcaattaattaaaaaattatttagtgttgtattgcaacgaacagtgcttgagttgcgtggggtttcatgtggcagtttacaggattttgagtcaagaaaaagcataatatcttccaaatcctttggttctatgcaaacagagtattctgctcttgctcaggccatcagcagccattgtgccagagcttgggaaaagttacgtcatcaaaaattgatggcatgccatctttccatatttatcaaaaccaatcaatttcgtttggatttgccacaatatcagcaaactatagggtttaagctgattaatccaactgatgatctgcgacatttgattcgttgtgccaaattgtgcctgcgtaaaatatttcgctctggattccattaccaaaaggtaggcgtttatttaggagatttaattgaaaaaaactgtttgcagttagatttgtttaaccaggtttcagagaaagaattgaatcagacagagcgattgatgtcggtattagatgaaatcaacacgaaatatggccgccataccttgcgtttggcagcagaagggcatgtgaagccatgggctatgcgggcgcagtcccgttctcctcgctatacaacttcctggtctgaattgcctgtggtaattatttaa

SEQ ID NO: 104183 - protein, 431 aa, Legionella pneumophila subsp. pneumophila str. Philadelphia 1
MGSRHSCYSYGIVMFALVDCNNFYVSCERLFKPALANKPILVLSNNDGCVIARSNEVKALGVQMGVPYFAVKALCKQHKVHVFSSNYTLYADMSRRVMSVLEDNWPAIEIYSIDEAFLDLNTLPQSEHDEFCRKLQKIVLRHTGIPVSIGIGATKTLAKLANHIAKKELRTPVFNIENQYHWLAKIVVGEVWGIGRQWGKKLVQQGIYTAHDLAGMDLQLIKKLFSVVLQRTVLELRGVSCGSLQDFESRKSIISSKSFGSMQTEYSALAQAISSHCARAWEKLRHQKLMACHLSIFIKTNQFRLDLPQYQQTIGFKLINPTDDLRHLIRCAKLCLRKIFRSGFHYQKVGVYLGDLIEKNCLQLDLFNQVSEKELNQTERLMSVLDEINTKYGRHTLRLAAEGHVKPWAMRAQSRSPRYTTSWSELPVVII

SEQ ID NO: 104184 - DNA, 1257 bp, Synechococcus elongatus PCC 6301
  CDS (1)..(1257): transl_table=11
atgttcgccctgattgactgcaacaacttctacgtctcttgtgaacgagtatttgatcccaagctgcaggggcagcctgtcgttgtcctctccaataacgacggctgcgtgattgctcgttctgcagaagcaaaagctctagggattcccatggggatccccttcttcaaagtcaaagacctgatatcacaacatcagattcaggtcttctccagcaactacgccctctacggcgacatgagccagcgagtgatgcaaaccctggcaacactctgtcctgatctagaggtctattccattgatgaagccttcttagacttctcaggatttcaagcccagcccctgcagcaaggtcaattgattcgtcaaaccgtcgggcagtggacaggcatccccgtctcgatcggcattgctgccaccaaggtactcgccaaagtagccaacaaactcgccaagcaaaatggtggtgtctttgtcctgtcgccatcaaaagtgcaagccgtcctcatgactctgcccgttgaagaagtttggggcatttccagtcgttggggtcagcggcttcgggctttgaacatcagtaccgccgccgaactccaggccactaaccttaatctgatgcgtcagcagttcaacatagttctcgagcggattgtgcgagagctacggggggaatcctgcttacccctcgaatccattgtcaatccgcagcaaagcttggtagtctctcgttccttcgggcagccaattacaacgctgccagagcttaaacaagccgtagcgacctacgtcagtcgagccgccgaggaactacggagccggcaactaacgaccagctatctaaccgtctttgtaagaacaaatcggtttcaagagaactatgaagcgcccaatgctagtcagggcttactcacgcccaccaatcacacggggaaattactggaaattgccctgcgttgcacagaatcgctctatcaaccaggacgagcctacaagaaagctggagtcctgtttcaagggttagggtcagcgcagtcaatccagcagagcctgtttgaggagtccgacagcgagaaaggagcagcgctgatggtgacgatggaccggcttaaccggcggtatggtcggcagtccctgcactatggagccacaggaactcgacaaccttgggccatgcgctccgaccagcgatcgccgcaatacacaactcgatggcaagacttacccgaagtccatgcaagagctcgagagatttga

SEQ ID NO: 104185 - protein, 418 aa, Synechococcus elongatus PCC 6301
MFALIDCNNFYVSCERVFDPKLQGQPVVVLSNNDGCVIARSAEAKALGIPMGIPFFKVKDLISQHQIQVFSSNYALYGDMSQRVMQTLATLCPDLEVYSIDEAFLDFSGFQAQPLQQGQLIRQTVGQWTGIPVSIGIAATKVLAKVANKLAKQNGGVFVLSPSKVQAVLMTLPVEEVWGISSRWGQRLRALNISTAAELQATNLNLMRQQFNIVLERIVRELRGESCLPLESIVNPQQSLVVSRSFGQPITTLPELKQAVATYVSRAAEELRSRQLTTSYLTVFVRTNRFQENYEAPNASQGLLTPTNHTGKLLEIALRCTESLYQPGRAYKKAGVLFQGLGSAQSIQQSLFEESDSEKGAALMVTMDRLNRRYGRQSLHYGATGTRQPWAMRSDQRSPQYTTRWQDLPEVHARAREI

SEQ ID NO: 104186 - DNA, 1272 bp, Escherichia coli
  CDS (1)..(1272): transl_table=11
atgtttgcactagctgatatcaacagtttctacgcctcatgtgaaaaagttttccgcccggaccttcgcaacgaaccggtcatcgtactcagcaataacgatggctgtgtgatcgcgcgcagcccggaggcaaaagcccttggcatcagaatggggcagccctggtttcaggtgagacaaatgcgcctggagaagaaaatacatgtattttccagcaattatgcgctgtaccacagcatgagccaacgggttatggctgttctggagtcgctttctcccgcagttgagccctactcaattgatgaaatgttcattgatttgcgggggataaatcattgcatctctccggagttttttggtcatcagctcagggaacaggtaaaaagctggacaggactcaccatgggggtgggcattgcgcctacaaaaacgctggctaaaagtgcacagtgggcaacaaagcaatggccacagttttccggtgtggtcgcgctgacggcagaaaaccgtaatcggatcttgaagctactggggctgcagccagttggtgaggtctggggagtaggacgcagactgacggaaaagctgaatgcgctgggtattaacacagcactgcagctggcgcaggctaacacggcattcatccggaaaaacttcagcgtcattcttgagcgtacggtacgcgaactcaacggcgagtcctgcatatccctggaagaagcaccaccggcaaaacagcagattgtctgtagtcgcagttttggtgaacgaatcacagacaaagatgccatgcaccaggctgttgttcagtatgcagagcgggccgcagagaaactacgtggggagcgtcagtattgccggcaggtgacgacatttgtacggacatccccctttgcagtaaaagaaccctgttacagcaatgccgctgtggaaaagcttccattgcccacacaggacagccgggacattattgccgcagcatgcagagcgttaaaccatgtctggcgtgaagggtaccgctatatgaaggcaggtgtcatgctggctgatttcacaccatcgggtatagcgcagccgggattatttgatgaaatccagccccgtaaaaacagtgaaaagttaatgaaaacactcgatgaactgaaccagtcgggaaaagggaaagtgtggtttgcggggcgaggaaccgcccctgaatggcaaatgaaacgggaaatgctctcgccttcgtatacaacacaatggactgagatccccattgcttcattatga

SEQ ID NO: 104187 - protein, 423 aa, Escherichia coli
MFALADINSFYASCEKVFRPDLRNEPVIVLSNNDGCVIARSPEAKALGIRMGQPWFQVRQMRLEKKIHVFSSNYALYHSMSQRVMAVLESLSPAVEPYSIDEMFIDLRGINHCISPEFFGHQLREQVKSWTGLTMGVGIAPTKTLAKSAQWATKQWPQFSGVVALTAENRNRILKLLGLQPVGEVWGVGRRLTEKLNALGINTALQLAQANTAFIRKNFSVILERTVRELNGESCISLEEAPPAKQQIVCSRSFGERITDKDAMHQAVVQYAERAAEKLRGERQYCRQVTTFVRTSPFAVKEPCYSNAAVEKLPLPTQDSRDIIAAACRALNHVWREGYRYMKAGVMLADFTPSGIAQPGLFDEIQPRKNSEKLMKTLDELNQSGKGKVWFAGRGTAPEWQMKREMLSPSYTTQWTEIPIASL

SEQ ID NO: 104188 - DNA, 1293 bp, Azoarcus sp. EbN1
  CDS (1)..(1293): transl_table=11
atgagttcaccgcccccggttttcgcgctggtcgactgcaacaacttctacgccagctgcgaaaaactcttcgaccctcggctcgccggccgggcggtcgtggtgctgtcgaacaacgacggctgcgtggtcgcccgctcggccgaggcgaaggtcctcggagtcccgatgggcgcgccctggttcaaactcgccgggctcgcccagcggcacggaatcatcgccctgtcctcgaactacgcgctgtacgcggacatgagcaaccgtgtgatcgaggttctggccagcttcacgccgcggctcgaggtctacagcatcgacgagtgctttctcgatttagcggggtttgctcagctcgacctcgtggagtacagctaccggatccgcgaccgcgtcagccaatggctcgggctgccggtatgcatcgggatcgccccgacgaaaaccctcgccaagctcgccaatcatcttgccaagaagcgcctgcagtacgctggcgtctgcgacctgcgcacaatccagccagcgcaacgggcggccctattcgctgaaatcggtgtcggcgaggtgtggggcgtcggtggccggctgcaggaccgcttggccacgatggcgatccgcaccgttgaagacctgcgtcgggccaaccccgaattaatccggcgccgcttctcggtcgccctcgaacgcacggtgcgcgagctcaatgacatgtcctgcctcgaactcgaagaggtcgccccgcccaggcagcagatcattgccagccgctcgttcggcaacgccgtcttcctcttggaagagctgcgggaagcggtcgcaagccacatcagccgggcagcggagaagctgcgcgcgcgaggatccgaggtaggggcgctgacggtgatgatctgcaccaatccgttcaagccccaagatccgcaataccagcgcgcggtcacggttccgctgagcgacccgaccagcgacacccgcaagctgatcgcaatcgcgctgcgggtgctcgacggtctctaccggtcaggcttcgcataccacaaagctggaatcatgctcgccgagctcatgccggccggaaaacggcaacagagcctgttcgacgagctggcgagcgatacgcgcgcacaagccgtcatggtggcaatggatgcgatcaaccaccgatggggccgcagcacgctgaaatcctccgtcatcggcacccggcaaggctggaagatgcgccaggaacggcggacaccggactatacgacgtcctggagcgatttaccggtggtggtggcacgctga

SEQ ID NO: 104189 - protein, 430 aa, Azoarcus sp. EbN1
MSSPPPVFALVDCNNFYASCEKLFDPRLAGRAVVVLSNNDGCVVARSAEAKVLGVPMGAPWFKLAGLAQRHGIIALSSNYALYADMSNRVIEVLASFTPRLEVYSIDECFLDLAGFAQLDLVEYSYRIRDRVSQWLGLPVCIGIAPTKTLAKLANHLAKKRLQYAGVCDLRTIQPAQRAALFAEIGVGEVWGVGGRLQDRLATMAIRTVEDLRRANPELIRRRFSVALERTVRELNDMSCLELEEVAPPRQQIIASRSFGNAVFLLEELREAVASHISRAAEKLRARGSEVGALTVMICTNPFKPQDPQYQRAVTVPLSDPTSDTRKLIAIALRVLDGLYRSGFAYHKAGIMLAELMPAGKRQQSLFDELASDTRAQAVMVAMDAINHRWGRSTLKSSVIGTRQGWKMRQERRTPDYTTSWSDLPVVVAR

SEQ ID NO: 104190 - DNA, 1284 bp, Bacteroides fragilis NCTC 9343
  CDS (1)..(1284): transl_table=11
atgtttggactaatggactgcaataacttctacgcaagttgcgagagagtgttcaatccggctttgaacggtaagccgatcgttgttttaagtaataacgacggatgtgttattgccagaagtaacgaagcgaaagcattggggattaaaatgggagttccggcttatcagatcaaagatgatattcagaaatatggtatatctgtcttttcatcgaactatacgctatacggcggcatgtccggacgcgtgatgtccatactggcagaacaagtgccggaaatggaagtatacagtatagacgaagcatttcttaacctggaagggattcgggatattcagtcactcggaacagacatcataaacaaagtaatccgcggaaccggcatacctgttagtttgggtatcgccccaaccaaaacactcgcaaaggtcgccaataaatttgcaaagaaatatcctgcttacaatcgtttatgtatcatcgatacagaagaaaagcgcaccaaggctctgcagcttactgaaattggagacatctgggggatcggtcaccggcaagttgccaagttagaaaagcagggagtcaaaacagcctatgactttaccgagttgcccgaatcttgggtgcgtaagaacatgactgtagtcggagaaaggacctggaaagaacttcaaggcatttcctgtattgatatggaaaccacaccaccggccaaaaagcagatatgtacaagtcggtcattcggcaagatggtggaggacatcgatacaatgtcggaagcaatcgccactcacgcttctacatgcgcaaagaaactccgacaacagaaaggctatgcaatgtcactaatggtattcatccatacaaataacttccgtaaagattcaccacaatattggaggaatacagttgtacatcttccagtaccgaccaatgacacattagaaattgtacattatgcactggccgggctaaaaacgattttcatgcaaggctatcaatataagaaagccggagttattatcaccgaaataaccgatagcacccaattgggactgtttgattcagtagatcgcgagaaacgtaaacgtcttcaacaaacaatagataagataaacggtaaacacagccgactcgtcaaattagcgattcaaggtacagggaggaattggaagcttaaacaaaaacagctatcagggcattataccactgacatcaatcagattataagcattaattgtacttacccaactgcatgtcaacgaaaacaatatagctga

SEQ ID NO: 104191 - protein, 427 aa, Bacteroides fragilis NCTC 9343
MFGLMDCNNFYASCERVFNPALNGKPIVVLSNNDGCVIARSNEAKALGIKMGVPAYQIKDDIQKYGISVFSSNYTLYGGMSGRVMSILAEQVPEMEVYSIDEAFLNLEGIRDIQSLGTDIINKVIRGTGIPVSLGIAPTKTLAKVANKFAKKYPAYNRLCIIDTEEKRTKALQLTEIGDIWGIGHRQVAKLEKQGVKTAYDFTELPESWVRKNMTVVGERTWKELQGISCIDMETTPPAKKQICTSRSFGKMVEDIDTMSEAIATHASTCAKKLRQQKGYAMSLMVFIHTNNFRKDSPQYWRNTVVHLPVPTNDTLEIVHYALAGLKTIFMQGYQYKKAGVIITEITDSTQLGLFDSVDREKRKRLQQTIDKINGKHSRLVKLAIQGTGRNWKLKQKQLSGHYTTDINQIISINCTYPTACQRKQYS

SEQ ID NO: 104192 - DNA, 1281 bp, Pseudomonas syringae pv. syringae B728a
  CDS (1)..(1281): transl_table=11
atggaaaagcgtgaggctgtcttcgcgctaatcgactgcaattgcttctatgccagctgcgagcgtgtttttcgtccagatctggagaaaacgcccatcgtggtactcagcaataacgacggttgcgtcatcgcccgtagctacgacgccaagccatttgtgaaaatgggcgctccctattttcagatcagagaggtgttgcgccgcaacggcatcaaggtgttcagcagcaactatgcactctatggcgacatgagcgagcgtgtcatgtcgatcatcgagtcgatggtgccagcctccgaggtctacagcatcgatgaggcgttcgcagacctcaccggcgtgcctggcgatctcacagcgttcggtcgacgcatccgggcgaacattcttaaatgcactggcattcctgtgggtgtgggtatcggtcctacgaaaacgctcgccaagctggcaaaccacactgctaagcgactgctatcccatacaggcggtgttgtagacatttgcgacctgcataaccgcaactgggtactgcgtaatacggcggtctcagaggtctggggggtagggaagaagatgaatgcccacctggaggctatgaacatccgcaccgcaatggaccttgcaaccgccgacccgcgtactctgcgcgaacggttcagcgtggtcattgaaaagaccgcacgtgagctggcaggtacttcgtgcctggagctgggcgaagctgcaccacccaagcaggagatctgttgcagccgaatgttcggcaaacggctaaccaccattcagcctatcaaagaggcggtggccacctacactcagcgtgcggccgagaagctccgttctcaaaactcgctgtgcaagaagatccgcgtcagcatccgtaccggcatgttcaatccggaagaagccaagtacgccaacggcgctttggttgaattgccataccccaccaacgacgtgcgcttgatgaccagggcggcgactgaggcagtgaatcgtttgtttcgaccggggttcaagtacagcaaagctgaggttctgttgctggatctgagacagcctggcgaatttacggatgacatgttcgctgcttcgcagccggcatcttcagagaaggtgatgggagtcctggatgagatcaatacacgctggggcagagggactttacgagctgggagtgttccttccaatccggagtgggctatgcgtcgcgagctgatgagtcaaagttatacgaccaggctcgatcagttgtgggaggtgaaaagtgtgtaa

SEQ ID NO: 104193 - protein, 426 aa, Pseudomonas syringae pv. syringae B728a
MEKREAVFALIDCNCFYASCERVFRPDLEKTPIVVLSNNDGCVIARSYDAKPFVKMGAPYFQIREVLRRNGIKVFSSNYALYGDMSERVMSIIESMVPASEVYSIDEAFADLTGVPGDLTAFGRRIRANILKCTGIPVGVGIGPTKTLAKLANHTAKRLLSHTGGVVDICDLHNRNWVLRNTAVSEVWGVGKKMNAHLEAMNIRTAMDLATADPRTLRERFSVVIEKTARELAGTSCLELGEAAPPKQEICCSRMFGKRLTTIQPIKEAVATYTQRAAEKLRSQNSLCKKIRVSIRTGMFNPEEAKYANGALVELPYPTNDVRLMTRAATEAVNRLFRPGFKYSKAEVLLLDLRQPGEFTDDMFAASQPASSEKVMGVLDEINTRWGRGTLRAGSVPSNPEWAMRRELMSQSYTTRLDQLWEVKSV

SEQ ID NO: 104194 - DNA, 1281 bp, Pseudomonas syringae pv. syringae B728a
  CDS (1)..(1281): transl_table=11
atggccggtcatgagaatgtcttcgcgctgatcgactgcaactgtttttatgcgagctgcgagcgagctttccgtcccgacctggcaaagactcccatcgtagtgctcagtaacaacgacggatgtgttatcgcccggagctatgacgcaaaaccatttgtgaaaatgggtgcaccgtactttcagatcaaggacgttttgcgtcagaacggcgtgattgccttcagcagcaattacgccctgtatggcgacatgagtgagcgggttatgacgatcatcgagtcgatggtgcccgcctcggaggtttatagcatcgatgaagcgtttgccgatctgacgggcataccgggcgacatgacagaatttggccggcgcatccggtcgaaaatcctcaaatgcaccggtataccagttggcgttggcattgggcctaccaagacgcttgccaagctggcgaaccacaccgctaagagactgctggcccaaacaggtggagtcgttgacatctgcgacctgcacaagcgcaactgggtgctgcgcaatacgtgtgtgtcagaggtgtggggagtgggaaagaagatgaaagcgcatctagaggccatgaacatccgaagcgcaatggatttggccaatgctgacgcgcgcaccctacgcaccaagttcagtgtcgtcattgaaaagactgcgcgagagctggccggcacgtcgtgtttggaaatgagcgaagctgatccgcccaaacaggaaatctgcagcagtcgaatgtttgggcagcgcctgaccactatcgagccgatcaaggaagcggtggccacctacacgcagcgcgccgctgaaaaactgcgtgcccagaattcactgtgcaagaagatgcgcgtcagtatccgcacaggtatgttcaacccggatgaacctaaatatgcgaatggtgcgctggtcgagctgccgtatcccaccaatgacgtgcgcttgctgacgaagggtgcaactgaggcggtcaaccgacttttccgcccagggtacaagtacagcaaggccgaagtgctgctgctggatcttcgccaacctggcgagtttacggatgacctgtttgcggagtcgcagccagcggcggtagaaaaggtgatgggcgtgctcgacgaaatcaatgcactctgggggagggggacattgagggccgggagcgtaccgtccgatccagactgggcaatgcgcagggacatgatgagccagagctacacgactcgattggatcaactgtgggtagtcagggcgtactga

SEQ ID NO: 104195 - protein, 426 aa, Pseudomonas syringae pv. syringae B728a
MAGHENVFALIDCNCFYASCERAFRPDLAKTPIVVLSNNDGCVIARSYDAKPFVKMGAPYFQIKDVLRQNGVIAFSSNYALYGDMSERVMTIIESMVPASEVYSIDEAFADLTGIPGDMTEFGRRIRSKILKCTGIPVGVGIGPTKTLAKLANHTAKRLLAQTGGVVDICDLHKRNWVLRNTCVSEVWGVGKKMKAHLEAMNIRSAMDLANADARTLRTKFSVVIEKTARELAGTSCLEMSEADPPKQEICSSRMFGQRLTTIEPIKEAVATYTQRAAEKLRAQNSLCKKMRVSIRTGMFNPDEPKYANGALVELPYPTNDVRLLTKGATEAVNRLFRPGYKYSKAEVLLLDLRQPGEFTDDLFAESQPAAVEKVMGVLDEINALWGRGTLRAGSVPSDPDWAMRRDMMSQSYTTRLDQLWVVRAY

SEQ ID NO: 104196 - DNA, 1281 bp, Pseudomonas fluorescens Pf-5
  CDS (1)..(1281): transl_table=11
atgtctaaacacaatgagccggtgtttgccctgatcgactgcaatagcttctatgccagttgcgagcgagtgtttcgccctgatctggcaaaggtgccgattgttgtgctgagcaataacgacggttgtgtcattgcgcgcagctatgacgcaaagtccttcgtcaaaatgggagagccgtattttcagatcaagcacaagctgaggcagcacggcattgtggcgttctcttcgaactatgccctctacggcgacatgagcgagcgggtgatatcgctgatcgaatcgatggtaccggcagtcgaggtgtacagcatcgatgaagccttcgcagatctcacgggaatcaatagccttgagcagttcggccgccagatccgggcccaggtgctgcgctgtacaggcattccggttggtgtagggatcgcacctacaaagacgctcgccaagttggccaaccacactgccaagcgtctacaagcgcacactgggggcgttgtagatattaccgatcaggtgaagcgagattgggtgttgcgaaacactgatgtcgccgaggtgtggggtatcggccggcggatgaaggcgcatctggacgggatgggaatcaagtctgctatggacctggccaaggctgatccgtggacgttgcgcaaaaatttcagtgtcgtgatcgagaagacggcccgggagttggcgggcacgccgtgcctggaactggacgagccagatccgccgaaacaggagatctgctgtagtcggatgtttgggaagcgactaaccgagttggcccctatcaaggaggcggttgctacttacatgatgagagcctcggaaaaactacgggctcagaactcattgtgtaagaaaatccgcgtcagcattcgcacgggcatgtttaaccccgaggaagccaagtatgcaaacggtgtcctggtagaactgccgtatccaaccaatgacgtcagactaatgacgaaaatggctgtggaagcgctggaccgcgttttcaggccgggtttcaaatacagtaaggccgaggtcctgttgttgaatctgtgccaaccaagcgagtacaccggcgatctcttcgccttagcgcaaccatctgaaaccgacaaggtgatgaaggttctggaccagatcaacagtcgctgggggaggggcacactccgtgctgccagcgtccctaccaatcccgattggggtatgcggcgggagatgatgagccagagttacacgacgaagcttgatcagctttggaaggtgtcctgcaactga

SEQ ID NO: 104197 - protein, 426 aa, Pseudomonas fluorescens Pf-5
MSKHNEPVFALIDCNSFYASCERVFRPDLAKVPIVVLSNNDGCVIARSYDAKSFVKMGEPYFQIKHKLRQHGIVAFSSNYALYGDMSERVISLIESMVPAVEVYSIDEAFADLTGINSLEQFGRQIRAQVLRCTGIPVGVGIAPTKTLAKLANHTAKRLQAHTGGVVDITDQVKRDWVLRNTDVAEVWGIGRRMKAHLDGMGIKSAMDLAKADPWTLRKNFSVVIEKTARELAGTPCLELDEPDPPKQEICCSRMFGKRLTELAPIKEAVATYMMRASEKLRAQNSLCKKIRVSIRTGMFNPEEAKYANGVLVELPYPTNDVRLMTKMAVEALDRVFRPGFKYSKAEVLLLNLCQPSEYTGDLFALAQPSETDKVMKVLDQINSRWGRGTLRAASVPTNPDWGMRREMMSQSYTTKLDQLWKVSCN

SEQ ID NO: 104198 - DNA, 1272 bp, Pseudomonas fluorescens Pf-5
  CDS (1)..(1272): transl_table=11
atgtctgactcggtatttgcacttatcgattgcaacagcttctacgcaagctgtgagcgggtattcaggccggacctggctcgggtgccgatcgtggtcctgagcaataacgacggctgcgttattgcacgcagttatgatgctaaaccgcatgtaaagatgggcgagccgtactttcaaattaagcgcaagctccagcagttgggcatagtcgcattttcgtcgaattacgcgctctatggcgatatgagccagcgcgtcatgagcgtcatcgagtccatggttccggctgtggaggtatattcgatcgatgaagctttcgccgatctgagtgggatctgcgggccggaagccctgggccggcaaatccgcgcgcaggttatgcgcgataccgggatacccgtcggagttgggatcgccaggactaaaaccctggctaagctggcaaaccacaccgccaaacgcctgcagacacacaccggaggcgtcgtcgatctatgcgacacgttcaagcgagactgggtgcttcgtaacaccgacgtcgcagaagtctggggtgttggccgccggatgacagcgcacctggaatcaattgggatcaggacagctatggatctggccaatgcggatcctcgaacactgcgcatgaaattcagcgtagtcattgagaaaactgcacgggaactagccggtaccgcgtgcctggagctggacgaccccgctccaccgaagcaggaaatctgctgcagtcggatgttcggccaacgcctgcaggaactgccagcgctcaaagaggcggtggccacctacatgatgcgtgcctcagaaaagctccgagcccagggctcactgtgcaagaaaattcgtgtcagcatccgcactggcatgttcaatccggaggaggcgaagtatgcaaacggtgttgtggtgcatctgccctaccccaccgacgacgtgcgtttactgacacgggaagcggtggatgccttggaccgaatattcaggccaggcttcaagtacagcaaagcagaagttatgttgctcgacctatgccagccaggcgactacacggacgacctttttgcggtgtcgcaacctgctgacgcaactcgggtaatgaaggttcttgatcagattaacgatcgatggggtcgaggaactcttcgatcagccagcgtgccagcagaacccgcctggggcatgcgcagagagatgatgagccgcagctacaccacacgtctagagcaactctggacggttcactgtcattga

SEQ ID NO: 104199 - protein, 423 aa, Pseudomonas fluorescens Pf-5
MSDSVFALIDCNSFYASCERVFRPDLARVPIVVLSNNDGCVIARSYDAKPHVKMGEPYFQIKRKLQQLGIVAFSSNYALYGDMSQRVMSVIESMVPAVEVYSIDEAFADLSGICGPEALGRQIRAQVMRDTGIPVGVGIARTKTLAKLANHTAKRLQTHTGGVVDLCDTFKRDWVLRNTDVAEVWGVGRRMTAHLESIGIRTAMDLANADPRTLRMKFSVVIEKTARELAGTACLELDDPAPPKQEICCSRMFGQRLQELPALKEAVATYMMRASEKLRAQGSLCKKIRVSIRTGMFNPEEAKYANGVVVHLPYPTDDVRLLTREAVDALDRIFRPGFKYSKAEVMLLDLCQPGDYTDDLFAVSQPADATRVMKVLDQINDRWGRGTLRSASVPAEPAWGMRREMMSRSYTTRLEQLWTVHCH

SEQ ID NO: 104200 - DNA, 1257 bp, Colwellia psychrerythraea 34H
  CDS (1)..(1257): transl_table=11
atgtatgctttagttgatgcagtatcattctacgcaagtgctgaaaaagtttttgaccccagcatacgtaataaacccgttgttgttttaactaataatgatggttgtatctgcgctgtctgtccgattgcaagacgccttggtattccaaaatttataccgtactttcaagttaaatcattgcttgaaaagcatggcgtggttgttcgttcttcaaattatgagttgtatgcggatttgagcgaacgaatgatgaatgtcatcggccgcttttgtgataaccagtatatatacagcattgatgagtcatttttatattttgatcattatgaaagctgcataaatgattggcacgaatatggacataaaataagaaaagccatttggaaagaaacgagacttcccgtcggtgttggttttggtgaaacagcaacactgtcaaaagcggcaaaccatgcagccaaaaaactctctggttttaatggtgtagccgttattaatagcgcagtaagcagagacaaaatactcaagcgcatggcggtagatgaggtatggggcatcgggcgaaaaatatcgaaacgattagggcttgagggtattaacaacgccgcgcagttagcagagcaagatcctaaacatatacgaaaacaatttagcgtagtaactgaaagaaccgtgaatgaattaaacggcatcagttgtttgtcttgggatgaggtgaaatcacccaaaaaagagattttctcaacacgaagttttggacagcgcattaccacaaaaaatgaattacgctctgcgttggtaacacatgcagccattgtaggaaggaaagtgagaagacaaaattcactcattaaaaagttaatgatatttgcctctaactcgccgcatgatgacttgtattacaagcaatccatggtttttccatttatcatagcgactgaaaatacctgtgaaatggcgcgcgcggtaaaccaagttattgattctatatacaaagcaggaataaaattttaccgttgtggtgtaggtgcaatcgaattaaatagtaaaacgtttatacaaccagacttatttatgcccgatcacactaatagtaacgtaatgaaatgcttagataatgtgaaccacagatacggagatagcaccttaaagctggccgctgaagggcatcatgaaaaatggcaaatgcgacgagcgtttttaagccctcaatacaccagtcagtggcgagacattcctaaaatacagtgctag

SEQ ID NO: 104201 - protein, 418 aa, Colwellia psychrerythraea 34H
MYALVDAVSFYASAEKVFDPSIRNKPVVVLTNNDGCICAVCPIARRLGIPKFIPYFQVKSLLEKHGVVVRSSNYELYADLSERMMNVIGRFCDNQYIYSIDESFLYFDHYESCINDWHEYGHKIRKAIWKETRLPVGVGFGETATLSKAANHAAKKLSGFNGVAVINSAVSRDKILKRMAVDEVWGIGRKISKRLGLEGINNAAQLAEQDPKHIRKQFSVVTERTVNELNGISCLSWDEVKSPKKEIFSTRSFGQRITTKNELRSALVTHAAIVGRKVRRQNSLIKKLMIFASNSPHDDLYYKQSMVFPFIIATENTCEMARAVNQVIDSIYKAGIKFYRCGVGAIELNSKTFIQPDLFMPDHTNSNVMKCLDNVNHRYGDSTLKLAAEGHHEKWQMRRAFLSPQYTSQWRDIPKIQC

SEQ ID NO: 104202 - DNA, 1275 bp, Salmonella enterica
  CDS (1)..(1275): transl_table=11
atgttcgctttggctgacgtcaactcgttctatgccagttgcgaaaaggtctttcgccccgatttgcgtgacaggtctgtggtggtcctgagtaacaacgatggttgtgtaatcgtacgcagcgctgaagcaaaaaaactgggcataaaaatgggggtgccgtggtttcaactgaggtcggcgaaatttccggagccggttatcgcgttctccagtaattacgccctctacgcatcaatgtcgaacagggtcatggttcacctggaagagctggcgccacgcgttgagcagtactccattgacgagatgtttctggatattcgcggtatagacagttgcatcgatttcgaggatttcggccgacagctgcgtgagcacgttcgttccggcacagggctgaccatcggcgtcggaatgggaccgaccaaaacgctggctaaaagcgcgcaatgggcatcgaaagaatggtcacagttcggaggcgtgcttgccctgacgttacacaatcagaaacgaacggagaaactgctgtcactgcaaccggtggaggaaatctggggtgtgggccgcaggatctcaaagaagctgaacacaatggggatcaccacagcactgcagctggcccgcgcgaatccaacgttcatcaggaaaaactttaatgtggttctggagagaacggtccgggaactcaatggagaaagctgtatttccctggaggaagcaccgccccccaaacagcagatagtctgcagcagaagctttggagaacgagtcacgacttatgaagcgatgcggcaggcagtctgtcagcacgctgaacgtgccgccgaaaagctgcgtggggaacggcagttctgcaggcatattgccgtgtttgtgaaaacatcgccgttcgccgtaactgagccctactacggtaatctggccagtgaaaaactgctcatccccacgcaggatacacgggacatcattgccgctgccgtcagagctctggacaggatctgggtggatggtcaccgttacgcaaaggcaggctgtatgctgaacgatttcacgccaaccggggtatcgcagcttaatttgtttgatgaagtacagccgcgggaacggagcgagcagctgatgcaagtcctggatgggattaaccatccgggcaaggggaaaatatggttcgccggtcgggggattgcccccgagtggcagatgaaaagggaactactttcgccagcttatacgacacgttgggcagatattcctgcagcgaaattgacttga

SEQ ID NO: 104203 - protein, 424 aa, Salmonella enterica
MFALADVNSFYASCEKVFRPDLRDRSVVVLSNNDGCVIVRSAEAKKLGIKMGVPWFQLRSAKFPEPVIAFSSNYALYASMSNRVMVHLEELAPRVEQYSIDEMFLDIRGIDSCIDFEDFGRQLREHVRSGTGLTIGVGMGPTKTLAKSAQWASKEWSQFGGVLALTLHNQKRTEKLLSLQPVEEIWGVGRRISKKLNTMGITTALQLARANPTFIRKNFNVVLERTVRELNGESCISLEEAPPPKQQIVCSRSFGERVTTYEAMRQAVCQHAERAAEKLRGERQFCRHIAVFVKTSPFAVTEPYYGNLASEKLLIPTQDTRDIIAAAVRALDRIWVDGHRYAKAGCMLNDFTPTGVSQLNLFDEVQPRERSEQLMQVLDGINHPGKGKIWFAGRGIAPEWQMKRELLSPAYTTRWADIPAAKLT

SEQ ID NO: 104204 - DNA, 1479 bp, Desulfovibrio desulfuricans G20
  CDS (1)..(1479): transl_table=11
gtgtgcttacacttgcggcagtaccggcatgcagcgcctgtgcgtgaaggagggatggctgtggatgtgaccgtactgggcagagctgcctgttcccgcgtgcggcatgacgggggaacaccgtccgcacccgcggcacagcggcaggggcgtccgttgtatgcgcttgtggactgcaacagtttttatgtttcctgcgagcgggttttcaggcccgaccttgtccgccgccccgtggttgtgctgtccaacaacgacggctgcatcattgcacgctcggcagaggctaaagctctgggtattcccatgggggccccgtggttcaaggtgcgcagacatgctgagtccgcgggggtgaccgtgttttcgtccaattatgccttgtacggtgatatgtcgtcacgcgtcatgcgggtgctggagcgtttctgtccggatgtgcatgtgtattccattgatgaggcttttatgcggctggacagcctgatcatgccgccgggtatgtcgccggagcggtatgcggcgtgtctgcggcgcgaggtgtaccggcgtacaggcattcccgtgtcggtggggctgggctgcaccaagactcttgccaagctggcaaacaggctgagcaaacagcagaatgccggagcgcgggccatggtgccggcggctttccggtatgccggagtattcaactttggagcagtgacagatcctgacgttatggatgcgttgctggaaacgctggacgtgacggatgtgtggggtgtgggggcgcgccatgcggggcgtctgcggacatggggcatacgcaccgcgcgggcgctgcgtgatgcaccggatgacagggtgcgcagatacatgagcgtgaccggtctgcacaccgtgctggaactgcgcggcatttcgtgtctgcctctggatgatgcgccgccgtcgcgcaggtcggttgtctcttcgcggtcattcggcacactggtgacgcacaaggagcatatgctcgaagctgtcacggcctatatgacacgggccgccgaaaaactgcggcgcgaacagcttgaagcgcactgcgtgggggttatgatcagcaccccgcgccacggcgacgggccgcgctatgccgacagcgcacaggtgcagcttgcggtgcccaccagccatacgccgcagctgatagtccgcgcccgcgccctgctggagagtatatggcgcgacggctaccggtaccagaaggccggcgtgatgctttcggggcttgaatctgcggtatcccgtcaggtttccatgctgcctgccctgcaggggacagggcggggactggaacggggaaggcggctcatggcggcggccgatgcggtgaatgcacgtttcggaaggggaacgctggaatacgcggcggccggtctgggaaggccgtggagcatgaaacaggaacacctgtcgccccgctacacttcggactggaaaaaactgccgcttgtgcgctga

SEQ ID NO: 104205 - protein, 492 aa, Desulfovibrio desulfuricans G20
MCLHLRQYRHAAPVREGGMAVDVTVLGRAACSRVRHDGGTPSAPAAQRQGRPLYALVDCNSFYVSCERVFRPDLVRRPVVVLSNNDGCIIARSAEAKALGIPMGAPWFKVRRHAESAGVTVFSSNYALYGDMSSRVMRVLERFCPDVHVYSIDEAFMRLDSLIMPPGMSPERYAACLRREVYRRTGIPVSVGLGCTKTLAKLANRLSKQQNAGARAMVPAAFRYAGVFNFGAVTDPDVMDALLETLDVTDVWGVGARHAGRLRTWGIRTARALRDAPDDRVRRYMSVTGLHTVLELRGISCLPLDDAPPSRRSVVSSRSFGTLVTHKEHMLEAVTAYMTRAAEKLRREQLEAHCVGVMISTPRHGDGPRYADSAQVQLAVPTSHTPQLIVRARALLESIWRDGYRYQKAGVMLSGLESAVSRQVSMLPALQGTGRGLERGRRLMAAADAVNARFGRGTLEYAAAGLGRPWSMKQEHLSPRYTSDWKKLPLVR

SEQ ID NO: 104206 - DNA, 1257 bp, Synechococcus elongatus PCC 7942
  CDS (1)..(1257): transl_table=11
atgttcgccctgattgactgcaacaacttctacgtctcttgtgaacgagtatttgatcccaagctgcaggggcagcctgtcgttgtcctctccaataacgacggctgcgtgattgctcgttctgcagaagcaaaagctctagggattcccatggggatccccttcttcaaagtcaaagacctgatatcacaacatcagattcaggtcttctccagcaactacgccctctacggcgacatgagccagcgagtgatgcaaaccctggcaacactctgtcctgatctagaggtctattccattgatgaagccttcttagacttctcaggatttcaagcccagcccctgcagcaaggtcaattgattcgtcaaaccgtcgggcagtggacaggcatccccgtctcgatcggcattgctgccaccaaggtactcgccaaagtagccaacaaactcgccaagcaaaatggtggtgtctttgtcctgtcgccatcaaaagtgcaagccgtcctcatgactctgcccgttgaagaagtttggggcatttccagtcgttggggtcagcggcttcgggctttgaacatcagtaccgccgccgaactccaggccactaaccttaatctgatgcgtcagcagttcaacatagttctcgagcggattgtgcgagagctacggggggaatcctgcttacccctcgaatccattgtcaatccgcagcaaagcttggtagtctctcgttccttcgggcagccaattacaacgctgccagagcttaaacaagccgtagcgacctacgtcagtcgagccgccgagaaactacggagccggcaactaacgaccagctatctaaccgtctttgtaagaacaaatcggtttcaagagaactatgaagcgcccaatgctagtcagggcttactcacgcccaccaatcacacggggaaattactggaaattgccctgcgttgcacagaatcgctctatcaaccaggacgagcctacaagaaagctggagtcctgtttcaagggttagggtcagcgcagtcaatccagcagagcctgtttgaggagtccgacagcgagaaaggagcagcgctgatggtgacgatggaccggcttaaccggcggtatggtcggcagtccctgcactatggagccacaggaactcgacaaccttgggccatgcgctccgaccagcgatcgccgcaatacacaactcgatggcaagacttacccgaagtccatgcaagagctcgagagatttga

SEQ ID NO: 104207 - protein, 418 aa, Synechococcus elongatus PCC 7942
MFALIDCNNFYVSCERVFDPKLQGQPVVVLSNNDGCVIARSAEAKALGIPMGIPFFKVKDLISQHQIQVFSSNYALYGDMSQRVMQTLATLCPDLEVYSIDEAFLDFSGFQAQPLQQGQLIRQTVGQWTGIPVSIGIAATKVLAKVANKLAKQNGGVFVLSPSKVQAVLMTLPVEEVWGISSRWGQRLRALNISTAAELQATNLNLMRQQFNIVLERIVRELRGESCLPLESIVNPQQSLVVSRSFGQPITTLPELKQAVATYVSRAAEKLRSRQLTTSYLTVFVRTNRFQENYEAPNASQGLLTPTNHTGKLLEIALRCTESLYQPGRAYKKAGVLFQGLGSAQSIQQSLFEESDSEKGAALMVTMDRLNRRYGRQSLHYGATGTRQPWAMRSDQRSPQYTTRWQDLPEVHARAREI

SEQ ID NO: 104208 - DNA, 1308 bp, Syntrophus aciditrophicus SB
  CDS (1)..(1308): transl_table=11
gtgagcgacttcctgttcagtctgcattcatggccgcaggcgattcttcacatcgacggcgatgccttctttacatcctgcgaagaggccattcaccccgaacttcgggggaagccgattatcgccggcggagagcgcggaattgtcgcctgtgccagttatgccgcgaaaaaacaaggcgtcatgcgtggcgtccccctccatcaggcccggaagatgtgccccggactggtgattcttccctcggactatgaaacgtacagcctgttctcccgacggatgttcaacgtgatgcggcgctttactccgcaggtggaagagtactccattgacgaagcctttgccgatatcaccgggatgcgtcgacccttgcgggcttcctatgaaacgatcgcagtcaacatcaaaaacgagattgcgagagagctgggcatcaccgtctccgttggcctgagcatcaccaaggtgctggccaaggtggcctcgaaacacaggaaacccaacggatttacatgcattcccggcaaaagcattgcgatataccttgaacacctccccgtggaaaagatatgggggatcggccatgccaccgccagttatctccataaaatgggggtccgaaccgccctggaatttgcccggctgccggaagttctcgtcaaaaagcgctttacaaaacccggcgttgaaatctggcgggagcttcggggcgactccgtttatccggtatgcgcggaagaaaagagtctctacgcttccatcagcaaaacaaaaaccttttccccggcaagcggcgatgcggactacctgttcgcccatctgatgcggaatcttgagtccgcctgcatcaaggcccggaggtatcatctggcggcaagccggattgcggccttcctgaaaagaaacgatttcagctatgcaggtcgggagatccgtctgaatcgcccttccgtttatcctctggaactgtcgatcgccctgcggaacctctttatcgatgtgtaccgcccgggcacactctataggtccacgggaatcgttctcctggaactttcaggagattcaggcacccaatacaccctttttgacgatgtcgtaagagcggatagggtgcgcgatatctacagggtcacggatgaagtcggtgcaaaatacggcaagcacagccttcacctgggggcgtctcatttcatcgagctgctgggaagaggaaagcggggcgaacccactgccagggaaaggacgcgtttcctgggagaaaccggacgcagacacatcaatcttccccttctgcatctgaaggtatag

SEQ ID NO: 104209 - protein, 435 aa, Syntrophus aciditrophicus SB
MSDFLFSLHSWPQAILHIDGDAFFTSCEEAIHPELRGKPIIAGGERGIVACASYAAKKQGVMRGVPLHQARKMCPGLVILPSDYETYSLFSRRMFNVMRRFTPQVEEYSIDEAFADITGMRRPLRASYETIAVNIKNEIARELGITVSVGLSITKVLAKVASKHRKPNGFTCIPGKSIAIYLEHLPVEKIWGIGHATASYLHKMGVRTALEFARLPEVLVKKRFTKPGVEIWRELRGDSVYPVCAEEKSLYASISKTKTFSPASGDADYLFAHLMRNLESACIKARRYHLAASRIAAFLKRNDFSYAGREIRLNRPSVYPLELSIALRNLFIDVYRPGTLYRSTGIVLLELSGDSGTQYTLFDDVVRADRVRDIYRVTDEVGAKYGKHSLHLGASHFIELLGRGKRGEPTARERTRFLGETGRRHINLPLLHLKV

SEQ ID NO: 104210 - DNA, 1257 bp, Desulfitobacterium hafniense Y51
  CDS (1)..(1257): transl_table=11
atgccggaacataaagcgaaggactgtgatattgttctcttcgatgccaacagctattatgccagctgtcatcaggcagtaaatcctgaactccagggtaagcccctgctggtggctggagatcccaggaaccggacagggattatccttacggccagctatgaggcgcggttttatggggttaagacggccatgcctttgtttcaggctttaaagctgtgcccggaggcggtggtgctgtccccggattttcggctgtacctggacctcagcaggaaaatgtgggagatcgtggagcggtatactgacgaagatcatattgaagtggtctctgtggatgagtgctttgcggattttcgaggttcccatcttctttttggcagtacggaagagatagcccgccgggtgcaaaaggagattctggaagagttaggcctgggggtatcggtgggggtcagctactgcaagatttttgctaagctggccagcgactaccagcgggacccgaagaccagagtcaagcttccccgcagtttcaccgtgatcgctccaggtgagctggaaagcaaagtatggcccttaggggtgggtgagttgtccggcatcggccggcagacggaaaaacagctggcggacctggggattcgaaccatcggggatttggcgcaggcttctcctcaggcacttcgcaagggatttggtgtctacggggccaaactctatgcatgggccaatgggcgtgatgaacggcctgtaaccccggaagatcaggcgaaggatcattccatcgggcggtccatcaccttgcctcaggatataacagacccggagcaaggagcggaggtcctgttgtttctggctgacagcgtgggcagaaaggtccgccgggaggataccaaggctcagactcttacggtacaggtcaaggatgcagagtttaaaaccaggacctattccacgaccctttttgagcctacggatagtaccgatgtgatctatcgggagagtcttaaactcctggccaaatggccccaaggaaaacccatccgcctgctgggtctgaccgccagccgtctgcaaaagggtatagaacagctcagtctgttccaggaagagagcgaggaacaaactgagctggatcgaacggtggatgaacttcgggataaatatggctccgggatcctgatgcgcggaacccagtacctttccttaagccgcaagctggcgggacgaagcacgaaggacaaacgggagtaa

SEQ ID NO: 104211 - protein, 418 aa, Desulfitobacterium hafniense Y51
MPEHKAKDCDIVLFDANSYYASCHQAVNPELQGKPLLVAGDPRNRTGIILTASYEARFYGVKTAMPLFQALKLCPEAVVLSPDFRLYLDLSRKMWEIVERYTDEDHIEVVSVDECFADFRGSHLLFGSTEEIARRVQKEILEELGLGVSVGVSYCKIFAKLASDYQRDPKTRVKLPRSFTVIAPGELESKVWPLGVGELSGIGRQTEKQLADLGIRTIGDLAQASPQALRKGFGVYGAKLYAWANGRDERPVTPEDQAKDHSIGRSITLPQDITDPEQGAEVLLFLADSVGRKVRREDTKAQTLTVQVKDAEFKTRTYSTTLFEPTDSTDVIYRESLKLLAKWPQGKPIRLLGLTASRLQKGIEQLSLFQEESEEQTELDRTVDELRDKYGSGILMRGTQYLSLSRKLAGRSTKDKRE

SEQ ID NO: 104212 - DNA, 1284 bp, Pseudomonas putida
  CDS (1)..(1284): transl_table=11
atgaactttgaaccccgccgacctgtgttcggcctggtcgacgggaacaagttttactgcagctgcgagcgtatttttcggcccgagatgaggggtaaaccagtggtggttctttcgaactcggatggctgcatcgtagcttgcaccaatgaggccaaagcgcttggtttgaagatgggagatccatatttcaagatccgggcatttctggagcgcaacggtgttgcagcgttcagcagcaattacacgctctacggcgagttatcgcacaggatgaccatggctacagcgtccctggtcagtgccgtggaacagtattcaattgacgaatccttcgtacgcttagaggaccagcgcgaaccattggtggacgtgggccgggctattcaggcgcgcgtgctgcagtgggtcgcgttgccagtcggtgtgggcatcggccacaccaaaacgctcgccaaggcagcacaatatgcctcgaagatctggcgagagaaaaccggtggtgttgtagacctgcgcaagccggaggcggttgagtggttgttgcgccggatgcctgtcgaagaagtgtggggcattggcaggcgtatgcgcgataacctggccagtgagggcattaaaacagcgtgggagctatccctcgctgagccgcgaacaatgggccgcaaatactcagtggtcttggaacggacgatcagggagcttcgcggcgagtcctgcatcgacatggaacaaagcccaccggacaaacagaccatttgcttaagcaagatgtttggtcagcgcgtccacacaatcgatgggcttggccaggcgttggccacctatatccacaaggccgctgagaagctgcgcaagcagcgatctttgtgcggtggcctgcggatcggcatacagacctcgttccatggcgacggtccgaagtacgccaatgcagccacgatcattcccgactacccaacagatgacgtgcgcgtgctgacgaagcacgcgctacgtgcgttggaaggcatctataggccgggctttgcgtacagcaaagcagaggtcatgttgatggatctgcgaaagcgtggtgagtacacgcaagatctgttcacgcccagtcaaccggcgcgcactgacgcgctcatgagcgttatggacaagatcaacaggcggtggggacatgactgcttgcgcactgcagctgtgcccctgtcgccggacaggggcatgcgtagggctctactgagccctagctacatgaccagttgggatcagatgtggacagtaaaatgctga

SEQ ID NO: 104213 - protein, 427 aa, Pseudomonas putida
MNFEPRRPVFGLVDGNKFYCSCERIFRPEMRGKPVVVLSNSDGCIVACTNEAKALGLKMGDPYFKIRAFLERNGVAAFSSNYTLYGELSHRMTMATASLVSAVEQYSIDESFVRLEDQREPLVDVGRAIQARVLQWVALPVGVGIGHTKTLAKAAQYASKIWREKTGGVVDLRKPEAVEWLLRRMPVEEVWGIGRRMRDNLASEGIKTAWELSLAEPRTMGRKYSVVLERTIRELRGESCIDMEQSPPDKQTICLSKMFGQRVHTIDGLGQALATYIHKAAEKLRKQRSLCGGLRIGIQTSFHGDGPKYANAATIIPDYPTDDVRVLTKHALRALEGIYRPGFAYSKAEVMLMDLRKRGEYTQDLFTPSQPARTDALMSVMDKINRRWGHDCLRTAAVPLSPDRGMRRALLSPSYMTSWDQMWTVKC

SEQ ID NO: 104214 - DNA, 1287 bp, Mesorhizobium sp. BNC1
  CDS (1)..(1287): transl_table=11
atgacggatcaagccgccaacatcctgcacgccgacctcgacgccttctatgccagtgtcgagcaactcctgaatccagccctgcgtggcaagccgatcgcagtcggcggcggcgtggtcctggccgccagctacgaagccaaggcgttcggcgtcaggggcggcatggccggcaggaaggcgcgggaactctgcccgcagctcgtcttcgtcggcggccatttcgaggactatcaacgccttggtgacgccgcaattgccatcatcggcgacttcacgccgctggtcgagcgcatctcgatcgacgaagccttcgcggacgtcaccggctgcacccacctcttcggtccgccagccgagatcgctgccgagatccgccgacgcatccgcgaccggctcggcctgccgatctcggtcggcgtagcgcgcacgaagcacctcgccaaaatcgcctcgcaggtcgccaagcccgatggcctcgtcgtcgtcgatccgacccgtgagatcgactttctccatcccctcccggtcgggctgatgtggggcgtcggcccagtcacgcaggtcaagctgcgcgagcagggtattctcaccatcggccagttggcggaaacgccaggccactcactcgcacgcctgctcggcccggcagccggcgagaagctgtcggcgctcgcctggaatcgcgatgcgcgcgaaatccgcacccacacccgcgcccgctcagccggcgcacagtcggcgctcggtcgaaagccggccaccgaacaggtcttcaagcccgttgttcgccatctggccgatcgcgttgccgcgcggctgcgcgacaaggcgctcgcgggccgcacgatcaccgtgcgcgtgcgcttcgtcgacatgcacgccgttacgcgctcgctgaccctcgacgcgccgatctcggcgacagcgatgctggcagagatcgccgaggagctggtgcgcgccgccttggccgatcatccgcgagagcggttcatcacgctggtcgccgtctcgatctcgcatctgcgccagcagcctgcgatccagctcgacctcccgctcggcctgccggacgaaaaacaccggcccggcacccggcagggcatcgctcgctggtcggccgaccgggccatggacgccgtgcgcgcccgcttcggccgcgacgccttgggctatgccaccgcgcagctcgaccgcgggcgttcagtgccggacgccttcagggaactggccgaaaagaacctcggaaatgttgatcgcggcgatggctctgacatagactga

SEQ ID NO: 104215 - protein, 428 aa, Mesorhizobium sp. BNC1
MTDQAANILHADLDAFYASVEQLLNPALRGKPIAVGGGVVLAASYEAKAFGVRGGMAGRKARELCPQLVFVGGHFEDYQRLGDAAIAIIGDFTPLVERISIDEAFADVTGCTHLFGPPAEIAAEIRRRIRDRLGLPISVGVARTKHLAKIASQVAKPDGLVVVDPTREIDFLHPLPVGLMWGVGPVTQVKLREQGILTIGQLAETPGHSLARLLGPAAGEKLSALAWNRDAREIRTHTRARSAGAQSALGRKPATEQVFKPVVRHLADRVAARLRDKALAGRTITVRVRFVDMHAVTRSLTLDAPISATAMLAEIAEELVRAALADHPRERFITLVAVSISHLRQQPAIQLDLPLGLPDEKHRPGTRQGIARWSADRAMDAVRARFGRDALGYATAQLDRGRSVPDAFRELAEKNLGNVDRGDGSDID

SEQ ID NO: 104216 - DNA, 1260 bp, Cytophaga hutchinsonii ATCC 33406
  CDS (1)..(1260): transl_table=11
atgtacgcattaatcgactgcaactgtttctacgtttcctgtgaacgtgtcttccgtcccgacctgcggcagcagccggttgttgtgctttctaacaacgacggctgtgtgatctcgcgttccgatgaagctaaagcaatcggtgttaaaatgggtgaaccattttttaaaatgaaagagctggtgcgtaatggtaaggtgactgctttctcttcaaactatacgctgtatggggatctgtctgatcgtgtaatgaaaacgcttgcttccattgtgccggatatagaagtctattccattgatgaagcatttttgcatctgaatgagagccatacggatttagaaacacttggccataccattcgcaatacagttaaacagcataccggaatcccggtaggcgtgggcattgcgccaaccaagacactcgccaagctggcgaaccgtctttcaaaaaaaacaggcggcgtacatattatttatccggataatattcaggaaaagctgaatgcgtgcgcactgcaggatgtatggggcatcggcaggcggaatgcgaaacggctgcaggcaaattatgttgataccattgagcagtttgtgaatcagcgcgaagaatgggtacgccagcatttttcagtgatcgggctgcgtacatataaggaattaaaaggaattccgtgcattgatatggaagatgaattgacggaaaaaaaatccatctgtacttcacgttcattcggtgaactgcagaatacatttgcctctatccaggaagctatagccacacacgctgccagctgtgccgagaaattacgcaaacaaaaatgtgccgcagccggtatgtatgtgtccttatcaaaaagccgctttaccgaccaggaaggcgataaatattttggcacctacattaaattaccacaggcaaccaacaatacagccacgttgattcaatatgcttcaaaagggttagagctcttgtttaagaaagatgtctattataaaaaatgtggcgtaaccgttattgatattgttcccgaagaaaagatccagttaaatttattcgaaccccaaaagaatgcgcggttgcatgcattggaagacacgattgataaactgaatcagaaactgggaaagaatgtccttcggcaagccatacaaggtaatgataacaatacctggaagctgcgctgtgaaaacatgtcgcccaactatacgaccaggataggggagatactggtcgtgcatgtaggtaataagtaa

SEQ ID NO: 104217 - protein, 419 aa, Cytophaga hutchinsonii ATCC 33406
MYALIDCNCFYVSCERVFRPDLRQQPVVVLSNNDGCVISRSDEAKAIGVKMGEPFFKMKELVRNGKVTAFSSNYTLYGDLSDRVMKTLASIVPDIEVYSIDEAFLHLNESHTDLETLGHTIRNTVKQHTGIPVGVGIAPTKTLAKLANRLSKKTGGVHIIYPDNIQEKLNACALQDVWGIGRRNAKRLQANYVDTIEQFVNQREEWVRQHFSVIGLRTYKELKGIPCIDMEDELTEKKSICTSRSFGELQNTFASIQEAIATHAASCAEKLRKQKCAAAGMYVSLSKSRFTDQEGDKYFGTYIKLPQATNNTATLIQYASKGLELLFKKDVYYKKCGVTVIDIVPEEKIQLNLFEPQKNARLHALEDTIDKLNQKLGKNVLRQAIQGNDNNTWKLRCENMSPNYTTRIGEILVVHVGNK

SEQ ID NO: 104218 - DNA, 1257 bp, Shewanella sp. MR-7
  CDS (1)..(1257): transl_table=11
atgtacgccttagtcgatgccaactcgttttactgctcggctgagcaagtgttccgccccgattggcgcggtaaaccgattatcgtcctaagcaataacgatggctgtatcgtggcagccaaccgccaggccagagaacttggggtccccaaatttgcgccgtactttcatgtcaaagagcagtgcgccaaactaggggtgatagtgtgctcaagcaactacgagctttatgccgatttgtcagcaaaaatgatggaaatcatcggccgcttcgctcccgagcaacatatttactccattgatgaatcgtttttatccttcaagcactgccactccagcattcccagcttaaaaacgcaaggactgcgtatccgtcaaaccgtttggaaagaagctcgcttacccgtttgtgttggtataggtgcaacactcacattggctaaaatcgccaatcatgctgccaaaaaactacctggttatcatggcgtttgcctgattgataatgacccacaacggattgaaattctcaagcaactctcagtcggtgacgtgtggggaattggacgacggctcagcaaaaagctggcgagtatgggcattcagaccgcttacgaccttgcgcaaatgccagcaggccttgcacgcaagcaattcagcatagagatagagcgaacagtccgagaacttaatggcactgcctgtaaacaatgggaccacacacgggcggataaacaacagatattttccactcgctccgtgggtgagcgcatcatggattttgattcgttactacaggcattgagcaaacacgttggaattgcagcggcaaaagctagggcgcaaggttcgtgctgcaaatcgatgctgatttttgccaataactccccttacgacgaacaacccgtcggttttaaatcccttatccatttccccacggcaaccaattgcacgattgaaatgacgcaggcaatgtctttggctgccccaaaattatttcgaccaggaattaggtactacaagataggtgtaggcttgattaatctcgaacaggatagatatcagcaactcgatttgttcaatcgtcctaaaaccaaacccatactaatgaacgcactggatggaataaattcccgctatggacaagacaccttatttttggcagcacaaggcatagaacaaaaatgggcaatgcggcgggcattactaacgccacaatacaccactctgtggggcggcataccgagagtcaagtgctaa

SEQ ID NO: 104219 - protein, 418 aa, Shewanella sp. MR-7
MYALVDANSFYCSAEQVFRPDWRGKPIIVLSNNDGCIVAANRQARELGVPKFAPYFHVKEQCAKLGVIVCSSNYELYADLSAKMMEIIGRFAPEQHIYSIDESFLSFKHCHSSIPSLKTQGLRIRQTVWKEARLPVCVGIGATLTLAKIANHAAKKLPGYHGVCLIDNDPQRIEILKQLSVGDVWGIGRRLSKKLASMGIQTAYDLAQMPAGLARKQFSIEIERTVRELNGTACKQWDHTRADKQQIFSTRSVGERIMDFDSLLQALSKHVGIAAAKARAQGSCCKSMLIFANNSPYDEQPVGFKSLIHFPTATNCTIEMTQAMSLAAPKLFRPGIRYYKIGVGLINLEQDRYQQLDLFNRPKTKPILMNALDGINSRYGQDTLFLAAQGIEQKWAMRRALLTPQYTTLWGGIPRVKC

SEQ ID NO: 104220 - DNA, 1266 bp, Magnetococcus sp. MC-1
  CDS (1)..(1266): transl_table=11
atgagctatgcgctggtggattgcaacaatttttatgcctcctgcgagcgcctttttcaaccgcacctggagggcaagccggtcgttgtgctctccaataacgatggctgcgccatcgcccgctccaacgaagccaaacagctgggcattgccatgggggcccccctgcatcagatccaggcactcatcaagcagcaccaagtggcgctcttctcctccaactatcccctctatggggatctctccgcccgcgtcatgcgcaccctggaacagttggcaccgcgcgttgaaatctactccattgacgaagcctttttagatctccaaggcatgcctgcgccccaacgccaaatcctcggcagaacgatccatcaacaggttaaacgctggacgggtatccctgtttcggtgggcattggccccaccaaaaccctggctaaagtggccaaccgtttcgccaaaaaatcgcccaagaccgagggtgtactggaccttagcgacccccaatggtgccgcaaggcgctacaccagctccccgttggcgaggtgtggggggtggggccgcgctgggccaaacggcttaaccaagcaggtattgataccgccctacagcttagccgcatgcccccacccttggcacgccaacagtttaatgtggtgctggaacgcaccgtgcgagagctgcgtggtgaatcggttatcccctttgcggcgctgcctgccgcccgtcaatccatcgccaccacccgcacctttggtcaaaaaatccatacgcatgacgaaattaaagaggcgatctccagctttaccgtacgcgccgctgaaaaattgcggaagcaggggttgctggccgccgccctgcacctgtttatcaccaccaaccgttttagcgagcaggacctccagtataaaaacagcctcacctggagcttccaacaaccccaggatgacaccctaaccctgctgaccggggcacacgccgcgctggatgccatctaccggcccggctaccgctaccaaaaggccggggtgatcctgttggggctggtttcggcccagcattttcaaccttccctgtttgcgcccccacccaggctgcccaacagtcgcgccctgatgcgcaccctcgacggccttaaccaaaagatggggcgcggtaccgtgcgttttggtgccgaaggcccccccaagccctcctggggcatgcgccagttgcagagatctcccgcctacaccacccgctggagcgatctaccccaagtttag

SEQ ID NO: 104221 - protein, 421 aa, Magnetococcus sp. MC-1
MSYALVDCNNFYASCERLFQPHLEGKPVVVLSNNDGCAIARSNEAKQLGIAMGAPLHQIQALIKQHQVALFSSNYPLYGDLSARVMRTLEQLAPRVEIYSIDEAFLDLQGMPAPQRQILGRTIHQQVKRWTGIPVSVGIGPTKTLAKVANRFAKKSPKTEGVLDLSDPQWCRKALHQLPVGEVWGVGPRWAKRLNQAGIDTALQLSRMPPPLARQQFNVVLERTVRELRGESVIPFAALPAARQSIATTRTFGQKIHTHDEIKEAISSFTVRAAEKLRKQGLLAAALHLFITTNRFSEQDLQYKNSLTWSFQQPQDDTLTLLTGAHAALDAIYRPGYRYQKAGVILLGLVSAQHFQPSLFAPPPRLPNSRALMRTLDGLNQKMGRGTVRFGAEGPPKPSWGMRQLQRSPAYTTRWSDLPQV

SEQ ID NO: 104222 - DNA, 1275 bp, Prosthecochloris aestuarii DSM 271
  CDS (1)..(1275): transl_table=11
atgttcgctctggttgactgcaataatttttacgcttcgtgcgagcgggtgttcaatccggcgcttgtcgggcggccggtcgttgtgctgtcgaacaacgacgggtgcgttattgcccgttcagaggaggcgaaggtcctggggatcgggatgggcgccccggagttcaagtgccgcgaactgctgctgcgccacggggttgctgtcttttcatccaactatccgctctatggcgatatgtcttcgcgggtgatgacgacgctggcaggttttgcgccgtcgatcgaggtgtattcgatcgacgaatcttttctcgatctcagcggtttcgggcgctttgaccttgagcgctacgggagcgagatccgaaggacagtacggaggcataccggtattcctgtgggggtcgggattgccgcaaccaaaacgcttgccaagattgccaaccggattgccaagaagcacctggagtatgatggggtatgcgtgcttgagcgcgatgcggagattcagcgtgcgctgaagctgatcgcggttggtgatatctggggcgtcggacggcagtgggcgagtttcctgcagacgaacggtattggtacggcagctgattttgccgctgcatcgcccgcctggatcaggcagcatatgcatgtgaccggggcacgggttcaggctgagctgaacgggcactcatgtctggctctggaagcggtgaggccggtgaagaaaagcatctgcacctcccgctcgttcgggcggacggtgagatcgaaagaggatctgcgacaggcggtggcgacctttgccggacggtgcgctctcaagctgcgccgtgaaggtctccgaacttcgcttgttacggtctttgccgcaacgagccgtttcaatcacgagagcgagcgctactgggggacgagaactcttgctctgcaggagccgtcgcaggattccattgtcctgctcaacgccgcggagcagctgctcgatgcactctatcagcccggctatgagtaccggaaagcgggcgttctcctcgccggtctgaaccctgcagacgctcccggagcagcgctgtcactgtttcctgaagctccttgcactcgtgacgggcagcaccgtaaactcatgcagattatggacgccgtcaaccggcgttacggccacggcaccatccatctcgcagcagaagagaccgaagcatggaaacccctgcagaaacggctttcgccacgttacaccacccggtggtcggagattctggaggttcatagctga

SEQ ID NO: 104223 - protein, 424 aa, Prosthecochloris aestuarii DSM 271
MFALVDCNNFYASCERVFNPALVGRPVVVLSNNDGCVIARSEEAKVLGIGMGAPEFKCRELLLRHGVAVFSSNYPLYGDMSSRVMTTLAGFAPSIEVYSIDESFLDLSGFGRFDLERYGSEIRRTVRRHTGIPVGVGIAATKTLAKIANRIAKKHLEYDGVCVLERDAEIQRALKLIAVGDIWGVGRQWASFLQTNGIGTAADFAAASPAWIRQHMHVTGARVQAELNGHSCLALEAVRPVKKSICTSRSFGRTVRSKEDLRQAVATFAGRCALKLRREGLRTSLVTVFAATSRFNHESERYWGTRTLALQEPSQDSIVLLNAAEQLLDALYQPGYEYRKAGVLLAGLNPADAPGAALSLFPEAPCTRDGQHRKLMQIMDAVNRRYGHGTIHLAAEETEAWKPLQKRLSPRYTTRWSEILEVHS

SEQ ID NO: 104224 - DNA, 1272 bp, Sulfitobacter sp. EE-36
  CDS (1)..(1272): transl_table=11
atgaagcggcctgttgccatcagcgacagcgccaacttctatgtgagcgctgagaggatattcgatccaacgctaaagaatgtcccagtgatcgttctatcaaacaacgatggctgcgccatagcgcgcagcgatgaggccaaggccttggggatcaagatgggcactccgctgcatcacatccgcgataaggttgaagcccatggcatacgggtgttcagctcaaactacaccctctatggcgacatctctcgtcgggtggttgaggtctacgaagactttacgccaaacgttgagatctattccatcgatgaatgcttcctcgactttgttggtttcaaagatcgcacctcacatgccaaggcactgcgtgcagcggtcttgagacgagtaggggtgccagtacgcatcggcatcgccccaaccaagacccttgcgaaatgtgcgaacgacattgccaagaagaaccccatctttgctggggttctggatatgatggacgagagccttgcaagctggctgctgccgcgtgtgccagtcggggacatctggggcgtgggtcgaaaaaccaccgacaagttgaaggccctgggtgtacacacggcagctgatcttcgtgatctgccaatccggcgggcaagggctgtcggcaccgtggtgctggagaggatcgtgctggagttacagggtgaggcctgtctcgcctttgaggacgtagagccacagcgcaaaggaatggccgtaacacgatcagcaggcactccgatggcagacttcgacacgctgttccaggcgatcaccgcgcacgcatcgcggggcgctgaaaagctacgccagcacggtttggtcgctggcacgctgactgtgtttttccacaccaataagcaccggccagatcgtcctcagtatacagcttccagaaccacccgaatgaccccgatgtcgtcggatacctttgatctcgttgaagccgcacgacgctgtgcggaagctggatggccaaagtcggacgctggaagctttggctttaccaaggctggtatcatgctgaatgacctggtgcggttcgaagatcgtcctcaaacgctcttcgatcaagcgcgaacgaaatccccggctttgatgaaggctctggatgacgtgaatgatcggtttggaaagaagacgatggttcttgccagcgaaggtatgaagcaggcgtggcgattgcgcgcagatcatcgaagcccgcgctataccacgcgaatggaagacctgccggtggtgagatag

SEQ ID NO: 104225 - protein, 423 aa, Sulfitobacter sp. EE-36
MKRPVAISDSANFYVSAERIFDPTLKNVPVIVLSNNDGCAIARSDEAKALGIKMGTPLHHIRDKVEAHGIRVFSSNYTLYGDISRRVVEVYEDFTPNVEIYSIDECFLDFVGFKDRTSHAKALRAAVLRRVGVPVRIGIAPTKTLAKCANDIAKKNPIFAGVLDMMDESLASWLLPRVPVGDIWGVGRKTTDKLKALGVHTAADLRDLPIRRARAVGTVVLERIVLELQGEACLAFEDVEPQRKGMAVTRSAGTPMADFDTLFQAITAHASRGAEKLRQHGLVAGTLTVFFHTNKHRPDRPQYTASRTTRMTPMSSDTFDLVEAARRCAEAGWPKSDAGSFGFTKAGIMLNDLVRFEDRPQTLFDQARTKSPALMKALDDVNDRFGKKTMVLASEGMKQAWRLRADHRSPRYTTRMEDLPVVR

SEQ ID NO: 104226 - DNA, 1260 bp, Pseudoalteromonas tunicata D2
  CDS (1)..(1260): transl_table=11
atgtatgcgttagtcgatgctgtttcattttatgccagtgctgaaaaagtatttgaccctgcaatacgatttaaacccgtagtggtattaactaacaatgatggctgtatttgcgctgtatgccctatcgctaaaaaattaagcattccaaagttccagccgtattttaaagtgaaaccttttttagatgcacataaggtagtggttcgttcttctaattatgagctttatgcggatttaagtgagcgcatgatgacggtgatcaaccgatattgtgataatcattatgtgtattctatcgatgaatcatttttacagtttacaggttttcaaaatatcatcagtgattggtttacctatggcaaaaccattcgcagagctgtatggcgtgaaacgggcttacctgttggggttggctttggcccaacaccgactcttgcaaaagcagccaatcatgccgccaaaaagctggctgggtttcgaggcgtagccgtgattaatgatgaacaatcacggaaaaatattttgtcacaaatgagcgtaaccgatgtttgggggattggctcacgccttggcaaaaagttaacgtttttaggcatccattctgcgctcgatctcgccaatcaaaacccaaaaatgatgagacgacaatttagcgtggtggtagagcgaaccatcaacgagctcaacggaataacctgcttaagttgggatgatgttaaacaaaataaaaaagagattttttcaactcgcagttttggtgaacgaatttttgatgcccacactttaaatgcagcactggttactcatggctcaattgttgccaaaaaacttcgaaatcagcattcgttaaccaaaaaactgctgatttttgcatccagttcggttcacgaagacaactattataaaaaatccattctctatgattttgcagtgcccacctgtgacactattgtaattgccaacgctatcgccgaagtattgccacaaatatttaaagccaatacgcgattttatcgttgtggggttggggcgattgaactggccgatagcaaatttcagcaaaaagatctttttgcaacaaccacagatcaaccagaactcatgaagtgcttagattcgattaataaacgctatggcacaggtactctttctcttgcctgcgaaaaaaaaacgcagcactggcaaatgaaacgcgcattattatcgccacaatacaccacccgctggtctgatatccctgtagtcgactgtaattag

SEQ ID NO: 104227 - protein, 419 aa, Pseudoalteromonas tunicata D2
MYALVDAVSFYASAEKVFDPAIRFKPVVVLTNNDGCICAVCPIAKKLSIPKFQPYFKVKPFLDAHKVVVRSSNYELYADLSERMMTVINRYCDNHYVYSIDESFLQFTGFQNIISDWFTYGKTIRRAVWRETGLPVGVGFGPTPTLAKAANHAAKKLAGFRGVAVINDEQSRKNILSQMSVTDVWGIGSRLGKKLTFLGIHSALDLANQNPKMMRRQFSVVVERTINELNGITCLSWDDVKQNKKEIFSTRSFGERIFDAHTLNAALVTHGSIVAKKLRNQHSLTKKLLIFASSSVHEDNYYKKSILYDFAVPTCDTIVIANAIAEVLPQIFKANTRFYRCGVGAIELADSKFQQKDLFATTTDQPELMKCLDSINKRYGTGTLSLACEKKTQHWQMKRALLSPQYTTRWSDIPVVDCN

SEQ ID NO: 104228 - DNA, 1311 bp, Photobacterium sp. SKA34
  CDS (1)..(1311): transl_table=11
atgactatgtctgaaattatcacaggtaaacacgatcaagtgtgggcattagtggacgccaagagtttctattgttcatgtgaacagttgtttgatccaaccttagtgaataagcccttagttgtactttctaataacgatggttgttgtgttgctctttctgatcaagcgaaagcacttggtattcaacgtggtgcgccatggtttaaagttgaacgaaatgccagtatgaaaggtgttcacgtacgtagttcaaattacaacttatatgccgatatgagtcgccgttttattgaagagctctctaagttttctccgtgtattgaacaatattcaatagatgaagcctttgttcgtctagatggttttaagttagatcaattgcacgattatggtcgagaaattaaaaacactatttataaaaatattggattacccgttcgcgtagggattggtgcaacaccaaccttggcaaaattgggtaatcatgcagccaaagtgtatgagagacaggtcaatggtgtcattcaaatcgatagtgattataaaagggaatggttactagctcgtacggaaattcaaaatatttggggaattggaccaaaaacggcaacgaggttacgtacatcaggtattgataatgcactccaactatctcaaaaaaacgcgcaagaaatgcgtcgagtatggagtgtcgttcttgcacgtacagtgatggaactgcaaggcgtcacgtgtattgcaccaggtgatattgatgaaacccgcaaacaaattttgtcgagtagaagtttcggtcaaggcattacagaatttgaagagttaaaatccgctttggcttttcattgtcagcgagcgggagaaaaactgcgcaaacaaggaagccaagcaaataccgtaggtgtgttcttacgtactaatcgctacaagcaattaccacagcgaaaccgaagtagcgcagtagcactgatgtgcccaagccaagataactataagtttattgaatcagcattacagcagcttaaacagctctataaagaaggctatgagtatcaaaaagttggtgtgatattagatgaactgacgccagctgaaaataatagctttcaattagatatgtttgataccagtgattatgatgaagctaaacggcgagagttaatggcaattaccgatatgatgaatgcgaagtttaaaaatggcattaaacccgcatctgttattgccacctctaactggcatatgaagcaagcacatcgttctaatcgttggactactcgacttgatgaattaccgattgcaaagtgttga

SEQ ID NO: 104229 - protein, 436 aa, Photobacterium sp. SKA34
MTMSEIITGKHDQVWALVDAKSFYCSCEQLFDPTLVNKPLVVLSNNDGCCVALSDQAKALGIQRGAPWFKVERNASMKGVHVRSSNYNLYADMSRRFIEELSKFSPCIEQYSIDEAFVRLDGFKLDQLHDYGREIKNTIYKNIGLPVRVGIGATPTLAKLGNHAAKVYERQVNGVIQIDSDYKREWLLARTEIQNIWGIGPKTATRLRTSGIDNALQLSQKNAQEMRRVWSVVLARTVMELQGVTCIAPGDIDETRKQILSSRSFGQGITEFEELKSALAFHCQRAGEKLRKQGSQANTVGVFLRTNRYKQLPQRNRSSAVALMCPSQDNYKFIESALQQLKQLYKEGYEYQKVGVILDELTPAENNSFQLDMFDTSDYDEAKRRELMAITDMMNAKFKNGIKPASVIATSNWHMKQAHRSNRWTTRLDELPIAKC

SEQ ID NO: 104230 - DNA, 1266 bp, Oceanospirillum sp. MED92
  CDS (1)..(1266): transl_table=11
atgtatgcgctggtggattgtaatagcttctatgccagttgtgagcggctgtttcgtcctgagttaaaggataaggccgtcgtggtgctctccaataacgatggttgcgtggtggcacgctcggcagaggcgaaagcgctggggattaaaatggcggtccccttctttgaagtgagggaattttatgagcgtgggcagttacaggtattttccagcaattacgccctatacggggatctctccgcacgggtaatgaccacgctggaagagctggtgcctgaggtggaggtttattcaattgatgaggccttccttggcttgagcggcatgcgaaccgagccggatctgactgagctagggcataagatcataaagcggatcaaccactggatcggtatcccggtcggggtcggtatagccgagacaaagacgctggcgaagctggcaaattatgcggccaagcattacccgcagactcagggtgtggtggatctttcgaaaccgggctggcgtgaacgcctgcttaaaaaaaccgatgtatcggaagtttggggggtggggcgtcgaacggtggagaagctgcgtgcagaagatatctacactgcggctgatctggcgagagccgatgcggaaaccatgcgacgtcgttattcggtggtgctggaacgaacgattctggaactgcggggtatcccctgtatcggatttgatgaacagccgaatcctaagcagcagatcttatgcagccgtaccttcagtcatcggttaacctgtctacagccgatgcaggaagcgatccgggagtatgcggtacgcgcggccgaaaaactccgcgaagagaaacgcctgaccagtagtgtttcgatctatatacgcaccaatccaaatgccaagtttgagatgaaatatgccaatggtgcgacttatccactgcctagcccgaccaatgacagccgagtgataatgaagatcgccctgcgtctgttacaagggatctaccgtgatggctatcgttatatgaaagctggggtgatactgaatgctttgcagccagaggataactaccaggcggacctgtttaaccctgatttgtgcacaactaaatccctgcaactgatgaaaactctcgatcaggttaatcagcgttttcatcgtgggctcagctttgccggacaggggcagaagcaggattgggccatgcagcgccagcacttgtcgcccagatatacgacaagttggcgggagttgaaggtggttcgggcttga

SEQ ID NO: 104231 - protein, 421 aa, Oceanospirillum sp. MED92
MYALVDCNSFYASCERLFRPELKDKAVVVLSNNDGCVVARSAEAKALGIKMAVPFFEVREFYERGQLQVFSSNYALYGDLSARVMTTLEELVPEVEVYSIDEAFLGLSGMRTEPDLTELGHKIIKRINHWIGIPVGVGIAETKTLAKLANYAAKHYPQTQGVVDLSKPGWRERLLKKTDVSEVWGVGRRTVEKLRAEDIYTAADLARADAETMRRRYSVVLERTILELRGIPCIGFDEQPNPKQQILCSRTFSHRLTCLQPMQEAIREYAVRAAEKLREEKRLTSSVSIYIRTNPNAKFEMKYANGATYPLPSPTNDSRVIMKIALRLLQGIYRDGYRYMKAGVILNALQPEDNYQADLFNPDLCTTKSLQLMKTLDQVNQRFHRGLSFAGQGQKQDWAMQRQHLSPRYTTSWRELKVVRA

SEQ ID NO: 104232 - DNA, 1293 bp, delta proteobacterium MLMS-1
  CDS (1)..(1293): transl_table=11
ttgtcatccattccctgtaggcccggcaccatggccaaggttttcgccctgctcgactgcaacaatttttacgtttcctgcgaacggctctttgcccccgggctggcagaccggccggtggtggtgctgtccaacaacgacggctgcgtcatcgcccgctccaacgaggccaaggccctgggcatcaagatgggcgagccgtttttccggtgccgacaactacttgagacccatggggtgcgggtgttctcctccaattaccccctgtacggggatatttccaaccgggtcatgagtgtcctggctcggctggagccggagatcgaggtatattccatcgacgaagcctttatccggctgccggcagacagccccgccgccctgcaggccacggggagccgcatcagggcgaccatcggcaaggagaccggcattcccgtctccatcggttttggcgccaccaagaccctggccaaaatcgccaaccggatcgccaagcagcaacccgagcatggcggcgtcttcgcgccgtcggaagatggcctggacgaactgctggccaccattgcggccggggaggtatgggggatcggggggcgatcggcggccaagttgtcgctgcgcggcatccgcaccgccctggacctgaaaaacgccaatgacgattggctgcggcaacagcttaccatcaccgggctgcgcaccgccagcgaactgcgcggggtttcctgcctgaccctggaagaaagcccaccgcccagtaaatcgatcaccacttcacgttcctttggccggccggtgcgggaacttgcggaactgagagaagccctggccacctacgtgaccatcgccgctgaaaaactgcgctcacaagggctgaaggccggctgcgtgcaggtctttctgaccaccaaccgctttcacaaccgtgaatcgcaatacgccaacagtgccgtggcgaccatgccgcaacccagctcctcgaccctggagctactgcatcatgccggcggtgtgctgaccaggatattcaaggccggctacacctaccagaaggtcggggtggtcctgctcgagctgacaaccgcgacccacacccaacccagcctgttccaaccaccccggcccgaccgcgaggcgctgatgcaggcaatggataagatcaaccagaagtggggccgggaaaccctgcacagcgccgccaccggctttcggaaagactggaagaaccgacagggccggaaatcaccggcctacaccacctcctggcaggaattgccggtggtggtgtaa

SEQ ID NO: 104233 - protein, 430 aa, delta proteobacterium MLMS-1
MSSIPCRPGTMAKVFALLDCNNFYVSCERLFAPGLADRPVVVLSNNDGCVIARSNEAKALGIKMGEPFFRCRQLLETHGVRVFSSNYPLYGDISNRVMSVLARLEPEIEVYSIDEAFIRLPADSPAALQATGSRIRATIGKETGIPVSIGFGATKTLAKIANRIAKQQPEHGGVFAPSEDGLDELLATIAAGEVWGIGGRSAAKLSLRGIRTALDLKNANDDWLRQQLTITGLRTASELRGVSCLTLEESPPPSKSITTSRSFGRPVRELAELREALATYVTIAAEKLRSQGLKAGCVQVFLTTNRFHNRESQYANSAVATMPQPSSSTLELLHHAGGVLTRIFKAGYTYQKVGVVLLELTTATHTQPSLFQPPRPDREALMQAMDKINQKWGRETLHSAATGFRKDWKNRQGRKSPAYTTSWQELPVVV

SEQ ID NO: 104234 - DNA, 1263 bp, Alteromonadales bacterium TW-7
  CDS (1)..(1263): transl_table=11
atgtatgccttagtcgatgccgtggccttttatgccagcgccgagaaagtatttgatcccgccattcgttcaaaacctgtggttgtgctcactaataacgacggctgcgtatgtgcggtatgccctattgcgcgacgtttaaatattcctaaatttggcccttattttaaagttaagcagttactagaacaaaacaatgtggttgtacgctccagtaactatgaactatacgctaatttaagcgaccgaatgatgagtgtgattggccgtttttgtgatacccagcatatttacagtattgatgaatcgtttttgcactttagcggctacgaaaacgttgtaaaagattggcatacttacgggcaccttattagacgaaccgtatggcgagaaacaaagctccccgttggcgtggggtttgggccaacgcctacacttgcaaaagcggcaaatcatgcagctaaaaaattaacaggctttgacggtgttgctgtcataaatgacgaagcaagccggcgaactattttacagcgcatggactgccaagatgtatggggaattggcaaacgtttagctaaaaagctaaaaataatgaacataaacaccgcatggcagcttgcccaacaaaacccaaaaactatgcgccgcgcttttagtgtggtggtagagcgtacagtaagcgagcttaatggcttagtatgtttaaactgggatgatgtacgccaagataaacgcgaaatttactcaactcgcagctttggagagcgtatttatgaaccaaccgctcttaaaaccgctttaattaaccatgtcactattgtgggcaaaaaactaagagcccaaaaatcgcttgcaaagcaattatatatttttgcatctagctcatcccatgaagacgtattttataaaaagtcttatatgtatcagtttagcatgccaacaaacgatacttgcgttatggcaaatgcggtgtctgaggtgtttgaaaaaatttaccaacctggcgtgcggttttataaatgtggtgtaggtgcactagaactcaccgctgagcaatttcagcaaagtgacttatttgcaccacaacaagataacccaaagttaatgggctgtttagatgctattaatacccgatacggcaagggtatgttgggcttagcaagtagtaaattaaacgatcgctggcatatgaacagagattttttatcgcctcagtacacaacccgttggcgagatataccaaaaataaaatgcgatttatag

SEQ ID NO: 104235 - protein, 420 aa, Alteromonadales bacterium TW-7
MYALVDAVAFYASAEKVFDPAIRSKPVVVLTNNDGCVCAVCPIARRLNIPKFGPYFKVKQLLEQNNVVVRSSNYELYANLSDRMMSVIGRFCDTQHIYSIDESFLHFSGYENVVKDWHTYGHLIRRTVWRETKLPVGVGFGPTPTLAKAANHAAKKLTGFDGVAVINDEASRRTILQRMDCQDVWGIGKRLAKKLKIMNINTAWQLAQQNPKTMRRAFSVVVERTVSELNGLVCLNWDDVRQDKREIYSTRSFGERIYEPTALKTALINHVTIVGKKLRAQKSLAKQLYIFASSSSHEDVFYKKSYMYQFSMPTNDTCVMANAVSEVFEKIYQPGVRFYKCGVGALELTAEQFQQSDLFAPQQDNPKLMGCLDAINTRYGKGMLGLASSKLNDRWHMNRDFLSPQYTTRWRDIPKIKCDL

SEQ ID NO: 104236 - DNA, 1266 bp, unidentified eubacterium SCB49
  CDS (1)..(1266): transl_table=11
atgattgcactagtagattgtaatagcttttatgcgtcttgtgagcaggtttttaggccagacttatggggtaagcctgtggtggtcttgagtaataatgatgggtgtattatagcagcaaatagagaggcaaaggcactcacagatattgccatgtttgagcctgtttttaagattaaaaaacagcttatagctcataatgtgaccttgttttcgtctaattatactttgtatggcgagctgtcacaacgggtaatgaatacactatatttgttttcgccacgagtagaggtttatagcattgacgagagttttgtagatctacatggttttggtcataaaaatttaaagcactacggaaattttataaaagaaaccatatttagaaacacagggatccctacgggcgtgggcattgctccaacaaaagtactggcaaaactggctaacaaaatcgctaaaaaaggaccagaacacgaccatgtttttgtgattgatagtgatgcaaagcgcattgaaatattaaaaaccaccgagataaaaagcatttggggaatagggcgacagcagacaaaaaaattaaaagaagtaggaattcatacggcatatcagtttacagaaatgccactcgcttgggtacgtaaagagatgaccgtagtaggagagcgcttgtggcgtgagttgcgcggcgaaccttgtatggatatgatagaaataccaaaacctaaaaaagggataggtactgcaaaatcttttgggcgaaagttagagcgtcttgatttaatagaagaagcctgtgcatactacataagcgaagtggcagaagtgctgcgcgctcaaaaatcgtgtgccatgtatttacaggtgtttttaaatacgagctcttttagtgtcaatgataagcaatacagaaataagcaaaccgtcacgcttgccatccccacaaacaatacgtttacacttgttacagaagctagaaaaattttaaaagccatttacaaacccggctatcgctataaaaaagtaggcgtcaatctcacgggtatcataccagaagcgtatgtgcaaggcaatctttttgaatctcctaagacagagaaacacaaagaattgatgcagttatttgataccctaaattacaaatacggaaaaggtaaagtgttttctggattaacaggtacaagaatgaaagagtgggaactcgttaaagcagatagaagcccaaggtttaccacgcagtggagtgaaatactagaagtgaagtag

SEQ ID NO: 104237 - protein, 421 aa, unidentified eubacterium SCB49
MIALVDCNSFYASCEQVFRPDLWGKPVVVLSNNDGCIIAANREAKALTDIAMFEPVFKIKKQLIAHNVTLFSSNYTLYGELSQRVMNTLYLFSPRVEVYSIDESFVDLHGFGHKNLKHYGNFIKETIFRNTGIPTGVGIAPTKVLAKLANKIAKKGPEHDHVFVIDSDAKRIEILKTTEIKSIWGIGRQQTKKLKEVGIHTAYQFTEMPLAWVRKEMTVVGERLWRELRGEPCMDMIEIPKPKKGIGTAKSFGRKLERLDLIEEACAYYISEVAEVLRAQKSCAMYLQVFLNTSSFSVNDKQYRNKQTVTLAIPTNNTFTLVTEARKILKAIYKPGYRYKKVGVNLTGIIPEAYVQGNLFESPKTEKHKELMQLFDTLNYKYGKGKVFSGLTGTRMKEWELVKADRSPRFTTQWSEILEVK

SEQ ID NO: 104238 - DNA, 1257 bp, Moritella sp. PE36
  CDS (1)..(1257): transl_table=11
gtgttcgcactggtggacgctaattcattttattgcagtgctgaacaggtgtttcgtcctgaatggcgcggtaaaccgattatcgtgttgtctaacaatgatggctgtattgttgccgcaaaccgacaagctaaagacgcgggcattcctaagtttaaaccctattttaagatcaaagccttgtgtgaacaacaaggcgtgatcgcgctttcttctaactacgaactctacgctgacctgtctgctaaaatgatggatgtggtggggcgttttgcccccgaacaacatatttatagtattgatgaatctttcttgtcgttccaacgcagttatcctgccatcccttgtttacgtgaacatggcgctaagttgcggcgtgcggtatggaaagagtgtcgattacccgtttgtgtgggcatgggctccacactgacattagccaaaatagccaatcatgcagccaaaaagatccgcggttataacggcgtttgtgtactggataatgacagtgaacgcttgcaggtactggcgcagctaaaggtcgatgaagtatgggggatcgggcgcaagttatctaaacagttagcgtttatgggcattgaaaccgcgttagatttagctaagctaccggttggtattgcccgtaaggattttaatgtcgaagtcgaaaggacagtaagggagcttaacggccagccgtgtaaaagttgggatactgccagagcagataaaaaacaaatttattcaacccgcagtgtcggcgagcgcattaccgaactcagtgcgctgcaacaagcattaagcaaacatgcgggcatagcctcacaaaaagcccgtaagcagggttcgctgtgcaagatcatggtgtgttttgcggccagctcgccttttgatgataaccctgccagctttcgcgctatccataaattcccttatcccacctccgacgttacccaaataaccaaagtcgcgacgcaactcgccaacgatttatttcaggacggcgtcaggttctacaagataggtgtcgggcttattgatttggtcgatggccgttatgaacagcaagatttatttaatcccgccccaagcaacgacaaacttatggacgtgtttgaccacctgaatcagaaatatggccgcgacacgctgtttttaggggcgcaaggcatagataagaagtgggaaatgcaccgtaacatgttaaccccacaatacaccaccaaatggttagatttacctcaggtgaggtgttga

SEQ ID NO: 104239 - protein, 418 aa, Moritella sp. PE36
MFALVDANSFYCSAEQVFRPEWRGKPIIVLSNNDGCIVAANRQAKDAGIPKFKPYFKIKALCEQQGVIALSSNYELYADLSAKMMDVVGRFAPEQHIYSIDESFLSFQRSYPAIPCLREHGAKLRRAVWKECRLPVCVGMGSTLTLAKIANHAAKKIRGYNGVCVLDNDSERLQVLAQLKVDEVWGIGRKLSKQLAFMGIETALDLAKLPVGIARKDFNVEVERTVRELNGQPCKSWDTARADKKQIYSTRSVGERITELSALQQALSKHAGIASQKARKQGSLCKIMVCFAASSPFDDNPASFRAIHKFPYPTSDVTQITKVATQLANDLFQDGVRFYKIGVGLIDLVDGRYEQQDLFNPAPSNDKLMDVFDHLNQKYGRDTLFLGAQGIDKKWEMHRNMLTPQYTTKWLDLPQVRC

SEQ ID NO: 104240 - DNA, 1197 bp, Escherichia coli
  CDS (1)..(1197): transl_table=11
atgtttgcactggctgatatcaacagtttctacgcctcatgtgaaaaagttttccgcccggaccttcgcaacgaaccggtcatcgtactcagcaataacgatggctgtgtgatcgcgcgcagcccggaggcaaaagcccttggcatcagaatggggcagccctggtttcaggtgagacagatgcgcctggagaagaaaatacatgtattttccagcaattatgcgctgtaccacagcatgagccaacgggttatggctgttctggagtcgctttctcccgcagttgagccctactcaattgatgaaatgttcattgatttgcgggggataaatcattacatctctccggagttttttggtcatcagctcagggaacaggtaaagagctggacaggactcaccatgggggtgggcattgcgcctacaaaaacgctggctaaaagtgcacagtgggcaacaaagcaatggccacagttttccggtgtggtcgcgctgacggcagaaaaccgtaatcggatcttgaagctactggggctgcagccagttggtgagatctggggagtaggacgcagactgacggaaaagctgaatgcgctgggtattaacacagcactgcagctggcgcaggctaacacggcattcatccggaaaaacttcagcgtcattcttgagcgtacggtacgcgaactcaacggcgagtcctgcatatccctggaagaagcaccaccggcaaaacagcagattgtctgtagtcgcagttttggtgaacgaatcacagacaaagatgccatgcaccaggctgttgttcagtatgcagagcgggccgcagagaaactacgtggggagcgtcagtattgccggcaggtgacgacatttgtacggacatctccctttgcagtaaaagaaccctgttacagcaatgccgctgtggaaaagctttcattgcccacacaggacagccgggacattattgccgccgcatgcagagccttaaaccatgtctggcgtgaagggtaccgctatatgaaggcaggagtcatgctggctgatttcactccatcgggtatagcgcagccgggattatttgatgaaatccagccccgtaaaaacagtgaaaagttaatgaaaacactcgatgaactgaacctgtcgggaaaagggaaagtgtggtttacggggcgaggaaccgccccttaa

SEQ ID NO: 104241 - protein, 398 aa, Escherichia coli
MFALADINSFYASCEKVFRPDLRNEPVIVLSNNDGCVIARSPEAKALGIRMGQPWFQVRQMRLEKKIHVFSSNYALYHSMSQRVMAVLESLSPAVEPYSIDEMFIDLRGINHYISPEFFGHQLREQVKSWTGLTMGVGIAPTKTLAKSAQWATKQWPQFSGVVALTAENRNRILKLLGLQPVGEIWGVGRRLTEKLNALGINTALQLAQANTAFIRKNFSVILERTVRELNGESCISLEEAPPAKQQIVCSRSFGERITDKDAMHQAVVQYAERAAEKLRGERQYCRQVTTFVRTSPFAVKEPCYSNAAVEKLSLPTQDSRDIIAAACRALNHVWREGYRYMKAGVMLADFTPSGIAQPGLFDEIQPRKNSEKLMKTLDELNLSGKGKVWFTGRGTAP

SEQ ID NO: 104242 - DNA, 1164 bp, Magnetospirillum gryphiswaldense
  CDS (1)..(1164): transl_table=11
atggccatcttcgccttggtcgattgcaacaatttctatgtatcctgcgagcgggtgttcaatccggcccttgagggcaagcccgtcgtcgttctatccaacaacgatggctgtgcggtggcgcgttccgccgaagccaaggccattggtgtcccaatgggagagccggcgttcaagcttcggcatctggtcgagcggcacggcctgatcatgcaatcatccaattatgccttgtacggcgacatgtccgagcgggtgatgtccgtgctggccaccttcgcccccggcgccgaagtctattccatcgacgagtgtttccttgatctcgacgggctgtcggtgcccgaccttacccaatggtgccagcatgttcgggcgacggtcaaacgctggaccggcatccccgtgtcggtggggatcggcggcaccaagacgctggccaagctcgccaaccggctggcgaagaagtcgcccaaggccaacggggtgcttgacctggtcagccatcccgcttgggtcgaggtggcgctgaagcgcaccccggtcggtgaggtttggggcatcggacggcaatatgccggtcattgtggggttcacggtatccttagcgcccatgacctgacccaggccgaggacagttggatcagaaagacgatggggacggtcggcctgcgaacagtgatggagttgcgcggggtggcggtccacaccctcgacaccgaaccggcggacaaacagacaacctgctgctcgcgttcgttcgccgaagcggtcacgctttacgaccatgtgcatgacgctgtgctgaccttcgccagccgtgccgccgaaaaaatccgggctgatggtctggtcgccggggctctccaggtgttcgcccagaccgaccgcttccgccgcgatcagccccagttctcgttgaacgcaatggtgcggctgtcgcccgcgacaaattcgacgccgcgtctgatcgcggcggctatctctgggctgcactcggcgtggcgcgacggctatgcctataagaaggccggggtgatcctgatcgatctggtcaatccggccaacattgcccgcgacctgttctcaccgccgccagatataggcgcccgagcccaagcgttgatgaatgcggttggttgttccctggccagcacgcgatga

SEQ ID NO: 104243 - protein, 387 aa, Magnetospirillum gryphiswaldense
MAIFALVDCNNFYVSCERVFNPALEGKPVVVLSNNDGCAVARSAEAKAIGVPMGEPAFKLRHLVERHGLIMQSSNYALYGDMSERVMSVLATFAPGAEVYSIDECFLDLDGLSVPDLTQWCQHVRATVKRWTGIPVSVGIGGTKTLAKLANRLAKKSPKANGVLDLVSHPAWVEVALKRTPVGEVWGIGRQYAGHCGVHGILSAHDLTQAEDSWIRKTMGTVGLRTVMELRGVAVHTLDTEPADKQTTCCSRSFAEAVTLYDHVHDAVLTFASRAAEKIRADGLVAGALQVFAQTDRFRRDQPQFSLNAMVRLSPATNSTPRLIAAAISGLHSAWRDGYAYKKAGVILIDLVNPANIARDLFSPPPDIGARAQALMNAVGCSLASTR

SEQ ID NO: 104244 - DNA, 1278 bp, Acinetobacter baumannii
  CDS (1)..(1278): transl_table=11
atggtaagacccatagccctgattgatgggaataatttctatgtttcgtgtgagagggtgtttcagccgcacttgctaggcaagccggttatcatcctgtcaaacaatgatggttgtgccgtagcacgatcagaggaagcaaaagccctcggtattaagatgggtgcgccgctgtttaaaatccgtgagctggtcaaagaacacggcgttaaagtgctatcctcaaactatacgctttacggagatatgagccgccgtgtcgtggatgctgtgagccagttttcacctcattacgaaatctattcgatagatgaaaactttgttgatttgtcgggctttggtgatcgttatgaagccattgccgttgatatgcgagccaccgttagacaagtgaccggaatccctaattgtgtcggcattgccgagacaaagacacttgcaaaacttgccaattttgccgccaagaaaaacccgatttttggcggtgtttgcgacttcacgcaaccggcagtattggcatggtgtttagaccggattccggttgctgaagtgtggggaatagggcggcaaacacaaatcaagctggcatcacaaggaatagcaacggcggcacagttgcgcgacatgccgcgcacacttgcacgtcaactcggtacagttgtcttagaaagaacagttgcggagcttcagggcatccgctgccttgagatcgaggacattgcaccacaacgcaagggcatggctgttacgcgctctgctggtgcgcctatgcgcgatttagaggctgttatgcaggcactcaccgcccacgcttcccgtgccgctgaaaagcttcggttgcatggattagttgctggtcagatcacagcgttttttcacacaaacagtttttcaaaaaacgccgcgcagcactcggtatcaagaaccgtaaagctgaagcccatgacgaataatacattcgatcttgtgcaggctgttaaccggtgcgcccgtgctggttggcatcctaaagcgcatgagcatggctatagctatacaaaggcgggtgtgatgctcgatgatcttctgaaggcagaggacgcgcccaaaatgctttttgatatagtgcagccccgtgatgctcgcctaatggaagcaatggacgcaattaatgaccgatacggcaaacgcaaggttgttatcggtgcgcaaggctttcagaataaacatgaagcgaaagcggatatgcgttcaccacgcttcacaacaagactttcagacttgccagtaatttgttga

SEQ ID NO: 104245 - protein, 425 aa, Acinetobacter baumannii
MVRPIALIDGNNFYVSCERVFQPHLLGKPVIILSNNDGCAVARSEEAKALGIKMGAPLFKIRELVKEHGVKVLSSNYTLYGDMSRRVVDAVSQFSPHYEIYSIDENFVDLSGFGDRYEAIAVDMRATVRQVTGIPNCVGIAETKTLAKLANFAAKKNPIFGGVCDFTQPAVLAWCLDRIPVAEVWGIGRQTQIKLASQGIATAAQLRDMPRTLARQLGTVVLERTVAELQGIRCLEIEDIAPQRKGMAVTRSAGAPMRDLEAVMQALTAHASRAAEKLRLHGLVAGQITAFFHTNSFSKNAAQHSVSRTVKLKPMTNNTFDLVQAVNRCARAGWHPKAHEHGYSYTKAGVMLDDLLKAEDAPKMLFDIVQPRDARLMEAMDAINDRYGKRKVVIGAQGFQNKHEAKADMRSPRFTTRLSDLPVIC

SEQ ID NO: 104246 - DNA, 1272 bp, Klebsiella pneumoniae
  CDS (1)..(1272): transl_table=11
atgtttgccctggccgatgtgaacagcttctatgccagctgtgaacgtgttttccgcccggatttgaaaggaaagccgatagtcgtcctgagcaacaacgacgggaatgtaatcgctcgcagtgccgaggcgaagccctggatcaaaatgggaactccgtggtttcagataaaaaacgaaagatacccggaaaaaatatatgcgttttcaagtaattatgaactttacgcctcgatatcggcgcgcgtgatgaactgcctggaggaactggcccccagggtggaacagtattcaattgatgagatgttcctcgacctgaccggcgtggagcactgtatggggcttgaggacttcgcccggcagctgcgtcagcaggtgtatgactgtacccgcctgaccattggcgtgggcgccggaccaacgaaaaccctcgcaaaatcagcccagtgggcctcaaaagagtggaaacagtttcatggcgtactcgctctgaccaggggaaatccgcaaaggacgcggaaactgctttcactgcagccggttgaagaaatctggggggtgggtaaccgtattgcacgcaagctaaatgtgctgggcataaaaaccgcgctcgatctggctctgacgaacccggccttcatccgcaaaaatttttctgtcgtccttgagcgaacggtacgggaactgaacggggaaagctgcctttcgcttgaggaagcccctccgacgaaacagcaaattgtctgcagccgcagttttggcgtgaagatcacggagtacgagtcactccgtcaggctatctgtcagcacgcagagcgggcctctgaaaaactgcgtaaagagcaccagtattgccggcatatttccgttttcatcaaaacgtctccgttcgccattaaagagccttactacggcaacgtggctacggaaaaacttcttacacccactcaggacaccagggacatcattgcagccgctacaacggctctggagcgtatctggagggatgggcaccggtatgccaaagccggagttatgctgaatgacttcaccggctccggagtttcgcagctgcaactgttcgacgaacgcccgccacgccctcacagtgctgagctgatgagggttctggacgggatcaacaactcagggctgggtaaagtatggtttgcggggcggggtatggccccggaatggcagatgaaacgggagatgctttctcctgcttatacgacacgatggtcagatattcctgcagcgaaactggcgtga

SEQ ID NO: 104247 - protein, 423 aa, Klebsiella pneumoniae
MFALADVNSFYASCERVFRPDLKGKPIVVLSNNDGNVIARSAEAKPWIKMGTPWFQIKNERYPEKIYAFSSNYELYASISARVMNCLEELAPRVEQYSIDEMFLDLTGVEHCMGLEDFARQLRQQVYDCTRLTIGVGAGPTKTLAKSAQWASKEWKQFHGVLALTRGNPQRTRKLLSLQPVEEIWGVGNRIARKLNVLGIKTALDLALTNPAFIRKNFSVVLERTVRELNGESCLSLEEAPPTKQQIVCSRSFGVKITEYESLRQAICQHAERASEKLRKEHQYCRHISVFIKTSPFAIKEPYYGNVATEKLLTPTQDTRDIIAAATTALERIWRDGHRYAKAGVMLNDFTGSGVSQLQLFDERPPRPHSAELMRVLDGINNSGLGKVWFAGRGMAPEWQMKREMLSPAYTTRWSDIPAAKLA

SEQ ID NO: 104248 - DNA, 1296 bp, uncultured Bacteroidetes bacterium
  CDS (1)..(1296): transl_table=11
atgtacggcatcattgactgtgataactgctacgtcagctgtgagcgcgtctttcgcccagacctgaacggaaaacctgtcgttgttctgtcaaacaacgacggctgtgtcgttgctcgtagcaatgaggcgaagaaaatgggcatcaaagcgggaacaccttacttccagcttgcccagcaataccctgatgccaaaatcgccgtgttctccagcaactatgagttgtatggcgaactcacaggcagggtcgtagagattatccgtcaggaggcacccaaatactttcgttacagcatcgacgagtgctttgtctatttcaacgattttgaggataagaacctaaagagtgggggggagaacctgcataaacgtatccgaaagagtgtggggatgcctgtgagcatcggacttgctcccacgaagacgctggcaaagatggccagttattttgcaaagaaatatgctggctatcggcactgctgtctgattgatacggatgagaagtggacgaaagcgctgaagctctttcctatcaatgaggtatggggaatcggccgacggtatgccgccaagctcgaagctttaggggtgcatacggcttacgactttgcacagcatcacggcgactgggtacgtgccacatttcataatattgttatctacaggacttggcaggaactgaacggcgtggatgctgttcccaatgaggagatggcgaagaagaaaagtatctgtaccagcaggagtttcaacggaatggtgacagatttcgacacgttgaagacgcatgtgtcgaactacgctgcccgttgcgcagagaaactgcgtcagcagggaacggttgccagcatcgttgctgtgtttctccacacgaatctgtttcgtgaggacttgccccaatactggaacttccaagagaaacggctgactgttggcaccaacagtaccatcgatatctgcaaggctgctaatgaggtgttgcaaagcatttatgtcaaaggctatcattacaagaaagctggtgtcatcgtgatgggcattggtccgaacgcacccatgcagctcgacttgtttgattataatgctgagcaatttcaaaagatgaagcgcttggatgcagtcatcgaccgcatcaacaaggtcaacggcacagagaccatcgtgttaggcagtcagcaatatacacagaaagacggcaagggcagggcagaggtctttgccaatgccatcaagcatgattatcgaagcaagaaccccaccacgcggtggagtgatatcattcatctgaaataa

SEQ ID NO: 104249 - protein, 431 aa, uncultured Bacteroidetes bacterium
MYGIIDCDNCYVSCERVFRPDLNGKPVVVLSNNDGCVVARSNEAKKMGIKAGTPYFQLAQQYPDAKIAVFSSNYELYGELTGRVVEIIRQEAPKYFRYSIDECFVYFNDFEDKNLKSGGENLHKRIRKSVGMPVSIGLAPTKTLAKMASYFAKKYAGYRHCCLIDTDEKWTKALKLFPINEVWGIGRRYAAKLEALGVHTAYDFAQHHGDWVRATFHNIVIYRTWQELNGVDAVPNEEMAKKKSICTSRSFNGMVTDFDTLKTHVSNYAARCAEKLRQQGTVASIVAVFLHTNLFREDLPQYWNFQEKRLTVGTNSTIDICKAANEVLQSIYVKGYHYKKAGVIVMGIGPNAPMQLDLFDYNAEQFQKMKRLDAVIDRINKVNGTETIVLGSQQYTQKDGKGRAEVFANAIKHDYRSKNPTTRWSDIIHLK

SEQ ID NO: 104250 - DNA, 1284 bp, Pseudomonas syringae pv
  CDS (1)..(1284): transl_table=11
atggaaaagcatgaggttgtcttcgcgcttatcgattgcaattgcttctatgccagctgcgagcgtgtttttcgtccagatctggagaaaacgcccatcgtggtactcagcaataacgacggttgcgtcatcgcccgtagctacgacgccaagccatttgtgaaaatgggggctccctattttcagatcaaagaggtgttgcgccgccacggcataaaggtgttcagcagcaactacgcgctctatggcgacatgagcgagcgtgtcatgtcgatcatcgagtcgatggtgccagcctccgaggtctacagcatcgatgaggcgtttgcagacctcaccggggtccctggcgatctcacagcgttcggtcgacgcatccgggcgaacattcttaaatgcactggtattcctgtgggggtgggtatcggtcctacgaaaacgctcgctaagctggcaaaccacactgctaagcgactgctatcccatacaggcggtgttgtagacatttgcgacctgcataaccgcaactgggtactgcgtaatacggcagtatctgaggtctggggggtagggaagaagataaatgcccacctggaggctatgaagatccgcacagcaatggaccttgcaaccgccgacccgcgtactctgcgcgaccggttcagcgtggtcattgaaaagaccgcacgtgagctggcaggtacttcgtgcctggagctgggcgaagctgcaccacccaagcaggagatctgttgcagccgaatgttcggcaaacggctaaccaccattcagccaatcaaagaggcggtggccacctacactcagcgtgcggccgagaagctccgttttcaaaactcgctgtgcaagaagatccgcgtcagcatccgtaccggcatgttcaatccggaagaagccaagtacgccaacggcgctttggttgaattgccataccccaccaacgacgtccgcttgatgaccagggcggcgactgaggcagtgaatcgtttgtttcgaccggggttcaagtacagcaaagctgaggttctgttgctggatctgagacagcctggcgaatttacggatgacatgttcgctgcttcgcagcctgcatcttcggagaaggtgatgggagtcctggacgagatcaatacacgctggggcagagggactttaagagctgggagtgttccttccaatccggaatgggctatgcgtcgcgagctgatgagtcaaagttatacaaccaggctcgatcagttgtgggaggtgaaaagtctcttgtag

SEQ ID NO: 104251 - protein, 427 aa, Pseudomonas syringae pv
MEKHEVVFALIDCNCFYASCERVFRPDLEKTPIVVLSNNDGCVIARSYDAKPFVKMGAPYFQIKEVLRRHGIKVFSSNYALYGDMSERVMSIIESMVPASEVYSIDEAFADLTGVPGDLTAFGRRIRANILKCTGIPVGVGIGPTKTLAKLANHTAKRLLSHTGGVVDICDLHNRNWVLRNTAVSEVWGVGKKINAHLEAMKIRTAMDLATADPRTLRDRFSVVIEKTARELAGTSCLELGEAAPPKQEICCSRMFGKRLTTIQPIKEAVATYTQRAAEKLRFQNSLCKKIRVSIRTGMFNPEEAKYANGALVELPYPTNDVRLMTRAATEAVNRLFRPGFKYSKAEVLLLDLRQPGEFTDDMFAASQPASSEKVMGVLDEINTRWGRGTLRAGSVPSNPEWAMRRELMSQSYTTRLDQLWEVKSLL

SEQ ID NO: 104252 - DNA, 1263 bp, Pseudomonas cichorii
  CDS (1)..(1263): transl_table=11
atgcccgtgttcggtctcgtggactgcaactgtttctacgcaagctgtgagcgtgtgtttcggccggatctggctaagatccccattgttgtgctcagcaataacgatggctgcgttatagctcgaagctacgacgccaaaccgttcgtgaaaatgggcgcgccctattttcagattaaggacgtattgcgccggcacggcatcaaggccttcagcagcaattttgcgctctacggagacatgagccaaagagtcatggccatcatcgaatcgatggtgcctgccgtcgaggtctacagcatcgatgaggcttttgccgagttaaccggcatgccaggcaatctaaccgagttaggtagagcaatccggtcaaaggtctaccgctgcacgggcatccctgtgggtgtagggattgctccgactaaaaccctggcaaagcttgccaattacacagcaaagcgtctccaggcgcacacaggcggcgtagtggatatctgcgaccctttgaagcgtgactgggtgctgcgcaatacctcagtcggtgaagtttggggtatcggtcgaaagctgaaagcacaccttgagggcatgcatatcctttccgcgaaggatcttgcagctgcagacccgtggatgctgcgcaagaaattcagcgtggtcgtggagaagacggcgcgagagctgtcaggcaccgtgtgcctggagctggatgaggtagagccaccaaagcaagagatctgctgcagcagaatgttcggcaagcgactgaccgagcttggaccgatcaaagaggcggtggccacctacatgatgcgtgcttcagagaaactgcgagcccagggatcagtatgcaaaaaaatcagggtcagcatccgtaccggcatgttcagtcctgacgaggccaagtatgcgaacggtgcgcttgtccagctgccctaccctacaaacgacgtgcggctgatgacaaaatatgcgaccgaggcagtgtcgcgcatctatcgtcccgggtccaggtacagcaaagcagaggttatgttgatggacatttgtcagccgggtgagtttaccgacgacctgttctcggccgtgcagccgctgagctctgatcgtctgatgaccgcattggacttgatcaacgaaaagtggggccgcggcacgctgcgtactggatctgtcccagttgtcccggattggggtatgcggcgcgagaatatgagccagagctacacgacgcgacttgatcagctgtgggttgtaaagtaa

SEQ ID NO: 104253 - protein, 420 aa, Pseudomonas cichorii
MPVFGLVDCNCFYASCERVFRPDLAKIPIVVLSNNDGCVIARSYDAKPFVKMGAPYFQIKDVLRRHGIKAFSSNFALYGDMSQRVMAIIESMVPAVEVYSIDEAFAELTGMPGNLTELGRAIRSKVYRCTGIPVGVGIAPTKTLAKLANYTAKRLQAHTGGVVDICDPLKRDWVLRNTSVGEVWGIGRKLKAHLEGMHILSAKDLAAADPWMLRKKFSVVVEKTARELSGTVCLELDEVEPPKQEICCSRMFGKRLTELGPIKEAVATYMMRASEKLRAQGSVCKKIRVSIRTGMFSPDEAKYANGALVQLPYPTNDVRLMTKYATEAVSRIYRPGSRYSKAEVMLMDICQPGEFTDDLFSAVQPLSSDRLMTALDLINEKWGRGTLRTGSVPVVPDWGMRRENMSQSYTTRLDQLWVVK

SEQ ID NO: 104254 - DNA, 1308 bp, Providencia rettgeri
  CDS (1)..(1308): transl_table=11
atgtggtgcgaaacatgcgccgtaagtcgtgacgatcccatgcctgtatttgccttggtggactgcaacaacttttacgccagttgtgagaagctgtttcgtcctgatttaaaagatacaccggttgtggtgctgtccaataacgacggctgcgtggttgcacggtcacgtgaagctaagtcactcggtattaaaatgggcgtacccgtctttcagatcaaagctgaaatgcagcgccatggtattttggcattctcgtccaactatgcgctgtacgcagatttgagcagtcgagtgatgcgcactttggaagagatggcaccacgagtagaggtttactcgattgacgaagcgtttttggacttaaccggtattgagtctgccatatctcttgtcgagttcggacaacaagtgcgagagcgcataggtcactggattgggatcagcgtctgtgtaggcattgcaccgactaaaacactcgccaagctggctaaccatgccgctaagaaatatcccgctactcaaggggttgtagacctgaccaatccagatcggcaacgtcgattgctcgcattagtcccggttgatgatgtttggggcgttggtaggcggctttctaagcgattaaatgcgttgggtatcactacagccttagacctagccaatgcctcacctagagccatcagagaccagttttcggtggttttagagagaaccgtcagagagctcaatggtgagtcgtgcattgaacttgaagagatcccgccaactaagaaacaaattgtctgtagccgttcatttggcgtaaaagtgacgcactttgaattcttacgtgaagccatatgcgaatacgcaacccgcgccacggagaagcttcgcaaagaacagcagcaagccaaagtgatgaccgtgtttatacgtaccagcccctttaaggacaacgagccgcagtacagcaactctgcatcgggtgagttgctgatccccagttgcgatacgcgggactttatcgagctggccaatcacttactcaagcggatttggaaggatggttttcgttatgccaaagcgggcgtcatgctgtctgacttttacgatcctggtatgtttcaaccaggactattcgatgacgtatcgacccgctctaatagccagcagttaatgtctgtattggacaccattaaccaaagcggtgccggaaaggttttctttgctggacaaggtacgaagaaagattggtcgatgaagcgagagcatttatctcccgcttatacaacacgctgggaccaattaccgcgagttaagtag

SEQ ID NO: 104255 - protein, 435 aa, Providencia rettgeri
MWCETCAVSRDDPMPVFALVDCNNFYASCEKLFRPDLKDTPVVVLSNNDGCVVARSREAKSLGIKMGVPVFQIKAEMQRHGILAFSSNYALYADLSSRVMRTLEEMAPRVEVYSIDEAFLDLTGIESAISLVEFGQQVRERIGHWIGISVCVGIAPTKTLAKLANHAAKKYPATQGVVDLTNPDRQRRLLALVPVDDVWGVGRRLSKRLNALGITTALDLANASPRAIRDQFSVVLERTVRELNGESCIELEEIPPTKKQIVCSRSFGVKVTHFEFLREAICEYATRATEKLRKEQQQAKVMTVFIRTSPFKDNEPQYSNSASGELLIPSCDTRDFIELANHLLKRIWKDGFRYAKAGVMLSDFYDPGMFQPGLFDDVSTRSNSQQLMSVLDTINQSGAGKVFFAGQGTKKDWSMKREHLSPAYTTRWDQLPRVK

SEQ ID NO: 104256 - DNA, 1272 bp, Shigella flexneri
  CDS (1)..(1272): transl_table=11
atgtttgcactggctgatatcaacagtttctacgcctcatgtgaaaaagttttccgcccggaccttcgcaacgaaccggtcatcgtactcagcaataacgatggctgtgtgatcgcgcgcagcccggaggcaaaagcccttggcatcagaatggggcagccctggtttcaggtgagacagatgcgcctggagaagaaaatacatgtattttccagcaattatgcgctgtaccacagcatgagccaacgggttatggctgttctggagtcgctttctcccgcagttgagccctactcaattgatgaaatgttcattgatttgcgggggataaatcattgcatctctccggagttttttggtcatcagctcagggaacaggtaaaaagctggacaggactcaccatgggggtgggcattgcgcctacaaaaacgctggctaaaagtgcacagtgggcaacaaagcaatggccacagttttccggtgtggtcgcgctgacggcagaaaaccgtaatcggatcttgaagctactggggctgcagccagttggtgaggtctggggagtaggacgcagactgacggaaaagctgaatgcgctgggtattaacacagcactgcagctggcgcaggctaacacggcattcatccggaaaaacttcagcgtcattcttgagcgtacggtacgcgaactcaacggcgagtcctgcatatccctggaagaagcaccaccggcaaaacagcagattgtctgtagtcgcagttttggtgaacgaatcacagacaaagatgccatgcaccaggctgttgttcagtatgcagagcgggccgcagagaaactacgtggggagcgtcagtattgccggcaggtgacgacatttgtacggacatccccctttgcagtaaaagaaccctgttacagcaatgccgctgtggaaaagcttccattacccacacaggacagccgggacattattgccgcagcatgcagagcgttaaaccatgtctggcgtgaagggtaccgctatatgaaggcaggagtcatgctggctgatttcacaccatcgggtatagcgcagccgggattatttgatgagatccagccccgtaaaaacagcgaaaagttaatgaaaacactcgatgaactgaaccagtctggaaaagggaaagtgtggtttgcggggcgaggaaccgcccctgaatggcaaatgaaacgggaaatgctctcgccttcgtatacaacacaatggactgagatccccattgcttcattctga

SEQ ID NO: 104257 - protein, 423 aa, Shigella flexneri
MFALADINSFYASCEKVFRPDLRNEPVIVLSNNDGCVIARSPEAKALGIRMGQPWFQVRQMRLEKKIHVFSSNYALYHSMSQRVMAVLESLSPAVEPYSIDEMFIDLRGINHCISPEFFGHQLREQVKSWTGLTMGVGIAPTKTLAKSAQWATKQWPQFSGVVALTAENRNRILKLLGLQPVGEVWGVGRRLTEKLNALGINTALQLAQANTAFIRKNFSVILERTVRELNGESCISLEEAPPAKQQIVCSRSFGERITDKDAMHQAVVQYAERAAEKLRGERQYCRQVTTFVRTSPFAVKEPCYSNAAVEKLPLPTQDSRDIIAAACRALNHVWREGYRYMKAGVMLADFTPSGIAQPGLFDEIQPRKNSEKLMKTLDELNQSGKGKVWFAGRGTAPEWQMKREMLSPSYTTQWTEIPIASF

SEQ ID NO: 104258 - DNA, 1239 bp, Bacillus subtilis
  CDS (1)..(1239): transl_table=11
atgatgaaagaaaaagtgatttttctcgttgacatgcaatcgttttatgcatctgtagagaaagcggaaaatccacatttgaaaaataggcccgtcattgtttcgggtgaccctgaaaaaaggggcggagtcgtattggctgcctgcccgctggcgaaacaaaagggtgtggtgaatgcttcacggctgtgggaggcgcaggaaaagtgtcctgaggctgttgtgctccggccgcgtatgcagcggtatattgatgtatcactgcaaattacggccattctcgaggagtatacagaccttgtggagccgtattccatcgatgaacagttcatggacattacaggcagccagaagctgtttgggacgccgatggagatcgcgaaaagcattcagggcagaatcatgcgggagatcggcgtttatgcacgggtcggaatcggccctaacaaagcgctggccaaaattgcgtgtgacaattttgccaaaaagaataagaacggtatttttaccttaacgaaagaaaatatgaaaaccgaaatgtggccgctcccggtgggcagcatgtttggcgtcgggagccgcatgaagcatcatttaaatcgaatgggcatcagcacgatcggcgggctcgcggcttttccgctcgatcttttaaaaaagaaatggggcattaacggccacgtgctgtggatgacggcaaacggaatcgactattcccctgtgtcaacttcgtctctggacgggcaaaaggcgataggtcatggaatgactctcccgagagactacgaacactttgacaaagaaatcaaggtcgtattgcttgagctgagtgaagaggtgtgcaggcgaagccgaaacgccggggtcatggggcagacagtgtcagtgagctgccggggtgctgattttgattggccgacgggcttcaaccggcaagtgaagctggcagagccgactaattctacgcaggatgtatatgaggctgtacgacggctgtttcttacattttgggacgggaaacccgtccgccgcctcggtgtcaatctgtctcagctctcatctgatgacatatggcagctcaatttatttcaggattatgcaaagaaaatgagcctaggctatgtgatggatggcattaaaaatcgattcggcgatacagcaatcatcagggcggcgtcactgacagcggcaggccaggcatttgaacgtgcggctaaaataggggggcattataaatga

SEQ ID NO: 104259 - protein, 412 aa, Bacillus subtilis
MMKEKVIFLVDMQSFYASVEKAENPHLKNRPVIVSGDPEKRGGVVLAACPLAKQKGVVNASRLWEAQEKCPEAVVLRPRMQRYIDVSLQITAILEEYTDLVEPYSIDEQFMDITGSQKLFGTPMEIAKSIQGRIMREIGVYARVGIGPNKALAKIACDNFAKKNKNGIFTLTKENMKTEMWPLPVGSMFGVGSRMKHHLNRMGISTIGGLAAFPLDLLKKKWGINGHVLWMTANGIDYSPVSTSSLDGQKAIGHGMTLPRDYEHFDKEIKVVLLELSEEVCRRSRNAGVMGQTVSVSCRGADFDWPTGFNRQVKLAEPTNSTQDVYEAVRRLFLTFWDGKPVRRLGVNLSQLSSDDIWQLNLFQDYAKKMSLGYVMDGIKNRFGDTAIIRAASLTAAGQAFERAAKIGGHYK

SEQ ID NO: 104260 - DNA, 1275 bp, Salmonella typhimurium
  CDS (1)..(1275): transl_table=11
atgtttgcactggctgatatcaacagtttctacgcctcatgtgaaaaagttttccgcccggaccttcgcaacgaaccggtcatcgtactcagcaataacgatggctgtgtgatcgcgcgcagcccggaggcaaaagcccttggcatcagaatggggcagccctggtttcaggtgagacaaatgcgcctggagaagaaaatacatgtattttccagcaattatgcgctgtaccacagcatgagccaacgggttatggctgttctggagtcgctttctcccgcagttgagccctactcaattgatgaaatgttcattgatttgcgggggataaatcattgcatctctccggagttttttggtcatcagctcagggaacaggtaaagagctggacaggactcaccatgggggtgggcattgcgcctacaaaaacgctggctaaaagtgcacagtgggcaacaaagcaatggccacagttttccggagtggtcgcgctgacggcagaaaaccgtaatcggatcttgaagctactggggctgcagccagttggtgaggtctggggagtaggacacagactgacggaaaagctgaatgcgctgggtattaacacagcactgcagctggcgcaggctaacacggcattcatccggaaaaacttcagcgtcattcttgagcgtacggtacgcgaactcaacggcgagtcctgcatatccctggaagaagcaccaccggcaaaacagcagattgtctgtagtcgcagttttggtgaacgaatcacagacaaagatgccatgcaccaggctgttgttcagtatgcagagcgggccgcagagaaactacgtggggagcgtcagtattgccggcaggtgacgacatttgtacggacatcaccctttgcagtaaaagaaccctgttacagcaatgccgctgtggaaaagcttccattgcccacacaggacagccgggacattattgccgccgcatgcagagccttaaaccatgtctggcgtgaagggtaccgctatatgaaggcaggtgtcatgctggctgatttcacaccatcgggtatagcgcagccgggattatttgatgaaatccagccccgtaaaaacagtgaaaagttaatgaaaacactcgatgaactgaaccagtcgggaaaagggaaagtgtggtttgcggggcgaggaaccgcccctgaatggcaaatgaaacgggaaatgttgagtcagtgttatacaactaaatggcgagatattcccctggccaggctgggttag

SEQ ID NO: 104261 - protein, 424 aa, Salmonella typhimurium
MFALADINSFYASCEKVFRPDLRNEPVIVLSNNDGCVIARSPEAKALGIRMGQPWFQVRQMRLEKKIHVFSSNYALYHSMSQRVMAVLESLSPAVEPYSIDEMFIDLRGINHCISPEFFGHQLREQVKSWTGLTMGVGIAPTKTLAKSAQWATKQWPQFSGVVALTAENRNRILKLLGLQPVGEVWGVGHRLTEKLNALGINTALQLAQANTAFIRKNFSVILERTVRELNGESCISLEEAPPAKQQIVCSRSFGERITDKDAMHQAVVQYAERAAEKLRGERQYCRQVTTFVRTSPFAVKEPCYSNAAVEKLPLPTQDSRDIIAAACRALNHVWREGYRYMKAGVMLADFTPSGIAQPGLFDEIQPRKNSEKLMKTLDELNQSGKGKVWFAGRGTAPEWQMKREMLSQCYTTKWRDIPLARLG

SEQ ID NO: 104262 - DNA, 1263 bp, Escherichia coli
  CDS (1)..(1263): transl_table=11
atgtttgcgctgattgatgtcaatggcatgtacgccagctgtgagcaggcatttaggccagatctggcaaaccgagcagtggccgttttatccaacaatgacggcaacattgtggcccgtaattacctggcgaagaaagcgggcctgaaaatgggcgatccgtacttcaaagtcagacccataatcgagcgtcataacatcgctatttttagctctaattacactctttatgcctccatgtcggcccggttcgcggccgtagttgagtcccttgcaagccacgtcgaacagtattcaatcgacgagctttttgttgactgcaaagggataacggccgccatgagccttgacgctttcgggcgccaactgcgcgaggaagtcaggcgacacacaacgctggtatgcggggtcggtattgcccgtactaagacgctggcgaagctgtgtaaccacgctgcaaaaacatggcccgctactggcggggtggttgctctggacgatggcgccagactgaagaaattaatgagcatcctgccggttgcggaagtctggggcgtcggccatcgtacagagaaagcactcgccacaatggggatcaaaacggtgctggatttagccagggcagatacgcgcctaatccgtaaaacattcggcgttgtgcttgaaagaacggtacgggagttgcgcggcgaggcttgcttcagcctggaagaaaaccctcctgcgaagcagcagattgttgtgtcgcgctcattcggccaacgcgtagaaaccctgacggacatgcagcaggctgtcaccggatttgcagcgcgcgcagctgaaaaactgcgtaatgagaggcaatactgccgcgtcataagcgtctttatccgtaccagtccttattcagtgcgtgatacacagtatgccaatcaggcaaccgaaaaactgacggtggcaacccaggacagccgcacgataattcaggcagcacaagcgctggcgcggatctggcgggaagatattgcgtatgcaaaagcaggggtcatgctggcagattttagcgggaaggaggcccagcttgatttattcgactctgctacgccttcagctggcagcgaggctttaatggctgttcttgatggtataaaccggcgtggaaagaaccagcttttttttgcaggccagggcatcgataactcctttgccatgcgtcgtcagatgttgtcacctgattacacgacagactggcgctcaataccaatagccaccatcaaataa

SEQ ID NO: 104263 - protein, 420 aa, Escherichia coli
MFALIDVNGMYASCEQAFRPDLANRAVAVLSNNDGNIVARNYLAKKAGLKMGDPYFKVRPIIERHNIAIFSSNYTLYASMSARFAAVVESLASHVEQYSIDELFVDCKGITAAMSLDAFGRQLREEVRRHTTLVCGVGIARTKTLAKLCNHAAKTWPATGGVVALDDGARLKKLMSILPVAEVWGVGHRTEKALATMGIKTVLDLARADTRLIRKTFGVVLERTVRELRGEACFSLEENPPAKQQIVVSRSFGQRVETLTDMQQAVTGFAARAAEKLRNERQYCRVISVFIRTSPYSVRDTQYANQATEKLTVATQDSRTIIQAAQALARIWREDIAYAKAGVMLADFSGKEAQLDLFDSATPSAGSEALMAVLDGINRRGKNQLFFAGQGIDNSFAMRRQMLSPDYTTDWRSIPIATIK

SEQ ID NO: 104264 - DNA, 1266 bp, Salmonella typhimurium
  CDS (1)..(1266): transl_table=11
atgtttgcgctgattgatgtcaatggcatgtacgccagctgtgagcaggcatttaggccagatctggcaaaccgagcagtggccgttttatccaacaatgacggcaacattgtggcccgtaattacctggcgaagaaagcgggcctgaaaatgggcgatccgtacttcaaagtcagacccataatcgagcgtcataacatcgctatttttagctctaattacactctttatgcctccatgtcggcccggttcgcggccgtagttgagtcccttgcaagccacgtcgaacagtattcaatcgacgagctttttgttgactgcaaagggataacggccgccatgagccttgacgctttcgggcgccaactgcgcgaggaagtcaggcgacacacaacgctggtatgcggggtcggtattgcccgtactaagacgctggcgaagctgtgtaaccacgctgcaaaaacatggcccgctactggcggggtggttgctctggacgatggcgccagactgaagaaattaatgagcatcctgccggttgcggaagtctggggcgtcggccatcgtacagagaaagcactcgccacaatggggatcaaaacggtgctggatttagccagggcagatacgcgcctaatccgtaaaacattcggcgttgtgcttgaaagaacggtacgggagttgcgcggcgaggcttgcttcagcctggaagaaaaccctcctgcgaagcagcagattgttgtgtcgcgctcattcggccaacgcgtagaaaccctgacggacatgcagcaggctgtcaccggatttgcagcgcgcgcagctgaaaaactgcgtaatgagaggcaatactgccgcgtcataagcgtctttatccgtaccagtccttattcagtgcgtgatacacagtatgccaatcaggcaaccgaaaaactgacggtggcaacccaggacagccgcacgataattcaggcagcacaagccgcgctggcgcggatctggcgggaagatattgcgtatgcaaaagcaggggtcatgctggcagattttagcgggaaggaggcccagcttgatttattcgactctgctacgccttcagctggcagcgaggctttaatggctgttcttgatggtataaaccggcgtggaaagaaccagcttttttttgcaggccagggcatcgataactcctttgccatgcgtcgtcagatgttgtcacctgattacacgacagactggcgctcaataccaatagccaccatcaaataa

SEQ ID NO: 104265 - protein, 421 aa, Salmonella typhimurium
MFALIDVNGMYASCEQAFRPDLANRAVAVLSNNDGNIVARNYLAKKAGLKMGDPYFKVRPIIERHNIAIFSSNYTLYASMSARFAAVVESLASHVEQYSIDELFVDCKGITAAMSLDAFGRQLREEVRRHTTLVCGVGIARTKTLAKLCNHAAKTWPATGGVVALDDGARLKKLMSILPVAEVWGVGHRTEKALATMGIKTVLDLARADTRLIRKTFGVVLERTVRELRGEACFSLEENPPAKQQIVVSRSFGQRVETLTDMQQAVTGFAARAAEKLRNERQYCRVISVFIRTSPYSVRDTQYANQATEKLTVATQDSRTIIQAAQAALARIWREDIAYAKAGVMLADFSGKEAQLDLFDSATPSAGSEALMAVLDGINRRGKNQLFFAGQGIDNSFAMRRQMLSPDYTTDWRSIPIATIK

SEQ ID NO: 104266 - DNA, 1275 bp, Salmonella typhimurium
  CDS (1)..(1275): transl_table=11
atgttcgctttggctgacgtcaactcgttctatgccagttgcgaaaaggtctttcgccccgatttgcgtgacaggtctgtggtggtcctgagtaacaacgatggttgtgtaattccgcgcagcgctgaagcaaaaaaactgggcataaaaatgggggtgccgtggtttcaactgaggtcggcgaaatttccggagccggttatcgcgttctccagtaattacgccctctacgcatcaatgtcgaacagggtcatggttcacctggaagagctggcgccacgcgttgagcagtactccattgacgagatgtttctggatattcgcggtatagacagttgcatcgatttcgaggatttcggccgacagctgcgtgagcacgttcgttccggcacagggctgaccatcggcgtcggaatgggaccgaccaaaacgctggctaaaagcgcgcaatgggcatcgaaagaatggtcacagttcggaggcgtgcttgccctgacgttacacaatcagaaacgaacggagaaactgctgtcactgcaaccggtggaggaaatctggggtgtgggccgcaggatctcaaagaagctgaacacaatggggatcaccacagcactgcagctggcccgcgcgaatccaacgttcatcaggaaaaactttaatgtggttctggagagaacggtccgggaactcaatggagaaagctgtatttccctggaggaagcaccgccccccaaacagcagatagtctgcagcagaagctttggagaacgagtcacgacttatgaagcgatgcggcaggcagtctgtcagcacgctgaacgtgccgccgaaaagctgcgtggggaacggcagttctgcaggcatattgccgtgtttgtgaaaacatcgccgttcgccgtaactgagccctactacggtaatctggccagtgaaaaactgctcatccccacgcaggatacacgggacatcattgccgctgccgtcagagctctggacaggatctgggtggatggtcaccgttacgcaaaggcaggctgtatgctgaacgatttcacgccaaccggggtatcgcagcttaatttgtttgatgaagtacagccgcgggaacggagcgagcagctgatgcaagtcctggatgggattaaccatccgggcaaggggaaaatatggttcgccggtcgggggattgcccccgagtggcagatgaaaagggaactactttcgccagcttatacgacacgttgggcagatattcctgcagcgaaattgacttga

SEQ ID NO: 104267 - protein, 424 aa, Salmonella typhimurium
MFALADVNSFYASCEKVFRPDLRDRSVVVLSNNDGCVIPRSAEAKKLGIKMGVPWFQLRSAKFPEPVIAFSSNYALYASMSNRVMVHLEELAPRVEQYSIDEMFLDIRGIDSCIDFEDFGRQLREHVRSGTGLTIGVGMGPTKTLAKSAQWASKEWSQFGGVLALTLHNQKRTEKLLSLQPVEEIWGVGRRISKKLNTMGITTALQLARANPTFIRKNFNVVLERTVRELNGESCISLEEAPPPKQQIVCSRSFGERVTTYEAMRQAVCQHAERAAEKLRGERQFCRHIAVFVKTSPFAVTEPYYGNLASEKLLIPTQDTRDIIAAAVRALDRIWVDGHRYAKAGCMLNDFTPTGVSQLNLFDEVQPRERSEQLMQVLDGINHPGKGKIWFAGRGIAPEWQMKRELLSPAYTTRWADIPAAKLT

SEQ ID NO: 104268 - DNA, 1269 bp, Salmonella typhimurium
  CDS (1)..(1269): transl_table=11
atgttcgcgctctgcgatgttaatagcttttacgcctcctgcgaaacggtctttcgtcctgatttatgtggccgaccggtggtggtgttatcaaacaatgatggctgcgttatcgcgtgtagcgccgaggcgaaacagctcggtatcgcaccaggtgagccatacttcaaacagaaagaacgcttccggcgatccggtgttgtttgcttcagcagtaattacgagctttacgctgatatgtcgaaccgggtaatgaccacactcgaggagatggtgccgcgggtagaaatttacagcattgatgaggccttttgtgatctgacgggggtacgaaactgccgggatctgacagatttcgggcgcgagataagagcgacggtcctgaagcgcacgcacctgactgtcggtgtaggcattgcccagacgaaaacccttgccaagctggctaaccatgctgcgaaaaagtggcagcgccagaccgacggggtggttgacttgtcgaacatcgatcgccagcgtcggctgctggccctgatacccgtggaggatgtctggggtgtcggcaggcgcatcagtaagaagctcaatgccctgggcatcaagactgctctcgatctctctgaacaaagtacctggatcatcaggaaacacttcaatgtcgtgctggagcgtaccgtgagagagcttcgcggagagccatgtctggagctcgaagagtttgcgccggcaaagcaggaaatcgtttgtagtcgctctttcggcgagcgggtcacagactatgaggaaatgcgccaggctgtttacagctacgctgcgcgcgcggcagaaaaactccgcggcgagcaccagtactgccgtttcatttcaacattcgtcaaaacatcaccctttgccctgaacgagccctactacggtaacagcgccgcggtgacgcttctcacccccacgcaggattcacgtgacattatcaatgcggctgtgaaatgcctggataaaatatggcgcgacggccatcgctaccagaaagcgggggtgatgctgggtgacttcttcagtcagggcgtagcgcaactcaaccttttcgacgataacgcgccgcgcgccggtagtgcgaagttgatggaagtactggaccatcttaacgcaaaagacgggaaggggacgctgtacttcgccgggcaggggatgtcgcaacagtgggctatgaagcgagaaatgctttcgcctcggtacaccacaagatactctgatctactgcgtgttaagtaa

SEQ ID NO: 104269 - protein, 422 aa, Salmonella typhimurium
MFALCDVNSFYASCETVFRPDLCGRPVVVLSNNDGCVIACSAEAKQLGIAPGEPYFKQKERFRRSGVVCFSSNYELYADMSNRVMTTLEEMVPRVEIYSIDEAFCDLTGVRNCRDLTDFGREIRATVLKRTHLTVGVGIAQTKTLAKLANHAAKKWQRQTDGVVDLSNIDRQRRLLALIPVEDVWGVGRRISKKLNALGIKTALDLSEQSTWIIRKHFNVVLERTVRELRGEPCLELEEFAPAKQEIVCSRSFGERVTDYEEMRQAVYSYAARAAEKLRGEHQYCRFISTFVKTSPFALNEPYYGNSAAVTLLTPTQDSRDIINAAVKCLDKIWRDGHRYQKAGVMLGDFFSQGVAQLNLFDDNAPRAGSAKLMEVLDHLNAKDGKGTLYFAGQGMSQQWAMKREMLSPRYTTRYSDLLRVK

SEQ ID NO: 104270 - DNA, 24 bp, Artificial sequence
  primer
atgtttgccctctgtgatgtaaac

SEQ ID NO: 104271 - DNA, 26 bp, Artificial sequence
  primer
ttatttgaccctcagtaaatcagaac

SEQ ID NO: 104272 - protein, 470 aa, Artificial sequence
  consensus sequence
  Variant (3)..(3): Xaa in position 3 is any amino acid
  Variant (5)..(5): Xaa in position 5 is any amino acid
  Variant (7)..(7): Xaa in position 7 is any amino acid
  Variant (10)..(10): Xaa in position 10 is any amino acid
  Variant (14)..(15): Xaa in position 14 to 15 is any amino acid
  Variant (17)..(17): Xaa in position 17 is any amino acid
  Variant (19)..(19): Xaa in position 19 is any amino acid
  Variant (21)..(23): Xaa in position 21 to 23 is any amino acid
  Variant (25)..(26): Xaa in position 25 to 26 is any amino acid
  Variant (30)..(31): Xaa in position 30 to 31 is any amino acid
  Variant (32)..(32): Xaa in position 32 is any or no amino acid
  Variant (38)..(39): Xaa in position 38 to 39 is any amino acid
  Variant (41)..(44): Xaa in position 41 to 44 is any amino acid
  Variant (47)..(48): Xaa in position 47 to 48 is any amino acid
  Variant (50)..(52): Xaa in position 50 to 52 is any amino acid
  Variant (53)..(53): Xaa in position 53 is any or no amino acid
  Variant (55)..(55): Xaa in position 55 is any amino acid
  Variant (57)..(57): Xaa in position 57 is any amino acid
  Variant (59)..(70): Xaa in position 59 to 70 is any amino acid
  Variant (71)..(72): Xaa in position 71 to 72 is any or no amino acid
  Variant (77)..(77): Xaa in position 77 is any amino acid
  Variant (80)..(82): Xaa in position 80 to 82 is any amino acid
  Variant (84)..(84): Xaa in position 84 is any amino acid
  Variant (86)..(94): Xaa in position 86 to 94 is any amino acid
  Variant (95)..(96): Xaa in position 95 to 96 is any or no amino acid
  Variant (98)..(99): Xaa in position 98 to 99 is any amino acid
  Variant (101)..(101): Xaa in position 101 is any amino acid
  Variant (107)..(107): Xaa in position 107 is any amino acid
  Variant (109)..(138): Xaa in position 109 to 138 is any amino acid
  Variant (139)..(143): Xaa in position 139 to 143 is any or no amino acid
  Variant (145)..(147): Xaa in position 145 to 147 is any amino acid
  Variant (154)..(154): Xaa in position 154 is any amino acid
  Variant (156)..(159): Xaa in position 156 to 159 is any amino acid
  Variant (161)..(162): Xaa in position 161 to 162 is any amino acid
  Variant (163)..(177): Xaa in position 163 to 177 is any or no amino acid
  Variant (180)..(192): Xaa in position 180 to 192 is any amino acid
  Variant (193)..(199): Xaa in position 193 to 199 is any or no amino acid
  Variant (201)..(203): Xaa in position 201 to 203 is any amino acid
  Variant (206)..(206): Xaa in position 206 is any amino acid
  Variant (208)..(213): Xaa in position 208 to 213 is any amino acid
  Variant (215)..(217): Xaa in position 215 to 217 is any amino acid
  Variant (220)..(220): Xaa in position 220 is any amino acid
  Variant (222)..(224): Xaa in position 222 to 224 is any amino acid
  Variant (226)..(233): Xaa in position 226 to 233 is any amino acid
  Variant (235)..(238): Xaa in position 235 to 238 is any amino acid
  Variant (239)..(239): Xaa in position 239 is any or no amino acid
  Variant (241)..(243): Xaa in position 241 to 243 is any amino acid
  Variant (246)..(247): Xaa in position 246 to 247 is any amino acid
  Variant (250)..(250): Xaa in position 250 is any amino acid
  Variant (252)..(253): Xaa in position 252 to 253 is any amino acid
  Variant (254)..(255): Xaa in position 254 to 255 is any or no amino acid
  Variant (257)..(269): Xaa in position 257 to 269 is any amino acid
  Variant (270)..(272): Xaa in position 270 to 272 is any or no amino acid
  Variant (274)..(274): Xaa in position 274 is any amino acid
  Variant (277)..(287): Xaa in position 277 to 287 is any amino acid
  Variant (288)..(288): Xaa in position 288 is any or no amino acid
  Variant (290)..(299): Xaa in position 290 to 299 is any amino acid
  Variant (303)..(328): Xaa in position 303 to 328 is any amino acid
  Variant (329)..(334): Xaa in position 329 to 334 is any or no amino acid
  Variant (336)..(337): Xaa in position 336 to 337 is any amino acid
  Variant (339)..(348): Xaa in position 339 to 348 is any amino acid
  Variant (350)..(358): Xaa in position 350 to 358 is any amino acid
  Variant (359)..(364): Xaa in position 359 to 364 is any or no amino acid
  Variant (366)..(367): Xaa in position 366 to 367 is any amino acid
  Variant (368)..(371): Xaa in position 368 to 371 is any or no amino acid
  Variant (373)..(373): Xaa in position 373 is any amino acid
  Variant (375)..(375): Xaa in position 375 is any amino acid
  Variant (378)..(388): Xaa in position 378 to 388 is any amino acid
  Variant (389)..(400): Xaa in position 389 to 400 is any or no amino acid
  Variant (403)..(410): Xaa in position 403 to 410 is any amino acid
  Variant (411)..(417): Xaa in position 411 to 417 is any or no amino acid
  Variant (420)..(422): Xaa in position 420 to 422 is any amino acid
  Variant (424)..(425): Xaa in position 424 to 425 is any amino acid
  Variant (427)..(428): Xaa in position 427 to 428 is any amino acid
  Variant (429)..(429): Xaa in position 429 is any or no amino acid
  Variant (431)..(434): Xaa in position 431 to 434 is any amino acid
  Variant (435)..(464): Xaa in position 435 to 464 is any or no amino acid
  Variant (466)..(467): Xaa in position 466 to 467 is any amino acid
  Variant (468)..(468): Xaa in position 468 is any or no amino acid
ALXDXNXFYXSCEXXFXPXLXXXPXXVLSXXXNNDGCXXAXXXXAKXXGXXXXGXPXFXXXXXXXXXXXXXXSSNYXLYXXXSXRXXXXXXXXXXXPXXEXYSIDEXFXXXXXXXXXXXXXXXXXXXXXXXXXXXXXXXXXXXGXXXTKTLAKXAXXXXKXXXXXXXXXXXXXXXXXGVXXXXXXXXXXXXXXXXXXXXVXXXWGXGXXXXXXLXXXGIXTXXXLXXXXXXXXRXXXXXVXXXRTXXELXGXXXXCXXXXXXXXXXXXXXXXRXFGXXXXXXXXXXXXAXXXXXXXXXXKLRXXXXXXXXXXXXXXXXXXXXXXXXXXXXXXXXLXXPXXXXXXXXXXAXXXXXXXXXXXXXXXGXXXXXXYXKXGVXXXXXXXXXXXXXXXXXXXXXXXLFXXXXXXXXXXXXXXXLMXXXDXXNXXXGXXXXXXXXXXXXXXXXXXXXXXXXXXXXXXXXXXSXXXTT

SEQ ID NO: 104273 - protein, 27 aa, Artificial sequence
  protein pattern
  Variant (2)..(2): Xaa in position 2 is Phe or Tyr
  Variant (3)..(3): Xaa in position 3 is Ala, Cys or Val
  Variant (5)..(5): Xaa in position 5 is Ala or Cys
  Variant (6)..(6): Xaa in position 6 is Glu or Gln
  Variant (7)..(8): Xaa in position 7 to 8 is any amino acid
  Variant (9)..(9): Xaa in position 9 is Phe, Leu or Met
  Variant (10)..(10): Xaa in position 10 is any amino acid
  Variant (11)..(11): Xaa in position 11 is Ala or Pro
  Variant (12)..(16): Xaa in position 12 to 16 is any amino acid
  Variant (17)..(17): Xaa in position 17 is Ala, Pro or Ser
  Variant (18)..(19): Xaa in position 18 to 19 is Ile, Leu or Val
  Variant (22)..(22): Xaa in position 22 is Ser or Thr
  Variant (24)..(24): Xaa in position 24 is Asn or Ser
  Variant (27)..(27): Xaa in position 27 is Cys or Asn
FXXSXXXXXXXXXXXXXXXVLXNXDGX

SEQ ID NO: 104274 - protein, 21 aa, Artificial sequence
  protein pattern
  Variant (2)..(4): Xaa in position 2 to 4 is any or no amino acid
  Variant (6)..(6): Xaa in position 6 is Phe, Ile, Leu, Met or Val
  Variant (7)..(7): Xaa in position 7 is Ala or Gly
  Variant (8)..(8): Xaa in position 8 is any amino acid
  Variant (10)..(11): Xaa in position 10 to 11 is any amino acid
  Variant (15)..(15): Xaa in position 15 is any amino acid
  Variant (16)..(16): Xaa in position 16 is Ala or Cys
  Variant (17)..(17): Xaa in position 17 is Asn, Gln or Ser
  Variant (18)..(19): Xaa in position 18 to 19 is any amino acid
  Variant (20)..(20): Xaa in position 20 is Ala, Ser or Thr
VXXXGXXXTXXLAKXXXXXXK

SEQ ID NO: 104275 - protein, 14 aa, Artificial sequence
  protein pattern
  Variant (5)..(5): Xaa in position 5 is any amino acid
  Variant (8)..(8): Xaa in position 8 is any amino acid
  Variant (9)..(9): Xaa in position 9 is Asp, Glu, Asn or Ser
  Variant (10)..(10): Xaa in position 10 is Phe, Ile, Leu, Met or Val
  Variant (12)..(12): Xaa in position 12 is any amino acid
  Variant (13)..(13): Xaa in position 13 is Lys or Arg
  Variant (14)..(14): Xaa in position 14 is Phe, Leu, Met or Val
SSNYXLYXXXSXXX

SEQ ID NO: 104276 - protein, 18 aa, Artificial sequence
  protein pattern
  Variant (2)..(2): Xaa in position 2 is any amino acid
  Variant (3)..(8): Xaa in position 3 to 8 is any or no amino acid
  Variant (14)..(14): Xaa in position 14 is any amino acid
  Variant (16)..(17): Xaa in position 16 to 17 is any amino acid
  Variant (18)..(18): Xaa in position 18 is Phe, Ile, Leu or Val
EXXXXXXXYSIDEXFXXX

SEQ ID NO: 104277 - DNA, 1122 bp, Escherichia coli
  CDS (1)..(1122): transl_table=11
atgtcaaaagtcgctctcatcaccggtgtaaccggacaagacggttcttacctggcagagtttctgctggaaaaaggttacgaggtgcatggtattaagcgtcgcgcatcgtcattcaacaccgagcgcgtggatcacatttatcaggatccgcacacctgcaacccgaaattccatctgcattatggcgacctgagtgatacctctaacctgacgcgcattttgcgtgaagtacagccggatgaagtgtacaacctgggcgcaatgagccacgttgcggtctcttttgagtcaccagaatataccgctgacgtcgacgcgatgggtacgctgcgcctgctggaggcgatccgcttcctcggtctggaaaagaaaactcgtttctatcaggcttccacctctgaactgtatggtctggtgcaggaaattccgcagaaagagaccacgccgttctacccgcgatctccgtatgcggtcgccaaactgtacgcctactggatcaccgttaactaccgtgaatcctacggcatgtacgcctgtaacggaattctcttcaaccatgaatccccgcgccgcggcgaaaccttcgttacccgcaaaatcacccgcgcaatcgccaacatcgcccaggggctggagtcgtgcctgtacctcggcaatatggattccctgcgtgactggggccacgccaaagactacgtaaaaatgcagtggatgatgctgcagcaggaacagccggaagatttcgttatcgcgaccggcgttcagtactccgtgcgtcagttcgtggaaatggcggcagcacagctgggcatcaaactgcgctttgaaggcacgggcgttgaagagaagggcattgtggtttccgtcaccgggcatgacgcgccgggcgttaaaccgggtgatgtgattatcgctgttgacccgcgttacttccgtccggctgaagttgaaacgctgctcggcgacccgaccaaagcgcacgaaaaactgggctggaaaccggaaatcaccctcagagagatggtgtctgaaatggtggctaatgacctcgaagcggcgaaaaaacactctctgctgaaatctcacggctacgacgtggcgatcgcgctggagtcataa

SEQ ID NO: 104278 - protein, 373 aa, Escherichia coli [sequence omitted]

SEQ ID NO: 104279 - DNA, 1894 bp, Glycine max
  CDS (212)..(1588)
tttttaaaaaaaattaataacgttcatctagtgcttcgcttgtcctgcgacctggtgatatgaatcctgacgcatagtactcacaactcacagactcaccggcgacaccgtcaccgacccacccaacaggatattggactcggggtacgtgcataacggcctgaaccgacgatcaacgagctacaacacaaggcgcataaacgtcttcttcatggatcccaacaacatccacacagcacgcatgaagttccagttcgcagagaactccgacggctgccagcacagctcctctggctcttataacatcctccccatagggctcttctatctcgcagcccactaccacgcattcgtttcattcaacatgcgcaatagtactactgacgtccacggcacgcggcccctcgcagttccaggagggggagagctgcccacaaaactgacaccgacagctcccacatccgatacgtctctactccctcatcaatcaatggagaacaccgagggatccagatctgcgacgaacggggtgctgcctctggcgcgcaaggtggcattgattaccggaattaccggccaagacggttcgtacctgacggaattccttctagacaagggttacgaggtgcacggtctgatccgtcgctcctcgaacttcaacacgcagcgcatcgaccacatctatgtggatccccacaacgcccacaaggcccgcatgaagctccactacgccgatctctccgacgcctcctccctccgccgctggctcgacaccatcctccccgacgaggtctacaacctcgccgctcagtctcacgtcgccgtctccttcgagatacccgactacaccgccgacgtcgtcgccaccggcgccctccgcctcctcgaggccgtccgttcccacatcgccgcctccggccgctcccacatccgctactaccaagccggctcctccgagatgttcggcgccacccctccgccgcagtccgaaaccacccccttccacccccgctccccctacgccgcctccaaatgcgccgcccactggtacaccgtgaactaccgcgaggcttactccctcttcgcctgcaacggcatcctcttcaaccacgagtccccccgccgcggcgagaatttcgtgacccgcaagatcacgcgggccgtgggccgcatcaaggtcgggctccagagcaagctcttcttgggcaacctccaggcctccagagattggggcttcgctggggactacgttgaagccatgtggctgatgctgcagcaggagaagcccgatgactatgttgtggccactgaagagtcccacaccgtggaggagttcttggaagtcgcgttcggctatgtgggactcaattggagggaccatgtcgtcattgacaagagatactttcgcccctctgaagtcgataacctcaaaggggacgcttccaaggccaagaaggtgcttggttggaaacctaaagtggggtttgagcagcttgtgaagatgatggttgaccgggacattgagatggctaagaaagagaaggttcttgttgatgctggctacattgatgctcagcaacaaccttgaatctcatctgcaacttgaggaagagggggttttgctgttttgatcatataatgccgttgacatagtttagtttatgggcaatttatgttgttttcttgttgcaactgttatttcctagatgtgcatttgtcggatttcttcttcttgtaagcccgttgattcattcaattaaaagctatatacatctacgcccattttcttgtagaaaaaattaagttcttccagttgttctgtttcttccttggtttctcctatatttcactccctggattggaaaacaaaatggttccaatgggagtatcaagt

SEQ ID NO: 104280 - protein, 458 aa, Glycine max
MDPNNIHTARMKFQFAENSDGCQHSSSGSYNILPIGLFYLAAHYHAFVSFNMRNSTTDVHGTRPLAVPGGGELPTKLTPTAPTSDTSLLPHQSMENTEGSRSATNGVLPLARKVALITGITGQDGSYLTEFLLDKGYEVHGLIRRSSNFNTQRIDHIYVDPHNAHKARMKLHYADLSDASSLRRWLDTILPDEVYNLAAQSHVAVSFEIPDYTADVVATGALRLLEAVRSHIAASGRSHIRYYQAGSSEMFGATPPPQSETTPFHPRSPYAASKCAAHWYTVNYREAYSLFACNGILFNHESPRRGENFVTRKITRAVGRIKVGLQSKLFLGNLQASRDWGFAGDYVEAMWLMLQQEKPDDYVVATEESHTVEEFLEVAFGYVGLNWRDHVVIDKRYFRPSEVDNLKGDASKAKKVLGWKPKVGFEQLVKMMVDRDIEMAKKEKVLVDAGYIDAQQQP

SEQ ID NO: 104281 - DNA, 1482 bp, Glycine max
  CDS (112)..(1209)
gtgagaaattgtgaatcggagggcgttgaagagttgtgagcataataaattgagaagcaaaagcgaaagggtctgtgtcttcactcattcttctattctattccatcatcaatggagaacaccgagggatccggatctgcgacgaacggggtgctggctccgccgcgcaaggtggcattgataaccggaattaccggacaagacggttcgtacctgacggaattcctcctggacaaggggtacgaggtgcacggcctgatccgccgctcgtcgaacttcaacacgcagcgcatcgaccacatatacgtggatccccacaacgcccacaaggcccgcatgaagctccactacgccgatctctccgacgcctcctccctccgccgctggctcgacaccatcctccccgacgaggtctacaacctcgccgcccagtcccacgtcgccgtctcattcgagatccccgactacaccgccgacgtcgtcgccaccggcgccctccgcctcctcgaggccgtccgctcccacatctccgcctccggccgctcccacatccgctactaccaagccggctcctccgagatgttcggcgccacccctccgccgcaatcggaaaccacccccttccacccccgctccccctacgccgcctccaaatgcgccgcccactggtacaccgtgaactaccgcgaggcctactccctcttcgcctgcaacggcatcctcttcaaccacgagtccccccgccgcggcgagaatttcgtgacccgcaagatcacgcgggccgtgggccgcatcaaggtcgggctccagagcaagctcttcttgggcaacctgcaggcctcgcgagactggggcttcgctggggactacgtggaagccatgtggctgatgctgcagcaggataagcccgatgactatgttgtggccaccgaagagtcccacaccgtcgaggagttcttggaagtcgcgttcggctatgtgggactcaattggagggaccatgtcgtcattgacaagaggtactttcgccccgccgaggtcgataacctcaaaggggacgcttccaaggccaagaaggtgcttggttggaagcccaaggttgggtttgagcagcttgtcaagatgatggttgaccaggacattgagatggctaagaaggagaaggttcttgttgatgctggctacattgatgctcagcaacaaccttgatctgatctgcaacttcccaaatttttagataaatgttttaattgaggatggaggaggggggtttttctgttttgatcttataatgccgctgttcttttaaatcattcttcatagttgacacagtttaatttatgagtaatttattttgttttcgtgttgcaactgttatttattagtcgtgcattttttcggactttattttattttttgtaagcctgctgattcattcaattaaatctatatgcatctacatccatagtcttgttgtagaaa

SEQ ID NO: 104282 - protein, 365 aa, Glycine max
MENTEGSGSATNGVLAPPRKVALITGITGQDGSYLTEFLLDKGYEVHGLIRRSSNFNTQRIDHIYVDPHNAHKARMKLHYADLSDASSLRRWLDTILPDEVYNLAAQSHVAVSFEIPDYTADVVATGALRLLEAVRSHISASGRSHIRYYQAGSSEMFGATPPPQSETTPFHPRSPYAASKCAAHWYTVNYREAYSLFACNGILFNHESPRRGENFVTRKITRAVGRIKVGLQSKLFLGNLQASRDWGFAGDYVEAMWLMLQQDKPDDYVVATEESHTVEEFLEVAFGYVGLNWRDHVVIDKRYFRPAEVDNLKGDASKAKKVLGWKPKVGFEQLVKMMVDQDIEMAKKEKVLVDAGYIDAQQQP

SEQ ID NO: 104283 - DNA, 1650 bp, Zea mays
  CDS (91)..(1224)
ctcgaggccggccgggccgggtaatttgcttcggcactctgccgccgcacccccaacccgtggcaatcaatccccttcctcgcttcgcaaatggctcattccaatggcgcggccgccactgccactgccggcggcggcgacgtggacgacgagaccgccccggtgccgcgggccctcgcgccggcgcggaaggtggcgctgatcacgggcatcacggggcaggacgggagctacctcacggagctgctcctgtccaagggatacgaggtgcacggcctcatccgccgctcctccaacttcaacacgcagcggctggaccacatctaccacgacccgcacgcggtgccgtcggccccgcgtcccccgatgcggctccactacgccgacctctccgactcctcctccctccgccgcgcgctcgacgccatctcccccgacgaggtctacaacctcgccgcgcagtcgcacgtcgccgtctccttcgagatccccgactacaccgccgacgtcaccgccacgggggcgctccgcctcctcgaggccgtccgcctgtcgcgcaagcccatgcgctactaccaggccggctcctcggagatgttcggctccacgccgccgccgcagcgcgaggacacgcccttccacccgcgctcgccctacgccgccgccaaggtcgccgcgcactggtacaccgtcaactaccgcgaggcctacggcgtattcgcctgcaacggcgtgctcttcaaccacgagtccccgcgccgcggcgagaacttcgtcacgcgcaagatcacgcgcgccgtcggccgcatcaagctcggcctgcagaccaaggtcttcctgggcaacctctcggcggccagggactgggggttcgcgggggactacgtggaggcaatgtggctcatgctgcagcaggatcagccggccgactacgtcgtcgccaccgaggagtcccacacagtcgaggagttcttgcaggctgccttcggctacgccggcctcaactggaaggatcatgtggtcattgacaagaagtacttccgccccgcagaggtcgacagcctccagggagactccaccaaggcgaggaagttgctcaaatggaagcccaaggttgggttccagcagctcgttgagatgatggttgatcgcgacgttgagctcgccaagaaggagaaggtcctggtcgatgctgggtaccgtgaccccaagcagcagccatagaagcagcacggctgcttcttgctctgctgcgttccggattcagactgttgctcatacacggtgattctcagagtaaaggttgacccaagttactatcgatacttctccaggtaagaaataaggatggttgcagtatgaccctcacagtatcttcattactttttttttcctgactataaaccaaacacccccttaaacaaaacgatgaataatccatgccagtttggtatttggaagaggatgaaacgcctgtctgattgtagctgttgatgttaagacatactgatagcatcagtttgtattgttctacttcagctactgtcacacatgtactgtttgatcggaaatatatgtttttttaggaaggttaatttcaaaaaaaaaaaaaaaaaaaaaaaaaaaaaaaaaaaaaaaaacccccccccc

SEQ ID NO: 104284 - protein, 377 aa, Zea mays
MAHSNGAAATATAGGGDVDDETAPVPRALAPARKVALITGITGQDGSYLTELLLSKGYEVHGLIRRSSNFNTQRLDHIYHDPHAVPSAPRPPMRLHYADLSDSSSLRRALDAISPDEVYNLAAQSHVAVSFEIPDYTADVTATGALRLLEAVRLSRKPMRYYQAGSSEMFGSTPPPQREDTPFHPRSPYAAAKVAAHWYTVNYREAYGVFACNGVLFNHESPRRGENFVTRKITRAVGRIKLGLQTKVFLGNLSAARDWGFAGDYVEAMWLMLQQDQPADYVVATEESHTVEEFLQAAFGYAGLNWKDHVVIDKKYFRPAEVDSLQGDSTKARKLLKWKPKVGFQQLVEMMVDRDVELAKKEKVLVDAGYRDPKQQP

SEQ ID NO: 104285 - DNA, 1416 bp, Arabidopsis thaliana
  CDS (75)..(1196)
aattcaacacggattttcaacacagagctgacgttagcatttgtctctgaaatcccagatccgaaaacccaacaatggcgtcagagaacaacggatccagatccgattccgaatccatcaccgctcccaaagctgattccaccgtcgttgaaccgaggaagatagctctgatcaccggaatcaccggccaggacggatcatacctgacggagttccttctcggaaaaggctacgaatttcatggtctgatccgtcgatcatcgaatttcaacacccagcgaatcaaccatatctacatcgatccacacaatgtcaacaaagctctgatgaaactccactacgccgatctcaccgacgcttcctctctccgtcgttggatcgatgtgatcaagcctgacgaagtttataacctagctgctcaatctcacgtcgctgtctccttcgagatccctgattacacagccgatgtagtcgcaaccggtgctctccgtctccttgaagccgtcagatctcacaccatcgacagtggccgtaccgtcaagtattaccaagccggatcttcggagatgtttggatcaactcctcctccacaatcggagacgacgccgtttcaccccagatctccttacgcagcttccaaatgcgctgctcattggtacacagtgaattacagagaggcgtacggtctcttcgcttgtaacggaatcttgttcaatcacgagtcacctcgccgtggtgagaatttcgtgacgaggaagatcacaagagcattgggaaggatcaaggttggtttgcagacgaagctattccttgggaatttgcaagcgtcaagagattggggatttgcaggagattatgtggaagcaatgtggttgatgttgcagcaagagaagccagatgattacgttgtggcaacagaggaaggacacacagtggaagagtttcttgatgtgtcatttgggtatttgggactcaattggaaagattatgttgagattgaccagaggtactttaggcctgctgaagtagataaccttcaaggagatgcaagcaaggcaaaggaagtgttggggtggaaaccacaagtagggtttgagaagcttgtgaagatgatggttgatgaagatcttgagcttgctaagagggagaaagtgcttgttgatgctggatacatggatgctaagcagcaaccttgatttgatcaattatacaaagatggagtttcttacatttatctgcttttatagagttttaaatttcgtttttttttctttctctttttgttgctttggtggttgtttgttgtctttttatgttttagtttctttgttgctttttaagttatctaaattgtttccctccaatgagttgaggatgaaagcgcagtgaattttgaatgaaggagcaaaaagaatc

SEQ ID NO: 104286 - protein, 373 aa, Arabidopsis thaliana
MASENNGSRSDSESITAPKADSTVVEPRKIALITGITGQDGSYLTEFLLGKGYEFHGLIRRSSNFNTQRINHIYIDPHNVNKALMKLHYADLTDASSLRRWIDVIKPDEVYNLAAQSHVAVSFEIPDYTADVVATGALRLLEAVRSHTIDSGRTVKYYQAGSSEMFGSTPPPQSETTPFHPRSPYAASKCAAHWYTVNYREAYGLFACNGILFNHESPRRGENFVTRKITRALGRIKVGLQTKLFLGNLQASRDWGFAGDYVEAMWLMLQQEKPDDYVVATEEGHTVEEFLDVSFGYLGLNWKDYVEIDQRYFRPAEVDNLQGDASKAKEVLGWKPQVGFEKLVKMMVDEDLELAKREKVLVDAGYMDAKQQP

SEQ ID NO: 104287 - DNA, 1403 bp, Triticum aestivum
  CDS (71)..(1189)
tagaacatcctaattgaaaacccaaatcaccgttctccccccaaatcacatcccactctcagatctcggaatggccgactcctccgcgccgcactccaacggcggcgccggcgccgaggcggaggcggtgccccgttccctggcgccgccgcggagggtggcgctggtgacgggcatcacggggcaggacgggagctacctgactgagctgctcctgtccaaggggtacgaggtgcacggcctcatccgccgctcctccaacttcaacacccagcgcctcgaccacatctaccacgacccgcacgcgacgccctccgccgcgcgcccgccgatgcgcctccactacgccgacctctccgactcgtcctccctccgccgcgcgctcgaccacgtgctccccgacgaggtctacaacctcgccgcccagtcccacgtcgccgtctccttcgaggtgcccgactacaccgccgacgtcaccgccacgggcgcgctccgcctgctcgaggccgtccgcctctcctcgaagcccatgcgctactaccaggcggggtcctcggagatgttcggctccacgccgccgccgcagagcgaggccacccccttccacccgcgctccccctacgccgccgccaaggtcgccgcgcactggtacaccgtcaactaccgcgaggcgtacggcctcttcgcctgcaacggcgtgctcttcaaccacgagtccccccggcgcggcgagaacttcgtcacccgcaagatcacccgcgccatcggccgcatcaaggtcgggctccagaccaaggtcttcctcggcaacctctccgccgccagggattggggcttcgccggggattatgttgaggccatgtggctcatgctccagcaggacaagcctgatgattatgttgtcgccactgaagagtgccacaccgtggaggagttcttgcaggctgcttttgggtatgccggcctcaactggaaggatcatgtggtcattgacaagaagtactttcgcccttcggaggtggactgcctgcagggagattcatccaagtcaaggagagtgcttgggtggaagcccaaggttggcttccagcagctagttgagatgatggttgataacgacatcgagcttgccaagaaggagaaggtccttgtggatgctgggtaccgcgaccccaagcagcagccatagagttggaatcaatagtttggttaaaatggagcttggtttggatttcccacccttagaagctgatacagtgtggccattgcagtagaggttggctgaagttattgttgtttgtctcagggtagaaataaggaggtttaaagtttgatcctacaagactgttgattaagttactatgtcatgtgcttttctcatatgaatgaatcagacaatttat

SEQ ID NO: 104288 - protein, 372 aa, Triticum aestivum
MADSSAPHSNGGAGAEAEAVPRSLAPPRRVALVTGITGQDGSYLTELLLSKGYEVHGLIRRSSNFNTQRLDHIYHDPHATPSAARPPMRLHYADLSDSSSLRRALDHVLPDEVYNLAAQSHVAVSFEVPDYTADVTATGALRLLEAVRLSSKPMRYYQAGSSEMFGSTPPPQSEATPFHPRSPYAAAKVAAHWYTVNYREAYGLFACNGVLFNHESPRRGENFVTRKITRAIGRIKVGLQTKVFLGNLSAARDWGFAGDYVEAMWLMLQQDKPDDYVVATEECHTVEEFLQAAFGYAGLNWKDHVVIDKKYFRPSEVDCLQGDSSKSRRVLGWKPKVGFQQLVEMMVDNDIELAKKEKVLVDAGYRDPKQQP

SEQ ID NO: 104289 - DNA, 1101 bp, Mesorhizobium loti MAFF303099
  CDS (1)..(1101): transl_table=11
ttgtcaaagagaaaagtagctttaatcaccggggttacgggacaagacggttcctacctcgcagaattgcttttagaaaagggctattctgtgcatgggataaagagacgatcgtctctttttaatactggccgtatagaccatctctatcatgaccctcatgaaagtggcgttgatcttacacttcaccacggggacttgacagactcgtcgagccttacgcgcgtcatccaactggttcagccggacgaaatttacaatttggcagctcagagccacgttgcagtctcctttgaagaaccagaatacaccgcgaactccgatgccttgggtgcgctgcgtatcctcgaggcaattcggatcctggggctcgtcaagcatacgcgctactaccaagcctcgacgtctgagctctacgggctggtgcgggaaacgccacagaccgagacgacaccgttctacccccggtccccctacgctgttgccaaattgtatgctcactggatcaccgtaaattatcgagaatcttacaatttgtatgcttgtaacggcattttatttaatcatgagtcacctgcgcgcggagaaacatttgtaactcgcaaaatcacgcgcgccttgactcggattaagcttggaatgcaacgcactctattcctcggcaaccttaatgcgcgtcgcgattgggggcacgctcgagactacgtccagatgcagtggttgatgctgcagcagcagcaacctgaagactttgtgatcgctagcggtgagcaacattcggtgcgcgaattcgtcaccgtcgcggccgctgaactcggcatcgatgttcgttgggtgggggaaggggtcgacgaagaggggtacgatgcaaagacgggagctctgatcgtaaaagtagatccccgctattttcgtcctgcagaagtcgagacacttctcggcgatgcccgcaaggcgaaagaaaagcttgggtgggagcccaaaatctccttcatcgaattggttagggagatggttcgggaagatttgcgcatggcggagcgtgaagcagtgctgatgaatcagggttattattcacacagtccacgagagttatgctga

SEQ ID NO: 104290 - protein, 366 aa, Mesorhizobium loti MAFF303099
MSKRKVALITGVTGQDGSYLAELLLEKGYSVHGIKRRSSLFNTGRIDHLYHDPHESGVDLTLHHGDLTDSSSLTRVIQLVQPDEIYNLAAQSHVAVSFEEPEYTANSDALGALRILEAIRILGLVKHTRYYQASTSELYGLVRETPQTETTPFYPRSPYAVAKLYAHWITVNYRESYNLYACNGILFNHESPARGETFVTRKITRALTRIKLGMQRTLFLGNLNARRDWGHARDYVQMQWLMLQQQQPEDFVIASGEQHSVREFVTVAAAELGIDVRWVGEGVDEEGYDAKTGALIVKVDPRYFRPAEVETLLGDARKAKEKLGWEPKISFIELVREMVREDLRMAEREAVLMNQGYYSHSPRELC

SEQ ID NO: 104291 - DNA, 1122 bp, Arabidopsis thaliana
  CDS (1)..(1122)
atggcgtcagagaacaacggatccagatccgattccgaatccatcaccgctcccaaagctgattccaccgtcgttgaaccgaggaagatagctctgatcaccggaatcaccggccaggacggatcatacctgacggagttccttctcggaaaaggctacgaagttcatggtctgatccgtcgatcatcgaatttcaacacccagcgaatcaaccatatctacatcgatccacacaatgtcaacaaagctctgatgaaactccactacgccgatctcaccgacgcttcctctctccgtcgttggatcgatgtgatcaaacctgacgaagtttataacctagctgctcaatctcacgtcgctgtctccttcgagatccctgattacacagccgatgtagtcgcaaccggtgctctccgtctccttgaagccgtcagatctcacaccatcgacagtggccgtaccgtcaagtattaccaagccggatcttcggagatgtttggatcaactcctcctccacaatcggagacgacgccgattcacctcagatctccttacgcagcttccaaatgcgctgctcattggtacacagtgaattacagagaggcgtacggtctcttcgcttgtaacggaatcttgttcaatcacgagtcacctcgccgtggtgagaatttcgtgacgaggaagatcacaagagcattgggaaggatcaaggttggtttgcagacgaagctattccttgggaatttgcaagcgtcaagagattggggatttgcaggagattatgtggaagcaatgtggttgatgttgcagcaagagaagccagatgattacgttgtggcaacagaggaaggacacacagtggaagagtttcttgatgtgtcatttgggtatttgggactcaattggaaagattatgttgagattgaccagaggtactttaggcctgctgaagtagataaccttcaaggagatgcaagcaaggcaaaggaagtgttggggtggaaaccacaagtagggtttgagaagcttgtgaagatgatggttgatgaagatcttgagcttgctaagagggagaaagtgcttgttgatgctggatacatggatgctaagcagcaaccttga

SEQ ID NO: 104292 - protein, 373 aa, Arabidopsis thaliana
MASENNGSRSDSESITAPKADSTVVEPRKIALITGITGQDGSYLTEFLLGKGYEVHGLIRRSSNFNTQRINHIYIDPHNVNKALMKLHYADLTDASSLRRWIDVIKPDEVYNLAAQSHVAVSFEIPDYTADVVATGALRLLEAVRSHTIDSGRTVKYYQAGSSEMFGSTPPPQSETTPIHLRSPYAASKCAAHWYTVNYREAYGLFACNGILFNHESPRRGENFVTRKITRALGRIKVGLQTKLFLGNLQASRDWGFAGDYVEAMWLMLQQEKPDDYVVATEEGHTVEEFLDVSFGYLGLNWKDYVEIDQRYFRPAEVDNLQGDASKAKEVLGWKPQVGFEKLVKMMVDEDLELAKREKVLVDAGYMDAKQQP

SEQ ID NO: 104293 - DNA, 1146 bp, Helicobacter pylori 26695
  CDS (1)..(1146): transl_table=11
atgaaagaaaaaatcgctttaatcaccggggttaccgggcaagacgggagctatctggctgaatacttgctgaatttgggttatgaagtgcatgggttaaaaaggcgctcttctagcatcaacacttctaggatcgatcatctgtatgaagatttgcatagcgatcataaaaggcgttttttcttacactatggggatatgaccgatagctctaatcttatccatttaatcgctaccactaagcctacagagatttataatttagccgctcaaagccatgtaaaagtctcttttgaaacccccgaatacaccgctaacgctgatggtattggcacgctaaggattttagaagccatgcggattttaggattagaaaagaaaacgcgcttttatcaagccagcacgagcgaattgtatggcgaagtcttagaaaccccgcaaaatgaaaacaccccctttaacccacgaagcccctatgcggtcgctaaaatgtatgccttttacatcaccaaaaattacagagaggcctataacttgtttgcggttaatggcattctttttaaccatgagagcagggtaaggggcgaaacttttgtaacccgtaaaatcacacgagccgctagcgcgatagcgtataacttaacggattgcttgtatttagggaatttagacgctaaaagagactgggggcatgccaaagattacgtgaaaatgatgcatttaatgctccaagcgcccatcccacaagattatgtgatcgccacaggaaagaccacaagcgtgcgcgattttgtgaaaatgagctttgaatttatcggtatcaatttagaatttcaaaatacagggattaaagaaatcggtttgattaaaagcgttgatgaaaaaagagcgaacgctttaaaattgaacttaagccatttaaaaaaaggccaaatcgtggtgcgcatagacgagcgttatttcaggcctaccgaagtggatttgcttttaggcgatcccactaaggcagagaaagagctagactgggttagggaatacgatttaaaagagttggttaaggacatgttagaatacgatttaaaagaatgccaaaaaaacctttacttgcaagatgggggttatattttaaggaatttttatgaatga

SEQ ID NO: 104294 - protein, 381 aa, Helicobacter pylori 26695
MKEKIALITGVTGQDGSYLAEYLLNLGYEVHGLKRRSSSINTSRIDHLYEDLHSDHKRRFFLHYGDMTDSSNLIHLIATTKPTEIYNLAAQSHVKVSFETPEYTANADGIGTLRILEAMRILGLEKKTRFYQASTSELYGEVLETPQNENTPFNPRSPYAVAKMYAFYITKNYREAYNLFAVNGILFNHESRVRGETFVTRKITRAASAIAYNLTDCLYLGNLDAKRDWGHAKDYVKMMHLMLQAPIPQDYVIATGKTTSVRDFVKMSFEFIGINLEFQNTGIKEIGLIKSVDEKRANALKLNLSHLKKGQIVVRIDERYFRPTEVDLLLGDPTKAEKELDWVREYDLKELVKDMLEYDLKECQKNLYLQDGGYILRNFYE

SEQ ID NO: 104295 - DNA, 1038 bp, Aquifex aeolicus VF5
  CDS (1)..(1038): transl_table=11
atgtctggaaagcgtgctttaattacaggaatcagggggcaggatggagcttacttggctaagctcttattagaaaagggatacgaggtttacggagctgataggagaagcggagaatttgcgagctggagactgaaagaactcgggatagaaaacgacgtaaagatcattcacatggatctgcttgagttttcaaacattatcagaaccatagaaaaggttcaacccgatgaagtttacaacttagcagctcagagctttgtgggagtttcctttgaacagcccatacttaccgcggaagtagatgccataggagttctgagaattcttgaagctctgagaacagtaaaacctgacaccaagttttatcaggcttccacgagcgagatgttcggtaaggtgcaggaaattccccaaacggaaaaaacgcctttttaccccagaagtccttatgcggttgccaaactcttcggacactggataacggtaaattacagggaagcttataacatgttcgcctgcagtgggatactctttaaccacgaatcacccctaaggggtattgaatttgtgacgagaaagataacatacagcttggcgaggataaagtacggacttcaggataagttagttctcggaaacttaaatgccaagagggactggggatacgcacccgaatacgtggaagctatgtggcttatgatgcagcagccggaaccagatgactacgttatagcgactggggaaacccataccgttcgggaattcgtagaaaaagcggcgaaaatagcggggttcgacatagagtgggtcggtgaagggataaacgagaaaggaatagacagaaacacaggtaaggtgatagtggaagtctcggaagaattcttcagacccgcggaagtggacatacttgtaggaaatcccgaaaaggctatgaagaagctcggatggaaaccgagaaccacttttgacgaactcgttgaaataatgatggaagcggaccttaaaagagtaagagacagagaagttagcgtttaa

SEQ ID NO: 104296 - protein, 345 aa, Aquifex aeolicus VF5
MSGKRALITGIRGQDGAYLAKLLLEKGYEVYGADRRSGEFASWRLKELGIENDVKIIHMDLLEFSNIIRTIEKVQPDEVYNLAAQSFVGVSFEQPILTAEVDAIGVLRILEALRTVKPDTKFYQASTSEMFGKVQEIPQTEKTPFYPRSPYAVAKLFGHWITVNYREAYNMFACSGILFNHESPLRGIEFVTRKITYSLARIKYGLQDKLVLGNLNAKRDWGYAPEYVEAMWLMMQQPEPDDYVIATGETHTVREFVEKAAKIAGFDIEWVGEGINEKGIDRNTGKVIVEVSEEFFRPAEVDILVGNPEKAMKKLGWKPRTTFDELVEIMMEADLKRVRDREVSV

SEQ ID NO: 104297 - DNA, 1023 bp, Mycobacterium tuberculosis H37Rv
  CDS (1)..(1023): transl_table=11
gtgaagcgagcgctcatcaccggaatcaccggccaggacggctcgtatctcgccgaactgctgctggccaaggggtatgaggttcacgggctcatccggcgcgcttcgacgttcaacacctcgcggatcgatcacctctacgtcgacccgcaccaaccgggcgcgcggctgtttctgcactatggtgacctgatcgacggaacccggttggtgaccctgctgagcaccatcgaacccgacgaggtgtacaacctggcggcgcagtcacacgtgcgggtgagcttcgacgaacccgtgcacaccggtgacaccaccggcatgggatccatgcgactgctggaagccgttcggctctctcgggtgcactgccgcttctatcaggcgtcctcgtcggagatgttcggcgcctcgccgccaccgcagaacgagctgacgccgttctacccgcggtcaccgtatggcgccgccaaggtctattcgtactgggcgacccgcaattatcgcgaagcgtacggattgttcgccgttaacggcatcttgttcaatcacgaatcaccgcggcgcggtgagacgttcgtgacccgaaagatcaccagggccgtggcacgcatcaaggccggtatccagtccgaggtctatatgggcaatctggatgcggtccgcgactgggggtacgcgcccgaatacgtcgaaggcatgtggcggatgctgcagaccgacgagcccgacgacttcgttttggcgaccgggcgcggtttcaccgtgcgtgagttcgcgcgggccgcgttcgagcatgccggtttggactggcagcagtacgtgaaattcgaccaacgctatctgcggcccaccgaggtggattcgctgatcggcgacgcgaccaaggctgccgaattgctgggctggagggcttcggtgcacactgacgagttggctcggatcatggtcgacgcggacatggcggcgctggagtgcgaaggcaagccgtggatcgacaagccgatgatcgccggccggacatga

SEQ ID NO: 104298 - protein, 340 aa, Mycobacterium tuberculosis H37Rv
MKRALITGITGQDGSYLAELLLAKGYEVHGLIRRASTFNTSRIDHLYVDPHQPGARLFLHYGDLIDGTRLVTLLSTIEPDEVYNLAAQSHVRVSFDEPVHTGDTTGMGSMRLLEAVRLSRVHCRFYQASSSEMFGASPPPQNELTPFYPRSPYGAAKVYSYWATRNYREAYGLFAVNGILFNHESPRRGETFVTRKITRAVARIKAGIQSEVYMGNLDAVRDWGYAPEYVEGMWRMLQTDEPDDFVLATGRGFTVREFARAAFEHAGLDWQQYVKFDQRYLRPTEVDSLIGDATKAAELLGWRASVHTDELARIMVDADMAALECEGKPWIDKPMIAGRT

SEQ ID NO: 104299 - DNA, 1146 bp, Helicobacter pylori J99
  CDS (1)..(1146): transl_table=11
atgaaagaaaaaatcgctttaatcaccggggttaccgggcaagacgggagctatctggctgaatacttgctgaatttgggttatgaagtgcatgggttaaaaaggcgctcttctagcatcaacacttctaggatcgatcatttgtatgaagatttgcacagcgaacacaaaaggcgttttttcttgcactatggggatatgaccgatagctctaacctcatccatttgatcgctaccactaagcccacagagatttataatttagccgcgcaaagccatgtgaaagtctcttttgaaaccccagaatacaccgctaacgctgatggtattggcacgctaaggattttagaggccatgcggattttgggcttagaaaagaaaacgcgcttttatcaagctagcacgagcgaattgtatggcgaagtcttagaaaccccacaaaatgaaaacaccccctttaacccacgaagcccctatgcggtcgctaaaatgtatgccttttacatcactaaaaattacagagaggcttataatttgtttgcggttaatggcatcctttttaaccatgagagcagggtaaggggcgaaacttttgtaacccgtaaaatcacacgagccgctagcgcgatagcgtataacttaacggattgcttgtatttagggaatttggacgctaaaagagactgggggcatgccaaagattatgtgaaaatgatgcatttgatgctccaagcacccaccccacaagattatgtaatcgctacagggaagaccacgagcgtgcgcgattttgtgaaaatgagctttgaatttatcggcattgatctagaatttcaaaatacagggattaaagaaatcggtttgattaaaagcgttgatgaaaaaagagcgaacgctttacaattaaacttaagccatttaaaaacgggcaaaatcgtggtgcgtatagacgagcactatttcaggcctactgaagtggatttgctcttaggcgatcccactggggctgagaaagagctgggctgggttagggaatacgatttaaaagagttggttaaggacatgttagaatacgatttaaaagaatgccagaaaaacctttacttgcaagatgggggctatactttaaggaatttttatgaatga

SEQ ID NO: 104300 - protein, 381 aa, Helicobacter pylori J99
MKEKIALITGVTGQDGSYLAEYLLNLGYEVHGLKRRSSSINTSRIDHLYEDLHSEHKRRFFLHYGDMTDSSNLIHLIATTKPTEIYNLAAQSHVKVSFETPEYTANADGIGTLRILEAMRILGLEKKTRFYQASTSELYGEVLETPQNENTPFNPRSPYAVAKMYAFYITKNYREAYNLFAVNGILFNHESRVRGETFVTRKITRAASAIAYNLTDCLYLGNLDAKRDWGHAKDYVKMMHLMLQAPTPQDYVIATGKTTSVRDFVKMSFEFIGIDLEFQNTGIKEIGLIKSVDEKRANALQLNLSHLKTGKIVVRIDEHYFRPTEVDLLLGDPTGAEKELGWVREYDLKELVKDMLEYDLKECQKNLYLQDGGYTLRNFYE

SEQ ID NO: 104301 - DNA, 1047 bp, Methanothermobacter thermautotrophicus str. Delta H
  CDS (1)..(1047): transl_table=11
atgaagagtgctttgattacaggaataactggtcaggatggggcttatctggcaaaatttctcttggaaaagggctatgaggtttatggaatttacagaaggctttcaactcctaatttctggagacttcagtaccttgaaatatttgatagaattaatctcgtacccgcagatctgactgatgagttctcacttctagaatcacttaaaatatctgatgcagatgaagtataccatcttgctgcacagagctttgttggaacatcattcgaacagcctacgagtacagcacatgttaccggtgttgctgttacaagcatgcttgaagcaataagacattataatccccatataagattctatcaagcctcaagcagtgagatatatggggatggtcacaccacaatccttaatgaaaactctccatttaagccatcgagtccctatgcagctgcaaaactttatgggtactggatgaccagaatctacagagaaggatacgacatttttgcttgtaatggaatactctttaaccatgaaagtccgctacgtggccttgagtttgtcacaaggaaaatttcgaataccgctgcaaaaatagcccttggacttgaagatgagctccttctcggaaatcttgatgcgaagagggactggggttatgcacctgattatgttgaggctatgcacatgatgctccagcacaaagagcctgatgacttcgtaatagctacagcagagactcatactgttagggagttctgtgaaaaaagtttcgaggaacttggtctcgactggcaggattatgttaaagtggacaagagatttttcagacctcttgatgttaattatctctgtggtgattactcaaaggccagagaaaaccttggttggcaacctaaaaccaaatttgaagaacttgtgaagatcatggttagagaggatcttgaaagatgggaaaggtggcagaacggagaaaaattcccctgggacgcgtcaaattatcctgatgaaacaaaattgataacgagggcactgagatcatga

SEQ ID NO: 104302 - protein, 348 aa, Methanothermobacter thermautotrophicus str. Delta H
MKSALITGITGQDGAYLAKFLLEKGYEVYGIYRRLSTPNFWRLQYLEIFDRINLVPADLTDEFSLLESLKISDADEVYHLAAQSFVGTSFEQPTSTAHVTGVAVTSMLEAIRHYNPHIRFYQASSSEIYGDGHTTILNENSPFKPSSPYAAAKLYGYWMTRIYREGYDIFACNGILFNHESPLRGLEFVTRKISNTAAKIALGLEDELLLGNLDAKRDWGYAPDYVEAMHMMLQHKEPDDFVIATAETHTVREFCEKSFEELGLDWQDYVKVDKRFFRPLDVNYLCGDYSKARENLGWQPKTKFEELVKIMVREDLERWERWQNGEKFPWDASNYPDETKLITRALRS

SEQ ID NO: 104303 - DNA, 1041 bp, Xylella fastidiosa 9a5c
  CDS (1)..(1041): transl_table=11
atgtgtaataaaagcgcggtcattacgggtattacaggacaggatggagcttatttagcgcagttgcttctcgaaatgggttatgtggtttatggtacgtatcgccgttctagctcattgaacttctggcgtattaatgaacttgggattgcacagcatcccaagttacatctggtcgaatatgatttgaccgatctctcttcgagtgtgcgactgctcgaattagccgctcctaaggaggtctataatcttgccgcacagagctttgttggcgtctcttttgaccagccattgaccacgacggacattaccggagtgggtgcggttaacctgttggaagccattcggattgttaatcctaagattcgcttctatcaggcatcgacttctgagatgtttggaaaagtccagcagactccgcagattgaggaaacacctttctatccgcgtagcccatacggtattgccaagttgtacgctcattggatgacggttaattatcgtgagtcgtacggtatctttgctgctagtggtattttgtttaatcacgaatcgccgttgcgagcgcgtgattttgtcactcgtaaaatcactcatgcgattgccatgattaaattagggaagctagacgtattgaagcttggtaatttggatgccaaacgtgattggggttttgcgaaggaatatgttgacggaatgtggcgtatgcttcaggctgatgagccagatactttcgtgctggcaaccaaccgaactgaaactgtgcgtgatttcgtcagcttggctgccagtgccgttgatatccagttggagtggaagggacaagccgaacgggaatgtggtgttgatgttgcatcgggaaaaactttagtcacaatcaatcctaagttttatcggccggcggaggtggatttgttgatcggtaatccggccaaagctagaacgaagctgggttgggaaccaaagaccacacttgaggagctttgccacatgatgatggaagcagatgtgcgccgcagcgaacgcgatttcccattctaa

SEQ ID NO: 104304 - protein, 346 aa, Xylella fastidiosa 9a5c
MCNKSAVITGITGQDGAYLAQLLLEMGYVVYGTYRRSSSLNFWRINELGIAQHPKLHLVEYDLTDLSSSVRLLELAAPKEVYNLAAQSFVGVSFDQPLTTTDITGVGAVNLLEAIRIVNPKIRFYQASTSEMFGKVQQTPQIEETPFYPRSPYGIAKLYAHWMTVNYRESYGIFAASGILFNHESPLRARDFVTRKITHAIAMIKLGKLDVLKLGNLDAKRDWGFAKEYVDGMWRMLQADEPDTFVLATNRTETVRDFVSLAASAVDIQLEWKGQAERECGVDVASGKTLVTINPKFYRPAEVDLLIGNPAKARTKLGWEPKTTLEELCHMMMEADVRRSERDFPF

SEQ ID NO: 104305 - DNA, 1047 bp, Mycobacterium tuberculosis CDC1551
  CDS (1)..(1047): transl_table=11
atgaccgacagaggcgggaagacagtgaagcgagcgctcatcaccggaatcaccggccaggacggctcgtatctcgccgaactgctgctggccaaggggtatgaggttcacgggctcatccggcgcgcttcgacgttcaacacctcgcggatcgatcacctctacgtcgacccgcaccaaccgggcgcgcggctgtttctgcactatggtgacctgatcgacggaacccggttggtgaccctgctgagcaccatcgaacccgacgaggtgtacaacctggcggcgcagtcacacgtgcgggtgagcttcgacgaacccgtgcacaccggtgacaccaccggcatgggatccatgcgactgctggaagccgttcggctctctcgggtgcactgccgcttctatcaggcgtcctcgtcggagatgttcggcgcctcgccgccaccgcagaacgagctgacgccgttctacccgcggtcaccgtatggcgccgccaaggtctattcgtactgggcgacccgcaattatcgcgaagcgtacggattgttcgccgttaacggcatcttgttcaatcacgaatcaccgcggcgcggtgagacgttcgtgacccgaaagatcaccagggccgtggcacgcatcaaggccggtatccagtccgaggtctatatgggcaatctggatgcggtccgcgactgggggtacgcgcccgaatacgtcgaaggcatgtggcggatgctgcagaccgacgagcccgacgacttcgttttggcgaccgggcgcggtttcaccgtgcgtgagttcgcgcgggccgcgttcgagcatgccggtttggactggcagcagtacgtgaaattcgaccaacgctatctgcggcccaccgaggtggattcgctgatcggcgacgcgaccaaggctgccgaattgctgggctggagggcttcggtgcacactgacgagttggctcggatcatggtcgacgcggacatggcggcgctggagtgcgaaggcaagccgtggatcgacaagccgatgatcgccggccggacatga

SEQ ID NO: 104306 - protein, 348 aa, Mycobacterium tuberculosis CDC1551
MTDRGGKTVKRALITGITGQDGSYLAELLLAKGYEVHGLIRRASTFNTSRIDHLYVDPHQPGARLFLHYGDLIDGTRLVTLLSTIEPDEVYNLAAQSHVRVSFDEPVHTGDTTGMGSMRLLEAVRLSRVHCRFYQASSSEMFGASPPPQNELTPFYPRSPYGAAKVYSYWATRNYREAYGLFAVNGILFNHESPRRGETFVTRKITRAVARIKAGIQSEVYMGNLDAVRDWGYAPEYVEGMWRMLQTDEPDDFVLATGRGFTVREFARAAFEHAGLDWQQYVKFDQRYLRPTEVDSLIGDATKAAELLGWRASVHTDELARIMVDADMAALECEGKPWIDKPMIAGRT

SEQ ID NO: 104307 - DNA, 1068 bp, Clostridium acetobutylicum ATCC 824
  CDS (1)..(1068): transl_table=11
ttgaaaaaagctattataaccggaataactgggcaggatgggtcttatttaacagagtttttattaaaaaagggttatgaggttcatgggataataagacgtgccagctcttttaataccaaaagaatagattatttgtttgaagatccaaagataggtaataagttattatttcttcaccatggagatttaacagattcaagtaatattaacaggctattagagaaggttcagccaactgaaatatacaatttagctgctcaaagccatgttcaagtttcatttgaggttcctgagtatacagtagaaactgatgcagtagggactttaagatttttagatgccataaaggaattaggaattaagtgtaagttttatcaagcgtctacatcagaactttttggtggaatgccaggaacagcgcctcaaagtgaaaaaactccattttatcctagaagcccgtatgcagcagctaagctttatgcatattggattactgtaaattatagggaagcatatggtattttcgcttgcaatggtgttctttttaatcatgaatccccaagaagaggagaaacttttgtaacaagaaagataactagggcgattgcaaatattatagaaggaaaccaagataaagtttcactgggaaacttaaatgctaaacgtgactggggatatgcaggtgattatgtagaagctatgtggttaatgcttcagaaagacacacctaaagattatgtaattgcaacaggggaaactcatactgtacgtgaatttgtagaaaaagcctttaaatttgcaggaataaagataaaatggattgggcagggaattgaggaaaagggaatagacttaaaaacaggtaaaacacttgtggatgtaaaccctagatatttcaggccaactgaggttgaacttcttttaggagatccatcaatggctgaaagggaacttgggtggaggcgcaaagtgaattttgaggaacttgtttacatgatggttgaggaggacttgaagaaaacacgtataactaatgtagatagggtgagagaactgttaacataa

SEQ ID NO: 104308 - protein, 355 aa, Clostridium acetobutylicum ATCC 824
MKKAIITGITGQDGSYLTEFLLKKGYEVHGIIRRASSFNTKRIDYLFEDPKIGNKLLFLHHGDLTDSSNINRLLEKVQPTEIYNLAAQSHVQVSFEVPEYTVETDAVGTLRFLDAIKELGIKCKFYQASTSELFGGMPGTAPQSEKTPFYPRSPYAAAKLYAYWITVNYREAYGIFACNGVLFNHESPRRGETFVTRKITRAIANIIEGNQDKVSLGNLNAKRDWGYAGDYVEAMWLMLQKDTPKDYVIATGETHTVREFVEKAFKFAGIKIKWIGQGIEEKGIDLKTGKTLVDVNPRYFRPTEVELLLGDPSMAERELGWRRKVNFEELVYMMVEEDLKKTRITNVDRVRELLT

SEQ ID NO: 104309 - DNA, 978 bp, Caulobacter crescentus CB15
  CDS (1)..(978): transl_table=11
atggcgaaaacggctttgatcaccggtgtgaccggtcaggacggggcgtacctcgccaagctgctgctggagaagggttacaccgtccacggcatgctgcgtcgctcggcctcggccgatgtgatcggcgaccgcctgcgctggatcggcgtctatgacgacatccagttcgagctgggcgacctcttggacgagggcggtctggcgcgcctgatgcggcgcctgcagccggacgaggtctacaacctggcggcccagagcttcgtcggcgcctcgtgggaccagccgcacctgacgggctcggtgacgggcctgggcacgaccaacatgctcgaagccgtgcgtctggaatgcccgcaggcgcggttctatcaggcctcgtcgtccgaaatgtacggtctggtgcagcacccgatccagtcggagacgacgccgttctatccccgctcgccctatgcggtggccaagctctacgcccactggatgacggtgaactatcgcgagagctttggcctgcacgcctcggccggcatcctgttcaaccacgagagcccgctgcgcggcatcgagttcgtgacccgcaaggtcaccgacgcggtggcggccatcaagctgggtcagcaaaagaccgtcgatctgggcaatctcgacgccaagcgcgactggggtcacgccaaggactatgtcgaggccatgtggctgatgctgcagcaggagacgccggacgactatgtggtcgcgaccggcaagacctggaccgtgcgccagatgtgcgaagtggccttcgcccatgtcggcctgaactatcaggaccacgtgacgatcaatccgaagttcctgcgtccggcggaagtggacctgctgctgggcgatccggccaaggccaaggccaagctcggctgggaacccaagacgaccatgcaacagatgatcgccgaaatggtcgacgccgacatcgcgcggcgctcgcgcaactga

SEQ ID NO: 104310 - protein, 325 aa, Caulobacter crescentus CB15
MAKTALITGVTGQDGAYLAKLLLEKGYTVHGMLRRSASADVIGDRLRWIGVYDDIQFELGDLLDEGGLARLMRRLQPDEVYNLAAQSFVGASWDQPHLTGSVTGLGTTNMLEAVRLECPQARFYQASSSEMYGLVQHPIQSETTPFYPRSPYAVAKLYAHWMTVNYRESFGLHASAGILFNHESPLRGIEFVTRKVTDAVAAIKLGQQKTVDLGNLDAKRDWGHAKDYVEAMWLMLQQETPDDYVVATGKTWTVRQMCEVAFAHVGLNYQDHVTINPKFLRPAEVDLLLGDPAKAKAKLGWEPKTTMQQMIAEMVDADIARRSRN

SEQ ID NO: 104311 - DNA, 1089 bp, Synechocystis sp. PCC 6803
  CDS (1)..(1089): transl_table=11
atgtcaaagtctaaagttgttttgctgacaggcatcacggggcaagatggctcctatctgagtgaattgttgttggaaaagggctaccaagtccatggcatcattcgccgaacttctacctttaacactgaccgcattgatcatctttatgttgatccccatgatcttgaggcgaaactccgacttcattatggtgatctgaccgacggcaccaccctgcgccgcattttagaagatgtcaaaccgacggagatttacaatctgggggcccaatcccacgtgcgggtgagctttgattctccggaatacactgtagattcagtggccatggggacgctacgactattggaagcgattcgggattatcaacatcgcaccggcatccaagtaaggttctatcaagccggttcttcggaaatgttcggcaaagtgcaggagattccccaaaaggaaaccacccccttttatccccgcagtccctacgcctgtgccaaggtttatggccattggcaaacggtgaactatcgggaatcctatgacttattcgcctgtaacggcattttgttcaaccacgaatccccccgccggggagaaacctttgtaaccaggaaaattactagggcgatcgccagaattgtggccggcacccaaaagaaattgtatttaggcaatatcgattccaagcgggattggggctatgccaaggactatgtacgggccatgtgggccatgttgcaacaggaacagcccgatgactatgtggtggccacgggggaaacccacgaagtgaaggaatttttagaaattgcctttggttacgtcaacctcaactggcagaactatgtggcctttgatgagcgctatttacgccccgctgaagtagatttattaatcggcgatccggcgaaaaccaaagcccaattgggctgggaaccctcggttacctttacggaattagttcatttaatggtggaggcagacttagcagtccttggtttaacttctcccaaccagagtggacgaatcaaggagctcatggcccaggatatggccttcattcggagccaaaatggccatgccgtcgattaa

SEQ ID NO: 104312 - protein, 362 aa, Synechocystis sp. PCC 6803
MSKSKVVLLTGITGQDGSYLSELLLEKGYQVHGIIRRTSTFNTDRIDHLYVDPHDLEAKLRLHYGDLTDGTTLRRILEDVKPTEIYNLGAQSHVRVSFDSPEYTVDSVAMGTLRLLEAIRDYQHRTGIQVRFYQAGSSEMFGKVQEIPQKETTPFYPRSPYACAKVYGHWQTVNYRESYDLFACNGILFNHESPRRGETFVTRKITRAIARIVAGTQKKLYLGNIDSKRDWGYAKDYVRAMWAMLQQEQPDDYVVATGETHEVKEFLEIAFGYVNLNWQNYVAFDERYLRPAEVDLLIGDPAKTKAQLGWEPSVTFTELVHLMVEADLAVLGLTSPNQSGRIKELMAQDMAFIRSQNGHAVD

SEQ ID NO: 104313 - DNA, 963 bp, Synechocystis sp. PCC 6803
  CDS (1)..(963): transl_table=11
atgaaaatagcattaatttctggcatatcaggacaagatggggcatatttagctcaactactaattgaaaaaagttatgccgtttggggtacgtcaagggacgctcaaatatccaatttccgtaatctcaaaattttgggtatccgggagtctataaaagtcgtctccatggccttaacagacttccgcagtgtcttgcaggtggtttcacaggtcaaccccgatgaaatttataaccttgccggacaatcttccgttggtttatcctttgaacagcccgttgaaactctagaaagtatcactatcggcaccttaaacctattagaagttgttcgctttttggacaaaccaatcaaactctacagcgctagttctagtgaatgctttggagatacaggcaattccgccgctgatgaaaataccgcctttcgtcctaggagtccctatgccgtggccaagtccgccgccttttggcaagtggcaaactatcgagaagcgtataatctatatgcgtgctccggcattctttttaaccatgaatctcccttgcggccagaaagatttgtgactcaaaaaattatcgctactgcgtgtcgtattgcccagggcagtcaggaaaagctctatttgggcaacaccagcatcagtcgggattggggatgggctccagagtatgtcgaggctatgtacctaatgctccaacaggcaaaaccagatgattatgtcattgccacaggggcgagttatcttttacaggattttgtggaaattactttctcttcattgggattaaactggcgggagcatgtcatcatcgatcaaagtttatttcgtcctacggatttggcaatgggtaaagcaaatccccgcaaagctcaggagcaattggggtggaaagcagagtataaaaccccagacgtggtaaaaatgatgattaatgcgaggtcaaatgggaaatattga

SEQ ID NO: 104314 - protein, 320 aa, Synechocystis sp. PCC 6803
MKIALISGISGQDGAYLAQLLIEKSYAVWGTSRDAQISNFRNLKILGIRESIKVVSMALTDFRSVLQVVSQVNPDEIYNLAGQSSVGLSFEQPVETLESITIGTLNLLEVVRFLDKPIKLYSASSSECFGDTGNSAADENTAFRPRSPYAVAKSAAFWQVANYREAYNLYACSGILFNHESPLRPERFVTQKIIATACRIAQGSQEKLYLGNTSISRDWGWAPEYVEAMYLMLQQAKPDDYVIATGASYLLQDFVEITFSSLGLNWREHVIIDQSLFRPTDLAMGKANPRKAQEQLGWKAEYKTPDVVKMMINARSNGKY

SEQ ID NO: 104315 - DNA, 1005 bp, Nostoc sp. PCC 7120
  CDS (1)..(1005): transl_table=11
atgactaaaacagccttagttacaggtattactggtcaagatggctactatctcagccatttgctcctcaatcaaggttatcgagtagtgggattagtttcaccacaccgccaaccgaatttggcaaagttaggggatttggcaaacaaggtagaaatatataatgttgatttgagagatcctgtagcattgttaaatgcagtggaacaactgcgtccccaagaaatttataatttagctgcacctagttttgtgcctgattcgtggaaagacccactaggaactttggatctgattactgggactgctacccgactgttagatgcagtccgacaggttggtttatctacaagattctatcaagctagtagttccgagatgtttggggatgttttatcttctcctcaagatgaagaaaccagctttcgtcccaaaaatccctacgcagcagcaaagttacacgcccattggacaatggtgcatcaccgacagcgctatggtctatttgcctgtagtggcattttatataaccatgagtcacctttacgcccgcctcaatttgttacgcgtaaagtttctttggctgctgcatcgattaagttgggtttagctcagacactggaaatgggtaacttagatgctaaacgtgattggggatttgctggcgattacgtcaaagctatgtggctgatgttgcaagcagaggaaccagaagagtacgtaataggtacaggaaaactgcacagtgttaaagaattagtgtctatcgcttttgagtcggtgggcttaaactggcaaaatcatgtagtgattaatacagatttgctcagacaagacgaacattttcagctcgtagctaaccctattaaagctaaaaagaaccttggttgggaaacggaagttagctttgagagacttttagagaaaatggtgcaaacagatgtagaaagattacaaagcggtgcgatcgcccaagcatcagaaggaaaattactggtagattag

SEQ ID NO: 104316 - protein, 334 aa, Nostoc sp. PCC 7120
MTKTALVTGITGQDGYYLSHLLLNQGYRVVGLVSPHRQPNLAKLGDLANKVEIYNVDLRDPVALLNAVEQLRPQEIYNLAAPSFVPDSWKDPLGTLDLITGTATRLLDAVRQVGLSTRFYQASSSEMFGDVLSSPQDEETSFRPKNPYAAAKLHAHWTMVHHRQRYGLFACSGILYNHESPLRPPQFVTRKVSLAAASIKLGLAQTLEMGNLDAKRDWGFAGDYVKAMWLMLQAEEPEEYVIGTGKLHSVKELVSIAFESVGLNWQNHVVINTDLLRQDEHFQLVANPIKAKKNLGWETEVSFERLLEKMVQTDVERLQSGAIAQASEGKLLVD

SEQ ID NO: 104317 - DNA, 1071 bp, Agrobacterium tumefaciens str. C58
  CDS (1)..(1071): transl_table=11
atggtagacaagagagccttgattatcggcgtaaccgggcaggatggcgcttatctcagcgaattgctgcttgccaagggatatatggttcacggcctgaagaggcggtcttcctcctttaataccggtcggatcgatcatctttaccaagatcccttcgaggaagacctgcgctttcgcctgcacttcggtgacctcacggacgccacgaacctgtgccgggtcattcaggaggtccagcccgacgagatctacaatctaggcgcccagagccatgtccaggtcagcttcgagacgccggaatatacggcaaatgcggatgcgcttggcacgctgaggctgctggaagccatgcgtatcctgaaccttggcgatcgctgccggttttaccaggcatccacatcggagctgttcggggggatgggcacggtcgcccagcacgagggtacgccgttctatccgagaagcccctatgctgcggccaaactctacgcatactggatgacggtcaattaccgggaaagttacggctttcacgcatccaacggcattctcttcaaccatgagagccccattcgcggggagacattcgtcacccggaagatcacgcgtggcgttgcggccatcgagcgcggtctcatgagcaagctgcgtcttggcaatctcgacgcaaagagggactgggggcatgcgcgcgattatgtcgaaggcatgtggcgcatcgtgcagcaggaaatacccgaggactatgtgcttgcgaccggcgaagcacatacggtgcgggaatttgttgagcttgctttcggcgtggttggcaagaccatcgaatggcacggcgatggcagtgacgaagtgggatatgatgccaaaaccggcaattcgatcatcgaaatcgatcccagatattttcgtccggcggaagtggattttcttctcggcgatcccagcaaggcgcgcagaaaactcgactggagtcactcgacgtccttttgcgacctcgttcaggaaatggtcgaagcggatcttcgcctcgtaatgttggaagagggaagaaatgagttcgtcgcctga

SEQ ID NO: 104318 - protein, 356 aa, Agrobacterium tumefaciens str. C58
MVDKRALIIGVTGQDGAYLSELLLAKGYMVHGLKRRSSSFNTGRIDHLYQDPFEEDLRFRLHFGDLTDATNLCRVIQEVQPDEIYNLGAQSHVQVSFETPEYTANADALGTLRLLEAMRILNLGDRCRFYQASTSELFGGMGTVAQHEGTPFYPRSPYAAAKLYAYWMTVNYRESYGFHASNGILFNHESPIRGETFVTRKITRGVAAIERGLMSKLRLGNLDAKRDWGHARDYVEGMWRIVQQEIPEDYVLATGEAHTVREFVELAFGVVGKTIEWHGDGSDEVGYDAKTGNSIIEIDPRYFRPAEVDFLLGDPSKARRKLDWSHSTSFCDLVQEMVEADLRLVMLEEGRNEFVA

SEQ ID NO: 104319 - DNA, 1038 bp, Methanosarcina acetivorans C2A
  CDS (1)..(1038): transl_table=11
gtggtaaaaatgtctaaagttgcattacttacaggagtgaccgggcaggatggagcataccttgccgaactcctgttgaataaaggatatactgtgcatgggatgcacagaagatcgtctctgagcaataccggacgtatagatcatctcctgcaagatccccatcaagaaaactccaaatttattttgcaccacggagacctgaccgattcggcaaacgttttcagacttattaaggacatcgaacctgatgaaatttacaacctcggcgcccaaagtcatgtccaggtttcttttgagactcccgaatacactgcgaactcggatggacttggagcccttcgtattctggaagcaataagaattctcgggcttgaagacaaatctaagttttatcaggcatcaaccagtgaattattcgggaaagtacgtgaagtcccacaaaaagaaagtactcctttctatccccgaagtccctattcggtagctaaactgtatgcttactggattaccgtaaactaccgtgaagcttatgatatgtttgcctgcaacggcatcctttttaatcacgaatctcctttgagaggagaaactttcgttaccaggaagattacaatagctgtatcaaagattaaaaaagggcttcaggataaactctatcttggaaatctcaatgccaaacgtgactggggattttcaggggattatgtggaagccatgtggctcattttacagcaggataaacccgaagattacgtcgtcgcaacaggagaaacccattccgttagagaattcaccgaacttgcattcagagaggcaggcattgacatcgaatgggaaggtgaaggagttaacgagattggcagggatgctaacagcggaaaaatactcgtggaagttgatccgatgttttacagaccgactgaagtggatattttgataggagacccttcaaaagccagagaaaaacttggctggaaaacaaaggtcagctttgaagaattggtcggaatgatggtaaaaggcgatatgagataa

SEQ ID NO: 104320 - protein, 345 aa, Methanosarcina acetivorans C2A
MVKMSKVALLTGVTGQDGAYLAELLLNKGYTVHGMHRRSSLSNTGRIDHLLQDPHQENSKFILHHGDLTDSANVFRLIKDIEPDEIYNLGAQSHVQVSFETPEYTANSDGLGALRILEAIRILGLEDKSKFYQASTSELFGKVREVPQKESTPFYPRSPYSVAKLYAYWITVNYREAYDMFACNGILFNHESPLRGETFVTRKITIAVSKIKKGLQDKLYLGNLNAKRDWGFSGDYVEAMWLILQQDKPEDYVVATGETHSVREFTELAFREAGIDIEWEGEGVNEIGRDANSGKILVEVDPMFYRPTEVDILIGDPSKAREKLGWKTKVSFEELVGMMVKGDMR

SEQ ID NO: 104321 - DNA, 1023 bp, Methanosarcina acetivorans C2A
  CDS (1)..(1023): transl_table=11
ttgacaaaggtcgcactgataacaggcataacaggccaggatggaacatacatttcaaagcttttattagataaggggtacgtagtacatggaataaaaagagaatcttctaccagaaccgaagataaggataaagagcaaaaaaacacaaatcttcattttcacttctgtgacatgaccgattattcgaagcttctaagaattattcaagagatacgtccggatgagatctataatctggcggcccaaagcaatgtgcaaacctcttttgaccgaccggaatatacagcagaaattaatgcacttggcaccctgcgcctcctcgaagctatccgtactcttgggctgaaaaagaaaacaaaatttttccaggcttctaccggggatttattcgggaactccctggaaatcccgcaaaatgaaaataccccctttcaccctaggaacccttatgcagtgtccaagttgtacgcctactggattgccataaactatcgtgaagcttatgatatgtttgtttgcaatggtatcctttttaatcatgaatccccgataagacccgaaaattttgttacgagaaaaattaccagggctgcggtcagaataaaaaaaggatttcaagaaaaactttaccttgggaatctgaatgcaaaaagagactggggatttgcaggagactacgttgaagctatgtggctgatgttgcaacaggataaaccggatgattatgtgattgcaacaggtgaaacccgttcggtacaggaactggtggaattcgcattcagagaggtcagtattgaactcgaatgggaaggagaagggcttgagaaaaaagggagaaatgctgtaacaggtgagattctggtcgaggtagaccccaggttttacaggccccttgagtcaagcttattagttggaaacccttcaaaagccagagaaaaacttggatggattccggaagtaaattttgaagagctggttaaaatgatggtcaaagatgacctggaattcgtaaaatgttaa

SEQ ID NO: 104322 - protein, 340 aa, Methanosarcina acetivorans C2A
MTKVALITGITGQDGTYISKLLLDKGYVVHGIKRESSTRTEDKDKEQKNTNLHFHFCDMTDYSKLLRIIQEIRPDEIYNLAAQSNVQTSFDRPEYTAEINALGTLRLLEAIRTLGLKKKTKFFQASTGDLFGNSLEIPQNENTPFHPRNPYAVSKLYAYWIAINYREAYDMFVCNGILFNHESPIRPENFVTRKITRAAVRIKKGFQEKLYLGNLNAKRDWGFAGDYVEAMWLMLQQDKPDDYVIATGETRSVQELVEFAFREVSIELEWEGEGLEKKGRNAVTGEILVEVDPRFYRPLESSLLVGNPSKAREKLGWIPEVNFEELVKMMVKDDLEFVKC

SEQ ID NO: 104323 - DNA, 1056 bp, Methanosarcina mazei Go1
  CDS (1)..(1056): transl_table=11
atgactaaaacagccttaattaccggaataacgggccaggatggggcttacttagcggaatttctccttaacaaaggatatgttgtacacgggatcaaacgtagatcctcttcattcaataccgcaagagttgaccatctttataaagacccccatgagcgaaatgtaaatttttttatgcattacggcgatcttacggattctactaaccttatcaggataattcaggaagttcagcctgatgaaatttacaaccttgccgctcaaagccatgtgcaggtgtcttttgagacccctgaatacacagcaaattccgatggacttggcacattacgtcttctggaggctattcgaatccttggcatggagaaaaaaacgaaattataccaggcttcaaccagtgaactttacggaaaagtccaggatatccctcagaaagaaactactcccttctatccaagaagcccttatgcagcggctaaactatacgcttactggattacggttaactatcgggaagcctacggcatttttgcatgtaatggaattttgttcaatcacgaatctcctattcggggagaaacattcgttaccagaaagatcactatggcagccacaaaaataaagcatggacttcaggagaagctttaccttggtaatcttgatgccaaaagggattggggatttgcaaaggattatgtggaagcaatgtggctgatccttcagcaagaatatccagaagactatgtgattgctactggagagactcactcggtaagggaatttacggaattagcttttaaggaagtagggatcgaggttttgtggaaaggcaaaggtagcgatgaagtcggaattgattccagtacaggtaaagttctggtagaagtagatcccagatattatagacctacggaagtagatttactaattggagatccctcaaaagcaaaggaaaaacttggctggaaaccaaaagtaaaactggaagagctggtaaaaatcatgataacggccgacgagaaagctgtacaggaaaatcacacttttgagtaa

SEQ ID NO: 104324 - protein, 351 aa, Methanosarcina mazei Go1
MTKTALITGITGQDGAYLAEFLLNKGYVVHGIKRRSSSFNTARVDHLYKDPHERNVNFFMHYGDLTDSTNLIRIIQEVQPDEIYNLAAQSHVQVSFETPEYTANSDGLGTLRLLEAIRILGMEKKTKLYQASTSELYGKVQDIPQKETTPFYPRSPYAAAKLYAYWITVNYREAYGIFACNGILFNHESPIRGETFVTRKITMAATKIKHGLQEKLYLGNLDAKRDWGFAKDYVEAMWLILQQEYPEDYVIATGETHSVREFTELAFKEVGIEVLWKGKGSDEVGIDSSTGKVLVEVDPRYYRPTEVDLLIGDPSKAKEKLGWKPKVKLEELVKIMITADEKAVQENHTFE

SEQ ID NO: 104325 - DNA, 1080 bp, Thermosynechococcus elongatus BP-1
  CDS (1)..(1080): transl_table=11
atgggcgatcgcaagcgggcattgatcacgggcatcactggccaagatggctcctacctcagtgagctgctcttggagaaaggctatgaagtgcatggcattattcgccgcacctccacatttaatactgatcgcattgaccacatttacgttgacccccaccaagagggggctactctgcgcctacactatggtgatctcaccgatggcagcaccctgcggcgcattatcgaacttagccagcccgatgaaatttataatctgggggcgcaatcccacgtgcgggtaagctttgatgctccccaatataccgttgacactgttgccatgggaaccctgcggctcctagaggccattcgcgaataccaagagcgcaccggcaaacaggtgaagttttaccaggcgggttcctcggagatgtttggcctcgtgcaggaggtaccgcagcgggaaaccacgcccttttatccccgcagtccctatgcctgtgctaaggtctatgcccattggcaaacggtcaattatcgcgaggcctataacctttttgcctgtaatggcattctctttaaccacgaaagcccgcggcggggtgaaacattcgtgacccgcaaaattacccgtgccgttgcccgcattgtggctggccagcaaaacaagctctatttgggcaacttagacgccaaacgggactggggctacgccaaggactatgtacgtgccatgtggttaatgctgcaacaggagcaacccgatgactatgtggtggccacgggggaaacccactctgtgcgggaatttctcgagctggcctttggctatgtggatctgaactgggaggattacgtggaatttgacccccgctatctgcgtcccacggaggtggatctactcttgggggatcccactaaggcaaaaacggtattgggttggcagccctcggttacatttcctgaactagtggccctaatggtggaagcagatctccatgccgtgggaattcaaggaactactcccaaaaccacttccgacaccgtgctggatctcattgcccagcgacagttgatcagtaaggcagactag

SEQ ID NO: 104326 - protein, 359 aa, Thermosynechococcus elongatus BP-1
MGDRKRALITGITGQDGSYLSELLLEKGYEVHGIIRRTSTFNTDRIDHIYVDPHQEGATLRLHYGDLTDGSTLRRIIELSQPDEIYNLGAQSHVRVSFDAPQYTVDTVAMGTLRLLEAIREYQERTGKQVKFYQAGSSEMFGLVQEVPQRETTPFYPRSPYACAKVYAHWQTVNYREAYNLFACNGILFNHESPRRGETFVTRKITRAVARIVAGQQNKLYLGNLDAKRDWGYAKDYVRAMWLMLQQEQPDDYVVATGETHSVREFLELAFGYVDLNWEDYVEFDPRYLRPTEVDLLLGDPTKAKTVLGWQPSVTFPELVALMVEADLHAVGIQGTTPKTTSDTVLDLIAQRQLISKAD

SEQ ID NO: 104327 - DNA, 1071 bp, Brucella suis 1330
  CDS (1)..(1071): transl_table=11
ttgcaggataaaacagctctcatcgtcggtgtaaccgggcaggatggcgcctatctaagcgagcttctgctgggcaagggctatcgggtgcatggcctgaaaaggcggtcatcgtcattcaatacggcgcgtatcgaccatctttatcaagacccgcatgaggaagacatccgctttcgcctgcatttcggcgacctgacagacgcaaccaatctgtgccgcgtcatccaggaagtgcagcctgacgagatttataatctcggcgcccagagccatgtgcaggtgagttttgaaacgccggaatatacggccaatgccgatgcgctcggcacactgcgcctgcttgaatccatgcgcatcctgggtctcggcaaaagctgccgtttctatcaggcttccacttcggagcttttcggcaatagttcccaccatgcgcaaaacgagcagacgcctttcgctccgcgcagcccatatgcaaccgccaagctttatgcttactggacaacggtgaactatcgcgatgcctatggtttccacgcctcgaacggcatcttgttcaatcatgaaagccccttgcggggcgaaaccttcgtcacccgcaagatcacgcgcgcagttgcagctatcgaacgcgggctacaggacaggctgcggcttggcaatcttgaggcccgccgcgactggggccatgcgcgcgattatgtcgaaggcatgtggcgcattctacaggaagacacaccggacgattatgtgctcgccacgggtgaaacgcatacggtgcgtgaattcatcgaacacgccttcaaggccgttgacaagcagatcgtatggcatggcgatggcgtggacgaggtcggcatcgaccgcaagacgggcaattgcctgatcgagatcgacccgcgctatttccgccccaacgaagtggatttccttatgggcgatgcttccaaggcaaaagaccgtctgggctggcaacatacgaccggctttgaaaatctcgtggctgaaatggtggattgggatctgcgcaacatcatgcgggaggtaggacgcaatgatttctacggctga

SEQ ID NO: 104328 - protein, 356 aa, Brucella suis 1330
MQDKTALIVGVTGQDGAYLSELLLGKGYRVHGLKRRSSSFNTARIDHLYQDPHEEDIRFRLHFGDLTDATNLCRVIQEVQPDEIYNLGAQSHVQVSFETPEYTANADALGTLRLLESMRILGLGKSCRFYQASTSELFGNSSHHAQNEQTPFAPRSPYATAKLYAYWTTVNYRDAYGFHASNGILFNHESPLRGETFVTRKITRAVAAIERGLQDRLRLGNLEARRDWGHARDYVEGMWRILQEDTPDDYVLATGETHTVREFIEHAFKAVDKQIVWHGDGVDEVGIDRKTGNCLIEIDPRYFRPNEVDFLMGDASKAKDRLGWQHTTGFENLVAEMVDWDLRNIMREVGRNDFYG

SEQ ID NO: 104329 - DNA, 1023 bp, Leptospira interrogans serovar Lai str. 56601
  CDS (1)..(1023): transl_table=11
atgaaaaaagctctcataaccgggattacaggacaagacggatcttatttaactgaatttttacttcagaaggggtatcaagttcatggaattgtcagaagatccagtatgttcaaccgagcgagaattgaacatctacgtgggaactccaaccttgttctacattatggagatttaaccgattcgagcaatttaaaccgaattttggaaaaggtttctccggatgaaatttacaatctcgcggctcaatcacatgtaggagtttcttttgaagttccagaatataccgctgaagcggacgcggtaggaacacttcgaattttagatgcaatcaaacagatcggagtaaagagtcgattttatcaagcttctacgtccgaactttacggaaaagtgcaagcaatcccacaaaccgaaacaactccgttttatcctagatcaccttatgctgtggcaaagttatacgcttattgggctgtagtaaattatagagaggcgtttggaattcatgcttctaatggaattcttttcaatcacgaatcacctagacgtggagaagggtttgtaacaagaaagattactctcggagttgctaatctactcgctaaaaaaggcgggcccattcagctcggaaacatggacgcaaaaagagactggggatacgcgcccgactatgtagaaatgatgtggatgatgttacaacaaccggaagcggatgattatgtagtagcgactaacgaaacacatacggtaagagagtttgtggaaaggtcttttggatttgtaggaattcaagtgcgctgggaaggaaatggagattctgaaaaggggtttgatgcaaaatctggacaattgcttgtagaagtgaatccaaagttctatcgcccaacggaagtagacattttaatcggagatcccgcaaaagcaaaaaagaaattgggttgggagcctaaagtaaaatttgaagaactggtcaagattatgactaaggcggattgcgagtcaatcggaatcaaaatttaa

SEQ ID NO: 104330 - protein, 340 aa, Leptospira interrogans serovar Lai str. 56601
MKKALITGITGQDGSYLTEFLLQKGYQVHGIVRRSSMFNRARIEHLRGNSNLVLHYGDLTDSSNLNRILEKVSPDEIYNLAAQSHVGVSFEVPEYTAEADAVGTLRILDAIKQIGVKSRFYQASTSELYGKVQAIPQTETTPFYPRSPYAVAKLYAYWAVVNYREAFGIHASNGILFNHESPRRGEGFVTRKITLGVANLLAKKGGPIQLGNMDAKRDWGYAPDYVEMMWMMLQQPEADDYVVATNETHTVREFVERSFGFVGIQVRWEGNGDSEKGFDAKSGQLLVEVNPKFYRPTEVDILIGDPAKAKKKLGWEPKVKFEELVKIMTKADCESIGIKI

SEQ ID NO: 104331 - DNA, 1068 bp, Pseudomonas putida KT2440
  CDS (1)..(1068): transl_table=11
atgcccgcacggcactatcggagttggttaagtcgcatgaaagcaatcgttactgggatcactggtcaagacggcgcctacctggcggaactgctgctggagaagggctacacagtctacggcacctatcgtcgtaccagctcggttaacttctggcgcatcgaggagctagggattcacaccaatcccaacttgcatctggtcgagtatgacctcaccgacctgtctgccagcatccgcctgctgcaaaccaccgaagctaccgaggtatacaacctggctgcgcaaagcttcgtcggtgtgtcgttcgagcagccgctgaccaccgccgaaatcacgggcctgggtgcagtcaacctgctggaagccatccgtatcgtcaacccgaaggcccgcttctatcaggcgtccacctccgagatgttcggcaaggtgcaagaaattccacaggtcgaaactaccccgttctacccgcgcagtccctatggtgtggccaagctctacgcccactggatgaccatcaactaccgcgagtcgtacaacctctttgcgaccagcggtatcttgttcaaccacgagtcgccactgcgcggccgtgagttcgtgacccgcaaaatcaccgactccgtcgccaaaatcaagctgggcctgctcgacaagctcgagctgggtaaccttgatgccaagcgtgactggggctttgccaaagagtacgtagaaggcatgtggcgcatgctgcaggcggacgaaccagacaccttcgtactggccaccaaccgtaccgaaaccgtacgcgacttcgttaccatggcattcaaagctgccggtatcgaaatcaactggagcggcaaggacgaggcagagcagggcacctgcgccgcctctggcaaagtgctggttgccatcaatccaaaattctaccgcccggccgaggtggagttgctgatcggcaacccggccaaagccaaggacgttctgggttgggagcctaagacaaaccttgaagaactgtgccgtatgatggtcgaagccgacctgcgtcgtaacgaaaaagggttctcgttctga

SEQ ID NO: 104332 - protein, 355 aa, Pseudomonas putida KT2440
MPARHYRSWLSRMKAIVTGITGQDGAYLAELLLEKGYTVYGTYRRTSSVNFWRIEELGIHTNPNLHLVEYDLTDLSASIRLLQTTEATEVYNLAAQSFVGVSFEQPLTTAEITGLGAVNLLEAIRIVNPKARFYQASTSEMFGKVQEIPQVETTPFYPRSPYGVAKLYAHWMTINYRESYNLFATSGILFNHESPLRGREFVTRKITDSVAKIKLGLLDKLELGNLDAKRDWGFAKEYVEGMWRMLQADEPDTFVLATNRTETVRDFVTMAFKAAGIEINWSGKDEAEQGTCAASGKVLVAINPKFYRPAEVELLIGNPAKAKDVLGWEPKTNLEELCRMMVEADLRRNEKGFSF

SEQ ID NO: 104333 - DNA, 1119 bp, Bradyrhizobium japonicum USDA 110
  CDS (1)..(1119): transl_table=11
gtgcagctctttccggtgcaactaaggaagaccatgacggttcgcaactcaaaggggcgtgtcgctctcatcaccggcgtgaccggtcaggacggcgcctatctcgccgaatatttgctgtcgctcggctatgtcgtgcacggcatcaagcggcgctcgtcctcgttcaacaccgcgcgcgtcgatcacctctatcaggacccgcatgtcggcaacgttccgttcctgatgcactatggcgacatgacggattcgaccaatctgatccgcctggtgcagcagatccggccgaccgagatctacaatctcgcagctcaaagccacgtcgccgtcagcttcgagagcccggaatacaccgccaatgccgacgccatcggcgtgctgcgcctgttggaagcgatccgcatcctcggcatggagaaggagacgcggttctaccaggcctcgacctccgagctctacggcctggtgcaggagatcccgcagaaggagacgacgccgttctatccgcgctcgccctacggcgttgccaagctctacggctactggatcacggtgaactaccgcgaagcctacggcatgttcgcgtcgaacggcatcctgttcaaccatgagagcccgatccgcggcgagaccttcgtgacccgcaagatcacccgcggcgtcgcgcgtatcgaggtcgggctggaacagacgctctatctcggcaatctcgaagccaagcgcgactggggccatgccagggactatgtcgagggcatgcacaagatcctgcaggccgacaaacccgacgacttcgtgctcgccaccggcgagatgcgctcggtgcgcgagatggtcgagctgtcctttgcccatgtcggccgtcgcatcgcctggcgcggcaagggcgtcgaggagaccggcgtcgacgagacgagcggcaagattgtggtgaagatcgatccgacctatttccgtccgaccgaggtcgatcttctcgtcggcgacgccagcaaggcgcgcgaggtgctcggctggacgccgaagcgcagctttgcccagctcgtcgaggagatgatgacgagcgatctggcggagacaaaacgggatgcggccagtggcaaacgcaccgtttga

SEQ ID NO: 104334 - protein, 372 aa, Bradyrhizobium japonicum USDA 110
MQLFPVQLRKTMTVRNSKGRVALITGVTGQDGAYLAEYLLSLGYVVHGIKRRSSSFNTARVDHLYQDPHVGNVPFLMHYGDMTDSTNLIRLVQQIRPTEIYNLAAQSHVAVSFESPEYTANADAIGVLRLLEAIRILGMEKETRFYQASTSELYGLVQEIPQKETTPFYPRSPYGVAKLYGYWITVNYREAYGMFASNGILFNHESPIRGETFVTRKITRGVARIEVGLEQTLYLGNLEAKRDWGHARDYVEGMHKILQADKPDDFVLATGEMRSVREMVELSFAHVGRRIAWRGKGVEETGVDETSGKIVVKIDPTYFRPTEVDLLVGDASKAREVLGWTPKRSFAQLVEEMMTSDLAETKRDAASGKRTV

SEQ ID NO: 104335 - DNA, 1071 bp, Bradyrhizobium japonicum USDA 110
  CDS (1)..(1071): transl_table=11
atgaccgagcggatcgctctcatcaccggcgtgaccggccaggacggcgcctatctcgccgaatatctgctgtcgctcggctatgtcgtgcacggcatcaagcggcgctcgtcttcgttcaacaccgcgcgggtcgatcacctatatcaggatccccatgtcggcaacgtgccgttcctgatgcattacggcgacatgaccgactcgaccaatctgatccgcctggtgcagcagatccggccgaccgagatctacaatctcgccgcccagagccacgtcgccgtgagcttcgagagcccggaatacacagccaatgccgacgcgatcggcgtgctgcggctgctggaagcgatccgcatcctcggcatggagaaggagacacggttctaccaggcctcgacctccgagctctacggtctcgtgcaggagatcccgcagaaggagacgacgccgttctatccgcgctctccttacggcgtggcaaagctctacggctattggatcacggtgaactaccgtgaggcctacggcatgttcgcgtccaacggcatcctgttcaaccacgagagcccgatccgcggcgagacttttgtcacgcgcaagatcacgcgcggcgtcgcccgcatcgaggtgggattggaggacacgctctatctcggcaatctcgaggccaagcgcgactgggggcatgccaaggactacgtcgagggcatgcacatgatcctccaggccgacaagcccgacgacttcgttctcgccaccggtgagacgcgctcggtgcgggagatggtcgaattgtcgttcgcgcaggtcggccggcgcatcgcctggcgtggcgcaggcgtcgaggagaccggtgtcgatgccaagagcggcaagacggtggtgaagatcgatccgacctatttccgcccgaccgaggtcgatctcctcatcggtgatgccagcaaggcgcgcgaggtgctcggctggaagccgaagcggagctttgcccagcttgtcgaggagatgatggcgagcgatctggcacaggcgaaacgggacgctgcccatgacaaacgctccgtttga

SEQ ID NO: 104336 - protein, 356 aa, Bradyrhizobium japonicum USDA 110
MTERIALITGVTGQDGAYLAEYLLSLGYVVHGIKRRSSSFNTARVDHLYQDPHVGNVPFLMHYGDMTDSTNLIRLVQQIRPTEIYNLAAQSHVAVSFESPEYTANADAIGVLRLLEAIRILGMEKETRFYQASTSELYGLVQEIPQKETTPFYPRSPYGVAKLYGYWITVNYREAYGMFASNGILFNHESPIRGETFVTRKITRGVARIEVGLEDTLYLGNLEAKRDWGHAKDYVEGMHMILQADKPDDFVLATGETRSVREMVELSFAQVGRRIAWRGAGVEETGVDAKSGKTVVKIDPTYFRPTEVDLLIGDASKAREVLGWKPKRSFAQLVEEMMASDLAQAKRDAAHDKRSV

SEQ ID NO: 104337 - DNA, 1041 bp, Xylella fastidiosa Temecula1
  CDS (1)..(1041): transl_table=11
atgtgtaataaaagcgcggtcattacgggtattacaggacaggatggtgcttatttagcgcagttgctcctcgaaatgggttatgtggtttatggtacgtatcgtcgttctagctcattgaacttctggcgtattaatgaacttgggattgcacagcatcccaatttacatctggtcgaatatgatttgaccgatctctcttcgagtgtgagattgctcgaattggccgctcctaaagaggtctataatcttgccgcacagagctttgttggcgtctcttttgaccagccattgaccacgaccgatattaccggagtgggtgcggtgaacctgttggaagccattcggattgttaatcctaagattcgcttctatcaggcatcgacttctgagatgtttggaaaagtccagcagactccgcagattgaggaaacgcctttctatccgcgcagcccatacggtattgccaagttgtatgctcactggatgacggttaattatcgtgagtcgtacggtatctttgctgctagtggtattttgtttaatcacgaatcgccgttgcgagcgcgtgattttgttactcgtaaaatcactcatgcgattgccatgattaaattagggaagctagacgtattagagcttggtaatttggatgccaaacgtgattggggttttgcgaaggaatatgttgagggaatgtggcgtatgcttcaggctgatgagccagatactttcgtgctggcaaccaaccgaactgaaactgtgcgtgatttcgtcagcttggctgccagtgccgttgatatccagttggagtggaagggacaagccgaacgggaatgtggtgttgatgttgcatcgggaaaaactttagtcacaatcaatcctaagttttatcgaccggctgaggtggatttgttgatcggtaatccggccaaagctagaacgaagctgggttgggaaccaaagaccacacttgaggagctttgtcacatgatgatggaagcagatgtgcgccgcagcgaacgcgatttccccttctaa

SEQ ID NO: 104338 - protein, 346 aa, Xylella fastidiosa Temecula1
MCNKSAVITGITGQDGAYLAQLLLEMGYVVYGTYRRSSSLNFWRINELGIAQHPNLHLVEYDLTDLSSSVRLLELAAPKEVYNLAAQSFVGVSFDQPLTTTDITGVGAVNLLEAIRIVNPKIRFYQASTSEMFGKVQQTPQIEETPFYPRSPYGIAKLYAHWMTVNYRESYGIFAASGILFNHESPLRARDFVTRKITHAIAMIKLGKLDVLELGNLDAKRDWGFAKEYVEGMWRMLQADEPDTFVLATNRTETVRDFVSLAASAVDIQLEWKGQAERECGVDVASGKTLVTINPKFYRPAEVDLLIGNPAKARTKLGWEPKTTLEELCHMMMEADVRRSERDFPF

SEQ ID NO: 104339 - DNA, 1047 bp, Pseudomonas syringae pv. tomato str. DC3000
  CDS (1)..(1047): transl_table=11
atgagtgcaccgcaagaatcggtaattatcactggtatcacgggccaggatggcgcgtaccttactcagttgctgctggaaaagggctacaaggtttacgggacgttccgtcgtaccagctcggtcaacttctggcgtcttgaagaactcggcgtcgccagacacccgaatttgcatctggttgagcatgatctgacggatttgagcgccagcattcgcttggtgcagaaagccgaacccactcagatttacaacctggccgcattgagctttgtcggtgtttccttcgatcagcccataacaactgctgaaatcacagggctgggcgccgtcaacctgcttgaagcgatacggatcgtaaacccgaaaatacgcttttatcaggcatccacctctgaaatgttcggcaaggtgcaggaggttcctcaggttgaaacgacttcgttctatccgcgtagcccatacggtgtcgccaagttgtatgcgcactggatgaccatcaattatcgggagtcctacggtatttttggcgccagcggcattctgttcaatcacgagtcgcctctgcgcggtaaagagtttgtaacccggaagatcaccgacgcagctgctcgaatctcactgggcctgccgcacgttctggagttgggtaatctggacgcacggcgtgactgggggtttgccaaagagtatgtcgaaggtatgtggcgcatgctgcaagccgaagagcccgactccttcgttctggcaaccaaccgatccgaaacggttcgtgactttgtatccatggctttcaaggctgtcgacattaaccttgagtgggtgggcagcgcggaaaatgagcggggcattgacgtgagtacaggcaagtcccttgtgcagatcaatccgaagttctatcgcccctctgaagtcgagttgctgatcggcaatcctgaaaaagccagaaacgtgctcgggtgggaggccaaaaccggccttgaggagctttgtcgattgatggttgaggctgacctgaggcgcaacaagaacggcacctcgttctga

SEQ ID NO: 104340 - protein, 348 aa, Pseudomonas syringae pv. tomato str. DC3000
MSAPQESVIITGITGQDGAYLTQLLLEKGYKVYGTFRRTSSVNFWRLEELGVARHPNLHLVEHDLTDLSASIRLVQKAEPTQIYNLAALSFVGVSFDQPITTAEITGLGAVNLLEAIRIVNPKIRFYQASTSEMFGKVQEVPQVETTSFYPRSPYGVAKLYAHWMTINYRESYGIFGASGILFNHESPLRGKEFVTRKITDAAARISLGLPHVLELGNLDARRDWGFAKEYVEGMWRMLQAEEPDSFVLATNRSETVRDFVSMAFKAVDINLEWVGSAENERGIDVSTGKSLVQINPKFYRPSEVELLIGNPEKARNVLGWEAKTGLEELCRLMVEADLRRNKNGTSF

SEQ ID NO: 104341 - DNA, 1122 bp, Salmonella enterica subsp. enterica serovar Typhi Ty2
  CDS (1)..(1122): transl_table=11
atgtcaaaagtcgctctcattactggcgtaaccggacaggatgggtcttacctggcagaatttctgctggaaaaagggtatgaggtgcatggtatcaagcgtcgcgcgtcatcgtttaataccgagcgcgtggaccatatttatcaggacccgcacagctgcaacccgaaatttcatctgcattatggcgacctgaccgacgcctcaaacctgacccgcattttacaagaagtgcagccggatgaggtctacaacctgggcgcgatgagccacgtggcggtgtcgtttgagtcgccggaatataccgccgatgtggatgcgatgggcactctgcgcctgctggaggcgatccgcttcctcggtcttgaaaagaaaacgcgtttctaccaggcctccacctctgaactgtacgggctggtgcaggaaatcccgcagaaagagaccacgccgttctacccgcgttctccctatgcggtggcgaaactgtacgcctactggatcaccgtcaactaccgtgaatcctacggtatttacgcctgtaacggcattctgtttaaccacgagtctccgcgtcgtggcgaaaccttcgtcacccgtaagatcacccgcgccatcgccaatatcgcccagggactggagtcctgcctgtatctcggcaacatggactcgctgcgcgactggggccatgcgaaagattacgtacggatgcagtggatgatgttacagcaggagcagccggaagatttcgtgattgccaccggcgtgcagtattccgtacgccagtttgtggagctggcggcggcgcaactggggataaaactgcgctttgaaggcgaaggcattaatgagaaagggatcgtggtatccgttaccggacacgatgcgccgggcgtgaaaccgagggatgtgattgtggccgttgatccgtgttatttccgtccggcggaagtggaaaccctgctgggcgatccgtccaaagcgcatgagaaactgggctggaaaccggaaattaccctgtcggagatggtctccgagatggtggcgaacgatctggaggccgcgaaaaaacactcactgctgaaatctcacggttacgaggtggccatcgcgctggagtcctga

SEQ ID NO: 104342 - protein, 373 aa, Salmonella enterica subsp. enterica serovar Typhi Ty2
MSKVALITGVTGQDGSYLAEFLLEKGYEVHGIKRRASSFNTERVDHIYQDPHSCNPKFHLHYGDLTDASNLTRILQEVQPDEVYNLGAMSHVAVSFESPEYTADVDAMGTLRLLEAIRFLGLEKKTRFYQASTSELYGLVQEIPQKETTPFYPRSPYAVAKLYAYWITVNYRESYGIYACNGILFNHESPRRGETFVTRKITRAIANIAQGLESCLYLGNMDSLRDWGHAKDYVRMQWMMLQQEQPEDFVIATGVQYSVRQFVELAAAQLGIKLRFEGEGINEKGIVVSVTGHDAPGVKPRDVIVAVDPCYFRPAEVETLLGDPSKAHEKLGWKPEITLSEMVSEMVANDLEAAKKHSLLKSHGYEVAIALES

SEQ ID NO: 104343 - DNA, 1071 bp, Bacteroides thetaiotaomicron VPI-5482
  CDS (1)..(1071): transl_table=11
atgaaaacagcccttatatcaggcatcaccggacaggatggttcttatcttgccgaatttctcttgcaaaaaggttacgaagtacacggtatcctccgtcgttcttcctcattcaataccggacgtatcgagcatttgtactttgacgaatgggtacgcgacatgaaacagaaacgtaccatcaacctgcactacggcgatatgacggactccagctcactgatccgcatcatacagcaggtgcaaccggatgaaatctacaatctggcagcgcagagtcatgtgaaggtatcattcgacgtgcccgaatatactgccgaagcagacgctatcggcacactgcgtatgctcgaagccgtacgcatcctgggactggaaacgaaaacaaggatatatcaggcttccacctccgagcttttcggcaaggtgcaggaagttccgcagaaggagacgactccgttctatccccgctctccctacggagtggcaaagcagtacggcttctggatcaccaagaactaccgtgaaagctatggcatgtttgccgttaacggcatcttgttcaatcacgaaagcgaacgtcgtggcgaaacattcgttacccgcaagatttctctcgctgccgcacgtatcgcgcaaggcgagcaggacaagctgtatttaggtaatctggatgcccgccgtgactgggggtatgcgaaagattacgtggaatgtatgtggctgattcttcagcatgacgttccggaagatttcgtaatcgccaccggagagatgcacaccgtacgcgaatttgccacactggcattcaaggaggcaggcatcgaacttcgttgggaaggcgaaggcgtggacgaaaagggtatcgacgtggctaccggaaaagtattggtagaggttgatcccaaatatttccgtccggcagaagtggaacaactgttaggagatcctaccaaagcccggacattgctgggatggaacccaaggaagacatcgttcggagaactggtaagcatcatggtgcgccatgacatggaaaaagtaagaagaatgatcgctaccaagcactaa

SEQ ID NO: 104344 - protein, 356 aa, Bacteroides thetaiotaomicron VPI-5482
MKTALISGITGQDGSYLAEFLLQKGYEVHGILRRSSSFNTGRIEHLYFDEWVRDMKQKRTINLHYGDMTDSSSLIRIIQQVQPDEIYNLAAQSHVKVSFDVPEYTAEADAIGTLRMLEAVRILGLETKTRIYQASTSELFGKVQEVPQKETTPFYPRSPYGVAKQYGFWITKNYRESYGMFAVNGILFNHESERRGETFVTRKISLAAARIAQGEQDKLYLGNLDARRDWGYAKDYVECMWLILQHDVPEDFVIATGEMHTVREFATLAFKEAGIELRWEGEGVDEKGIDVATGKVLVEVDPKYFRPAEVEQLLGDPTKARTLLGWNPRKTSFGELVSIMVRHDMEKVRRMIATKH

SEQ ID NO: 104345 - DNA, 1047 bp, Coxiella burnetii RSA 493
  CDS (1)..(1047): transl_table=11
atgcgtaaaaaagcatttattactggtattacagggcaggatggctcttatttagcagaacttttgctgagaaaagattatgaagtacatggcatgatcagacgatcatcttcatttaatactgaacgtctctcagatatttatgaagaaaaacacaaagaaaatgcacgtttattcttgcattatggtgatatcacagatggtttagtgctcaataagcttatccatgaaataaaaccacatgaagtctataatttagcggcacaaagtcatgtgcgtgtttcctttgatatccctgtctatactatggaaacgattggactaggaacattaaatattctagaagcaattaaaaatgctgataatgcaaaagaaatacgcttctatcaagcttcaagttcagaaatgtatggtgatgttaaatcagttccgcaaacagagtccactccgtttaatcctcgcagcccttatgcttgcgctaaagtgtttgcacattaccaaaccattaattatcgcgagagctatgggcttcatgcgtcaacaggcattcttttcaaccatgaaagccctcggcgcggtgaaacttttgttacacgtaaaattacctctgggatagcaaaaattctagcaggacttgaaaaaaaaatttatttgggtaatctagaggctaaacgtgattggggatatgctaaagattatgtcgaagcaatgtggcttatgttgcaacaagacactcctgacgattatgtgattgcaacaggtgaaacctggtctgttaaggagctattagaatattcatttaatttagttaatcttaattggcgtgattttgttgtaatagatccaaaatattacagacctgctgaagttgatcttttgttaggggaacctaaaaaagccaaagagaagcttggttggcagccgaatacttctttccataagcttattaaaattatgcttgaacatgattttaaatcttatggtgttatgctgccatcgtcaaatgaaaaacaaacagttgaagtttgtatagaagggcttaaataa

SEQ ID NO: 104346 - protein, 348 aa, Coxiella burnetii RSA 493
MRKKAFITGITGQDGSYLAELLLRKDYEVHGMIRRSSSFNTERLSDIYEEKHKENARLFLHYGDITDGLVLNKLIHEIKPHEVYNLAAQSHVRVSFDIPVYTMETIGLGTLNILEAIKNADNAKEIRFYQASSSEMYGDVKSVPQTESTPFNPRSPYACAKVFAHYQTINYRESYGLHASTGILFNHESPRRGETFVTRKITSGIAKILAGLEKKIYLGNLEAKRDWGYAKDYVEAMWLMLQQDTPDDYVIATGETWSVKELLEYSFNLVNLNWRDFVVIDPKYYRPAEVDLLLGEPKKAKEKLGWQPNTSFHKLIKIMLEHDFKSYGVMLPSSNEKQTVEVCIEGLK

SEQ ID NO: 104347 - DNA, 1137 bp, Helicobacter hepaticus ATCC 51449
  CDS (1)..(1137): transl_table=11
atgaaaaaagcattaatcacaggtgttacagggcaagatggagcgtatttgagtgaatttttactcaataaaggttacgaagttcacggcattaaaaggcgtagctcactttttaacaccgatagaatcgatcatctctttgatggacatcataataagaaaattccattttacttgcattttggcgatatgacagattctatgaatctcacgcgtttgattgcagaagtccaacctgatgaaatctataatctcgccgcgcaaagccacgtagctgtaagctttgaaacacccgaatatactgcaaatgccgatggaataggcacgcttagaatcttagaagcagtaaaattcttaaatcttattgacaaaacgcgcatttatcaggcttccacctctgaactctttggcaaggtgcaagagattcctcaaagtgagagcacacccttttatccccgctctccttatgcagtggcgaaaatgtatgcgtattggattacggtgaattatagagaagcctataatatgtttgcgtgtaatggaattttgtttaatcacgaaagccctgtgcgaggtgaaacctttgtaacacgtaaaattacacgtgcagcttctaaaattgcactcaatctacaagataagctctatcttggcaatttagacgctaaacgcgattggggacatgcaaaggattatgtcaaaatgatgtggttaattttacaacacgaaaaggcagaggattgggtgattgccacagggaaaacgacacaagttagagactttgtgcgtttagcatttgcctattgtggtatcacattagcatttcaaggaagtggcgcagatgaaaaaggcgttgtaagtgcgttagattctgctaaagcagtaagtcttggattaaatttagagcatcttaaaatcggacaagaagttgttgcggtagataagcgatattttcgccccacagaagtagatttactccttggcgacccaagcaaagctgaaaaagagttaggctggaatcgtgaatttgacttgaaagatttagtcaatgatatgatggagagcgatttaaaactaatgcgcaaagatgtgtatctcaaagaaggtggatacaaaattatgcggtattttgaataa

SEQ ID NO: 104348 - protein, 378 aa, Helicobacter hepaticus ATCC 51449
MKKALITGVTGQDGAYLSEFLLNKGYEVHGIKRRSSLFNTDRIDHLFDGHHNKKIPFYLHFGDMTDSMNLTRLIAEVQPDEIYNLAAQSHVAVSFETPEYTANADGIGTLRILEAVKFLNLIDKTRIYQASTSELFGKVQEIPQSESTPFYPRSPYAVAKMYAYWITVNYREAYNMFACNGILFNHESPVRGETFVTRKITRAASKIALNLQDKLYLGNLDAKRDWGHAKDYVKMMWLILQHEKAEDWVIATGKTTQVRDFVRLAFAYCGITLAFQGSGADEKGVVSALDSAKAVSLGLNLEHLKIGQEVVAVDKRYFRPTEVDLLLGDPSKAEKELGWNREFDLKDLVNDMMESDLKLMRKDVYLKEGGYKIMRYFE

SEQ ID NO: 104349 - DNA, 978 bp, Rhodopirellula baltica SH 1
  CDS (1)..(978): transl_table=11
atgcctaccgcactcatcactggcatcaccgggcaagacggctcgtacctgaccgagcaactgctcgaccgaggctacacggtccacggcctggtcaggcggaccagcaacacggttcgaactcgactcgacccgctgttccacaacaagggcgtctacaacaagagtttgtttctgcactatgcggacctggatgatgcgaccaccatccgccgcgtgctcgtcaaaactcagcccgacgaactgtatcacttggccgggcaaagccacgtgggtgccagtttcgacatccccgaatcaacgtgccagttcaccgcaatgggcacgctcaaattgcttgaaattcttcgcgacctcgagaaacaaccgcggttcctgcacatcagcagcagcgaaatcttcggtcgccccgacgaatttcctcagcacgaacacacgccaatgcgaccggtcacgccgtatggcgtcgccaagaccttcgcgacccagatggtccagctctaccgtgaatcgtttggtttgtttgcctgcaacgcgatttgctacaaccacgaatcaccacgacggggcgaatccttcgtcacccgaaaaatcaccaaggctgccgcggaaatctccctgggcctgaacgacgaaatcgtgctcggttccctcgatggacgccgcgattggggcagtgctcccgagtacaccaccgccatgcacctgatgcttcaacaagacgccccagatgattatgtcctggccacagggaaaacacatagcgtcgaagagttcctcgacgccgcgtttcgaagcgtcggtctcaagtacaaaaaccacctgaaacaaaaccccaagtacatgcgaccggcagaagtcactcgcctggtcggcgacccaacccacgccaaacaacgactcgaatggacccccaccacgaccgctctcgagctagccaaacaaatgaccgccgctgacgttgaatcgctgaagtga

SEQ ID NO: 104350 - protein, 325 aa, Rhodopirellula baltica SH 1
MPTALITGITGQDGSYLTEQLLDRGYTVHGLVRRTSNTVRTRLDPLFHNKGVYNKSLFLHYADLDDATTIRRVLVKTQPDELYHLAGQSHVGASFDIPESTCQFTAMGTLKLLEILRDLEKQPRFLHISSSEIFGRPDEFPQHEHTPMRPVTPYGVAKTFATQMVQLYRESFGLFACNAICYNHESPRRGESFVTRKITKAAAEISLGLNDEIVLGSLDGRRDWGSAPEYTTAMHLMLQQDAPDDYVLATGKTHSVEEFLDAAFRSVGLKYKNHLKQNPKYMRPAEVTRLVGDPTHAKQRLEWTPTTTALELAKQMTAADVESLK

SEQ ID NO: 104351 - DNA, 1053 bp, Rhodopirellula baltica SH 1
  CDS (1)..(1053): transl_table=11
gtggccctgagcccctgcgtcactttcccactcatcccagccatgaccaaaaccgcactcatcaccggcatcacgggccaggacggctcctacctcaccgacttgttgctcgaaaaaggctatcaggttcacgggatcgttcgtcgcagcagcaccttcaacaccgaccggattgatcacgtctacaaagacccgcacgagtcgtccaacctgcacttgcactatggcgatctgaccgacggtcaaaacatgaccaatctcgtcttggacattcaaccagacgagatctacaacctcggtgcccagtcacatgttcgcgtctctttcgactcgcctgtctacacggtccagaccgttggcctcggctcactcaatgtgctcgaagccgctcgccaactcaacaagcaaaaagcgactcgcgtttaccaagccagcagcagcgaaatgtttggcgatgtgatcgaaacacctcaaactgaaacgacaccgtttcaaccacaaagtccttatgcctgtgccaaagtttacgcttttcaccaaacggtgaactaccggcacgcttatgacttgttcgccagcaacggcatcctgttcaaccacgaatcgccacgtcgaggcgaaacgtttgtgactcgcaaaatcacgcgtgccgccacgcgaatcaaactcggactgcaagacaaactgtatcttgggaacctcgacgccaaacgagactggggctatgccaaagactatgtcgaaggcatgtggcgaatcctccagcatgacgagcccgatgactttgttctggccaccggcgaaactcaaaccattcgccaattcctcgactataccttcgaagctttggatctggattggaacaagtacgtcgagatcgaccctcgctacttccgccccaccgaagtcgacctgctactgggcgactactccaaagccaaaaccaagcttggttgggaaccagaaaccagctgcaaacaactggccgaattgatggtcgaacacgacctcgaactcgccaaaaccgagttggcacaaaagtcactctcataa

SEQ ID NO: 104352 - protein, 350 aa, Rhodopirellula baltica SH 1
MALSPCVTFPLIPAMTKTALITGITGQDGSYLTDLLLEKGYQVHGIVRRSSTFNTDRIDHVYKDPHESSNLHLHYGDLTDGQNMTNLVLDIQPDEIYNLGAQSHVRVSFDSPVYTVQTVGLGSLNVLEAARQLNKQKATRVYQASSSEMFGDVIETPQTETTPFQPQSPYACAKVYAFHQTVNYRHAYDLFASNGILFNHESPRRGETFVTRKITRAATRIKLGLQDKLYLGNLDAKRDWGYAKDYVEGMWRILQHDEPDDFVLATGETQTIRQFLDYTFEALDLDWNKYVEIDPRYFRPTEVDLLLGDYSKAKTKLGWEPETSCKQLAELMVEHDLELAKTELAQKSLS

SEQ ID NO: 104353 - DNA, 1128 bp, Prochlorococcus marinus subsp. marinus str. CCMP1375
  CDS (1)..(1128): transl_table=11
atggctgagaagaaaaagacagcactgataacaggtataactggtcaggatggaagttatttggctgaacttctattagagaagggttatgtagttcatggaattaaacgccgagcaagtaccttcaatactagtcgcattgaccatctctatcaagatccacatgtttcagatcaaagtttaattctccattatggagacctgactgatagtacaaatcttattcgtattattcaacaagttgagccagatgagatatataatcttggcgcgcaaagtcatgttgctgtaagtttcgaagctgcagaatataccgctaattgcgatggattagggactttgagaattcttgaggctgttcgaatgctaggactgtccaagaaaacaaggatttatcaggcaagtactagtgaactctatggtttagttcaacaaataccccaaacggaaactactcctttttatccacgaagcccttatgcagtagccaagttatatggctattggataactgttaattatagagaagcttatggaatgtatgcatgtaatggaattctttttaatcatgaatctcccagaagaggcgaaacttttgtcaccagaaaaataactaggggattggctcgtattgatgctggtttagatgaatgtctttatatgggcaatttggattcgcttcgagattggggacatgcaagagattatgtagaaatgcagtggttaatgcttcaaaatgaaactcctgaagatttcgttattgcaacaggtcgtcaagaaagcgttaggcgtttcattgaattaacagcgctggagttgggttggggctctattgaatgggaaggtaaaagtattaatgagataggaagacgaggagataatggtcaagtcgtgatacgaattgattcacgttattttcgccctgcagaagttactactcttttaggtgaagcatctaaggctcatcagaaattaggttggaaacctttgactagtcttgagcaaatagttgcagaaatggttgctgtagataaggaagaagctgctaaagaagcattgttaagtagtaaaggtttttcggttatgagccctatggagtctcctccttctaattctcttaataagtaa

SEQ ID NO: 104354 - protein, 375 aa, Prochlorococcus marinus subsp. marinus str. CCMP1375
MAEKKKTALITGITGQDGSYLAELLLEKGYVVHGIKRRASTFNTSRIDHLYQDPHVSDQSLILHYGDLTDSTNLIRIIQQVEPDEIYNLGAQSHVAVSFEAAEYTANCDGLGTLRILEAVRMLGLSKKTRIYQASTSELYGLVQQIPQTETTPFYPRSPYAVAKLYGYWITVNYREAYGMYACNGILFNHESPRRGETFVTRKITRGLARIDAGLDECLYMGNLDSLRDWGHARDYVEMQWLMLQNETPEDFVIATGRQESVRRFIELTALELGWGSIEWEGKSINEIGRRGDNGQVVIRIDSRYFRPAEVTTLLGEASKAHQKLGWKPLTSLEQIVAEMVAVDKEEAAKEALLSSKGFSVMSPMESPPSNSLNK

SEQ ID NO: 104355 - DNA, 1074 bp, Prochlorococcus marinus subsp. pastoris str. CCMP1986
  CDS (1)..(1074): transl_table=11
ttgaatagctcaaaagtagcattaattacaggtattactggacaagatggaagttatcttgctgaactccttttagataaggggtacattgttcacggaataaagaggcgatcgagtagttttaatactgaaagaattgatcatttatatcaagacccacatgaaatatctccacaattaatactccattacggagatttagttgacagtacaaatattattaggttaataaaagaaattgaaccagatgaaatttataatctcgctgcacaaagtcatgtagctgttagctttgaaactccagaatatacggcaaattgcgatgctcttggtacattaagaattcttgaagctgttaggatattaaacttagaaaaaaagactaaaatttaccaagctagtactagtgagttatatgggagagtatgtaaatcccctcaaaacgaagatactccttttaaccctcaaagtccctatggcgtggctaaattgtattcatattggataataaaaaattatagagatgcatatggtatttacgcatgtaatggtattttgtttaatcatgaaagtccaaggagaggagaaacatttgttacgagaaaaatcacaaggggtcttgtgagaattgattcaggtattgatgaaatactttatcttggaaatttaaattctttgagagattggggtcatgctaaggattatgtgaaaatgcaatggcttatgcttcagcaagattatgcagatgattatgtaatagctactggaaaaaataaaagtatcaaagaatttattgaattggtagcatgtgagctcggctggaatagaaaaaaccgaaatctaccagctattcgctgggagggctcaggtttgcaagaggttggaattagaaatgaaaataataaaataattatcaaagttgataaaagatattttaggccatctgaagtagatagtttgttgggtgatcctactaaagctattaataaacttggatggagaagctctattactttagaaaaattaatacacgaaatggtggaatttgataagttgaaacttgctaaacaataa

SEQ ID NO: 104356 - protein, 357 aa, Prochlorococcus marinus subsp. pastoris str. CCMP1986
MNSSKVALITGITGQDGSYLAELLLDKGYIVHGIKRRSSSFNTERIDHLYQDPHEISPQLILHYGDLVDSTNIIRLIKEIEPDEIYNLAAQSHVAVSFETPEYTANCDALGTLRILEAVRILNLEKKTKIYQASTSELYGRVCKSPQNEDTPFNPQSPYGVAKLYSYWIIKNYRDAYGIYACNGILFNHESPRRGETFVTRKITRGLVRIDSGIDEILYLGNLNSLRDWGHAKDYVKMQWLMLQQDYADDYVIATGKNKSIKEFIELVACELGWNRKNRNLPAIRWEGSGLQEVGIRNENNKIIIKVDKRYFRPSEVDSLLGDPTKAINKLGWRSSITLEKLIHEMVEFDKLKLAKQ

SEQ ID NO: 104357 - DNA, 1164 bp, Synechococcus sp. WH 8102
  CDS (1)..(1164): transl_table=11
atgccctcctccgccactagagctgccaaaactgccctgatcacaggcattacaggccaagacggcagttacctggcggagcttctgctggagaagggctatttggtgcacgggatcaagcgccgggccagcagcttcaacaccactcggatcgatcacctgtatcaggatccgcacgagagcgatcctcgactggtgctgcactacggcgatctcaccgacagcaccaacctgatccggatcatccagcaggagcaaccggacgagatctacaaccttggtgctcaaagccatgtggccgtgagctttgaggcgccggaatacacggcaaacagcgatgcccttggcaccctgcgcatcctcgaggcggtgcggatgctcgggctcataggaaaaacccggatctatcaggccagcactagcgagctctacggcctagtgcaggaggtgccgcagaaggagtcgacacccttttatccgcgcagcccctacggcgtcgccaagctttacgcctactggatcacggtcaattaccgcgaggcctacgggatgtatgcctgcaacggcatcctgttcaaccatgagagtccgcggcgcggcgagacgtttgtgacccgcaagatcacccggggtctggcgcggatcgatgcggggctggagcagtgcctgttcatgggcaacctcgattccctacgcgactggggccatgcgcgcgactacgtggagatgcagtggcggatgctccagcaggaaggtccgccggaagacttcgtgatcgccaccggccggcaggagtcggtgcggcgctttattgagctagcagcatccgaactcggttggggcagcatccagtggcagggcagaggcttgcaggaaactggatctcgcgccgacaccggcgatgtggtggtgcgtattgatccgcgctatttccgcccggcagaggttgaaacgctgcttggtgatcccaccagagcaaaagagaagcttggctggatccccaccaccaccctggaggaacttgtggccgagatggttgccacggatcgggaggacgccaagaaagatgcacacctcaaacgcaagggttttgcggttgttggttcgatggagaacccgcctacaaaccctgaagcgatcaaagcggctggaggcgcagagtga

SEQ ID NO: 104358 - protein, 387 aa, Synechococcus sp. WH 8102
MPSSATRAAKTALITGITGQDGSYLAELLLEKGYLVHGIKRRASSFNTTRIDHLYQDPHESDPRLVLHYGDLTDSTNLIRIIQQEQPDEIYNLGAQSHVAVSFEAPEYTANSDALGTLRILEAVRMLGLIGKTRIYQASTSELYGLVQEVPQKESTPFYPRSPYGVAKLYAYWITVNYREAYGMYACNGILFNHESPRRGETFVTRKITRGLARIDAGLEQCLFMGNLDSLRDWGHARDYVEMQWRMLQQEGPPEDFVIATGRQESVRRFIELAASELGWGSIQWQGRGLQETGSRADTGDVVVRIDPRYFRPAEVETLLGDPTRAKEKLGWIPTTTLEELVAEMVATDREDAKKDAHLKRKGFAVVGSMENPPTNPEAIKAAGGAE

SEQ ID NO: 104359 - DNA, 1086 bp, Porphyromonas gingivalis W83
  CDS (1)..(1086): transl_table=11
gtggcattaatcacaggaattacagggcaggacggctctttcctcgccgagtttctgatagaaaaggggtacgaagtgcacggtatcctgcgccgttcgtcttcgttcaatacgggacgaatcgaacacctctatctcgacgaatgggtgcgggacatgaagcgcgagcggctgatcaatctgcactacggggacatgacggacagctcctctttggtacgcatcattcagaccactcgcccctcggaaatatacaatctggccgctcaaagccacgtcaaggtgtcgttcgacgttccggagtacacggcagaagccgatgccgtgggtacgcttcgcctcttggaagcggtgcgaatactcggattggagaaggaaacgcggatctatcaagcctctacatccgagctgttcggcaaggtgcaggaagtgccccaacgggagagcactccgttttacccccgatcgccatacggagtggccaagcagtatgctttctggatcacgaagaactatcgcgagagctacggcatgtttgccgtcaatggcattctcttcaaccatgagagcgaacgccggggcgaaacctttgtcaccagaaagatcacactggctgcagcccgcatcaagcaaggatttcaggacaagctctacctcggcaatctggatgcccgtcgcgactggggctatgctcgcgactacgtggagtgtatgtggctgatgctacagcacaatataccggaagacttcgtcattgccacaggggagatgcacagtgtacgcgagttcgccaccctggcatttcgagaagtcggcatagagctggagtggaaaggctgcggagtggaggagcaaggtatagacatcgccacgggacgggttttggtagaggtggatcccaaatacttccgtccctgcgaagtggatcagctattgggagacccgaccaaagccaagactttactaagatggaatccgacaaagacctctttcgaagaattggtacgaatcatggtcgaagcagacatgagatttgtccgaaaattgcatatgagagccgaaatagacacttctcataatgaataa

SEQ ID NO: 104360 - protein, 361 aa, Porphyromonas gingivalis W83
MALITGITGQDGSFLAEFLIEKGYEVHGILRRSSSFNTGRIEHLYLDEWVRDMKRERLINLHYGDMTDSSSLVRIIQTTRPSEIYNLAAQSHVKVSFDVPEYTAEADAVGTLRLLEAVRILGLEKETRIYQASTSELFGKVQEVPQRESTPFYPRSPYGVAKQYAFWITKNYRESYGMFAVNGILFNHESERRGETFVTRKITLAAARIKQGFQDKLYLGNLDARRDWGYARDYVECMWLMLQHNIPEDFVIATGEMHSVREFATLAFREVGIELEWKGCGVEEQGIDIATGRVLVEVDPKYFRPCEVDQLLGDPTKAKTLLRWNPTKTSFEELVRIMVEADMRFVRKLHMRAEIDTSHNE

SEQ ID NO: 104361 - DNA, 1050 bp, Gloeobacter violaceus PCC 7421
  CDS (1)..(1050): transl_table=11
atgagcgaatccaagcgcgccttgatcactgggatcaccggtcaggacggatcttacctggctgaatatctgcttggctgcggctacgaagtgcacggtttgctgcggcgcagcagcaccctcaacgtcggtcgggtctcgcacctgcaggagcgcatccagttgcactattcggatttgaccgattcgatgagtttgcagcgtgttctgcagctgtgcgaaccgcacgaagtctacaacctggccgcccagtcgcacgtcaaagtttccttcgaccagcccatctacaccggcgatgcgacggctctcggggtgaccagactactggaagctgtgcggatgatcgtgccggaggcgcgcttctaccaggcgtcttcctccgagatgttcggcaaagtgcgcgaggtgccccagaccgaattgacccctttccatccgcgctcgccctacgcggtggccaaagtctacggctattgggcgacggtcaactaccgcgaagcccacggcctgttcgcctgcaacggcatcctgttcaaccacgaatccccaagacgtggagaggattttgtaacgcgcaagatcacctgtgcggtggcgcgcattgcggcgggcaagcagcgcgaactggtgctgggcaataccgaagcgcggcgcgactggggctacgcgggggattacgtcgaattgatgtggcggatgctccagcaggagaagcccgacgactacgtggtggccaccaacgaacagtggagcgtgcagcaatttgtcgagcgcgccttcgaattagtggacctcgactggcgccagtacgtgcgcaccgacccgcgctacttccgcccggcggaggtggacgaactgatcggcaacccggctaaagcccgcgagcagctcggctggcagccgcgggtgcgctttgacggattggtacggctgatgctcgcggcggacctggtggccaacggggtgatgcccgagttcgactggcccgaagtcgaagatatcggtctgtacgccgcgccgggtttcaagctgctgcgcccggcccgataa

SEQ ID NO: 104362 - protein, 349 aa, Gloeobacter violaceus PCC 7421
MSESKRALITGITGQDGSYLAEYLLGCGYEVHGLLRRSSTLNVGRVSHLQERIQLHYSDLTDSMSLQRVLQLCEPHEVYNLAAQSHVKVSFDQPIYTGDATALGVTRLLEAVRMIVPEARFYQASSSEMFGKVREVPQTELTPFHPRSPYAVAKVYGYWATVNYREAHGLFACNGILFNHESPRRGEDFVTRKITCAVARIAAGKQRELVLGNTEARRDWGYAGDYVELMWRMLQQEKPDDYVVATNEQWSVQQFVERAFELVDLDWRQYVRTDPRYFRPAEVDELIGNPAKAREQLGWQPRVRFDGLVRLMLAADLVANGVMPEFDWPEVEDIGLYAAPGFKLLRPAR

SEQ ID NO: 104363 - DNA, 1074 bp, Gloeobacter violaceus PCC 7421
  CDS (1)..(1074): transl_table=11
gtgcctatcctatccaccgcaccgggaagcgacggtccccggcggtcgtgtgggagcttcgtcggcgctggggggcagcaggtgcgcgtcttgatcacgggaatcggcgggcaggacgggttttacttgagcctggcgctgttgcgccggggccaccgtgtctttgggattcaccgccgggatccgccgggtgagccgctggcaacgctgctgcccgccggtggggatttgcagctactaacaggcgatgtcaccgaccgcgcttttttgcggcgggtggtgggcgaagcggcacccgagcagatctacaacctggcggcccagagccgcgtgggccagagttttgcgatggccgagcgcaccttcgaggtcaatgccctggcgccgctgtacctgcttgaaatcatccgcgaactcaatccgcgcattcgctttttccaggcctgctccgctgaggtgttcggcgaatgcccccgagcgccccaggacgaatcgacgccttttgcgccggtgagcccctacgccattgccaaagcgagcgcctactggctggtgaacagttaccggcgctccagcggtctgtttgcctgcaacgccattctctacaaccacgagtcgcccctgcgcgacgagagttttttgtcgggcaaagtcgtgcgctccctggcccgcattctggtgggccagcagcagacgctggcgctgggcaacctcgaagcgcggcgcgattggggcttcgcgggtgattacgtcgaggcgatggtagcgatgatggcccaggcggagccggacgattatgtgattgcctcgggtgaggggcacagcgtcggagaattcgtcgaggaagcctttggctacgcccgtctcgattggcgaaaacacgtcgttatcgacgagcagctgttgcgggcgagcgaggcgcacgtgctgttgggcaacgccgggcgcgcccgggcgcggctcggatggcagccgcgcctgggatttcaagcgctggtgcgattgatggtagactcggccattgaacaggtgaaggccgccaccttgagtgccgccgcttccagagaacactga

SEQ ID NO: 104364 - protein, 357 aa, Gloeobacter violaceus PCC 7421
MPILSTAPGSDGPRRSCGSFVGAGGQQVRVLITGIGGQDGFYLSLALLRRGHRVFGIHRRDPPGEPLATLLPAGGDLQLLTGDVTDRAFLRRVVGEAAPEQIYNLAAQSRVGQSFAMAERTFEVNALAPLYLLEIIRELNPRIRFFQACSAEVFGECPRAPQDESTPFAPVSPYAIAKASAYWLVNSYRRSSGLFACNAILYNHESPLRDESFLSGKVVRSLARILVGQQQTLALGNLEARRDWGFAGDYVEAMVAMMAQAEPDDYVIASGEGHSVGEFVEEAFGYARLDWRKHVVIDEQLLRASEAHVLLGNAGRARARLGWQPRLGFQALVRLMVDSAIEQVKAATLSAAASREH

SEQ ID NO: 104365 - DNA, 1122 bp, Vibrio vulnificus YJ016
  CDS (1)..(1122): transl_table=11
atgccaaataaagttgccttaattacaggtgtaacgggtcaggacggatcatacttagcagagttccttttagaaaaaggttatgaggttcatggtattaagcgccgcgcctcaagttttaatacagagcgtgtagaccatatttatcaagatagacacgacgataaccctaaatttttccttcattatggtgacctcacagatacttcaaacttaactcgtattcttaaagaggtgcaacctgatgaggtgtataacttaggagcccaaagccatgtcgccgtatcgtttgaagcgccagaatacacagctgatgtagatgcaattggtacgctgcgtttgcttgaagcaatccgtttccttggattagagaagaaaacaaaattctaccaagcatcaacgtcagagttgtacggtgaagtgcaagagattccgcaaaaggaaactactcctttctacccacgttcaccatacgctgttgcaaaaatgtatgcttactggattacagtaaattaccgtgagtcttatggtatgtatgcatgtaacggtattctgtttaaccatgaatcacctcgtcgcggcgaaacgttcgtaacgcgaaaaataacacgtggccttgccaatatttctcaaggtttagagaagtgtttatatctaggtaatatggatgctcttcgcgattgggggcacgcaaaagactatgtacgtatgcagtggatgatgcttcagcaagttacaccagaagactttgttattgcaacaggaagacaaatctctgtcagagaatttgtatctttatcggccaaagagctagggattacgctggaatttagcggtgaaggtattgatgaaatagcgacagttgtatctattgacggtgaaaatgcacaagtacttaaagtaggtgatgttattgtacgtgtagacccgcgttatttccgtccagccgaagttgaaacattgttaggcgatccaaccaaagccaaagaaaagttaggttgggagccagagattactgttgaagaaatgtgtgcagaaatggttcaacatgacttagctaaagcgaagcagcatgcattattgaaatctcacggctactctgtgagtgttccagtagagtaa

SEQ ID NO: 104366 - protein, 373 aa, Vibrio vulnificus YJ016
MPNKVALITGVTGQDGSYLAEFLLEKGYEVHGIKRRASSFNTERVDHIYQDRHDDNPKFFLHYGDLTDTSNLTRILKEVQPDEVYNLGAQSHVAVSFEAPEYTADVDAIGTLRLLEAIRFLGLEKKTKFYQASTSELYGEVQEIPQKETTPFYPRSPYAVAKMYAYWITVNYRESYGMYACNGILFNHESPRRGETFVTRKITRGLANISQGLEKCLYLGNMDALRDWGHAKDYVRMQWMMLQQVTPEDFVIATGRQISVREFVSLSAKELGITLEFSGEGIDEIATVVSIDGENAQVLKVGDVIVRVDPRYFRPAEVETLLGDPTKAKEKLGWEPEITVEEMCAEMVQHDLAKAKQHALLKSHGYSVSVPVE

SEQ ID NO: 104367 - DNA, 987 bp, Rhodopseudomonas palustris CGA009
  CDS (1)..(987): transl_table=11
atgagcaagacggctttcatcaccggcatcaccggacaggacggtgcctacttggcccagcatctcatcgcgcagggctacgccgttcacggtctgctccgtcgcagtgcctctgcggatggcatgaccagccggttgaagtggctcggcattgccgaccaggtgacgctgcatgacggaaacctgaccgacctctccagcctgatccggctgctgacggatctgcagccagacgaggtctacaatctggcggcacagtcgttcgtcaaatcctcgtggcaacaacccctgctcaccgggacggtaacggggctcggtgccgtaaacgctctcgaagcagtgcggatcgcctgcccgaaagcgcgcttctatcaagcgtcgtcatcggagatgtacggcctgatccagcagcggatccaaagcgaaaccacgccgttctatccgcgttcgccctacgcagcagccaaactctacgcgcattggatgacgatcaactatcgcgagagcttcggcatgcacgcgtcgtgcggcatcctgttcaaccacgagtcgccgctgcgcggcatcgagttcgtcacccgcaagatcaccgatggcgtcgcgcggatcaaactcggcctacagactaccctgtcgctcggcaatctcgacgccaaacgtgactggggtcatgcgcgcgactacacccgggcgatgtggctgatgctgcagcaggacgtgccggacgactacgtgattgccacggggcgcaccgcgtccgtgcgtgagttctgcgaaatggcgttcgcctgcgtaggcctcgacatgaatcaatacgtcgtgaccgatccgcggcatttgcgccccgcggaggtggactatcttcaaggtgatgcggccaaggccaagcggaagctcggctggacgttcgagacatcgctcgagcagatgatcgccgaaatggttgaggccgacctcgcccgcctcaagatgaccgagcgactgtaa

SEQ ID NO: 104368 - protein, 328 aa, Rhodopseudomonas palustris CGA009
MSKTAFITGITGQDGAYLAQHLIAQGYAVHGLLRRSASADGMTSRLKWLGIADQVTLHDGNLTDLSSLIRLLTDLQPDEVYNLAAQSFVKSSWQQPLLTGTVTGLGAVNALEAVRIACPKARFYQASSSEMYGLIQQRIQSETTPFYPRSPYAAAKLYAHWMTINYRESFGMHASCGILFNHESPLRGIEFVTRKITDGVARIKLGLQTTLSLGNLDAKRDWGHARDYTRAMWLMLQQDVPDDYVIATGRTASVREFCEMAFACVGLDMNQYVVTDPRHLRPAEVDYLQGDAAKAKRKLGWTFETSLEQMIAEMVEADLARLKMTERL

SEQ ID NO: 104369 - DNA, 1050 bp, Geobacter sulfurreducens PCA
  CDS (1)..(1050): transl_table=11
gtgaaacgcgcactcataaccggcatttctggccaggacggctcgtacctggcggaactgctccttggcaagggatacgaggttcacggcgtcatccggcgttcgtcatcattcaataccgggcggatcgaccacctctatcgggacccccacgagcccgacgtgcggcttttcctccactacggcgacttgaacgacgccagctccatcaaccgggtcctgcgcgaggtgcggcccgacgagatctacaacctgggcgcccagagccatgtccgggtttcattcgatgtccccgagtacaccggggaaatcgatgccctcggcacggtgcggctactggaaggcatccgcgagaccggcctgaacacgagattctaccaggcctcgtcctccgagctgtacggcaaggtggtggagacgccccagaaggaaaccacccccttctacccccgctcaccctatgcctgcgccaaggcctacgcctactacatcaccgtcaactatcgcgagagttatggcatgtatgcctgtaacggcattctgttcaaccatgagtcgccgcgtcgcggcgagacgttcgtcacccggaagatcacccgggctgccggccggatcaagacgggtcttcaggatcggctctatctcgggaatctggatgccaagcgcgactggggctttgccggggactacgtggaagccatgtggctcatgctccagcagcaggaggccgacgacttcgtggtggccacgggcgagacctggtcggtgcgggagttcgccgaacgggtcttcgcgcggctcggcatgccccttgagtggcaggggaaaggggggcacgagaaggggatcgacacgaacagcgggaagatcgtgatcgagatcgacccccgctatttccggccggcggaggtggacctgctgctgggcgatcctgccaaggcccggcgccagctcggctggcagccccgggtggacttccaggggctcgtggatatgatgaccgatgcggacctggcattggccgagcgggagaagcgggccgatggatag

SEQ ID NO: 104370 - protein, 349 aa, Geobacter sulfurreducens PCA
MKRALITGISGQDGSYLAELLLGKGYEVHGVIRRSSSFNTGRIDHLYRDPHEPDVRLFLHYGDLNDASSINRVLREVRPDEIYNLGAQSHVRVSFDVPEYTGEIDALGTVRLLEGIRETGLNTRFYQASSSELYGKVVETPQKETTPFYPRSPYACAKAYAYYITVNYRESYGMYACNGILFNHESPRRGETFVTRKITRAAGRIKTGLQDRLYLGNLDAKRDWGFAGDYVEAMWLMLQQQEADDFVVATGETWSVREFAERVFARLGMPLEWQGKGGHEKGIDTNSGKIVIEIDPRYFRPAEVDLLLGDPAKARRQLGWQPRVDFQGLVDMMTDADLALAEREKRADG

SEQ ID NO: 104371 - DNA, 1032 bp, Mycobacterium avium subsp. paratuberculosis K-10
  CDS (1)..(1032): transl_table=11
gtgaagcgagcgcttataacagggatcacggggcaggatggttcctacctcgccgagctactactgagcaagggatacgaggttcacgggctcgttcgtcgagcttcgacgtttaacacgtcgcggatcgatcacctctacgttgacccacaccaaccgggcgcgcgcttgttcttgcactatgcagacctcactgacggcacccggttggtgaccctgctcagcagtatcgacccggatgaggtctacaacctcgcagcgcagtcccatgtgcgcgtcagctttgacgagccagtgcataccggagacaccaccggcatgggatcgatccgacttctggaagcagtccgcctttctcgggtggactgccggttctatcaggcttcctcgtcggagatgttcggcgcatctccgccaccgcagaacgaatcgacgccgttctatccccgttcgccatacggcgcggccaaggtcttctcgtactggacgactcgcaactatcgagaggcgtacggattattcgcagtgaatggcatcttgttcaaccatgagtccccccggcgcggcgagactttcgtgacccgaaagatcacgcgtgccgtggcgcgcatccgagctggcgtccaatcggaggtctatatgggcaacctcgatgcgatccgcgactggggctacgcgcccgaatatgtcgaggggatgtggaggatgttgcaagcgcctgaacctgatgactacgtcctggcgacagggcgtggttacaccgtacgtgagttcgctcaagctgcttttgaccacgtcgggctcgactggcaaaagcacgtcaagtttgacgaccgctatttgcgccccaccgaggtcgattcgctagtaggagatgccgacagggcggcccagtcactcggctggaaagcttcggttcatactggtgaactcgcgcgcatcatggtggacgcggacatcgccgcgttggagtgcgatggcacaccatggatcgacacgccgatgttgcctggttggggcagagtaagttga

SEQ ID NO: 104372 - protein, 343 aa, Mycobacterium avium subsp. paratuberculosis K-10
MKRALITGITGQDGSYLAELLLSKGYEVHGLVRRASTFNTSRIDHLYVDPHQPGARLFLHYADLTDGTRLVTLLSSIDPDEVYNLAAQSHVRVSFDEPVHTGDTTGMGSIRLLEAVRLSRVDCRFYQASSSEMFGASPPPQNESTPFYPRSPYGAAKVFSYWTTRNYREAYGLFAVNGILFNHESPRRGETFVTRKITRAVARIRAGVQSEVYMGNLDAIRDWGYAPEYVEGMWRMLQAPEPDDYVLATGRGYTVREFAQAAFDHVGLDWQKHVKFDDRYLRPTEVDSLVGDADRAAQSLGWKASVHTGELARIMVDADIAALECDGTPWIDTPMLPGWGRVS

SEQ ID NO: 104373 - DNA, 1071 bp, Nasonia vitripennis
  CDS (1)..(1071)
atggcaacgggagatcagaaacgcgtcgctctcattaccggcatcactgggcaggatggctcgtatttggccgagttccttattgaaaaaggttacgaggttcatggtattattagaagagcaagttcattcaataccaccagaatacagcatctttatgaagatcctaatagtcacagacagggaaagatgaaacttcattatggcgatatgacagattctagtagtcttgttaaagtaattagcaaagttcaacctactgaaatctacaatttagctgctcaaagccatgtcaaggtaagttttgatttaagtgaatacacagctgaagtcgatgctgttggcacagtaagattgctagatgctgtacaaacgtgtggattagaaaaatcagtcaaattttatcaagcttctacttctgaactttatgggaaagccagtgaggtgcctcagaatgaaaagactccattttatccacgatcaccttatgcttgtgccaagatgtatagtttttggattgttataaactacagagaggcatatggtatgcatgccagcaatggtatactctttaaccatgaaagtccaaggcgaggtgaaaattttgtaacccgaaagatcactagaacaatagcaaaaatacacttgggcttacaagatgtattggagctaggaaatttggatgctaaaagagattggggacatgctaaggattatgttgaagcaatgtggttaatgctacaacaagatgtcccagatgattatgtgatagctacaggtgaaacgcacagtgtaagggaatttgttgaagaagcattccagtttgttggaagaagtattaaatgggaaggtaaaggtgtagaggaagttggaaaagatgcaagtagtggacaaatacttgtaaaagttaatcctaaatattttcgtccaacagaagttgatcttctgatgggagatgcgacaaaagcaaagaaaacattgggctggacaccaactgtgtcattccaagaacttgtggttgatatgatgactgctgatttggaattgatgagaagaaatccagtagcataa

SEQ ID NO: 104374 - protein, 356 aa, Nasonia vitripennis
MATGDQKRVALITGITGQDGSYLAEFLIEKGYEVHGIIRRASSFNTTRIQHLYEDPNSHRQGKMKLHYGDMTDSSSLVKVISKVQPTEIYNLAAQSHVKVSFDLSEYTAEVDAVGTVRLLDAVQTCGLEKSVKFYQASTSELYGKASEVPQNEKTPFYPRSPYACAKMYSFWIVINYREAYGMHASNGILFNHESPRRGENFVTRKITRTIAKIHLGLQDVLELGNLDAKRDWGHAKDYVEAMWLMLQQDVPDDYVIATGETHSVREFVEEAFQFVGRSIKWEGKGVEEVGKDASSGQILVKVNPKYFRPTEVDLLMGDATKAKKTLGWTPTVSFQELVVDMMTADLELMRRNPVA

SEQ ID NO: 104375 - DNA, 1089 bp, Anopheles gambiae str. PEST
  CDS (1)..(1089)
atggagggcgaagcagcagtgacgaatccggtcgataggaaagtggcactgataacaggcattacgggtcaagatggttcatatttggcggaatttctgctggacaagggctacgaggtgcacggcataataaggcgcgcgagtacgttcaacacgtcgcgcatcgagcatctgtatgcggatccgcgcacgcaccgggagggcaagatgaagctgcactacggcgacatgaccgacagcagcgcgctggtgaaaatcattgcccaggtgcgcccgtccgaaatatacaatctggccgcccagagccacgtgaagatttcgttcgatctgagcgagtacacggcggaggtggatgcggtcggtacgctgcggctgctcgatgccatccgcacggtggggcaggagcggacggtccgcttctatcaggcatcgacgtccgagctgtacggcaaggtggcggagacgccccagaacgaaaagaccccgttctatccccgctcaccgtacgcgtgtgccaagatgtacgggtactggattgtgatcaactatcgcgaagcgtacgacatgttcgcctgcaatggcatcctgttcaatcacgagtcgccgcgccggggggagaacttcgtgacgcgcaaaatcacccgctcggtggccaagatttcgctcggccagcaggagtacctggagctgggcaatctcgactcgaagcgcgactggggccacgcgaaggactacgtcgaggcgatgtggctgatgatgcagcaggagcggccggaagatttcgtgattgcgacgggcgaaacgcactcggtgcgagagtttgtggagcaggcgttccggtacattgggcgcgagatcgagtggcgagggacgggtgtggatgaggtgggggtcgagaagggcaccgatacggtgcgggtgcgcatcaatcccaagtttttccgcccgaccgaggtcgacctgctgctgggcgacgcgtccaaggcgaaggcacagctgggctggtcgccgaaggtaacattcctggagctgatcgccgacatgatggcggcggacatacagctgatgaagaacaacccatcggcctaa

SEQ ID NO: 104376 - protein, 362 aa, Anopheles gambiae str. PEST
MEGEAAVTNPVDRKVALITGITGQDGSYLAEFLLDKGYEVHGIIRRASTFNTSRIEHLYADPRTHREGKMKLHYGDMTDSSALVKIIAQVRPSEIYNLAAQSHVKISFDLSEYTAEVDAVGTLRLLDAIRTVGQERTVRFYQASTSELYGKVAETPQNEKTPFYPRSPYACAKMYGYWIVINYREAYDMFACNGILFNHESPRRGENFVTRKITRSVAKISLGQQEYLELGNLDSKRDWGHAKDYVEAMWLMMQQERPEDFVIATGETHSVREFVEQAFRYIGREIEWRGTGVDEVGVEKGTDTVRVRINPKFFRPTEVDLLLGDASKAKAQLGWSPKVTFLELIADMMAADIQLMKNNPSA

SEQ ID NO: 104377 - DNA, 1071 bp, Apis mellifera
  CDS (1)..(1071)
atggcaactgatagtagaagacgtgttgcattaattactggtattactggacaagatggttcctatttagcagaatttttattagaaaaaggatatgatgtacatggtataattagacgagctagctcttttaatactgctcgaattcaacatctttatgaagatccaaaatgtcatcgtcaaggcaaaatgaagttacattatggtgatatgacagattccagtagtttaattaaagtaattagttctgtacaaccaacagaaatttataatcttgctgctcaaagtcatgttatggtaagttttgaagtaagtgagtatactgctgaagtagatgcagtaggaacagttagattattagatgcaatacgtacctgtggccttgaaaaatctgttaaattttaccatgcatcaacatctgaactttatggcagggtaactcaagtacctcaaaatgaaaaaactccattttatcctcgttcaccatatgcttgtgcaaaattatatagtttttggattgtaataaattatagagaagcatataatatgtttgcttgtaatggtattttatttaatcatgagagtcctcgtagaggagagaattttgttacaagaaaagtgaccagatctatagcaaagatacatcttggtttacaagacattcttgaattaggaaatttagatgctaaacgagattggggacacgcaaaagattatgttgaagcaatgtggttaatgttgcaacaaccaacagcagatgattatgttatagcaacaggagagacacatagtgttagagaatttgtggaagcagcatttcaatatgtaggtcgtaccattaaatgggaaggtgaaggaataaatgaaataggacaggatgtacaaacaggacaagtattagttaaagtgaatcctaaatatttccgtccaacggaagtagatgtacttttgggtgatgctactaaagcaaaagaaaaaattggttggaaacctactattacatttgagaatcttgtaaaagatatgatggattctgatttagaattaatgagcaaaaatccaaatgcttaa

SEQ ID NO: 104378 - protein, 356 aa, Apis mellifera
MATDSRRRVALITGITGQDGSYLAEFLLEKGYDVHGIIRRASSFNTARIQHLYEDPKCHRQGKMKLHYGDMTDSSSLIKVISSVQPTEIYNLAAQSHVMVSFEVSEYTAEVDAVGTVRLLDAIRTCGLEKSVKFYHASTSELYGRVTQVPQNEKTPFYPRSPYACAKLYSFWIVINYREAYNMFACNGILFNHESPRRGENFVTRKVTRSIAKIHLGLQDILELGNLDAKRDWGHAKDYVEAMWLMLQQPTADDYVIATGETHSVREFVEAAFQYVGRTIKWEGEGINEIGQDVQTGQVLVKVNPKYFRPTEVDVLLGDATKAKEKIGWKPTITFENLVKDMMDSDLELMSKNPNA

SEQ ID NO: 104379 - DNA, 1080 bp, Strongylocentrotus purpuratus
  CDS (1)..(1080)
atggctacaaatgggtcaccctcgaacgatcgaaaagttgccctcatcacaggcataacaggacaggatggatcatatctagctgaattcctgattgataagggctatacagtccatggaatcatgaggagggcaagtaccttcaacacaggacgtatccaacatctctacaaggatcccaagacacatcaaagtggatccatggtactacattatggtgacctgacggacagtacgtgcttggtcaagattgtgagcaaggtcagaccctcggagatctacaaccttggtgcgcagagtcacgtgaaggtatcctttgagatgggcgaatactcggctgacgttgatggtgtgcaagttttgcaaattttgaccgctccgaaaatgtgtgagcaactgaatcctttttattattccacatcctttgttttcattgttgaacaagaatatcctacagatatattttgtttatttgtatattctcttgttacctatgcaggtgcggcgaagctgtatgcctactggatcacaatcaacttccgagaagcctacaacatgtttgcttgcaacggtatcctcttcaaccatgagagccctaggagaggtgagacatttgtgacgaggaaaatcaccagagctgttgccaagatccatctgggacagcaggattccgtgagcctaggaaacattgattctcagcgtgattggggacacgctaaagactacatcgaggccatgtggatgatgctgcaacacaaggagccagtggaccttgtcatcgcaaccaaccaggtccacagtgtgcgggagtttgtggtagcttcgttcaaatgcatcggggttgagattgtatgggaaggcaagggagaacaagaagttggaaaagacaaggcgacgggagtcattcgagtcaaaatcgatcccaagttctacaggccaacggaagtggaatatttacaaggagatccatcaaaggcagagaaacttctgggatggaaacccaagtgttcttttgatgaacttgtgaaggaaatggttgagagtgacattaatgtcatgaagaagaatcctacggcttag

SEQ ID NO: 104380 - protein, 359 aa, Strongylocentrotus purpuratus
MATNGSPSNDRKVALITGITGQDGSYLAEFLIDKGYTVHGIMRRASTFNTGRIQHLYKDPKTHQSGSMVLHYGDLTDSTCLVKIVSKVRPSEIYNLGAQSHVKVSFEMGEYSADVDGVQVLQILTAPKMCEQLNPFYYSTSFVFIVEQEYPTDIFCLFVYSLVTYAGAAKLYAYWITINFREAYNMFACNGILFNHESPRRGETFVTRKITRAVAKIHLGQQDSVSLGNIDSQRDWGHAKDYIEAMWMMLQHKEPVDLVIATNQVHSVREFVVASFKCIGVEIVWEGKGEQEVGKDKATGVIRVKIDPKFYRPTEVEYLQGDPSKAEKLLGWKPKCSFDELVKEMVESDINVMKKNPTA

SEQ ID NO: 104381 - DNA, 1071 bp, Tribolium castaneum
  CDS (1)..(1071)
atggcaagtggtgaggaccgcaaagtggcccttttgaccggaattacgggtcaggacggttcgtatcttactgagtttcttctgggcaaaggctacgaagttcatgggattattcgcagagctagtacttttaatacgagcagaattgagcatttgcacacaaatgtttaccagcataagggcggaaaaatgcatttacattatggggacatgaccgattctagctcacttgtgaagcttataaataaaataaaaccaatggaaatttataatttggcggctcaaagccacgttaaggtgtcttttgatttgagcgagtacacggcagaggtggacgctgtgggaactttgcgacttttggatgccataaggacttgtgggttggagaaagaagtcaagttttatcaagcttccacctcggaattgtacggaaaagtcgccgaaattccacagagtgaaaaaacgccgttttatcccaggtctccatacgcttgtgcaaagctttacgcttactggatcgtggtgaactaccgtgaagcttacggcatgttcgcctgcaacggcatcctcttcaaccacgaaagcccccgacgtggtgaaaccttcgtcacgcgcaaaatcacccgagaagtggccaaaatccacctggggctcactcagtgccttgaattaggcaacctggactcgaagcgcgactggggccatgccaaggactacgtggaggccatgtggctcatgctgcagcagcccgagccggacgacttcgtcatagcttccggggagacgcacagtgtgcgggagtttgttgaggcggctttcagacacgtggggaaggagattctgtgggaagggagcggcgtggacgaggtggggaaggagaaggacaccggagttgtccgggttaggatcaacccgaggtatttccggcccacggaagtggatttgttgttgggggatgcgtccaaagccaggagcaagtttaattgggcgccgaaagtgtcgtttcctgagctggtgaaggatatgatggaggcggatattgatttaatgaagaggaatcctttggcttag

SEQ ID NO: 104382 - protein, 356 aa, Tribolium castaneum
MASGEDRKVALLTGITGQDGSYLTEFLLGKGYEVHGIIRRASTFNTSRIEHLHTNVYQHKGGKMHLHYGDMTDSSSLVKLINKIKPMEIYNLAAQSHVKVSFDLSEYTAEVDAVGTLRLLDAIRTCGLEKEVKFYQASTSELYGKVAEIPQSEKTPFYPRSPYACAKLYAYWIVVNYREAYGMFACNGILFNHESPRRGETFVTRKITREVAKIHLGLTQCLELGNLDSKRDWGHAKDYVEAMWLMLQQPEPDDFVIASGETHSVREFVEAAFRHVGKEILWEGSGVDEVGKEKDTGVVRVRINPRYFRPTEVDLLLGDASKARSKFNWAPKVSFPELVKDMMEADIDLMKRNPLA

SEQ ID NO: 104383 - DNA, 1143 bp, Prochlorococcus marinus str. AS9601
  CDS (1)..(1143): transl_table=11
atgataaagaatcaaaaagttgctctaattactggtattaccggtcaagatggcagctatcttgcggaatttttattgaataaaggttatatagttcatggaataaaaagaaggtccagtagtttaaatactgagagaattgaccatatttatcaagatccgcatttaagtaacccctcattgatattgcattacggagatttaactgatagtacaaaccttataagaataatcaaatatgtaaagccagatgagatttacaatcttggggctcaaagtcatgtgagtgttagctttgaaactccagaatacacagctaactgtgatgcgttagggaccttaagaatattagaagcaattagattattaaaacttgaaaaaattactaaattttatcaagctagtacaagcgaattatatggtttagtgcaagaaacccctcaaactgagaaaacacctttttaccctagaagtccttatggagtagctaaactttactcatattggataactgtaaattacagagaatcctatggaatatttgcttgcaatggaattctttttaatcatgaaagtccaagaagaggagagacatttgttacaagaaaaataacaagaggattatctcgaatagatcagggcttagaaaattgtatttatcttggtaatcttgatgcattaagagattggggacatgctgttgattatgtagaaatgcagtggaagatgttacagcaaaaagacccaaaagattatgtaatttcaacaggcaggcaggaaagtgtaagaagatttattcatttagcagctttggcattggggtggaaaacaaatgcagagaataatgctattgtttgggagggttcaggattagatgaagtaggaagaagagttgatacaaatgaaattattataaggattgatccaaaatatttcagaccatcagaagttgaaacactccttggagattcttcaaaagcatatgaagaacttaattggaaaccaaaaataagtttagaagagcttataaaagaaatgataaatgcagatattgagttagcaaaaaaagaagcttttttatttagaaaaggatttaacatccctaaatcaattgaaaaccctccgagcatttttgaaaaataa

SEQ ID NO: 104384 - protein, 380 aa, Prochlorococcus marinus str. AS9601
MIKNQKVALITGITGQDGSYLAEFLLNKGYIVHGIKRRSSSLNTERIDHIYQDPHLSNPSLILHYGDLTDSTNLIRIIKYVKPDEIYNLGAQSHVSVSFETPEYTANCDALGTLRILEAIRLLKLEKITKFYQASTSELYGLVQETPQTEKTPFYPRSPYGVAKLYSYWITVNYRESYGIFACNGILFNHESPRRGETFVTRKITRGLSRIDQGLENCIYLGNLDALRDWGHAVDYVEMQWKMLQQKDPKDYVISTGRQESVRRFIHLAALALGWKTNAENNAIVWEGSGLDEVGRRVDTNEIIIRIDPKYFRPSEVETLLGDSSKAYEELNWKPKISLEELIKEMINADIELAKKEAFLFRKGFNIPKSIENPPSIFEK

SEQ ID NO: 104385 - DNA, 969 bp, Prochlorococcus marinus str. MIT 9515
  CDS (1)..(969): transl_table=11
atgaccaaggcatttatcacaggtataaatggtcaggacggatcatatctagcagaacaccttttatcacttggttacgaagtaggcggacttgtaagaagaagctcagttgctgaaaatcagacttatagaattaatcctatagaaagtaagttaaaaacatattatggcgatttaattgaccagaattcactagcagatgcctttcgacattttaaacctgatttgatttttaatttagcagctcaaagtcatgtcagactttcttttgatatgccaggttttactgcacaagtaaatgcagttggtgctttaaatgtttttactgcggccaaggagaattgtgagggtgcaagaatctatcaagccagctcctctgaaatgtttggaacttcagttgacccagataattatcaacgagaaactacaccaatgcatcccgtaagtccttatggatgttcaaaattatatgcatatagtattgctagaaatttccgaagagcctatggtcttcatatttcaaatggcatcctttttaatcacgaatccccaaggagagggacaaatttcgtgacagctaaggttgtaaaaggtgctcttgacattaaatacaaaaaagaaaaattcctagaattagggaacctagattcatacagagattggggacattcttacgactatacgaaagcaatgattaaattattagaatatagtgaacctttggatatcgttatatctactgggaaagcccactcagtcaaggatctatgtaaagtggttttttcgaaacttggcatggattatgaagaacatataaaaatcaatcctaaattcctccgccctcaagaacttccatacttacaaggagattcgacaaaagcaaaacaaatccttggatgggaaccggaatttacttttgaaactttagttgaagatatgattatgcattttgaggcctcttacaaataa

SEQ ID NO: 104386 - protein, 322 aa, Prochlorococcus marinus str. MIT 9515
MTKAFITGINGQDGSYLAEHLLSLGYEVGGLVRRSSVAENQTYRINPIESKLKTYYGDLIDQNSLADAFRHFKPDLIFNLAAQSHVRLSFDMPGFTAQVNAVGALNVFTAAKENCEGARIYQASSSEMFGTSVDPDNYQRETTPMHPVSPYGCSKLYAYSIARNFRRAYGLHISNGILFNHESPRRGTNFVTAKVVKGALDIKYKKEKFLELGNLDSYRDWGHSYDYTKAMIKLLEYSEPLDIVISTGKAHSVKDLCKVVFSKLGMDYEEHIKINPKFLRPQELPYLQGDSTKAKQILGWEPEFTFETLVEDMIMHFEASYK

SEQ ID NO: 104387 - DNA, 1107 bp, Prochlorococcus marinus str. MIT 9515
  CDS (1)..(1107): transl_table=11
atgaataaaaaagccttaattactggagttaccggacaagatgggagttatctagttgaatttcttttaaataaaaaatacgaagtacatggaataaagaggagaagtagtagcttaaacacgcgaagggtagatcatctatatcaagatccacatgaaaataatccaagattttttatgcattatggtgatctaactgacagtacaaacttaataagacttatacaagatatctcccctgatgaaatttataatttaggtgctcaaagtcatgtagcagttagttttgaaactcccgaatatactgctaattgcgatgctttaggcaccttaagaatattagaggcagttcgagtattaggtctctcaaaaaaaacaaaaatatatcaagccagcactagtgaattatatggtttggttcaggaaacacctcaaaacgaaaaaacacctttctatcctagaagtccatatggtgttgcaaaattatatgcttattggattacgattaattatcgagaagcatatggaatgtacgcatgtaacgggattcttttcaaccatgaaagccctaggagaggagaaacatttatcacgagaaaaatcacaagagggcttgcgagaatagatgctggccttgaaaaacttcttttcttgggaaatcttaattcaaaaagggattggggacacgcaagagactatgtggaaatgcaatggctaatgcttcaacaaaaggaaccaaaagattatgtcatatcaactgggagagcagaaagtataagaaaatttgctgagataagtgcatcttatcttggctggagtgataaaggaaaacctgggataatttgggaaggagaaggtttaaatgaagtgggaagaagagctgatactatggaaatagttatcaaagttgaccccagatactttagaccaactgaagttgaatttcttcttggtgaatcaaaaaaagcatctctagaattaggttggactccaaacacttcattagaagaattagtaaaagaaatgatagaatctgataaagaagaagctaggaaagactctctattgaaaaaatcaggttttcaaataaataattcccaagaataa

SEQ ID NO: 104388 - protein, 368 aa, Prochlorococcus marinus str. MIT 9515
MNKKALITGVTGQDGSYLVEFLLNKKYEVHGIKRRSSSLNTRRVDHLYQDPHENNPRFFMHYGDLTDSTNLIRLIQDISPDEIYNLGAQSHVAVSFETPEYTANCDALGTLRILEAVRVLGLSKKTKIYQASTSELYGLVQETPQNEKTPFYPRSPYGVAKLYAYWITINYREAYGMYACNGILFNHESPRRGETFITRKITRGLARIDAGLEKLLFLGNLNSKRDWGHARDYVEMQWLMLQQKEPKDYVISTGRAESIRKFAEISASYLGWSDKGKPGIIWEGEGLNEVGRRADTMEIVIKVDPRYFRPTEVEFLLGESKKASLELGWTPNTSLEELVKEMIESDKEEARKDSLLKKSGFQINNSQE

SEQ ID NO: 104389 - DNA, 1053 bp, Prochlorococcus marinus str. NATL1A
  CDS (1)..(1053): transl_table=11
gtgagtcaaaagaaaattgctttaatcactggcataactggtcaagatggaagctacctagcggaacttctacttgataaaggatataaagttcatggactcgttaggagatcaagtcagaaaaataccaatcttttagataacattttaaatagtcagcacaataaaaatcttgaacttcactatggtgatttaacacagagcaccaatatccttagaataattgaaaatatacaaccagatgagatctacaatttaggagcgcaaagccatgtccaagtaagtttcgagacgccagaatatactgcccaaactgatgcattaggtcctctaaggatacttgaagctattaggattctgcaactcaccaaaaaaacaaaaatttatcaagccagtacatcagaattgtatggactggtacaagaaacacctcaaaacgagagaacacccttttacccaagaagtccatatggagtcgcgaaactttatgcatattggataacaatcaattatcgagaatcgtatgggattttcgcttgtaacggaattttatttaatcatgaatctcctagacgtggagaaaattttgtaacaagaaaaatcaccaaaggattgtgcgaaatcaacaggggttcaactgactgcctatatctagggaatatagattctttgagggactgggggcatgcaaaagattatgtcgaaatgcagtggatgatgcttcaacaagaaaaacctgaagattatgtgatttcaacaggtaaacaaacttctgttaggagatttgttgaattatgtgcagaacatttaaattggggcggaattatttgggaaggcaaggggatagatgaaatagggaagagaaaagataataaacaagtaattatcaggattgatccaaatttatttcgacccgcagaagtgaatagcctattgggagactcagaaaaagcctacaaaaaacttggttggaaacctaaatataatatcgagagtctgataattgaaatgatcgaagaagataaaatagacaagaaatataattataattaa

SEQ ID NO: 104390 - protein, 350 aa, Prochlorococcus marinus str. NATL1A
MSQKKIALITGITGQDGSYLAELLLDKGYKVHGLVRRSSQKNTNLLDNILNSQHNKNLELHYGDLTQSTNILRIIENIQPDEIYNLGAQSHVQVSFETPEYTAQTDALGPLRILEAIRILQLTKKTKIYQASTSELYGLVQETPQNERTPFYPRSPYGVAKLYAYWITINYRESYGIFACNGILFNHESPRRGENFVTRKITKGLCEINRGSTDCLYLGNIDSLRDWGHAKDYVEMQWMMLQQEKPEDYVISTGKQTSVRRFVELCAEHLNWGGIIWEGKGIDEIGKRKDNKQVIIRIDPNLFRPAEVNSLLGDSEKAYKKLGWKPKYNIESLIIEMIEEDKIDKKYNYN

SEQ ID NO: 104391 - DNA, 1095 bp, Prochlorococcus marinus str. MIT 9301
  CDS (1)..(1095): transl_table=11
atgactaaaaaagttgctcttattacgggaataactggacaggatggaagttatcttggtgaattcttgttatcaaaaggttacgaagtacatggaattaaaagaagatctagttctttcaatactgaaagaattgatcatctttaccaagatccacacaaaagcaaatgtaggtttttcttgcattatggagatttaactgacagcacaaatattctaaagttaatagaaaaaatccaaccagatgaaatatataatcttggagcacaaagccacgtcgcagttagtttcgaatctcctgaatatacagctaatagcgatgcactggggaccttaagaattttagaagcagtaaaaattttaaagttaataaataaaactaaggtttatcaggcaagtacttcagaattatttggtaaagtacaagaaattcctcaaacagaatccactcctttttatcctgcaagtccatatggtgtggcaaagttatatgcttattggattactgttaactacagagaatcttatgggatgtttgcatcaaacggaatattatttaatcatgaaagtcccaggagaggtgaaacatttgttacgagaaaaatcacaagaggtttagcaagaatagatcaaggattagacgaaatattatatttaggtaatctagatgcaaaacgagattggggacatgcaaaagattacgtcgaagttcaatggaaaatattgcaacattctaaacctgatgattttgtaatcgctactggtagacaagaaagtgttagaagatttgttgaacttgcatcaattgaacttggatggggaggcattatttgggaaggtgaaggagagaatgaaattggcaaaagaaaagatagtagtaaaattgttattaaggtagataaacgatatttcaggcctagcgaggtacaagaattacttggtaataactttaaggcaaaaaaaattctaggatgggaatcaaagataactctagaaaagcttatcaaagaaatgatccaaaatgataaagaattagctgctaaagaatcattattaaaaagggaaggttataagataaatagctcaaatgaataa

SEQ ID NO: 104392 - protein, 364 aa, Prochlorococcus marinus str. MIT 9301
MTKKVALITGITGQDGSYLGEFLLSKGYEVHGIKRRSSSFNTERIDHLYQDPHKSKCRFFLHYGDLTDSTNILKLIEKIQPDEIYNLGAQSHVAVSFESPEYTANSDALGTLRILEAVKILKLINKTKVYQASTSELFGKVQEIPQTESTPFYPASPYGVAKLYAYWITVNYRESYGMFASNGILFNHESPRRGETFVTRKITRGLARIDQGLDEILYLGNLDAKRDWGHAKDYVEVQWKILQHSKPDDFVIATGRQESVRRFVELASIELGWGGIIWEGEGENEIGKRKDSSKIVIKVDKRYFRPSEVQELLGNNFKAKKILGWESKITLEKLIKEMIQNDKELAAKESLLKREGYKINSSNE

SEQ ID NO: 104393 - DNA, 1146 bp, Desulfovibrio vulgaris subsp. vulgaris str. Hildenborough
  CDS (1)..(1146): transl_table=11
atgaagcgcgcgctcatcaccggcatcaccgggcaggacggggcctacctcgccgaattcctgcttgccaaaggctatgaggtgcacggcatcaagcgccgggcctcgcttttcaataccgaccgcatcgaccacctctatcaggacccgcacgagaagcgcagacggttcatcctgcattacggcgacatgaccgatgccagcaatctcatccgcatcgtgcaggaggtgcagcccgacgaggtctacaacctcgcggcgcagagtcatgtgaaggtgtcgttcgaactgcctgaatatacggccaatgtcgacgcactggggccgttgcggctgcttgaggccattcgcatcctcggcctggagaagagcacgcgcttctatcaggcctccacatcggagcttttcgggctggtgcaggaagtgccgcagacggaacgcacccccttctatccccgttccccctacgcctgcgccaaactctatgcctactggattgcggtcaactaccgcgaggcctacggcatgtacgcctgcaacggcatcctcttcaatcacgagtcgcctgtgcgcggcgagaccttcgtcacgcgcaagattacccgtgcgctggcgcggacggtgcttgggctgaccaacggtctgcatctcggcaatctcaacgccctgcgcgactgggggcacgcccgtgactacgtggagatgcagtggctcatgttgcaacaggacaagcccgaagatttcgtcatcgccaccggacatcagtattcggtgcgcgacttcgtggccacggctgcaggtgaactcggtcttgcactggagtggcacggcgagggcgtggacgagaagggtgttgtcacgtcggtggatgcgaaggcgctggaacggttgaccggtgccgccggggcttcgtgccccgtgaagccgggcgacgttctggtgcaggtcgacccgcgctacttccgtcccaccgaggtcgagacgctgctgggcgacccgacgcgggcccatgaacgcctcggatggaaaccgcggacgaccttcgccgacatggtggcggagatggtccgcgaggacgtgaacctcgcccgccgcgacgccgtatgcaaggtggccggtttcagggccttcagttacaacgaatag

SEQ ID NO: 104394 - protein, 381 aa, Desulfovibrio vulgaris subsp. vulgaris str. Hildenborough
MKRALITGITGQDGAYLAEFLLAKGYEVHGIKRRASLFNTDRIDHLYQDPHEKRRRFILHYGDMTDASNLIRIVQEVQPDEVYNLAAQSHVKVSFELPEYTANVDALGPLRLLEAIRILGLEKSTRFYQASTSELFGLVQEVPQTERTPFYPRSPYACAKLYAYWIAVNYREAYGMYACNGILFNHESPVRGETFVTRKITRALARTVLGLTNGLHLGNLNALRDWGHARDYVEMQWLMLQQDKPEDFVIATGHQYSVRDFVATAAGELGLALEWHGEGVDEKGVVTSVDAKALERLTGAAGASCPVKPGDVLVQVDPRYFRPTEVETLLGDPTRAHERLGWKPRTTFADMVAEMVREDVNLARRDAVCKVAGFRAFSYNE

SEQ ID NO: 104395 - DNA, 1122 bp, Desulfotalea psychrophila LSv54
  CDS (1)..(1122): transl_table=11
gtgattatgaagaaggcattgattaccggtattaccggccaagatgggtcctatttggcggagttgttgttggagaagggttatgaggtacatggcatcaagaggcgggcctcctcctttaataccgagcggattgatcatatttatcaggatcccaatgccgagaatcccaggttttttctccattacggtgatttgactgactcctccaatcttacccgtatcctcaaagaggtgcagcccgatgaggtctataatcttgctgctcagtcccatgtggccgtctcttttgaggctcctgaatatactgccgatgttgtggccaatggcaccctacgcatcttggaggccattcgctttttggggcttgagaagaagacccgtttttatcaggcctcgacttcggagctctttggtgaggtgcaggagattccccagactgagacgaccccatttcatccccgctcaccctatgcagtggccaagatgtatgcctattggattaccataaattaccgtgaatcctacggtatgtatgcctgtaacggcattctctttaaccatgagtcgcctcgtcgcggtgagacctttgttacccgcaagattacccgtgcctttgccaatattgcccagggactcgaggagtgtgtctaccttggtaatatggatgccctgcgtgattggggccacgccaaggattatgtccgtatgcagtggatgatgctccagcaggatgctcccgatgattttgttattgctacgggcaggcagatttcggtacgtgactttgtccggctatcggccaaggaagctggtttcgagcttgagttcagcggtgagggcttggctgaggttggaacagtaaaggctattgtgggtgaagatgcccctgcggttcaggtgggtgatgtggtggttcgagtgaatccccgttacttccgtcctgccgaggtggagaccctgcttggtgatcctactaaggctaaggagaagcttggttgggtccctgagatcaccgtggaggagatgtgtgctgagatggtggctaacgatcttgctaaggctaagcagcatgctttgttgaaattgcacggttacacaattcccgtcactaaggaataa

SEQ ID NO: 104396 - protein, 373 aa, Desulfotalea psychrophila LSv54
MIMKKALITGITGQDGSYLAELLLEKGYEVHGIKRRASSFNTERIDHIYQDPNAENPRFFLHYGDLTDSSNLTRILKEVQPDEVYNLAAQSHVAVSFEAPEYTADVVANGTLRILEAIRFLGLEKKTRFYQASTSELFGEVQEIPQTETTPFHPRSPYAVAKMYAYWITINYRESYGMYACNGILFNHESPRRGETFVTRKITRAFANIAQGLEECVYLGNMDALRDWGHAKDYVRMQWMMLQQDAPDDFVIATGRQISVRDFVRLSAKEAGFELEFSGEGLAEVGTVKAIVGEDAPAVQVGDVVVRVNPRYFRPAEVETLLGDPTKAKEKLGWVPEITVEEMCAEMVANDLAKAKQHALLKLHGYTIPVTKE

SEQ ID NO: 104397 - DNA, 1122 bp, Yersinia pseudotuberculosis IP 32953
  CDS (1)..(1122): transl_table=11
atgactaagattgcgctcattactggtattacaggacaagatggctcttatttggctgagtttttattagaaaagggttatgaggttcatggtattaagcgccgagcttcatcttttaataccagccgcattgatcatatttatcaagatcgccatgagacgaatccacgcttctttttacattatggtgacttgactgacacgtcgaatttaattcgtttggtccaggaaattcagcctgatgagatttataatttgggtgcacaatctcatgtggctgtttcatttgaatcaccggaatatactgccgatgttgatgccatggggacactgcggttgctagaggccattcgtatcaatgggcttgaaaagaagactcgtttctatcaagcctcaacctcagagctttatggtttagtgcaggaaacgcctcagcgtgaaacaacgccattctatccgcgttctccttatgctgttgccaaaatgtatgcttactggattacagtaaattaccgtgaatcatatggaatgtatgcttgtaacggaattttatttaaccatgagtctcctcgtcgtggtgaaacatttgttactcggaagattacccgtgctgttgcgaatattgcattaggtctagaaaaatgtctctatttaggcaatatagattcgctacgtgactggggccatgcgaaagattatgtgcgtatgcaatggatgatgttgcaacaagataagccagaagattttgttattgcaacaggcaagcaaattaccgttcgtgagtttgtacgtatgtcagcaagagaagcagggattgaattggaatttagtggagaaggcgttgaagaggttgccactgttgttgctattaatggtaaccatatttcttctgtaaatattggagatgtaatagtccgtgttgatccacgttatttccgtcctgctgaagttgaaacattattaggcgatccaactaaggctaaaaaagtattaggctgggtacctgaaattacggttgaagaaatgtgtgctgaaatggtcgctagtgacttagagcaggctaaacagcatgcattgttaaaggctaatggctttgacgtatccatttcgttggagaattaa

SEQ ID NO: 104398 - protein, 373 aa, Yersinia pseudotuberculosis IP 32953
MTKIALITGITGQDGSYLAEFLLEKGYEVHGIKRRASSFNTSRIDHIYQDRHETNPRFFLHYGDLTDTSNLIRLVQEIQPDEIYNLGAQSHVAVSFESPEYTADVDAMGTLRLLEAIRINGLEKKTRFYQASTSELYGLVQETPQRETTPFYPRSPYAVAKMYAYWITVNYRESYGMYACNGILFNHESPRRGETFVTRKITRAVANIALGLEKCLYLGNIDSLRDWGHAKDYVRMQWMMLQQDKPEDFVIATGKQITVREFVRMSAREAGIELEFSGEGVEEVATVVAINGNHISSVNIGDVIVRVDPRYFRPAEVETLLGDPTKAKKVLGWVPEITVEEMCAEMVASDLEQAKQHALLKANGFDVSISLEN

SEQ ID NO: 104399 - DNA, 1044 bp, Burkholderia mallei ATCC 23344
  CDS (1)..(1044): transl_table=11
atgacccaagcacgcaaggcgatcatcaccgggataacgggccaggacggcgcttatctggcgaagctgctgctcgacaagggctacgaagtcgtcggcacgtatcgccgcacgagctcggtgaacttctggcgcatcgccgaactgggcgtcgacaagcatccgggcttgacgctcgtcgagcacgatctgaccgatctcggctcgagcctgcgcctcgtcgagcgcacgcagccgcacgagctgtacaacctcgccgcgcagagcttcgtcggcgtatcgttcgaccagccggcgacgacggccgaagtcaccggcctcggcgcgctgcacctgctcgaggcgatccgcgtcgtgaacccgaagatccgctattaccaggcgtcgacgtcggagatgttcggcaaggtgcaggcgattccgcaaatcgagagcaccccgttctatccgcgcagcccgtacggcgtcgcgaagctgttcgcgcactggacgacgctcaactatcgcgagtcgtacggcatcttcggctcgagcgggatcctgttcaatcacgaatcgccgctgcgcggccgcgagttcgtcacgcgcaagatcaccgataccgtcgcgaagatcaagctcggcaaggcgagccggctcgagctcggcaacatgggcgccaagcgcgactggggcttcgcgctcgagtacgtcgaagggatgtggcgcatgctgcaggcggacgagcccgatacctacgtgctcgcgacgaaccgcaccgagacggtccgcgatttcgtgcggatggcgttcgcggcggccggctatcagctcgaatggagcggcaagggcgaggacgagcgcggcatcgatacggcgacgggcaacgtgctcgtatcggtgaatccgaagttctaccggcccgccgaagtcgatctgctgatcggctgcgcggacaaggcgcgggacaagctcggctgggtgccgaagacgacgctcgaggcgctctgccggatgatggtggaggccgacctcacgcgcaaccgtcatcatgagaccttctga

SEQ ID NO: 104400 - protein, 347 aa, Burkholderia mallei ATCC 23344
MTQARKAIITGITGQDGAYLAKLLLDKGYEVVGTYRRTSSVNFWRIAELGVDKHPGLTLVEHDLTDLGSSLRLVERTQPHELYNLAAQSFVGVSFDQPATTAEVTGLGALHLLEAIRVVNPKIRYYQASTSEMFGKVQAIPQIESTPFYPRSPYGVAKLFAHWTTLNYRESYGIFGSSGILFNHESPLRGREFVTRKITDTVAKIKLGKASRLELGNMGAKRDWGFALEYVEGMWRMLQADEPDTYVLATNRTETVRDFVRMAFAAAGYQLEWSGKGEDERGIDTATGNVLVSVNPKFYRPAEVDLLIGCADKARDKLGWVPKTTLEALCRMMVEADLTRNRHHETF

SEQ ID NO: 104401 - DNA, 1044 bp, Burkholderia pseudomallei K96243
  CDS (1)..(1044): transl_table=11
atgacccaagcacgcaaggcgatcatcaccgggataacgggccaggacggcgcttatctggcgaagctgctgctcgacaagggctacgaagtcgtcggcacgtatcgccgcacgagctcggtgaacttctggcgcatcgccgaactgggcgtcgacaagcatccgagcttgacgctcgtcgaacacgatctgaccgatctcggctcgagcctgcgcctcgtcgagcgcacgcagccgcacgagctgtacaatctcgccgcgcagagcttcgtcggcgtatcgttcgaccagccggcgacgacggccgaagtcaccggcctcggcgcgctgcacctgctcgaggcgatccgcgtcgtgaacccgaagatccgctattaccaggcgtcgacgtcggagatgttcggcaaggtgcaggcgattccgcaaatcgagagcaccccgttctatccgcgcagcccgtacggcgtcgcgaagctgttcgcgcactggacgacgctcaactatcgcgagtcgtacggcattttcggctcgagcgggatcctgttcaatcacgaatcgccgctgcgcggccgcgagttcgtcacgcgcaagatcaccgataccgtcgcgaagatcaagctcggcaaggcgagccggctcgagctcggcaacctgggcgccaagcgcgactggggcttcgcgctcgagtacgtcgaagggatgtggcgcatgctgcaggcggacgagcccgatacctacgtgctcgcgacgaaccgcaccgagacggtccgcgatttcgtgcggatggcgttcgcggcggccggctatcagctcgaatggagcggcaagggcaaggacgagcgcggcatcgatacggcgacgggcaacgtgctcgtatcggtgaatccgaagttctaccggcccgccgaagtcgatctgctgatcggctgcgcggacaaggcgcgggacaagctcggctgggtgccgaagacgacgctcgaggcgctctgccggatgatggtggaggccgacctcacgcgcaaccgtcatcatgagaccttctga

SEQ ID NO: 104402 - protein, 347 aa, Burkholderia pseudomallei K96243
MTQARKAIITGITGQDGAYLAKLLLDKGYEVVGTYRRTSSVNFWRIAELGVDKHPSLTLVEHDLTDLGSSLRLVERTQPHELYNLAAQSFVGVSFDQPATTAEVTGLGALHLLEAIRVVNPKIRYYQASTSEMFGKVQAIPQIESTPFYPRSPYGVAKLFAHWTTLNYRESYGIFGSSGILFNHESPLRGREFVTRKITDTVAKIKLGKASRLELGNLGAKRDWGFALEYVEGMWRMLQADEPDTYVLATNRTETVRDFVRMAFAAAGYQLEWSGKGKDERGIDTATGNVLVSVNPKFYRPAEVDLLIGCADKARDKLGWVPKTTLEALCRMMVEADLTRNRHHETF

SEQ ID NO: 104403 - DNA, 1119 bp, Methylococcus capsulatus str. Bath
  CDS (1)..(1119): transl_table=11
atgacccgaaaaatcgctctcatcaccggcgtcaccggccaggacggcgcctacctgtccgaattcctcctcggcaagggctacgaagtccatggcatcaagcgccggacctcgctcttcaacaccgatcgcatcgaccacctctatcaggaccctcacgtgaaggaccgccgcttcatcctgcatcacggcgacctgaccgattccaccagtctggtccgcatcatccaaaaggtgcagccggacgaaatctacaacctggcggcccagtcccacgtcgcagtcagcttcgaggagccggaatacaccgcgaatgcggacggcatcggcgccctgcgcatcctggaagccatccggatcctcggaatggaaaagaaagcccgctactatcaggcgtccacctcggaactctacggcctggtgcaggaggttccgcagaaggaaaccacgccgttctacccgcgcagcccgtatgccgtcgccaagctctacgcctactggatcacggtcaattaccgcgaggcttacggcatctacgcctgcaacggcatcctgttcaaccacgaaagtccggtacggggcgaaaccttcgtcacccgcaagatcacccgcgccatcgcccgcatcgcgctcggccttcaggagtgcctctacctcggcaatctgtcggccttgcgcgactggggccacgcccgcgactacgtcgagatgcagtggctgatgctccagcaagaccagcccgacgacttcgtgattgcgaccggggtccagtacagcgtccgccagttcgtcgacttcgccgcggaagaactgggaatttcgctggcctgggaaggggagggcgaaagcgaaaccggcagagtcgtggccgtatccaacaaggacgtcaaggtgaaagccggagacgtcatcgtccgggtcgatccccgctatttccgtcccaccgaggtcgagactctgctcggggatgccagcaaggcgcgcgagaaactcggctggaggccccagaccagcctgcgggaactggtcaaggaaatggtgcagagcgattacgcggccgcgaagcgcgatgccctcgtcaagatggccggcttcaccgcctacgactacaacgagtag

SEQ ID NO: 104404 - protein, 372 aa, Methylococcus capsulatus str. Bath
MTRKIALITGVTGQDGAYLSEFLLGKGYEVHGIKRRTSLFNTDRIDHLYQDPHVKDRRFILHHGDLTDSTSLVRIIQKVQPDEIYNLAAQSHVAVSFEEPEYTANADGIGALRILEAIRILGMEKKARYYQASTSELYGLVQEVPQKETTPFYPRSPYAVAKLYAYWITVNYREAYGIYACNGILFNHESPVRGETFVTRKITRAIARIALGLQECLYLGNLSALRDWGHARDYVEMQWLMLQQDQPDDFVIATGVQYSVRQFVDFAAEELGISLAWEGEGESETGRVVAVSNKDVKVKAGDVIVRVDPRYFRPTEVETLLGDASKAREKLGWRPQTSLRELVKEMVQSDYAAAKRDALVKMAGFTAYDYNE

SEQ ID NO: 104405 - DNA, 1092 bp, Synechococcus elongatus PCC 6301
  CDS (1)..(1092): transl_table=11
atgacccgtaagcgcgccctgattaccggagtgactggccaagatggggcttatctggcagagtttcttctcgacaaaggctacgaagttcacggcatcaaacgccgcgcttcactgtttaacaccgatcgcattgatcatctttacgaagatccccatgtcgacgatcggcgctttattctgcactgcggcgatctcaccgattccaccaacctcattcgaattgtccagcagattcagccccacgaaatctacaacctcggggcccagagccacgttcaagtctcctttgacagtcctgagtacactgccaacaccgatggcttgggcaccctgcgcatcctcgaagcgattcggatcctcggactagagcagcagacacggttctaccaagcctcgacctctgagctgtacggcctcgtccaagaaattccccaaactgagacgacccctttctacccgcgcagcccctacgctgttgctaagctctacgcctattggatcacagttaattaccgcgaagcttacggcatctatgcctgcaatggcattctcttcaaccatgagtcaccgctgaggggtgaaacctttgtcacccgcaaaattacccgtgctcttgctcggatcaagctggggctgcaggactgcctctacctcggcaacttggatgccaaacgggactggggtcacgcccgcgactatgtcgagatgcagtggctgatgctgcaacaggagcaaccggatgactacgtaattgccaccggcgtacagttctccgtgcgtcagtttgtggaaattgcggcggcggaagtgggtctgacaattgcgtggtcgggcagtggtgtggaggaaaagggcatcaacccagccacgggacaagcgatcgtggcgattgatccccgttacttccgtccgactgaagtagaaacattgctgggcgatccctcgaaggcgaagcggcagctgggctgggagccgcgcatcagttttgaacagttggtgagcgagatgatgcgcgaagatttgcatctggcggagcgcgatgctctgatcaaacaagcggggtacaaggccttcgactacttcgagtga

SEQ ID NO: 104406 - protein, 363 aa, Synechococcus elongatus PCC 6301
MTRKRALITGVTGQDGAYLAEFLLDKGYEVHGIKRRASLFNTDRIDHLYEDPHVDDRRFILHCGDLTDSTNLIRIVQQIQPHEIYNLGAQSHVQVSFDSPEYTANTDGLGTLRILEAIRILGLEQQTRFYQASTSELYGLVQEIPQTETTPFYPRSPYAVAKLYAYWITVNYREAYGIYACNGILFNHESPLRGETFVTRKITRALARIKLGLQDCLYLGNLDAKRDWGHARDYVEMQWLMLQQEQPDDYVIATGVQFSVRQFVEIAAAEVGLTIAWSGSGVEEKGINPATGQAIVAIDPRYFRPTEVETLLGDPSKAKRQLGWEPRISFEQLVSEMMREDLHLAERDALIKQAGYKAFDYFE

SEQ ID NO: 104407 - DNA, 1032 bp, Campylobacter jejuni RM1221
  CDS (1)..(1032): transl_table=11
atgaaaaaaacagcgttaattacaggatttacagggcaagttggttctcaaatggcagattttttgcttgcaaatacggattatgaagttataggaatgatgcgttggcaagagcctatggacaatatctatcatttaagtgataggattaataaaaaagatagaataagcattttttatgcagatttaaatgattactctagtcttcaaaaactttttgagagtcaaagacctgatgtgatttttcacctagcagctcagtcttatccaaaaacttcttttgatataccgattgaaactttacagactaatataataggtacggcaaatatcctagaaaatattagaattttaaaggcgaaagatggttatgaccctgtagtgcatgtatgttcttctagtgaagtttatggtagagcaaaggtaggtattaagttaaacgaagatacaacttttcacggtgcaagtccttatagtataagcaaaatcggcaccgattatttaggaagattttatggcgaagcttataacattcgcacttttgttacaagaatgggaacacatagtggcccaagacgttctgatgtgttttttgaaagcacggttgcaaagcaaattgctttgattgaaacgggttatcaagagcctgttatcaaggttggaaatctctcaagcgtaagaacctttcaagatgccagagatgctataagggcttattatctactttcattagaaagccaaaaaggaaaagttccttgtggggaagcttttaatatagcaggagaagaggcttttaaactcccagaggttatagaaattcttttatctttttctacaagaaaggatataaaaatagagcaagatgaagaaagattgcgtcctattgatgcggattatcaaatgtttgataacacaaaaatcaaaagttttattaactggaagccagaaattgcagctagaaaaatgtttgaagatttgttaaatcattggagagatgagataaaaaaaggaaggattccgttaaatagatga

SEQ ID NO: 104408 - protein, 343 aa, Campylobacter jejuni RM1221
MKKTALITGFTGQVGSQMADFLLANTDYEVIGMMRWQEPMDNIYHLSDRINKKDRISIFYADLNDYSSLQKLFESQRPDVIFHLAAQSYPKTSFDIPIETLQTNIIGTANILENIRILKAKDGYDPVVHVCSSSEVYGRAKVGIKLNEDTTFHGASPYSISKIGTDYLGRFYGEAYNIRTFVTRMGTHSGPRRSDVFFESTVAKQIALIETGYQEPVIKVGNLSSVRTFQDARDAIRAYYLLSLESQKGKVPCGEAFNIAGEEAFKLPEVIEILLSFSTRKDIKIEQDEERLRPIDADYQMFDNTKIKSFINWKPEIAARKMFEDLLNHWRDEIKKGRIPLNR

SEQ ID NO: 104409 - DNA, 1074 bp, Bacteroides fragilis NCTC 9343
  CDS (1)..(1074): transl_table=11
atgaaaaaagctcttatttcaggtattaccggacaggatggttcattcctcgccgagtttcttcttcagaaaggttacgaagtacacggcatcctgcgccgttcatcttctttcaatacaggccggatcgaacacttgtactttgatgaatgggtgcgcgatatgaaacagaaacgtacagtcaacctgcactacggagatatgaccgactcaagttcactgatccgcatcatccagcaagtacaacccgacgaaatatacaacctggcggcacaaagccacgtaaaagtatcgttcgacgtaccggaatataccgccgaggcggatgcactcggtacattgcgtatgcttgaagctgtccgcatcctgggactggaaaaacagacacgcatctaccaggcttccacttccgaactctacggaaaagtacaggaagtgccgcaaagcgaaacgactccgttctatccgcgttctccgtatggagtagccaagcaatacggtttctggatcaccaagaactatcgtgaaagttacggaatgtttgccgtaaacggtatcttattcaatcacgagagtgaacgccgtggcgagactttcgtaacccgtaagatcacgctggcagcagcacgcatcgcacaaggcgaacaggataaattatatttgggtaacctggatgccaagcgtgactggggctatgccaaagattatgtagaatgtatgtggctgatcctgcaacatgacgtacccgaagatttcgtaatcgctaccggcgaaatgcataccgtccgcgaattctgtacactggcatttgccgaaataggcatcaacctgcgttgggaaggcgaaggcgtcaatgagaaaggaatcgacacggccaccggcaaagtactggtagaggtcgacccgaaatacttccgccctgccgaagtggaacaattgctcggtaacccaaccaaagccagaaccgtattgggatggaatccatgcaaaacaccattcccggaactggtaaaaatcatggtacgccacgatatggccaaagtgaaaagaatgattgcgactaaacatgattga

SEQ ID NO: 104410 - protein, 357 aa, Bacteroides fragilis NCTC 9343
MKKALISGITGQDGSFLAEFLLQKGYEVHGILRRSSSFNTGRIEHLYFDEWVRDMKQKRTVNLHYGDMTDSSSLIRIIQQVQPDEIYNLAAQSHVKVSFDVPEYTAEADALGTLRMLEAVRILGLEKQTRIYQASTSELYGKVQEVPQSETTPFYPRSPYGVAKQYGFWITKNYRESYGMFAVNGILFNHESERRGETFVTRKITLAAARIAQGEQDKLYLGNLDAKRDWGYAKDYVECMWLILQHDVPEDFVIATGEMHTVREFCTLAFAEIGINLRWEGEGVNEKGIDTATGKVLVEVDPKYFRPAEVEQLLGNPTKARTVLGWNPCKTPFPELVKIMVRHDMAKVKRMIATKHD

SEQ ID NO: 104411 - DNA, 1032 bp, Pseudomonas syringae pv. syringae B728a
  CDS (1)..(1032): transl_table=11
atgaaagcaatcattaccggcattactggtcaagacggcgcttacctggctgagctgctgctcgaaaaaggctataccgtttacggcacctatcgccgtaccagctccgtcaatttctggcgtatagaagagctcgggatccagaacaaccctaatctgcatctcgtcgagtatgacctgactgacctgtctgccagcattcgcttgctgcaaactactggcgctaccgaggtctacaacctcgcggcacaaagcttcgtgggcgtgtcgttcgaacagccgttgaccactgccgaaatcaccggcatcggcgcagtcaacctgctggaagccattcgcatcgtcaacaccaagatccgtttctaccaggcatcgacttccgagatgttcggcaaggtccaggccatcccgcaagtagaaagcactccgttctacccgcgcagcccgtatggcgtcgccaagctctacgcgcactggatgaccatcaactaccgtgagtcgtacgacatcttcgccaccagcggcatcctgttcaaccacgagtcgccactgcgtggccgtgagttcgtgacccgcaagatcaccgattcggttgccaagatcaaactgggcctgatcgagtcgttcgaactgggcaacatggacgccaagcgcgactggggttttgccaaggaatacgtcgaaggtatgtggcgcatgctgcaggctgatgagccggacacctttgtcctggccaccaaccgcaccgaaaccgtacgcgacttcgtgagcatggcgttcaaggccactggcgtgaccatcaagtgggaaggcgaagccgagtcggaaaaaggcatttgcgcagacactggcaaggtactggtttcggtcaatccgaagttctaccgcccaaccgaagtcgagctgctgatcggtaaccctgcaaaagccaaggaagtcctgggctgggagcctaagaccaatctggaagagctgtgccgcatgatggtcgaagcggatctgcgtcgtaatgaaaaaggcttttcgttctga

SEQ ID NO: 104412 - protein, 343 aa, Pseudomonas syringae pv. syringae B728a
MKAIITGITGQDGAYLAELLLEKGYTVYGTYRRTSSVNFWRIEELGIQNNPNLHLVEYDLTDLSASIRLLQTTGATEVYNLAAQSFVGVSFEQPLTTAEITGIGAVNLLEAIRIVNTKIRFYQASTSEMFGKVQAIPQVESTPFYPRSPYGVAKLYAHWMTINYRESYDIFATSGILFNHESPLRGREFVTRKITDSVAKIKLGLIESFELGNMDAKRDWGFAKEYVEGMWRMLQADEPDTFVLATNRTETVRDFVSMAFKATGVTIKWEGEAESEKGICADTGKVLVSVNPKFYRPTEVELLIGNPAKAKEVLGWEPKTNLEELCRMMVEADLRRNEKGFSF

SEQ ID NO: 104413 - DNA, 1035 bp, Pseudomonas fluorescens Pf-5
  CDS (1)..(1035): transl_table=11
atgaaacgcgcagttatcactggtattactggccaggatggtgcctatcttgcaaagcttcttcttgagaagaactacaccgtatatggaacttttcgtcggtcgagttctgtgaatttttggagaatcgaagagctaggaattgctgggcatccttctttgcacttggttgaatatgacctgaccgacctttcggcgagtatccgcttaatgcaagtgactgaggccgacgaggtttataacctagcggctcagagtttcgtcggtgtctcctttgatcagcctatcaccacggctgaaatcacggggcttggcgcggtgaatctccttgaagcgattcgcatcgtgaatccgaaagctcgtttttatcaggcctcaacgtctgaaatgttcggtaaggtccaggcgatcccgcagaaagaagacacgccgttctacccgcgcagcccctacggtgtggccaagttatatgcccactggatgacgataaattaccgcgaaagctacgacatttttggttgtagtggcattctgttcaatcacgagtcccctttgcgtgggcgtgagtttgtcactcgaaaaattaccgacacggtggcgaagatcagacttggcaaggcggaagttctagagctgggcaatatggatgcgcgtcgagattgggggtttgcggaagagtacgtggagggaatgtggcgaatgctgcaggcggagcgcccggacagctatgtgttggccacgaaccgtaccgaaagtgtgcgtacatttgttagcttggctttcaaggccgccggtatcgatatcgacttccgctatcaggctgaaaatgagattggagtcgacgcggtaacgggtaagactctcgtacgtgtcaatccgaagttctaccgtccggcggaagtggaactgctgattggtgatccgcagaaggctaaggatgaattgggctgggctccggtgacctcggtagagcagctgtgcgccatgatggttgaagcggatctgaggagaaatgctgatggattctccttctga

SEQ ID NO: 104414 - protein, 344 aa, Pseudomonas fluorescens Pf-5
MKRAVITGITGQDGAYLAKLLLEKNYTVYGTFRRSSSVNFWRIEELGIAGHPSLHLVEYDLTDLSASIRLMQVTEADEVYNLAAQSFVGVSFDQPITTAEITGLGAVNLLEAIRIVNPKARFYQASTSEMFGKVQAIPQKEDTPFYPRSPYGVAKLYAHWMTINYRESYDIFGCSGILFNHESPLRGREFVTRKITDTVAKIRLGKAEVLELGNMDARRDWGFAEEYVEGMWRMLQAERPDSYVLATNRTESVRTFVSLAFKAAGIDIDFRYQAENEIGVDAVTGKTLVRVNPKFYRPAEVELLIGDPQKAKDELGWAPVTSVEQLCAMMVEADLRRNADGFSF

SEQ ID NO: 104415 - DNA, 1125 bp, Colwellia psychrerythraea 34H
  CDS (1)..(1125): transl_table=11
atgacaacaaagaaagtggctctaattaccggtattactggacaagatggttcatatttagcggagcttttattagaaaaaggttatgaggtacatggtattaaacgtcgttcatcttcattaaataccgagcgaattgatcatatatatcaagataatcatgaaaagaatcaaaaatttttccttcattatggtgatttaaccgactcatcaaacttaacccgtatattaaaagatgttcaacctgatgaagtctacaatttaggtgctcaatctcacgtcgctgtatcattcgaatgccccgaatatactgccgatgttgatgccattggtaccttgcgactacttgaagctattagatttttaggcctagaaaagaagactaaattttatcaagcctctacttccgagttatatggtgaagtgcaagaaataccacaatcagaaacgacgccctttcatcctcgctccccttatgctgttgccaaaatgtatgcttactggatagtggtaaattatcgtgagtcttatggcatgtatgcctgtaacggtattttgtttaaccatgaatctcctcgtcgtggtgaaacgtttgtgaccagaaagattactcgcgcgattgccaatattgctcaaggtttagagtcatgtttatacttaggtaatatggatgcattacgtgattggggacatgcaaaagattatgtgcgaatgcaatggatgatgttacaacaagaacatcctgatgattttgttattgccacaggtaagcaaattagtgttcgtgaatttgtaactttgtcagcacttgaagcaggtatagagctaacgtttagtggtgaaggtttagatgaagtagcacgagtaactaaaattatcggagataacgccccagcattaagcgttggagatatcatggttaaagttgacccacgatatttccgccctgctgaagttgaaactctgttaggtgatccatctaaagcgaaagaaaaactaggctgggtaccacaaattacagtggaagaaatgtgtagtgaaatggtcgctaacgatctcagtaaagcaaaacaacacgccattttaaaagcacatggctaccaaaattcgactagcgtagaataa

SEQ ID NO: 104416 - protein, 374 aa, Colwellia psychrerythraea 34H
MTTKKVALITGITGQDGSYLAELLLEKGYEVHGIKRRSSSLNTERIDHIYQDNHEKNQKFFLHYGDLTDSSNLTRILKDVQPDEVYNLGAQSHVAVSFECPEYTADVDAIGTLRLLEAIRFLGLEKKTKFYQASTSELYGEVQEIPQSETTPFHPRSPYAVAKMYAYWIVVNYRESYGMYACNGILFNHESPRRGETFVTRKITRAIANIAQGLESCLYLGNMDALRDWGHAKDYVRMQWMMLQQEHPDDFVIATGKQISVREFVTLSALEAGIELTFSGEGLDEVARVTKIIGDNAPALSVGDIMVKVDPRYFRPAEVETLLGDPSKAKEKLGWVPQITVEEMCSEMVANDLSKAKQHAILKAHGYQNSTSVE

SEQ ID NO: 104417 - DNA, 1032 bp, Pseudomonas syringae pv. phaseolicola 1448A
  CDS (1)..(1032): transl_table=11
atgaaagcaatcattaccggcattactggtcaagacggcgcttacctggctgagctgctgctcgaaaaaggctataccgtttacggcacctaccgccgtaccagctctgtcaatttctggcgtatcgaagagctcgggattcagaacaaccctaatctgcatctcgtcgagtatgacctgactgacctgtctgccagcattcgcttgctgcaaaccaccggcgctaccgaggtctacaacctcgcggcacaaagcttcgtgggtgtgtcgttcgaacagccgttgaccactgccgaaatcaccggcattggcgcggtcaacctgctggaagccatccgtatcgtcaacacgaagatccgcttctaccaggcctctacttccgagatgttcggcaaggttcaggctattccgcaagtagagagcacacctttctacccacgcagcccgtacggcgtggccaagctctacgcacactggatgaccatcaactaccgcgagtcgtacggcatcttcgccaccagcggcattctgttcaaccacgagtcgccactgcgcggccgtgagttcgtgacccgcaagatcaccgattcggttgccaagatcaaactgggcctgatcgagtcgttcgaactgggcaacatggacgccaagcgcgactggggttttgccaaggaatacgtcgaaggtatgtggcgcatgctgcaggctgatgagccggacaccttcgtcctggccaccaaccgcactgaaaccgtacgcgacttcgtgagcatggcattcaaggccactggcgtgaccatcaagtgggaaggcgaagccgagtcggaaaaaggcatttgcgcagacactggcaaggtactggtttcggtcaatccgaagttctaccgcccaaccgaagtcgagctgctgatcggtaaccctgcaaaagccaaggaagtcctgggctgggaaccgaagaccaatctggaagagctgtgccgcatgatggtcgaagcggatctgcgtcgtaatgaaaaaggcttttcgttctga

SEQ ID NO: 104418 - protein, 343 aa, Pseudomonas syringae pv. phaseolicola 1448A
MKAIITGITGQDGAYLAELLLEKGYTVYGTYRRTSSVNFWRIEELGIQNNPNLHLVEYDLTDLSASIRLLQTTGATEVYNLAAQSFVGVSFEQPLTTAEITGIGAVNLLEAIRIVNTKIRFYQASTSEMFGKVQAIPQVESTPFYPRSPYGVAKLYAHWMTINYRESYGIFATSGILFNHESPLRGREFVTRKITDSVAKIKLGLIESFELGNMDAKRDWGFAKEYVEGMWRMLQADEPDTFVLATNRTETVRDFVSMAFKATGVTIKWEGEAESEKGICADTGKVLVSVNPKFYRPTEVELLIGNPAKAKEVLGWEPKTNLEELCRMMVEADLRRNEKGFSF

SEQ ID NO: 104419 - DNA, 1068 bp, Prochlorococcus marinus str. NATL2A
  CDS (1)..(1068): transl_table=11
gtgagcccccaaaaaactgctcttatcacaggcatcacagggcaagatggtagttacctagcagaattactaatatcaaaaggatatgaagtacatggccttgttagaagatcaagtcaagtaaatacacatctaatcgatcatttgataagtgataatgaagagaaaaaaaaagttcatttacactatggagatcttacacacagcacaaatttagtaagaattataaaagagattgagccagatgagatctataatttaggtgctcaaagtcatgtaaaagtaagctttgaatcgccagagtacacagctcaaactgatgcactgggacctttgcgaatacttgaagctgtaaggatccttggattaactaaaaagactagaatttatcaagccagtacgtccgaattatatggcctaatacaagaaacacctcaaaaagagaccacacctttttatccaagaagtccttacggagtagcaaaattatatgcttattggataactattaactaccgtgagtcttatggaatatatgcatgtaacggcatacttttcaatcatgagtctccaagaagaggtgaaactttcgtaacaaggaaaatcactagaggtttaacaagaataaatttaggcttagaaaaatgcctagagatgggaaacattgattctctaagggactggggacatgcaaaagactatgtggagatgcaatggagaatgcttcaacaagagacacctgaagattatgtgattgcaactggccaaacaacatcagttagaaattttatagaaaaatcatctattgctctgggctggggcggaatcgaatgggatggagaaaatgagaaagaagttggcagaagaaaagacaatggagatctggtaataaaaatcaatccagagttttacaggcctgccgaagtagagcaattattaggtgatgcgacaaaagcacataacaatctcggatggaagccgaaaataaaaatagacgaattaataatggaaatgatcaatgctgataaattaattgctgaactagaactaaaacagatgtctatttaa

SEQ ID NO: 104420 - protein, 355 aa, Prochlorococcus marinus str. NATL2A
MSPQKTALITGITGQDGSYLAELLISKGYEVHGLVRRSSQVNTHLIDHLISDNEEKKKVHLHYGDLTHSTNLVRIIKEIEPDEIYNLGAQSHVKVSFESPEYTAQTDALGPLRILEAVRILGLTKKTRIYQASTSELYGLIQETPQKETTPFYPRSPYGVAKLYAYWITINYRESYGIYACNGILFNHESPRRGETFVTRKITRGLTRINLGLEKCLEMGNIDSLRDWGHAKDYVEMQWRMLQQETPEDYVIATGQTTSVRNFIEKSSIALGWGGIEWDGENEKEVGRRKDNGDLVIKINPEFYRPAEVEQLLGDATKAHNNLGWKPKIKIDELIMEMINADKLIAELELKQMSI

SEQ ID NO: 104421 - DNA, 945 bp, Prochlorococcus marinus str. NATL2A
  CDS (1)..(945): transl_table=11
ttgaaaagtaaaaccgccgttgttctgggatgcaaaggacaagatggttctttgatgtgcagatcgcttttggaaaaaaattacaaggtaatcggattaattcgtggagaattaaaagatgagagcaatcttcacaagctcgacataaaaaataaaataaaaattgaaacaggagacataaaagattttcagatcataagtaacttgattgaaaaatatcagccggattgcgtgtacaaccttgctgctcagtcatccgtgggtcagtcgttccagaatccaaaagaaacaatagattcaattgtaaatggaacgatgaatattttaaacgtatgcaaaattatcaattacaccggaagaattttttttgctggtagtagcgaaatgtttggaaatatcgaaagcaaggctaatattgatcacccacaacaaccaaattcaccatacgctatcgctaaacaaacaagcttcaatctggtaaaaatgtacagagagatatatgcattaaaatgtacaactgggattttgtttaatcatgaatcaaatttaagaccagaaacattcgtaacacaaaaaattataaaaactgctcaagagatcaaaaaatataaaaaaaagaaattaataattggcaatattgatataataagggattggggttgggctccggaatacatcaatgctattcagttgatatctaattctaatttaattaaagatcacatagtatgcaccggtaaggcaacaagtttaaaaacttttattcaaaaagtttttgccaagcttgatttagattgggaagagttcactgtagtgaataaaaatttatttagagcttctgatataaaaagaagttgtggagatcctacaccactttttgaagaattagggtggaagtccaaggttaatttcgattcagtaattgagagaatgcttaatcaatga

SEQ ID NO: 104422 - protein, 314 aa, Prochlorococcus marinus str. NATL2A
MKSKTAVVLGCKGQDGSLMCRSLLEKNYKVIGLIRGELKDESNLHKLDIKNKIKIETGDIKDFQIISNLIEKYQPDCVYNLAAQSSVGQSFQNPKETIDSIVNGTMNILNVCKIINYTGRIFFAGSSEMFGNIESKANIDHPQQPNSPYAIAKQTSFNLVKMYREIYALKCTTGILFNHESNLRPETFVTQKIIKTAQEIKKYKKKKLIIGNIDIIRDWGWAPEYINAIQLISNSNLIKDHIVCTGKATSLKTFIQKVFAKLDLDWEEFTVVNKNLFRASDIKRSCGDPTPLFEELGWKSKVNFDSVIERMLNQ

SEQ ID NO: 104423 - DNA, 1122 bp, Methanosarcina barkeri str. Fusaro
  CDS (1)..(1122): transl_table=11
ttgtccaaagttgcattaataactggaattacaggtcaggatggcgcttatcttgccgaattattactcgaaaagggatacattgtgcatggaatcaagcggcgatcttcttcttttaacacggcaagaattgatcatctttacaaagacccccatgagagaaatgttaattttttcatgcactatggggatttgacagattctaccaatctgatccgcataatccaggaagttcagcctgatgaaatatacaatcttgcagcccagagccacgttcaggtatcttttgagactccagagtatacggcaaattctgatgctataggaactctcagactactagaggctatccgcatcctgggttttgaaaagaaaacaagattttaccaggcttctaccagtgaactctatgggaaagtccaggaggtcccccagaaagaaactactcctttttacccaagaagcccgtatgccgcagccaaactgtacgcatactggattacagtcaactaccgggaagcctatggtatttttgcatgtaatggaatccttttcaaccatgaatctccaatccgtggtgagacttttgtgacaagaaaaatcacaatggcggctacaaggataaaatacggcatgcaggataggctttaccttggaaaccttgattcaaaaagagactggggttttgcaaaagactatgtagaagccatgtggctgatgctccagcaagaagagcccgacgattacgttatagcaacgggcgaaactcactcagtccgagaatttattgaacttgtgtttaaagaactcggaatcgatataatctggcagggaaaaggagaagaagaagtcggaatcgatgcccttacaaataaaatcttagttgaagtagatcctgagtattatagacccactgaagtagaaatgttgattggcgattcatcaaaagccagaagaaaacttggctggcaaccaaaagtcagactggaagaactggtaaagatgatggtaaagtccgatgaagaagaagtcctgaaaagttatcctgcagagaaattagcttccagtcaggaaactgaggaagagtcaataaaatcagaattagatatcaggagtttgtaa

SEQ ID NO: 104424 - protein, 373 aa, Methanosarcina barkeri str. Fusaro
MSKVALITGITGQDGAYLAELLLEKGYIVHGIKRRSSSFNTARIDHLYKDPHERNVNFFMHYGDLTDSTNLIRIIQEVQPDEIYNLAAQSHVQVSFETPEYTANSDAIGTLRLLEAIRILGFEKKTRFYQASTSELYGKVQEVPQKETTPFYPRSPYAAAKLYAYWITVNYREAYGIFACNGILFNHESPIRGETFVTRKITMAATRIKYGMQDRLYLGNLDSKRDWGFAKDYVEAMWLMLQQEEPDDYVIATGETHSVREFIELVFKELGIDIIWQGKGEEEVGIDALTNKILVEVDPEYYRPTEVEMLIGDSSKARRKLGWQPKVRLEELVKMMVKSDEEEVLKSYPAEKLASSQETEEESIKSELDIRSL

SEQ ID NO: 104425 - DNA, 1086 bp, Thiobacillus denitrificans ATCC 25259
  CDS (1)..(1086): transl_table=11
atgatcaagaaagccctcatcaccggcgtgaccggccaggacggcgcctatctcgccgaattcctgctcggcaagggctacgaggtccacggcatcaagcgccgcacctcgcttttcaacaccgaccgcatcgaccatctctaccaggacccgcacgagaaggaccgccgcttcatcctgcatcacggcgaccttaccgactcgtcgagcctgatccgcatcatccagcaggtgcggcccgacgagatctacaacctcgccgcgcagtcgcacgtcgccgtttcgttcgaggagcccgagtacaccgccaactctgacgcgctcggcgcgctgcgcatcctcgaggccatccgcatcctcggcctcgagaaaaagacgcgcttctaccaggccagcaccagcgaactctacggcctggtgcaggaaaccccgcagaaggagaccacccccttctatccgcgcagcccctacgcggtcgccaagctctacgcctactggatcacggtcaactaccgcgaggcttacggcatgtatgcctgcaacggcatcctcttcaaccacgagtcgccgatccgtggggagacctttgttacccgcaagatcacgcgcgcgctggcccgaatcaaactgggcctgcaggactgtctcttcctcggcaacatggacgccaaacgcgactggggccacgccaaggactacgtcgagatgcagtggctgatgctgcagcaggagaagcccgaggacttcgtcatcgccaccggcgtgcagtacagcgtgcgcgacttcgtcgacgccgccgcgaaggaactcggcatgagcatccgctgggaaggagagggcgtcgccgagaagggctacgacgacaaaggccgctgcgtcgtcgccgtcgacccgcgctacttccgaccgaccgaagtcgaaaccctgcttggtgatcccgccaaggccaaggacaagctcggctggacgccgaagatcagcttcgacgaactcgtcaccgaaatggtgcgcgaagacctcaaggcggccgagcgcgacgagctggtgaaaaagcacggctacaaagccatggattaccacgaataa

SEQ ID NO: 104426 - protein, 361 aa, Thiobacillus denitrificans ATCC 25259
MIKKALITGVTGQDGAYLAEFLLGKGYEVHGIKRRTSLFNTDRIDHLYQDPHEKDRRFILHHGDLTDSSSLIRIIQQVRPDEIYNLAAQSHVAVSFEEPEYTANSDALGALRILEAIRILGLEKKTRFYQASTSELYGLVQETPQKETTPFYPRSPYAVAKLYAYWITVNYREAYGMYACNGILFNHESPIRGETFVTRKITRALARIKLGLQDCLFLGNMDAKRDWGHAKDYVEMQWLMLQQEKPEDFVIATGVQYSVRDFVDAAAKELGMSIRWEGEGVAEKGYDDKGRCVVAVDPRYFRPTEVETLLGDPAKAKDKLGWTPKISFDELVTEMVREDLKAAERDELVKKHGYKAMDYHE

SEQ ID NO: 104427 - DNA, 1035 bp, Anabaena variabilis ATCC 29413
  CDS (1)..(1035): transl_table=11
ttgtcaatactctgttacctgaatccttacgaacaaggttatgaagttcatggtattattcgccggacttccacattcaatacagaccgtatcgatcacatttatgaagatccccatcaagaaggagccaagttatttcttcactacggtgatttaaccgatggtacaacgctacgccgaattcttgaagaagttcaaccaacagaaatttacaacttaggcgctcaatctcacgtacgagtaagctttgattcgccagagtatacagtagatgccgtaggtatgggaacactacggttactagaagcaatccgtgactaccaacgacgcacaggcattcaagtacgtttttaccaagctggttcttcagaaatgtatggcttagtgcaagccgtaccccaaagcgaaactacaccattttatccccgtagtccctacgcttgtgccaaagtttatgcccactggcaaacagtcaattaccgggaatcttacggtttatttgcttgtaatggcatactttttaaccatgaatcacctcgtcgcggtgaaacttttgttacccgcaaaattactagagctgttgcccagattgttgccggcaatcagaaaaacatctatatgggtaaccttgatgccaagagagattggggttatgccaaagattatgtccgtgccatgtggttgatgttacagcaagaacaaccagatgattatgtaattgctacaggagaaacccactcagtacgtgaatttttagagttggcgtttggctatgtaaatcttaactggcaagattatgtagagtttgatgagcgttatctgcgtccggcggaagtagatttattaattggtgaccccacgaaagcacaacaaaaattgggatggaagccttctgtcacctttaaagaattggtggcattaatggtagaagccgatttgcaagctttaggtcagacttcacctaatggcaatacttcaatcctaccgcaggatattgctactattcgtcaacaactgggtgtactccacttctga

SEQ ID NO: 104428 - protein, 344 aa, Anabaena variabilis ATCC 29413
MSILCYLNPYEQGYEVHGIIRRTSTFNTDRIDHIYEDPHQEGAKLFLHYGDLTDGTTLRRILEEVQPTEIYNLGAQSHVRVSFDSPEYTVDAVGMGTLRLLEAIRDYQRRTGIQVRFYQAGSSEMYGLVQAVPQSETTPFYPRSPYACAKVYAHWQTVNYRESYGLFACNGILFNHESPRRGETFVTRKITRAVAQIVAGNQKNIYMGNLDAKRDWGYAKDYVRAMWLMLQQEQPDDYVIATGETHSVREFLELAFGYVNLNWQDYVEFDERYLRPAEVDLLIGDPTKAQQKLGWKPSVTFKELVALMVEADLQALGQTSPNGNTSILPQDIATIRQQLGVLHF

SEQ ID NO: 104429 - DNA, 1122 bp, Rhodobacter sphaeroides 2.4.1
  CDS (1)..(1122): transl_table=11
atgacgaagaccgccctgattaccgggatcacggggcaggacggctcgtacttggcggagttccttctggagaagggctatgaggtccacggcatcaagcgccgggcttcaatgttcaacacccagcgaattgaccacatctacgaagatccgcacgcccgcaatccaaggctgaagctgcattacggcgatctgaccgacagttcgaacctcacccgtatccttgcccagatccaaccggacgaggtttacaacctcggcgcccagagccatgttgcggtgagcttcgagagccccgagtataccgccgatgtcgatgcggtgggagcgctgcggctgctcgaggcgattcgcttcctcgggctggaaaaaaagacgcggttttaccaagcatcgacctctgagctttacggcctcgtgcaagagataccgcagcgtgagacgacgccattctatccgcgctcgccctatgccgtggccaagctctatgcctattggatcaccgtcaattaccgcgagtcttacgggatctacgcctgcaacggcatcctctttaaccatgagtccccgcgccggggcgagaccttcgtaacccgcaagatcacccggggcctttcccatatcgcccagggactggagccctgcctatacatgggcaacatcgactccctccgcgactggggtcacgccagggactatgttcggatgcagtggatgatgctgcagcaggagaaacccgatgatttcgtgattgcgactggcttgcaatactcggtgcgcgagttcatcaagtggtcggccgccgagctcggcatcacgctccgctttgaagggcagggcgtggaggaaatcggggtcgtggaagacgtctgtggcgatatggcgcctgaggttacgcgcggcgacgtgatcgtgcgcatcgacccgcgctatttccgcccggcggaagtggagacgcttctaggcgatccggcgaaggccaagcagaagctcggttgggtaccggaaatgaccgtgcgcgagatgtgcgccgagatggtggccgaggatctgaaatccgcccgccgccatcgacttcttcgtgagaacgggctgcacctgcccgtggcgctcgaaagctga

SEQ ID NO: 104430 - protein, 373 aa, Rhodobacter sphaeroides 2.4.1
MTKTALITGITGQDGSYLAEFLLEKGYEVHGIKRRASMFNTQRIDHIYEDPHARNPRLKLHYGDLTDSSNLTRILAQIQPDEVYNLGAQSHVAVSFESPEYTADVDAVGALRLLEAIRFLGLEKKTRFYQASTSELYGLVQEIPQRETTPFYPRSPYAVAKLYAYWITVNYRESYGIYACNGILFNHESPRRGETFVTRKITRGLSHIAQGLEPCLYMGNIDSLRDWGHARDYVRMQWMMLQQEKPDDFVIATGLQYSVREFIKWSAAELGITLRFEGQGVEEIGVVEDVCGDMAPEVTRGDVIVRIDPRYFRPAEVETLLGDPAKAKQKLGWVPEMTVREMCAEMVAEDLKSARRHRLLRENGLHLPVALES

SEQ ID NO: 104431 - DNA, 972 bp, Pseudomonas fluorescens PfO-1
  CDS (1)..(972): transl_table=11
atgacaaaaagtgcattgatcaccgggatcaccggccaggacggcgcgtatctggccaagctgttgctcgacaagggttacaaggttcacggcctcgtggcacggcgcagcagcgactcgcgctggcgtctgcgcgagatgggcgttgaagccgacatcgtttacctggacggcgacatggccgacgcctgctcggtgcagcgcgcggtgatcaagtcggcgccggacgaggtgtataacctggcggcccagagcttcgttgccgcctcctgggaccaaccggtaaccaccggcatcgtcgatggcctgggcgtgactcacctgctcgaagcgatccgtcagttcagcccgcacacgcgtttctatcaggcgtccaccagcgaaatgttcggtctgatccaggccgagcaacaggatgagaacaccccgttctacccgcgcagcccgtacggcgtggccaaactctatggccactggatcaccgtcaactaccgtgaaagcttcaacctgcacgccagcagcggcattttgttcaatcatgaatcacccctgcgcggcatcgaattcgtgacccgcaaggtcaccgatgccgccgcccggatcaaacagggcaaacagcaggagctggccctgggcaacatcgatgccaagcgcgactggggcttcgccggtgactacgtcgaggccatgtggctgatgctgcaacaggacaagcccgacgatttcgtggtcgccaccggcgtcaccaccaccgtgcgcgagatgtgtcgcatcgccttcgatcacgtcggcctcaactatcgggattacgtgaagatcgacccggcgtttttccgcccggccgaagtcgaagtgctgctcggcaatccggccaaggcccagcgcgtgctgggctggaaaccgaaaaccgacctcgacaccctgatccgcatgatgatggatgcggacatgaaacgcgtcgccaaggagtag

SEQ ID NO: 104432 - protein, 323 aa, Pseudomonas fluorescens PfO-1
MTKSALITGITGQDGAYLAKLLLDKGYKVHGLVARRSSDSRWRLREMGVEADIVYLDGDMADACSVQRAVIKSAPDEVYNLAAQSFVAASWDQPVTTGIVDGLGVTHLLEAIRQFSPHTRFYQASTSEMFGLIQAEQQDENTPFYPRSPYGVAKLYGHWITVNYRESFNLHASSGILFNHESPLRGIEFVTRKVTDAAARIKQGKQQELALGNIDAKRDWGFAGDYVEAMWLMLQQDKPDDFVVATGVTTTVREMCRIAFDHVGLNYRDYVKIDPAFFRPAEVEVLLGNPAKAQRVLGWKPKTDLDTLIRMMMDADMKRVAKE

SEQ ID NO: 104433 - DNA, 1047 bp, Burkholderia sp. 383
  CDS (1)..(1047): transl_table=11
atgagccaaactcgcaagaaggccatcatcaccgggatctcggggcaagacggcgcctacctgaccaagctgctgctcgacaagggctacgaggtcaccggtacctaccgccgcaccagctcggtgaatttctggcgcatcgccgagctcggcgtcgacacgcacccgaacctcacgctcgtcgaacacgacctgaccgacgccggctcgagcctgcgcctgctcgaacgcacgcagcccgacgagctgtacaacctcgccgcgcaaagcttcgtcggcgtgtcgttcgaccagccggcgacgaccgccgaagtgacgggcctgggtccgctgaacctgctcgaggcgatccgcgtcgtgagcccgaagacgcgcttctaccaggcgtcgacctccgagatgttcggcaaggttcagtcgattccgcagacggaagcgacctcgttctatccgcgcagcccgtacggcgtcgcgaagctctacgcgcactggatgacggtgaactaccgtgagtcgtacggcctgttcggcagcagcggcatcctgttcaaccacgaatcgccgctgcgcggccgcgagttcgtcacgcgcaagatcaccgacaccatcgcgaagatcaagctcggcaaggcgacccgcctcgagctcggcaacctcgacgcgaagcgcgactggggcttcgcgctcgagtacgtcgaaggcatgtggcgcatgctgcaggccgacgaacccgacacctacgtgctcgcgaccaaccgcaccgagaccgtgcgcgatttcgtgcggatggcgttcgcggcggccggctaccagatcgaatggaccggcaagggcgaacaggagcgcggcctcgacgcatcgaacggcaacgtgctcgtggaagtgaacccgaagttctaccgccccgccgaagtcgacctgctgatcggctgcgccgacaaggcaaagagcaaactcggctgggaaccgaagacgacgctcgaacaactttgccagatgatggtcgaagcggatttgacgcggaatcaacaccatgacacgttctga

SEQ ID NO: 104434 - protein, 348 aa, Burkholderia sp. 383
MSQTRKKAIITGISGQDGAYLTKLLLDKGYEVTGTYRRTSSVNFWRIAELGVDTHPNLTLVEHDLTDAGSSLRLLERTQPDELYNLAAQSFVGVSFDQPATTAEVTGLGPLNLLEAIRVVSPKTRFYQASTSEMFGKVQSIPQTEATSFYPRSPYGVAKLYAHWMTVNYRESYGLFGSSGILFNHESPLRGREFVTRKITDTIAKIKLGKATRLELGNLDAKRDWGFALEYVEGMWRMLQADEPDTYVLATNRTETVRDFVRMAFAAAGYQIEWTGKGEQERGLDASNGNVLVEVNPKFYRPAEVDLLIGCADKAKSKLGWEPKTTLEQLCQMMVEADLTRNQHHDTF

SEQ ID NO: 104435 - DNA, 1083 bp, Geobacter metallireducens GS-15
  CDS (1)..(1083): transl_table=11
atgaaaaaagctctcattaccggtattaccggacaggatggatcgtacctcgcagaactgttgctggaaaaaggttacgaggtccacggcgtcaagcgcagggcctctctgtttaacacggatcggattgaccacctctaccaggacccccacgaaacagggcggcgtttcgtgcttcactatggcgacatgaccgattccaccaacctgatcagaatcatccagtcggtccaacccgacgagatatacaatctggcagcacaatcccacgtggcggtatcgtttgaaacgccggaatacaccgccaatgccgatgccatcggccccctgcggatcctcgaagcgattcgcatcctcggcctggaaaagaagacccgcttttaccaggcatcaacgtccgaactgtacggtctggttcaggaaatcccccagaaagagacgacccccttctacccccgctctccctatgccgttgccaagctctacgcctactggatcaccgtcaactaccgcgaatcatacggtatctatggctgcaacggcatcctgttcaatcacgaatcaccggtgaggggggagaccttcgtcacccgcaagattacccgcgccttggctcgcatcaagctgggattgcaggagtgcctctatctgggcaaccttgacgcaaagcgcgactgggggcatgcccgggattatgttgaaatgcagtggctcctgatgcagcaggatgagcctgaagactgggtcattgccaccggtatccagtacagcgtccgtgactttgtcaacgccgctgccgaagagttggggatgaagatagcgtggcaaggggcgggagtcaatgagaccggaaccgatcactccggcaaggtcatggtcaaggtcgatccgcgctatttccgccccaccgaggtggagaccctcctgggcgacgcggccaaggccagggagaaactggggtgggctccaaaaatcagtttcagggaactggtgtccgagatggtgcgcgaggacctgagagccgccgaacgtgatgagttggtaaagaaacacggctacaaggcgtttgaccaccatgaataa

SEQ ID NO: 104436 - protein, 360 aa, Geobacter metallireducens GS-15
MKKALITGITGQDGSYLAELLLEKGYEVHGVKRRASLFNTDRIDHLYQDPHETGRRFVLHYGDMTDSTNLIRIIQSVQPDEIYNLAAQSHVAVSFETPEYTANADAIGPLRILEAIRILGLEKKTRFYQASTSELYGLVQEIPQKETTPFYPRSPYAVAKLYAYWITVNYRESYGIYGCNGILFNHESPVRGETFVTRKITRALARIKLGLQECLYLGNLDAKRDWGHARDYVEMQWLLMQQDEPEDWVIATGIQYSVRDFVNAAAEELGMKIAWQGAGVNETGTDHSGKVMVKVDPRYFRPTEVETLLGDAAKAREKLGWAPKISFRELVSEMVREDLRAAERDELVKKHGYKAFDHHE

SEQ ID NO: 104437 - DNA, 1050 bp, Geobacter metallireducens GS-15
  CDS (1)..(1050): transl_table=11
gtgaaaaaagcactgattaccggcatcaccggtcaggatggctcctacctggcggagttgctgctgcaaaagggttacgaagtccacggcatgatccgccgttcgtcatcctttaacacaggtcggattaaccacatctaccgcgatccacacgaaaaggacgtccggttgtttttgcactatggtgatctcaacgacgccagttccatcaacaccctgctgcgcatcgtccaaccggacgagatctacaatcttggtgcccagagccatgtccgggtctcattcgatgtgccggaatacaccggagaggtggatgccctgggagcggtacggatactcgagggaatccgggaaaccggacttaataccagattttatcaggcgtcatcttctgaactctatggaaaggtcgttgagacaccacagcgtgaatcgactccattttacccccggtccccctacggttgtgccaaggcttatgcctactacatcacccagaactatcgcgaaagctacgacatttacgcctgcaacggcattctcttcaatcatgagtcacctcggcgtggcgaaacctttgttacccgaaagatcacccgggcggcggcccggatcaagttggggctccagaactgtctctatctggggaacctggatgcaaaacgggactggggatttgccggagattacgttgaagcgatgtggctgatgctgcaacaggagcaggcggacgactatgttatcgccaccggcgagacctatatggtccgaaccttcgccgaaaaggttttcgcccgccttgggatgccgcttgaatggggggggagcggcgatcgggaagaaggggttgacaccgctaccggcaagcctctgattcgcgttgactccaaatatttccgtcccgcagaggttgacttgctactgggagacccatcaaaggcaaagcgggtgctcggctggcaacagcagaccagctttgaccagttggtcgccatgatgaccgatgccgatctggcgctggcagagcgggaaatgcgcgccaatggataa

SEQ ID NO: 104438 - protein, 349 aa, Geobacter metallireducens GS-15
MKKALITGITGQDGSYLAELLLQKGYEVHGMIRRSSSFNTGRINHIYRDPHEKDVRLFLHYGDLNDASSINTLLRIVQPDEIYNLGAQSHVRVSFDVPEYTGEVDALGAVRILEGIRETGLNTRFYQASSSELYGKVVETPQRESTPFYPRSPYGCAKAYAYYITQNYRESYDIYACNGILFNHESPRRGETFVTRKITRAAARIKLGLQNCLYLGNLDAKRDWGFAGDYVEAMWLMLQQEQADDYVIATGETYMVRTFAEKVFARLGMPLEWGGSGDREEGVDTATGKPLIRVDSKYFRPAEVDLLLGDPSKAKRVLGWQQQTSFDQLVAMMTDADLALAEREMRANG

SEQ ID NO: 104439 - DNA, 1149 bp, Desulfovibrio desulfuricans G20
  CDS (1)..(1149): transl_table=11
atgaaaaaagcactcatcacaggcatcaccggacaggacggtgcctatcttgccgaatttctgctgaacaaaggctacgaggtgcacggtatcaagcgccgcgcttcctcgttcaacaccgaccgcatcgaccacctgtatcaggacccgcatgtggacgggcggaagtttattctgcactacggcgacctgaccgattccacaaacctgatacggatcattcaggaagtgcggccgcatgaaatatacaatctggccgcacagagccatgtaaaggtctcattcgactctccggaatacacggccaacaccgatgcgctgggtactctgcgcattctcgaagccatccgcatactgggactggaaaagcatacccgtttctatcaggcttccacttcagaactattcgggcaggttcaggaaattccgcaaaaggaaacaacgccgttctacccccgttctccctacgcctgcgccaagctgtacgcatactggattaccgttaactaccgtgaagcatacggcatttacggatgcaacggcattctgttcaaccatgaatcgcccgtacgcggcgaaacgtttgtcacccgcaagataacccgtgctctggcccgcatagcgctgggactgcagcaaaaggtctatctgggcaacatgaacgccaaacgcgactggggccatgcccgcgactatgtggaaatgcagtggctcatgctgcagcaggaacaccccgaggactttgtcatcgccacgggcagacagcattccgttcgtgattttgtcaatatttcggcagctgaagtcggtatttttctggactggcagggcagcggtgccgaagaaaaaggtgtggtacgggccgtggacgaaacccggcttgccgcatgcctgaacggtaaaagcggcacggcacgcatgccgtcgcccggtgatgtcatagttgaagtagaccggcgttatttccgcccgacggaagtggaaacactgctgggcgacccctcgcgggccaaggaaaaactcggctggacgccgcgcatcagctttgaagagatggtccgtgaaatggtgcagacagatgtgaacatcgccgcgcgcgaccgcgtttgcctggacagcggcttcaccgtttttgaatacaacgactag

SEQ ID NO: 104440 - protein, 382 aa, Desulfovibrio desulfuricans G20
MKKALITGITGQDGAYLAEFLLNKGYEVHGIKRRASSFNTDRIDHLYQDPHVDGRKFILHYGDLTDSTNLIRIIQEVRPHEIYNLAAQSHVKVSFDSPEYTANTDALGTLRILEAIRILGLEKHTRFYQASTSELFGQVQEIPQKETTPFYPRSPYACAKLYAYWITVNYREAYGIYGCNGILFNHESPVRGETFVTRKITRALARIALGLQQKVYLGNMNAKRDWGHARDYVEMQWLMLQQEHPEDFVIATGRQHSVRDFVNISAAEVGIFLDWQGSGAEEKGVVRAVDETRLAACLNGKSGTARMPSPGDVIVEVDRRYFRPTEVETLLGDPSRAKEKLGWTPRISFEEMVREMVQTDVNIAARDRVCLDSGFTVFEYND

SEQ ID NO: 104441 - DNA, 1086 bp, Desulfovibrio desulfuricans G20
  CDS (1)..(1086): transl_table=11
atgaaaaaagcgttgattagcgggattaccgggcaggatggagcctatctggcagaatttttactgcaaaaaggctacgaagtgcatggtatcaagcgccgtgcgtctttgtttaatacagaccgtattgatcatttatacgaagacccacatgcagagaaccgtaaatttattttgcattatggcgacctgagtgattcgacaaatctcatcagaattattcaggaagtgcagcctgacgaaatttataatcttgctgcacaaagccatgtacaggtttcctttgattcgccggagtacaccgctaacgtagatgctttgggcacgcttcgcattctggaagctatccgtattctgggtttagaaaagaaaactcgcttttatcaggcgtcaacttcggagctgttcggtcaggtgcaggaaattccgcagaccgaaaaaactccgttctatccgcgttccccttatgcctgtgcaaaattgtatgcgtattggatttgcgtaaactatcgtgaagcctacggcatgtatgcctgcaatgggattttgtttaaccatgagtctcccattcgtggcgaaacttttgtgacgcgtaaaattaccagagcactggcgcgcatcaagctcggcctgcaagataggctttatcttgggaatatgaatgcattacgcgactggggccacgcaaaagactatgttgagatgcagtggttgatgctccaacaggatgcaccgcaagattttgttattgcaactggtgaacagcattcagtacgtgaatttgttgagctggcagctacagaactgggcatttccattgaatggcgtggctacggcgaagaagaaaaaggctacgatacggcgacaggcaagtgtatcgttgcggtggataaaaaatactatcgtcccacagaagtggaaacgttgctcggtgatcctgccaaggccaaaaaagaacttgggtgggtgccgcgcaccacttttaccgaattggttaaagaaatggtgcagacggacttccgagaagcagagcgagaaatcttgtgtaccgagcacgggttcccggtctgccagccgcaggagtaa

SEQ ID NO: 104442 - protein, 361 aa, Desulfovibrio desulfuricans G20
MKKALISGITGQDGAYLAEFLLQKGYEVHGIKRRASLFNTDRIDHLYEDPHAENRKFILHYGDLSDSTNLIRIIQEVQPDEIYNLAAQSHVQVSFDSPEYTANVDALGTLRILEAIRILGLEKKTRFYQASTSELFGQVQEIPQTEKTPFYPRSPYACAKLYAYWICVNYREAYGMYACNGILFNHESPIRGETFVTRKITRALARIKLGLQDRLYLGNMNALRDWGHAKDYVEMQWLMLQQDAPQDFVIATGEQHSVREFVELAATELGISIEWRGYGEEEKGYDTATGKCIVAVDKKYYRPTEVETLLGDPAKAKKELGWVPRTTFTELVKEMVQTDFREAEREILCTEHGFPVCQPQE

SEQ ID NO: 104443 - DNA, 1104 bp, Prochlorococcus marinus str. MIT 9312
  CDS (1)..(1104): transl_table=11
atgaactttagcactgatatgaatgacaagaatattaaaaaaattgcattaattactggaattactggccaagatggtagttatcttgcagaatttttacttaataagggatatcaagttcatgggattaaaagaaggtctagtagtctgaatacatcgagaatcgatcatctttatcaagaccctcacgaattaaaccaaaattttattcttcattatggtgatttaacagactctacgaatttgataagaattattcaagatgttcaaccggatgaaatttacaatttaggggcacaaagtcacgtggcagtaagctttgagacacctgaatatacggctaattgtgatgcattaggaacattaagaatattagaagctataagaattttaggacttgaaaataaaacaaaaatttatcaagcaagtactagtgagttatatggtgaagttcaggaaactccgcaaactgaaaaaacacctttttatcctaggagcccttatggggtggccaaaatgtatgcttattggataacagtcaattatagggaatcttatggaatatttgcttgtaatggtattttattcaatcatgagagtcctagaagaggcgagactttcgtaactaaaaaaattactagaggtttagcaaggatacattgtggtttggatgattgtatttatttaggtaatcttgattcattaagagattggggtcacgcaaaagactacgtcgagatgcaatggttaatgttacagcaagatactccagaggattttgtaattgctactggaagaagcgaatccattaggcaatttgtagaaattgcagctcaaaagctaggttggagtaagaacgaaaattcatctgcaataatttgggaaggagaaggattaaatgaagttggaaaacgaaaagacacaggagaaattgttgtaagaattgataaaaggtattttcgccccgctgaagttgaagctttaataggagattcctctaaagctagaaaagaattaggatgggaacctaaaatccgccttgaagaaatgattgaagaaatgatcaaatatgatttggaggtatgcaaaggcttagtaaattaa

SEQ ID NO: 104444 - protein, 367 aa, Prochlorococcus marinus str. MIT 9312
MNFSTDMNDKNIKKIALITGITGQDGSYLAEFLLNKGYQVHGIKRRSSSLNTSRIDHLYQDPHELNQNFILHYGDLTDSTNLIRIIQDVQPDEIYNLGAQSHVAVSFETPEYTANCDALGTLRILEAIRILGLENKTKIYQASTSELYGEVQETPQTEKTPFYPRSPYGVAKMYAYWITVNYRESYGIFACNGILFNHESPRRGETFVTKKITRGLARIHCGLDDCIYLGNLDSLRDWGHAKDYVEMQWLMLQQDTPEDFVIATGRSESIRQFVEIAAQKLGWSKNENSSAIIWEGEGLNEVGKRKDTGEIVVRIDKRYFRPAEVEALIGDSSKARKELGWEPKIRLEEMIEEMIKYDLEVCKGLVN

SEQ ID NO: 104445 - DNA, 1092 bp, Synechococcus elongatus PCC 7942
  CDS (1)..(1092): transl_table=11
atgacccgtaagcgcgccctgattaccggagtgactggccaagatggggcttatctggcagagtttcttctcgacaaaggctacgaagttcacggcatcaaacgccgcgcttcactgtttaacaccgatcgcattgatcatctttacgaagatccccatgtcgacgatcggcgctttattctgcactacggcgatctcaccgattccaccaacctcattcgaattgtccagcagattcagccccacgaaatctacaacctcggggcccagagccacgttcaagtctcctttgacagtcctgagtacactgccaacaccgatggcttgggcaccctgcgcatcctcgaagcgattcggatcctcggactagagcagcagacacggttctaccaagcctcgacctctgagctgtacggcctcgtccaagaaattccccaaactgagacgacccctttctacccgcgcagcccctacgctgttgctaagctctacgcctattggatcacagttaattaccgcgaagcttacggcatctatgcctgcaatggcattctcttcaaccatgagtcaccgctgaggggtgaaacctttgtcacccgcaaaattacccgtgctcttgctcggatcaagctggggctgcaggactgcctctacctcggcaacttggatgccaaacgggactggggtcacgcccgcgactatgtcgagatgcagtggctgatgctgcaacaggagcaaccggatgactacgtaattgccaccggcgtacagttctccgtgcgtcagtttgtggaaattgcggcggcggaagtgggtctgacaattgcgtggtcgggcagtggtgtggaggaaaagggcatcaacccagccacgggacaagcgatcgtggcgattgatccccgttacttccgtccgactgaagtagaaacattgctgggcgatccctcgaaggcgaagcggcagctgggctgggagccgcgcatcagttttgaacagttggtgagcgagatgatgcgcgaagatttgcatctggcggagcgcgatgctctgatcaaacaagcggggtacaaggccttcgactacttcgagtga

SEQ ID NO: 104446 - protein, 363 aa, Synechococcus elongatus PCC 7942
MTRKRALITGVTGQDGAYLAEFLLDKGYEVHGIKRRASLFNTDRIDHLYEDPHVDDRRFILHYGDLTDSTNLIRIVQQIQPHEIYNLGAQSHVQVSFDSPEYTANTDGLGTLRILEAIRILGLEQQTRFYQASTSELYGLVQEIPQTETTPFYPRSPYAVAKLYAYWITVNYREAYGIYACNGILFNHESPLRGETFVTRKITRALARIKLGLQDCLYLGNLDAKRDWGHARDYVEMQWLMLQQEQPDDYVIATGVQFSVRQFVEIAAAEVGLTIAWSGSGVEEKGINPATGQAIVAIDPRYFRPTEVETLLGDPSKAKRQLGWEPRISFEQLVSEMMREDLHLAERDALIKQAGYKAFDYFE

SEQ ID NO: 104447 - DNA, 1035 bp, Rhodospirillum rubrum ATCC 11170
  CDS (1)..(1035): transl_table=11
atgagtaaatgtgcccttatcacaggcatcaccgggcaagatggcgcctatctttctcagcttctgatttcaaaaggatatcgtgtctacggaacagtacgccacttggctaccgctaatatatggcgattgagagagcttgaaattctggataaaacaaatctaattgaaatagatcttttaaattatgacagcatctacgatgccatcaagacgactaatccggatgaaatctataatcttgcctctcccagcttcgtcggaacttcttttgaacatccaatttatgctggaaatgccggaggattggctgtcacgcgccttctcgcggctattttggcagccgatcctgacatccgcttttatcaagcctcaacgtcagaaatgtttggcaaggcgcagaccaccccgcagacggaaaccacgcccttctatcccagaaatccctatggagtggccaagttatatggccactggatgacggtgaactaccgtgactcccacaacctcttcgcatgctccggcattctgtttaaccatgaatcgcccttgcgcggcagggatttcgtcacaagaaaaatcagcctgggactatcgtgcatcaaagaagggcagcaggatattctaagacttggcaatctggaggcccaacgggactggggtttcgctggagattatgtcgaggggatgtggcggatgcttcagcacgagattcccagcgattatattttggcgacgggaaaaccccgttctgtgcgggacgtcgtcgatctcgcggccggcgctttgggaatggatcttctctgggaagggaccggcgctgaaatggtcggcatcgaacgatcgtccggccgaaaaattgtcgtcgtcgatccggcttttttccgccccatagaaaaagagctgctaaccggggtcgcagaaaaagcccattccgtgctgggatggcggcaaagaatgggctttgaagatctcattgcccagatgacagagagagaccacgatcgcgttataaaaaaagacctattttattaa

SEQ ID NO: 104448 - protein, 344 aa, Rhodospirillum rubrum ATCC 11170
MSKCALITGITGQDGAYLSQLLISKGYRVYGTVRHLATANIWRLRELEILDKTNLIEIDLLNYDSIYDAIKTTNPDEIYNLASPSFVGTSFEHPIYAGNAGGLAVTRLLAAILAADPDIRFYQASTSEMFGKAQTTPQTETTPFYPRNPYGVAKLYGHWMTVNYRDSHNLFACSGILFNHESPLRGRDFVTRKISLGLSCIKEGQQDILRLGNLEAQRDWGFAGDYVEGMWRMLQHEIPSDYILATGKPRSVRDVVDLAAGALGMDLLWEGTGAEMVGIERSSGRKIVVVDPAFFRPIEKELLTGVAEKAHSVLGWRQRMGFEDLIAQMTERDHDRVIKKDLFY

SEQ ID NO: 104449 - DNA, 1071 bp, Rhodospirillum rubrum ATCC 11170
  CDS (1)..(1071): transl_table=11
atggcggcgaaggttgcgcttattaccggggtgacggggcaggacggcgcctatctggcggaattcctgctgggcaagggctatgaggtccacggcatcaagcggcggtcgtcgtcgctcaacaccgggcggatcgatccgctttatcaagatccccacgatcccgaccgcacgttcttcctgcattacggcgacatgaccgacagcgccaatctgatcgggctggttcaggccattcagcccgacgagatctataatctcgccgcgcaaagccatgtccaggtcagtttcgagatccccgaatacaccgccaatgccgatgcggtcggcaccttgcgcctgctcgaggcgatccgtttgcttgggctgaccgacaagacgcggttctatcaggcctcgacttccgagctttacggcaaggtgcgcgagacgccgcaaagtgaaaccacgccgttttatccgcgcagcccctatgcggcggccaagctttacgcctattggatcacggtgaactaccgcgaggcctatggcattcacgcctcgaacggcattcttttcaatcatgaaagcccgctgcgcggcgaaaccttcgtgacccgcaagatcacccgggcggtggcggccattcatcttggactgcaagacgtgctttatctgggcaatctcgacagctggcgtgactggggccatgcgcgcgactatgtgaaaggcatgtgggcgatgcttcaacaaccccgccccgatgactatgtcttggcgacgggggtggtccattcggttcgcgccttcgtggaaatggctttttccaagctggggcgccgcgtgacatggcagggcgagggggtcgacgagatcgggatcgacagcgccagcggcgccaaactggtggccatcgatccccgttatttccggccgaccgaggtcgagttcctgcaaggcgatccgaccaaggcccgcgagcgtctgggctgggtcgccgaaaccccgcttgccgagttggtcgctgaaatggtcgccgccgatctcgccgtgctcaaacgcacccaggagagtctgatcaccaatgactga

SEQ ID NO: 104450 - protein, 356 aa, Rhodospirillum rubrum ATCC 11170
MAAKVALITGVTGQDGAYLAEFLLGKGYEVHGIKRRSSSLNTGRIDPLYQDPHDPDRTFFLHYGDMTDSANLIGLVQAIQPDEIYNLAAQSHVQVSFEIPEYTANADAVGTLRLLEAIRLLGLTDKTRFYQASTSELYGKVRETPQSETTPFYPRSPYAAAKLYAYWITVNYREAYGIHASNGILFNHESPLRGETFVTRKITRAVAAIHLGLQDVLYLGNLDSWRDWGHARDYVKGMWAMLQQPRPDDYVLATGVVHSVRAFVEMAFSKLGRRVTWQGEGVDEIGIDSASGAKLVAIDPRYFRPTEVEFLQGDPTKARERLGWVAETPLAELVAEMVAADLAVLKRTQESLITND

SEQ ID NO: 104451 - DNA, 1038 bp, Burkholderia thailandensis E264
  CDS (1)..(1038): transl_table=11
atgagcgtcattgcaattatcaccggcatcacgggccaagacggggcttatctcgctcaactcctgctcgacaagggctatgtggttcacggcacctatcgccgcaccagctcggtcaacttctggcgcatcgaggagctcggcatcggcgctcatccgaatctccatctcgtcgaatacgatctgaccgacctgagcgcgagcatccgcctgctgcggacgacgggcgcgacggaagtttacaatcttgccgcgcaaagcttcgtcggcgtatcgttcgaccagcccgtcaccaccgcggagatcaccggcatcggcccgctgaacctgctcgaggcgatccggatcgtgaatccggcgatccgcttctatcaggcgagcacgtcggagatgttcggcaaggtgcaggcgattccgcagacggagacgacgccgttctatccgcgcagcccatacggcgtcgcgaagctctatgcgcactggatcacggtcaactatcgcgaaagctacaacatcttcggctgcagcgggattctgttcaatcacgaatcgccgctgcgcggccgcgaattcgtcacgcgcaagatcaccgacagcatggcgaagatccgcctcggcaagctcgacgtgctcgagctaggcaatctcgacgcgaagcgcgactggggcttcgcgaaggaatacgtggaagggatgtggcggatgctgcaggccgacaagcccgatacctacgtgctcgcgacgaaccggaccgagaaggtgcgggacttcgtcggcatggcggcgcgcgcggcgggcttcaagcttgcatgggaaggccgcgaagaaaacgaagtcgggatcgacctgggctcgggcaagacgatcgtgaggatcaatccgaagttctatcggccggccgaagtggatctgctgatcggcgatccgaagaaggcgcgcgacgagctcgggtgggcgccggccacgacactggagcagttgtgccagatgatggtcgaggccgacatccggcgcaatgaaacagggttttccttctga

SEQ ID NO: 104452 - protein, 345 aa, Burkholderia thailandensis E264
MSVIAIITGITGQDGAYLAQLLLDKGYVVHGTYRRTSSVNFWRIEELGIGAHPNLHLVEYDLTDLSASIRLLRTTGATEVYNLAAQSFVGVSFDQPVTTAEITGIGPLNLLEAIRIVNPAIRFYQASTSEMFGKVQAIPQTETTPFYPRSPYGVAKLYAHWITVNYRESYNIFGCSGILFNHESPLRGREFVTRKITDSMAKIRLGKLDVLELGNLDAKRDWGFAKEYVEGMWRMLQADKPDTYVLATNRTEKVRDFVGMAARAAGFKLAWEGREENEVGIDLGSGKTIVRINPKFYRPAEVDLLIGDPKKARDELGWAPATTLEQLCQMMVEADIRRNETGFSF

SEQ ID NO: 104453 - DNA, 1035 bp, Syntrophus aciditrophicus SB
  CDS (1)..(1035): transl_table=11
atgaaaaaagcatttatcaccggcattacaggacaggacggctcctatctggctgaatttctcctcgggaaaggctatgaagtccacggcctgatccggcgctccagtaccttcaatacggaccgcatcgaccatctgtacaaggatttccacgatcctcaggccaggctttatctgcattacggagatctctccgtttccggtcagttgactgacatgctctacgacatcagtcccgatgaaatctatcacctcggcgcccagagccacgtgcgggtcagcttcgacatgcccgaatacacgggagacgtcaccggcctcggaaccctcaggctcctggaggcgatccggaaaaccggcgtaaaggcccgtttttatcaggcttcctcaagtgaaatgttcggggccgccccccctccacagcatgaagggacccttttccagccgcaaagcccttacgccgccgccaaggtctatgcctattacgtcgtcaggaattaccgggacgcttacaagctgtttgcctgcaatggaatcctgttcaaccatgaatccccccggcggggtgaaaccttcgtcacccggaagatcacccggggtgctacccagatcaagcttggtcttcgggacaagctctatctgggcaacctggaagcaaaaagagactggggctttgccggcgattatgtggaagccatgtggctgatgctccagcaggacaagccggacgactacgtaatcgccacgggggaaacccattccgtccgggagtttgccgagaaggtctttcagaagctggatctcgactaccatcagtatgtggaaatcgatccccgctacttccgccccacggaggtggacgttctgctcggcgactcatccaaagccagacgcctcctgaactggaagccgcgtgtcagcttcgatgaactggtcgaaatgatgatcgccgcggacctggaactcgctcagcgggagaaaacgctgacggacgccggttactcctgcaatctgaacccgcatctctgcatttaa

SEQ ID NO: 104454 - protein, 344 aa, Syntrophus aciditrophicus SB
MKKAFITGITGQDGSYLAEFLLGKGYEVHGLIRRSSTFNTDRIDHLYKDFHDPQARLYLHYGDLSVSGQLTDMLYDISPDEIYHLGAQSHVRVSFDMPEYTGDVTGLGTLRLLEAIRKTGVKARFYQASSSEMFGAAPPPQHEGTLFQPQSPYAAAKVYAYYVVRNYRDAYKLFACNGILFNHESPRRGETFVTRKITRGATQIKLGLRDKLYLGNLEAKRDWGFAGDYVEAMWLMLQQDKPDDYVIATGETHSVREFAEKVFQKLDLDYHQYVEIDPRYFRPTEVDVLLGDSSKARRLLNWKPRVSFDELVEMMIAADLELAQREKTLTDAGYSCNLNPHLCI

SEQ ID NO: 104455 - DNA, 1002 bp, Frankia sp. CcI3
  CDS (1)..(1002): transl_table=11
gtgcctcgcgcgctgattaccgggattaccggtcaggacgggttgtatctgggtgagttgctgaccgcgaagggttatgaggtgttcgggttggtgcgggggcagtcgaacccgaaggtggcgacggtggagcggctggtgccgggggtggtgttgttggagggggatctgacggatcttccgtcgttgatcggggcggtggagatctcgcagccggacgaggtgtacaacctgggggcgatctcgttcgtggggttgtcgtggaagcaggcggagctgaccggggagacgacggggatgggggtgctgcgggttctggaggcgttgcggatcgcgggtggtaacgacatgtcgggggtgcggttctatcaggcgtcgtcgtcggagatgttcgggaaggtgcgggagacgccgcagcgggagtcgacgccgtttcatccgcggtcgccgtacggggtggcgaagacgtttggtcactatctgacggtgaattatcgggagtcgtacggggcgttcgcgtgttcggggttgttgtttaatcacgagtcgccgcggcgggggatcgagttcgtgacccggaagatctcgcgggcggtggcgcggatttcgttggggttgcaggactcgttgtcgttggggaatctggagtcgcggcgggactggggtttcgcgggggattacgtggaggcgatgtggcggatgctgcagcaggacgcgccggacgattatgtggtggcgaccggggagacgcacagtatccgggagttgttggatgtggcgttcgggcgggtggggatctcggactggtcggggttcgtgcggcaggatccccggtttttccggccggctgaggtggatgtgctggtgggggattcgtcgaaggcgcgggaggtgttggggtggaagccgcgggtggggttcgaggagttggtggcgatgatggtggacgccgacgtcgccaccgagacggaatcggccgacaaggcactgacaatccgttga

SEQ ID NO: 104456 - protein, 333 aa, Frankia sp. CcI3
MPRALITGITGQDGLYLGELLTAKGYEVFGLVRGQSNPKVATVERLVPGVVLLEGDLTDLPSLIGAVEISQPDEVYNLGAISFVGLSWKQAELTGETTGMGVLRVLEALRIAGGNDMSGVRFYQASSSEMFGKVRETPQRESTPFHPRSPYGVAKTFGHYLTVNYRESYGAFACSGLLFNHESPRRGIEFVTRKISRAVARISLGLQDSLSLGNLESRRDWGFAGDYVEAMWRMLQQDAPDDYVVATGETHSIRELLDVAFGRVGISDWSGFVRQDPRFFRPAEVDVLVGDSSKAREVLGWKPRVGFEELVAMMVDADVATETESADKALTIR

SEQ ID NO: 104457 - DNA, 1092 bp, Frankia sp. CcI3
  CDS (1)..(1092): transl_table=11
gtgcctcgcgcgctgattaccgggattaccggtcaggacgggttgtatctgggtgagttgctgaccgcgaagggttatgaggtgttcgggttggtgcgggggcagtcgaacccgaaggtggcgacggtggagcggctggtgccgggggtggtgttgttggagggggatctgacggatcttccgtcgttgatcggggcggtggagatctcgcagccggacgaggtgtacaacctgggggcgatctcgttcgtggggttgtcgtggaagcaggcggagctgaccggggagacgacggggatgggggtgctgcgggttctggaggcgttgcggatcgcgggtggtaacgacatgtcgggggtgcggttctatcaggcgtcgtcgtcggagatgttcgggaaggtgcgggagacgccgcagcgggagtcgacgccgtttcatccgcggtcgccgtacggggtggcgaagacgtttggtcactatctgacggtgaattatcgggagtcgtacggggcgttcgcgtgttcggggttgttgtttaatcacgagtcgccgcggcgggggatcgagttcgtgacccggaagatctcgcgggcggtggcgcggatttcgttggggttgcaggactcgttgtcgttggggaatctggagtcgcggcgggactggggtttcgcgggggattacgtggaggcgatgtggcggatgctgcagcaggacgcgccggacgattatgtggtggcgaccggggagacgcacagtatccgggagttgttggatgtggcgttcgggcgggtggggatctcggactggtcggggttcgtgcggcaggatccccggtttttccggccggctgaggtggatgtgctggtgggggattcgtcgaaggcgcgggaggtgttggggtggaagccgcgggtggggttcgaggagttggtggcgatgatggtggacgccgacgtcgccaccgagacggaatcggccgcgcgcgacgggctcgcggcccccgccgggcgggctggggcggcccgtcccgccgggcctaccgtcgtcgaccagccgcgcggcggatcggatcgttccggggtccgctcgtga

SEQ ID NO: 104458 - protein, 363 aa, Frankia sp. CcI3
MPRALITGITGQDGLYLGELLTAKGYEVFGLVRGQSNPKVATVERLVPGVVLLEGDLTDLPSLIGAVEISQPDEVYNLGAISFVGLSWKQAELTGETTGMGVLRVLEALRIAGGNDMSGVRFYQASSSEMFGKVRETPQRESTPFHPRSPYGVAKTFGHYLTVNYRESYGAFACSGLLFNHESPRRGIEFVTRKISRAVARISLGLQDSLSLGNLESRRDWGFAGDYVEAMWRMLQQDAPDDYVVATGETHSIRELLDVAFGRVGISDWSGFVRQDPRFFRPAEVDVLVGDSSKAREVLGWKPRVGFEELVAMMVDADVATETESAARDGLAAPAGRAGAARPAGPTVVDQPRGGSDRSGVRS

SEQ ID NO: 104459 - DNA, 1125 bp, Saccharophagus degradans 2-40
  CDS (1)..(1125): transl_table=11
atggctaggaaaatagcactgattaccggggtaacaggtcaggacggatcttatttgtctgagctgctattagaaaaaggctatgaggtgcatggtatcaagcgtcgggcatccttgtttaatactgcgcgtgtagatcatatatatcaagataagcatgaagaaaatgccaacttttttttgcattatggagatttaactgattcgtcaaatttaactcgcattttaaaagaagtgcaaccagatgaggtgtacaacttgggggcgcagtcacatgttgctgtttcgtttgagtgtccagagtacacagcggatgttgatgcaataggtgctttacgtattctagaggctattcggtttttaggtttggagaagaagacgcggttttatcaagcttcaacgtccgaactttttggtgaggttaaggaaatcccgcagaatgagtccacgccttttcatccgcgctctccttatgcagtggctaaaatgtatgcttattggattactgttaactatcgtgagtcatatggtatgtttgcctgcaatggtattttatttaatcatgagtcgccgcgtcgtggtgaaacttttgttactcgtaaaatcacccgtggtattgctaatgtggctcagggagtagagaaatgtttatacttgggcaatatggatgctcttcgtgattgggggcatgcgaaagattatgttcgaatgcagtggatgatgttgcagcaagcagagccagaagattttgttattgctacaggtaagcaaatttcggttcgcgagtttgttaagttgtctgcaataaatgcgggtttcgaactcgagtttagtggagagcacattaatgaagtggccactgtagtttctattgtagaccctaataaggctcctgctttgaaagtcggggatcaaattgtcaaagttgaccctaaatattttcggccagcagaggttgaaactttattgggagacccagcaaaagccaaagcgaaattaggttgggtgcccgaaatatcagtggaagaaatgtgtgcggaaatggtcgctagtgacctaggtctggcaaagcaacatgctttgcttttagctcatggccatgatgtgaatgtttctgtagagtga

SEQ ID NO: 104460 - protein, 374 aa, Saccharophagus degradans 2-40
MARKIALITGVTGQDGSYLSELLLEKGYEVHGIKRRASLFNTARVDHIYQDKHEENANFFLHYGDLTDSSNLTRILKEVQPDEVYNLGAQSHVAVSFECPEYTADVDAIGALRILEAIRFLGLEKKTRFYQASTSELFGEVKEIPQNESTPFHPRSPYAVAKMYAYWITVNYRESYGMFACNGILFNHESPRRGETFVTRKITRGIANVAQGVEKCLYLGNMDALRDWGHAKDYVRMQWMMLQQAEPEDFVIATGKQISVREFVKLSAINAGFELEFSGEHINEVATVVSIVDPNKAPALKVGDQIVKVDPKYFRPAEVETLLGDPAKAKAKLGWVPEISVEEMCAEMVASDLGLAKQHALLLAHGHDVNVSVE

SEQ ID NO: 104461 - DNA, 1041 bp, Methylobacillus flagellatus KT
  CDS (1)..(1041): transl_table=11
atgaccataaaaactgccatcattaccggcatcacaggccaagatggtgcatatctcgcagaacttctccttagtaaaggctataaggtttacggtaccttccgccgtacaagctcggtcaacttctggcgtattgaagagctgggaattgaaaatgacccaaatcttcttttggttgaatacgacctgaccgatttgtcagcaagcatccgtctattgcagagcacaggtgcaacagaagtgtacaacttagctgcgcaaagttttgtgggcgtgtcttttgagcaacctattactaccgcggagatcacaggtgtcggtgcgctcaatcttttggaggccattcgtttagtaaatcccaatattcgctattaccaagcatccacatccgaaatgttcggcaaggtgcaggcgattccacaaacggaagatacgcctttctatccacgcagtccttatggtgtcgccaagctgtatgcgcactggatgactgttaactatcgtgaaagctatggaatcttcggatctagcggtattttattcaatcatgagagtccgttgcgtggtcgcgagttcgtgacgcgcaagatcacggattcggtggccaagatcaagctggggaaacttgattgcctggagttgggtaacttggatgcaaagcgtgattggggctatgccaaggattatgtggaaggcatgtggcgcatcctgcaggcggatgagccggatacctttgtactggcgaccaatcgtaccgagactgtgcgcgattttgtaagcatggcgttcaagggggctggcattgctgttgagttcaagggcaagggcgaggacgaagttgccgtggatactgcaaccggtaagatagtggttcgggtcaatccgaagttttaccgtccagcggaagtggacctactgatcggtagcccagccaaggccaaggccaagctgggttgggaaccgaagacaacgctggagcaactctgccagatgatggtcgaggccgatctgcgccgcaacacggaaggtttctcattttga

SEQ ID NO: 104462 - protein, 346 aa, Methylobacillus flagellatus KT
MTIKTAIITGITGQDGAYLAELLLSKGYKVYGTFRRTSSVNFWRIEELGIENDPNLLLVEYDLTDLSASIRLLQSTGATEVYNLAAQSFVGVSFEQPITTAEITGVGALNLLEAIRLVNPNIRYYQASTSEMFGKVQAIPQTEDTPFYPRSPYGVAKLYAHWMTVNYRESYGIFGSSGILFNHESPLRGREFVTRKITDSVAKIKLGKLDCLELGNLDAKRDWGYAKDYVEGMWRILQADEPDTFVLATNRTETVRDFVSMAFKGAGIAVEFKGKGEDEVAVDTATGKIVVRVNPKFYRPAEVDLLIGSPAKAKAKLGWEPKTTLEQLCQMMVEADLRRNTEGFSF

SEQ ID NO: 104463 - DNA, 1119 bp, Burkholderia xenovorans LB400
  CDS (1)..(1119): transl_table=11
atgagtcacaaagttgccttgattaccggcgttacaggtcaggacggctcgtaccttgcggaattactgttaagcaagggctatgaagttcacggcataaagcgccgttcgtcgctgttcaatacggaacgaatcgatcacctgtaccaggagccgcatgcgtccgatcgccgcttcgtcctgcaccacggcgatctgaccgattcgacgagcctcgtgcggatcatccaacgcgcgcagcccgacgagatttataacctcggggcacaaagccacgtcgcggtctcattcgaggagccggagtatacggcgaacgtcgacggtgtcggcgcactgcgcattctcgaggcgatcaggattctcggcctcgaaaagaagacgcgcttctatcaggcctcgacgtctgaactctatggattggttcaggaaatcccccaaaaggaaaccacgcctttctacccacgtagtccgtatgcggtagccaagctgtacgcgtactggatcacggtcaactaccgcgaggcgtatggcatctacgcgtgcaacggcattctgttcaatcacgagtccccggtgcgcggcgagacctttgtgacgcgcaagatcacgcgggcgatctcccgcattgcaacaggcctgcaggagtgtctgtacctcggcaacatgtccgcgctgcgggactggggccacgcgcgcgactacgtcgagatgcaatggttgatgctgcaacaggaacagcccgaagactttgtgattgccaccggcgtgcagtacagcgtgcgtcagttcgttgagcaggccgctgcggaactggggatccatttgcgctttgagggatcgggcgtcgacgaggtgggcattgtcgagcgtgtcgtagggggagacacgaaagtagtgcggggtgacgtgatcgtgcgtgtggatccgcgctatttccgcccggccgaggtggaaacgttgctgggtgatcccaccagggcgcacgaaaagttgggctggaaaccggctacgtcgttcgaatcactggtcacggaaatggtgcgcgccgactatcaggtcgcgaagcgggatgcgttggtgacgctggcgggtttcaagacatttgagtacaacgagtga

SEQ ID NO: 104464 - protein, 372 aa, Burkholderia xenovorans LB400
MSHKVALITGVTGQDGSYLAELLLSKGYEVHGIKRRSSLFNTERIDHLYQEPHASDRRFVLHHGDLTDSTSLVRIIQRAQPDEIYNLGAQSHVAVSFEEPEYTANVDGVGALRILEAIRILGLEKKTRFYQASTSELYGLVQEIPQKETTPFYPRSPYAVAKLYAYWITVNYREAYGIYACNGILFNHESPVRGETFVTRKITRAISRIATGLQECLYLGNMSALRDWGHARDYVEMQWLMLQQEQPEDFVIATGVQYSVRQFVEQAAAELGIHLRFEGSGVDEVGIVERVVGGDTKVVRGDVIVRVDPRYFRPAEVETLLGDPTRAHEKLGWKPATSFESLVTEMVRADYQVAKRDALVTLAGFKTFEYNE

SEQ ID NO: 104465 - DNA, 1044 bp, Burkholderia xenovorans LB400
  CDS (1)..(1044): transl_table=11
atgagccaaccacgcaaagcgatcatcaccggcgtatccggacaggacggcgcctatctgaccaaactgctgctcgacaagggctaccacgtgaccggcacctaccggcgcacgagttccgtcaatttctggcgtatgcgtgagctgggtgtgctcgatcatccgaatctgcgtctggtcgaacacgatctcaccgatctcggttcgacgctgcggctgctcgaaggcgcgcaggccgacgagttgtacaacctcgccgcgcaaagcttcgtgggcgtttcgttcgaccagccggtgacgaccgccgaagtaaccggcatcggcgcgctgaatctgctcgaaggcatccgcattctcaacccgaagacgcgttactaccaggcgtccacgtcggagatgttcggcctcgtgcaggccgtgccgcaacgcgaggacacgcccttctatccccgcagcccctatggcgtggccaagctgttcgcgcattggtcgacgatcaactatcgcgaatcgtatgggctctttgcgagcagcgggattctgttcaatcacgaatcgccgctgcgtgggcgtgaattcgtcacccgcaagattaccgacaccgtcgccaagatcaagctcggcaagcaggacgtgctggagctgggcaacatgagcgcgcggcgcgactggggcttcgcgctcgaatacgtggaaggcatgtggcgcatgctgcaagccgatgagccggacaccttcgtgctcgccaccggccgcaccgaaacggtccgcgatttcgtgcgcatggcgttcgccgcggcggggtatcagctcgaatggtcgggcaaggaagagcgcgaaacgggtatcgatgtcgctaccggcaagacactggtgcgcgtgaatccgaagttctatcggccggccgaagtggatctgctgatcggctgcgcggacaaggctcacgagaagctcggctggaaaccggcaaccacgctggaacagctgtgccacatgatggttcatgcggatctggggcgcaacgagcatcacgagacgttctga

SEQ ID NO: 104466 - protein, 347 aa, Burkholderia xenovorans LB400
MSQPRKAIITGVSGQDGAYLTKLLLDKGYHVTGTYRRTSSVNFWRMRELGVLDHPNLRLVEHDLTDLGSTLRLLEGAQADELYNLAAQSFVGVSFDQPVTTAEVTGIGALNLLEGIRILNPKTRYYQASTSEMFGLVQAVPQREDTPFYPRSPYGVAKLFAHWSTINYRESYGLFASSGILFNHESPLRGREFVTRKITDTVAKIKLGKQDVLELGNMSARRDWGFALEYVEGMWRMLQADEPDTFVLATGRTETVRDFVRMAFAAAGYQLEWSGKEERETGIDVATGKTLVRVNPKFYRPAEVDLLIGCADKAHEKLGWKPATTLEQLCHMMVHADLGRNEHHETF

SEQ ID NO: 104467 - DNA, 1206 bp, Ralstonia metallidurans CH34
  CDS (1)..(1206): transl_table=11
atgggcgtaaacgaactggataacctcttcgacgcggccgacaagcccggcgatgcatcgacgccacgcggcgccaatggccggcgccgggcactgatcaccggcatcaccggccaggacggttcgtacctgtgcgaatacctgctcgacaagggatacgaagtccacggcatcaagcggcgcagttcgctgttcaataccgagcgtatcgatcatctgtacgaggacccgcaagcaccggaccgcaggttgatcctccatcacggcgacatgaccgatacggcgagcctcgtgcgcgtcgtgcaacagtcccgccccgacgaggtctacaacctcgcggcgcagagccacgtgcaggtgtccttcgaggagcccgagtacaccgccaacaccgacgccgtcggcacgctgcgcctgctcgaggcgatgcggattctcggcatggagcaaagcacgcgtttctaccaggcatccacgtccgaactgtatggactggtgcaggagattccgcagaaggaaaccacgccgttctatccgcgcagcccgtatgccgtggccaagctctacgcctactggatcaccgtgaactaccgtgaagcctatggcatgtacgcgtgcaacggcatcctgttcaatcacgaaagccccgtgcgcggcgagacgttcgtcacccgcaagatcacacgcgccatcgcgcgcatcgcgctgggcctgcaggaagtgctctatcttggcaacctgtccgcgctgcgcgactggggccatgcgcgcgactacgtcgagatgcagtggctgatgctgcagcaggaaacgccgcgtgatttcgtcatcgccacgggcgagcaacacagcgtgcgcgagttcgtcacgctctccgcgcagaagctcgggctaacggtcaccttcgagggcagcggcgtcgacgaggtcggcatcatttctcatatcgacacctcacgccgcgagttgtcctcccgctgcaaggtcggcgacgtgatcgtgcgcgtggacccgcgctacttccgcccgaccgaagtcgagacgctgctgggcgacccgacgcaggcacgtgagcaactgggctggtccccacgcatcacgttcgacgaactagtgcacgaaatgatcgaagcggacttcgtggccgcgcggcgtgacgcgctggtcaagatggccggcttcagaacctatgactaccatgagtga

SEQ ID NO: 104468 - protein, 401 aa, Ralstonia metallidurans CH34
MGVNELDNLFDAADKPGDASTPRGANGRRRALITGITGQDGSYLCEYLLDKGYEVHGIKRRSSLFNTERIDHLYEDPQAPDRRLILHHGDMTDTASLVRVVQQSRPDEVYNLAAQSHVQVSFEEPEYTANTDAVGTLRLLEAMRILGMEQSTRFYQASTSELYGLVQEIPQKETTPFYPRSPYAVAKLYAYWITVNYREAYGMYACNGILFNHESPVRGETFVTRKITRAIARIALGLQEVLYLGNLSALRDWGHARDYVEMQWLMLQQETPRDFVIATGEQHSVREFVTLSAQKLGLTVTFEGSGVDEVGIISHIDTSRRELSSRCKVGDVIVRVDPRYFRPTEVETLLGDPTQAREQLGWSPRITFDELVHEMIEADFVAARRDALVKMAGFRTYDYHE

SEQ ID NO: 104469 - DNA, 1083 bp, Acidobacteria bacterium Ellin345
  CDS (1)..(1083): transl_table=11
atgaaaaaagcgctaatcaccggagtcacaggccaggatggttcatatctggcagcgttgttgttgtccaaaggttacgaagtacacggaatcaaaagacgtagctcgctttttaatactcagcgaattgatcatctctatcaagatccccacgagcagggcaggcagttcgtgttgcactatggcgacatgacggacaccagcagcctcgtgcgagtgattcagcgcgttcaaccggacgagatttacaacctcgcggcgcagagccatgtcgcggtatccttcgaggaaccggaatataccgcaaacgcagatgcgatcggaactttacgcattttagaagcgattcgcattctgggccttgcagggaaaacccgtttctatcaagcctcgacgtcggaactctttggcaaggtgcaagagacaccacaaaaagagagcaccccgttttatccacgttctccttatgcggtcgccaagctttatgcatattggatcaccgtcaattatcgcgaagcgtacggtatgtacgcatgcaatggggtgcttttcaatcacgaatcgccggttcgaggggaaacattcgttacgcgcaagatcacgcgcggcctttctcgtataaaagttggtctgcagaaaacgctttttcttgggaatctgcattcacgccgggattggggacacgcgcgtgactatgcggagatgcagtggctcatgcttcagcaacagaatccggaagattttgtaatcgcaactggcgaacaacacagcgtccgcgagtttgtggatcttgccgcaagcaagatcgacatgaccatcgagtggaagggtgagggcgttgatgaacgcggttatgatcgcacggggaattgcatcgtcgccgttgacccgagatactttcgtccgacggaagtcgatacgctgttaggggatgcggagaaagcgcgtaaacaactaggctggcaacctcgcatcggttttgatcagttagtcactgagatggtaatgagcgacctcgacgcagctgaacgtgacgttttagttcacaagcacggttataaggtgttcgagtcgcatgagtag

SEQ ID NO: 104470 - protein, 360 aa, Acidobacteria bacterium Ellin345
MKKALITGVTGQDGSYLAALLLSKGYEVHGIKRRSSLFNTQRIDHLYQDPHEQGRQFVLHYGDMTDTSSLVRVIQRVQPDEIYNLAAQSHVAVSFEEPEYTANADAIGTLRILEAIRILGLAGKTRFYQASTSELFGKVQETPQKESTPFYPRSPYAVAKLYAYWITVNYREAYGMYACNGVLFNHESPVRGETFVTRKITRGLSRIKVGLQKTLFLGNLHSRRDWGHARDYAEMQWLMLQQQNPEDFVIATGEQHSVREFVDLAASKIDMTIEWKGEGVDERGYDRTGNCIVAVDPRYFRPTEVDTLLGDAEKARKQLGWQPRIGFDQLVTEMVMSDLDAAERDVLVHKHGYKVFESHE

SEQ ID NO: 104471 - DNA, 1122 bp, Silicibacter sp. TM1040
  CDS (1)..(1122): transl_table=11
atgaccaaacgtgcgctcatcaccggggtcaccggtcaagacggctcttacctggcagagttcctgctggagaagggctatgaggtgcatggcattaagcgccgcgcctcatccttcaacaccagccgtatcgaccatatctatcaggatccgcacacggatcgggcgcgcttcaagctgcattatggagatctggccgacacttccaacctgacgcggatcttgcgcgaggtcgaaccggatgaggtgtataacctcggtgcgcaatctcatgtcgcggtgtcttttgaggctccggaatacacggcagatgtggatgccattggcacactgcgcctcttggaggcgatccgtttcctcggtcttgagcagaagacccggttttatcaggcctcgacatctgagctctatggtctggtgcaggagacgccgcaacgcgaaacgactccgtttcacccccgctcgccctatgcggtggccaagatgtacgcctattggatcacggtgaactaccgcgaggcttatggcctttacgcttgtaacggcattctgttcaaccatgagagcccgcgccggggtgagacatttgtgacccgcaagatcacccgcggccttgccaatatcgcacaggggctcgagccctgcctttacatgggcaatatcgacagcctgcgggattggggtcatgccaaggactatgtgcgcatgcagtggatgatgctgcagcaagacacgcccgaggatttcgtgatcgccacgggcaagcaatcttccgtgcgggagttcatcatctggtcggcagcggaactcgggattgagctcgagttttccggcaagggcgtggacgaggtggcaactgtcaccgcgatcaacggtgatgccgcacccgcgctcagggtgggcgatattgtcatgcgtattgatccgcggtacttccgtccggccgaggtcgacacgctccttggagatccgacaaaggcgaaggaaaaactcggctgggtgccggagatcacggcgcaggagatgtgcgcggaaatgattgaggaagacctgaaaaccgcgcgccgtcatgcccttttgaaagaacatggctatgatctgccggtctgcatcggggagtaa

SEQ ID NO: 104472 - protein, 373 aa, Silicibacter sp. TM1040
MTKRALITGVTGQDGSYLAEFLLEKGYEVHGIKRRASSFNTSRIDHIYQDPHTDRARFKLHYGDLADTSNLTRILREVEPDEVYNLGAQSHVAVSFEAPEYTADVDAIGTLRLLEAIRFLGLEQKTRFYQASTSELYGLVQETPQRETTPFHPRSPYAVAKMYAYWITVNYREAYGLYACNGILFNHESPRRGETFVTRKITRGLANIAQGLEPCLYMGNIDSLRDWGHAKDYVRMQWMMLQQDTPEDFVIATGKQSSVREFIIWSAAELGIELEFSGKGVDEVATVTAINGDAAPALRVGDIVMRIDPRYFRPAEVDTLLGDPTKAKEKLGWVPEITAQEMCAEMIEEDLKTARRHALLKEHGYDLPVCIGE

SEQ ID NO: 104473 - DNA, 975 bp, Myxococcus xanthus DK 1622
  CDS (1)..(975): transl_table=11
atggcgaccaagcgcgcactcattacgggcatcacggggcaggacggcagctatctcgcggagctgctcctttcgaagggctacgaggtgcacggcatggtgcgccgctcgtcggaggagaagttcgagcgcatccagcacctgcacgggaagattcagcttcaccagggcgacttgctggaccagttctcgctcgcggcgttgctcaacctgacgaagcccgacgaggtctacaacttggcggcgcagtccttcgtccccaccagttggaaccagccggtgctcacgggtgagttcaccgcgctgggcgtgacgaagatgctggaggccatccgccacacccgcccggaggcgcgcttctaccaggcgtcgtccagcgagatgttcggcaaggtgctggaagttccgcagacggaggacacgcccttctatccgcgcagcccgtacggtgtggccaaggcctacggccaccacatcacggtgaactaccgcgagtccttcaacctgttcgcggtgagcggcatcctcttcaaccacgagtcgccgcgccggggcctggagttcgtcacgcgcaaggtcacctacaacgtggcgcgcatcaagctgggcctccaggagaagctgcccatgggcaacctggacgccaagcgtgactggggcttcgcgggcgactacgtggacgccatgtggcggatgctccagcagccgcaggccgaggactacgtggtggccaccaacgagacgcacaccgtgcgcgagctggtggagattgccttcgcgcgcgtgggcctggactgggagaagcacgtcttcatcgacccggccttcgtgcgccccgccgaggtggacctgctcatcggtgacccggccaaggcgaagacgaagctgggctgggagcccaaggtccgcttcaaggagctggtggagatgatggtggacgcggacctggagcgcgtgaaggcggggcagcggtag

SEQ ID NO: 104474 - protein, 324 aa, Myxococcus xanthus DK 1622
MATKRALITGITGQDGSYLAELLLSKGYEVHGMVRRSSEEKFERIQHLHGKIQLHQGDLLDQFSLAALLNLTKPDEVYNLAAQSFVPTSWNQPVLTGEFTALGVTKMLEAIRHTRPEARFYQASSSEMFGKVLEVPQTEDTPFYPRSPYGVAKAYGHHITVNYRESFNLFAVSGILFNHESPRRGLEFVTRKVTYNVARIKLGLQEKLPMGNLDAKRDWGFAGDYVDAMWRMLQQPQAEDYVVATNETHTVRELVEIAFARVGLDWEKHVFIDPAFVRPAEVDLLIGDPAKAKTKLGWEPKVRFKELVEMMVDADLERVKAGQR

SEQ ID NO: 104475 - DNA, 1056 bp, Mycobacterium sp. MCS
  CDS (1)..(1056): transl_table=11
atgactaagcgtgcgctcatcacaggtatcactggacaggatggctcatatcttgcggagctgttactccacaaaggctatgaagtacatggcttgatccgccgcgcatcaacattcaacaccgcgcggatcgaccacctttatgtcgacccacattcacccaacgccaaactattcctgcactacggcgatctcagtgatggtgctcggttagtgacgttgttagccagcataagacccgacgaagtctacaaccttgctgcgcagtcccacgtgcgtgtttcatttgacgagccagaacacactgctgacacgaccggagcaggaaccattcgaatgctagaggcggtccggctgtccggcatagaaacacgtttctaccaggcatcctcgtcagagttgtatggggcgactcccccaccacagaacgaggaaactcccttctatccgcgttcaccatatgcagccgcgaagctgtacagctattggattacgaaaaattatcgtgaggcttacggccttttcgccgtcaacgggatcttgttcaatcatgaatcgccgcgccgcggcgagaccttcgtgacaaggaagataactcgcgccgccgccgctatcaaaagtggtagccaagattacctctatatgggcaacctcgacgcggtacgggactggggatacgcgcctgagtacgtcgaaggcatgtggcgcatgctgcaggttgacgagcctaacgactatgtccttgccaccggcgtgggaattacggtccgtgatttcctcgagatagcgttcgcgcatgtggggctgcggtgggaggatcacgtccgattcgacgaacgctatctccgccccaccgaggttgacgcgctgattggagactcgacgcgtgcgagagagaagctcggctgggtaccaactgtgcatggccaaacgctcgctcgcctgatggtcgacgccgacattgaagcgctccagcatgaggggagcccttggttcgacaaggtgctcttggattcgtgggggactgcgcccactcaagaggtgagtgcgccatga

SEQ ID NO: 104476 - protein, 351 aa, Mycobacterium sp. MCS
MTKRALITGITGQDGSYLAELLLHKGYEVHGLIRRASTFNTARIDHLYVDPHSPNAKLFLHYGDLSDGARLVTLLASIRPDEVYNLAAQSHVRVSFDEPEHTADTTGAGTIRMLEAVRLSGIETRFYQASSSELYGATPPPQNEETPFYPRSPYAAAKLYSYWITKNYREAYGLFAVNGILFNHESPRRGETFVTRKITRAAAAIKSGSQDYLYMGNLDAVRDWGYAPEYVEGMWRMLQVDEPNDYVLATGVGITVRDFLEIAFAHVGLRWEDHVRFDERYLRPTEVDALIGDSTRAREKLGWVPTVHGQTLARLMVDADIEALQHEGSPWFDKVLLDSWGTAPTQEVSAP

SEQ ID NO: 104477 - DNA, 1005 bp, Rubrobacter xylanophilus DSM 9941
  CDS (1)..(1005): transl_table=11
ttgagtagtactgcgctgatcaccggcataacggggcaggacggggcttatctggcgcaacttctcttggagaagggttatcgggtggtgggcgcattccgccgggcaagcatggtgaatacggctcgtctggacgcccttggtatagcggagcacgtagagctggtgccgttcgatctgacggaccacggcaacatgcggcgggtaatcgaggcagtggcgccggacgaagtgtacaacctggcggcccagagcttcgtcggggtgtccttcgagcagccggtgacgaccggcgagatcacgggggtgggggtggtgaggctcctggaggcgatccgggaggtgaacccggagatccgcttctaccaggcttccacgagcgagatgttcggcaaggcgcgggagactccacagaacgagacgacgcccttccatccccgcagcccctacgcggcctcgaagctctacgcccactggacggccgtgaactaccgggaagcctacgggatgcacgcctcctcgggcatcttgttcaaccatgagagcccgctcaggggtgtggagttcgtgacgcgcaagatctccctgggcgccgcccgcataaagtacggcttgcaggagaagctcacgctcggaaacctcgaggctaggcgcgactgggggtatgcgaaggagtacgttgaggcgatgtggttgatgctgcaacagccggaagccgaggattatgtcgttgctaccggcgagagccactccgtgcgggagttcgtcgagacggcttttgaggtggcagggctagactgggagaggtatgtggttactgatcccgcctttctgcgcccggccgaagtggacttcctgctgggagacccctccaaggcaaagagcaaactcgggtgggagcccagaaccacgtttagggagttggttgagatcatggtggaggcagatctgcggcgggcggcgttcgaggcccgccacggccgggagatgttggagatccggtag

SEQ ID NO: 104478 - protein, 334 aa, Rubrobacter xylanophilus DSM 9941
MSSTALITGITGQDGAYLAQLLLEKGYRVVGAFRRASMVNTARLDALGIAEHVELVPFDLTDHGNMRRVIEAVAPDEVYNLAAQSFVGVSFEQPVTTGEITGVGVVRLLEAIREVNPEIRFYQASTSEMFGKARETPQNETTPFHPRSPYAASKLYAHWTAVNYREAYGMHASSGILFNHESPLRGVEFVTRKISLGAARIKYGLQEKLTLGNLEARRDWGYAKEYVEAMWLMLQQPEAEDYVVATGESHSVREFVETAFEVAGLDWERYVVTDPAFLRPAEVDFLLGDPSKAKSKLGWEPRTTFRELVEIMVEADLRRAAFEARHGREMLEIR

SEQ ID NO: 104479 - DNA, 1113 bp, Cytophaga hutchinsonii ATCC 33406
  CDS (1)..(1113): transl_table=11
atgaagaaagcattaattacaggagtaacgggtcaggatggcgcttatttgagcgagtttttattgaaaaaaggatacgaagttcacggcgttaaaagaagatcttcattgtttaacacagatcgtatagatcatttatatgtagatcagcatgaaaaaaatgtaaaattcaagttacattatggtgatttaacagattctaccaatttaatccgcattatccaggaagttcagccggatgaaatatataatttaggagccatgtctcacgtaaaagtgagctttgatacgccggaatatactgccaatgcagatggtatcggaacactgcgtatccttgaagcaatccgtattttaggtttggaaaaaaagactaaaatctatcaggcttctacatctgaactttacggtttggtacaggaagttccgcaaaaagaatcaactcctttctacccgcgttctccttatgctgttgcgaaaatgtatgcatactggatcacggttaactatagagaagcatataacatgtttgcctgtaacgggattttgtttaaccacgaatctccattacgtggagaaacatttgttacaagaaaaattacacgtgccgtagcacgtattgctttaggtgcacaggataaagtttacttaggcaatcttgattcaaagcgtgactggggacatgcaaaagattatgtagaagcaatgtggttaatcctgcaacagaaaaaaccacaagactttgtaattgctacgggtgttaccacaacggttagagattttgttaaaatggcgtttgcccgtgttggtatcgaagtagaatttaaaggcagtggcgtaaaagaaacagctgttgttaaatcttgcaaaaacaaagagtttcaattaaaaaaaggaactgttgttgttgcagtagataaagcctatttcagaccaactgaagttgatttgctgatcggagatccttccaagtgtaaaaagattttaaagtggaaaccgaagtacaaccttgctatgcttgtaaacgaaatggttgacgcagatgtgcaattattcaaaaaagacgaataccttaagaaaggtggatttaaaacattaagtcaatttgaatag

SEQ ID NO: 104480 - protein, 370 aa, Cytophaga hutchinsonii ATCC 33406
MKKALITGVTGQDGAYLSEFLLKKGYEVHGVKRRSSLFNTDRIDHLYVDQHEKNVKFKLHYGDLTDSTNLIRIIQEVQPDEIYNLGAMSHVKVSFDTPEYTANADGIGTLRILEAIRILGLEKKTKIYQASTSELYGLVQEVPQKESTPFYPRSPYAVAKMYAYWITVNYREAYNMFACNGILFNHESPLRGETFVTRKITRAVARIALGAQDKVYLGNLDSKRDWGHAKDYVEAMWLILQQKKPQDFVIATGVTTTVRDFVKMAFARVGIEVEFKGSGVKETAVVKSCKNKEFQLKKGTVVVAVDKAYFRPTEVDLLIGDPSKCKKILKWKPKYNLAMLVNEMVDADVQLFKKDEYLKKGGFKTLSQFE

SEQ ID NO: 104481 - DNA, 1131 bp, Rhodococcus sp. RHA1
  CDS (1)..(1131): transl_table=11
gtgttcccgacgggtctgagtagccctgcggtagcaaggattcgggaggccagttatcgtaggacagtccgatcgggcgatttatcgactagggagccgactttgaagcgggcactgatcaccggcatcacgggacaagacgggtcgtatctcgcggagctgctgctcgcgaagggatacgaggtgcacgggttgatccgccggtcctcgacgttcaacacctcgaggatcgagcacctctacgtcgacccgcacgaccctgccgccaagctgttcctgcactacggtgacctcagcgacggcgcccgcctggtgacactgctctcgcagatccagcccgacgaggtctacaacctcgccgcccagtcacacgtacgggtgagcttcgacgaacctgaacacaccgggaacaccaccggcatcggctctgtccggctcctcgaagccgtccgcctcgccggcctgaactgccggtactaccaggcctcgagctcggagatgttcggagcgaccccacccccgcagaatgaggacacccccttctacccacgctcgccctacggcgcggcgaaggtgtactcgtactgggtgacgcggaactaccgcgaggcgtacggcatgttcgcggtcaacggcatcctcttcaaccacgagtccccccggcgcggcgagaccttcgtgacacggaagatcacccgcgcagtggcacggatcaaggccggcgtcgaggaccacgtctacatgggcaacctggacgccatccgcgactggggctacgcccccgaatacgtcgagggcatgtggcggatgctgcaggccgaccaacccgacgactactgcctcgccaccgggggccgctactcggtgcgcgacttcctcaccgtggccttcgaacacgccggcctcgactgggaaaagcacgtccgcttcgacgaccggtacctgcgccccaccgaagtcgacgcattgatcggcgacgccagcaaggccgaggtgaagctcggctggaaggcccgggtccacacccccgagttggcgcggatcatggtcgacgccgacatccaggccctcgcgcacgaaggccggccctggatcgactccccggcacacccagactgggagatcctgtga

SEQ ID NO: 104482 - protein, 376 aa, Rhodococcus sp. RHA1
MFPTGLSSPAVARIREASYRRTVRSGDLSTREPTLKRALITGITGQDGSYLAELLLAKGYEVHGLIRRSSTFNTSRIEHLYVDPHDPAAKLFLHYGDLSDGARLVTLLSQIQPDEVYNLAAQSHVRVSFDEPEHTGNTTGIGSVRLLEAVRLAGLNCRYYQASSSEMFGATPPPQNEDTPFYPRSPYGAAKVYSYWVTRNYREAYGMFAVNGILFNHESPRRGETFVTRKITRAVARIKAGVEDHVYMGNLDAIRDWGYAPEYVEGMWRMLQADQPDDYCLATGGRYSVRDFLTVAFEHAGLDWEKHVRFDDRYLRPTEVDALIGDASKAEVKLGWKARVHTPELARIMVDADIQALAHEGRPWIDSPAHPDWEIL

SEQ ID NO: 104483 - DNA, 1029 bp, Trichodesmium erythraeum IMS101
  CDS (1)..(1029): transl_table=11
atgagtgaaaggaaacgagcgctaattactggtattacaggtcaagacggttcatatttagctgaacttttacttgagaaaaactatgaagttcatggtatcattagacgtagttctagctttaatacagataggatagagcatatatatcaagattctcattatccagatgctagattatttctccattatggagacttaactgatgggactactctacgtcgaattattgaagcagttaagccattagaaatatacaacttaggtgcccagtcccatgttagggtgagctttgattctccagagtatacggtagattcagtgggaatgggcactctacgtttactcgaagcaatacgagactatcaacaacgtactgggattgaagttcgtttttatcaagctggatcttcggaaatgtttggtaaagttcaagaaatacctcagaaagaaactacacctttttacccccgtagtccctattcttgtgctaaagtttatgcctactggcaaacaataaattatcgagagtcgtacaatctatttgcttgtaatggtatattattcaaccatgaaagtcctcgtcgaggtgagacttttgtaactcgtaaaattactcgtgctgtagctagaattttagcagataaacaaaaaaaactttatcttggtaatcttgatgctaaaagagattggggatatgcaaaggattatgttcgagctatgtggatgatgctacagcaggaagcaccagatgattatgtgattgctactaatgaaactcattctattaaagaatttctagaaatagcatttacttatgtaaatctagagtggcaagattatgtggagtttgaccctcgttatctacgtcctactgaggttgatttgttaattggtgattgtacaaaagcacgagaaaagttacattggaaaccatcagttacatttacggagttggtacatttgatggttgattctgatattaaggttttggaaaaagctgttattaatagtaatggttttgattaa

SEQ ID NO: 104484 - protein, 342 aa, Trichodesmium erythraeum IMS101
MSERKRALITGITGQDGSYLAELLLEKNYEVHGIIRRSSSFNTDRIEHIYQDSHYPDARLFLHYGDLTDGTTLRRIIEAVKPLEIYNLGAQSHVRVSFDSPEYTVDSVGMGTLRLLEAIRDYQQRTGIEVRFYQAGSSEMFGKVQEIPQKETTPFYPRSPYSCAKVYAYWQTINYRESYNLFACNGILFNHESPRRGETFVTRKITRAVARILADKQKKLYLGNLDAKRDWGYAKDYVRAMWMMLQQEAPDDYVIATNETHSIKEFLEIAFTYVNLEWQDYVEFDPRYLRPTEVDLLIGDCTKAREKLHWKPSVTFTELVHLMVDSDIKVLEKAVINSNGFD

SEQ ID NO: 104485 - DNA, 1155 bp, Synechococcus sp. CC9311
  CDS (1)..(1155): transl_table=11
atgtcagaattaagtcattgcaaaaaggcgctgatcaccggaattacaggccaagacggaagttatttagcggaattgctgctggagaagggatatgaggtgcatgggattaagaggcgtgcaagcagcttcaacaccaataggatcgaccatctctaccaagatccgcatgtggatgatccgcggttggtgctgcactacggagatttaacggatagcagcaatttgatccggatcattgagcaggtgcagccggatgaaatttataacctcggagcccaaagccatgtggcagtgagctttgaagcaccggaatacacagcgaatagtgatgcattaggtacgctgcgaatattagaagcggtgcggatgctggggctcacggagacaacgaggatctatcaggcgagcacgagtgagctgtatggcttggtgcaggagatgccgcaaaaggagagcacgccgttttacccacgcagtccctatggggtggccaagttgtatgcgtactggatcacggtgaattaccgggaggcttacgggatgtatgcctgcaatggggtgctgttcaaccacgagagccccaggcgtggtgaaacgtttgtgacgcgcaagatcacgcggggtttggcacggattgatgcgggtttagaggattgcctgtatatgggcaatctcgattcgctgcgggattggggacacgcccgggattatgtggagatgcagtggcgaatgctgcagcaggagggtccaccggaggattttgtaatcgccacggggcggcaggaaagcgtgcggcggttcattgaattaacggcactggaactgggctggggcgcgatcgagtgggaaggcaaggggttagaggaaacgggcaaacgcagcactggggaagtggtagtgcggattgatccgcgctatttccgtccagctgaagtggagacgctgctcggtgatcccgcgaaggccaagcagaagctgggctggacgccaacgacaacgctggaagagttagtggcggagatggtggcgactgacaaggaggaggccaagaaagaggcttatttgaaattgaaaggattcaatgtggtgggctcgatggaaaatccaccaacgaatcctgatgccgtcaaggccgctggaggcaaggcgtga

SEQ ID NO: 104486 - protein, 384 aa, Synechococcus sp. CC9311
MSELSHCKKALITGITGQDGSYLAELLLEKGYEVHGIKRRASSFNTNRIDHLYQDPHVDDPRLVLHYGDLTDSSNLIRIIEQVQPDEIYNLGAQSHVAVSFEAPEYTANSDALGTLRILEAVRMLGLTETTRIYQASTSELYGLVQEMPQKESTPFYPRSPYGVAKLYAYWITVNYREAYGMYACNGVLFNHESPRRGETFVTRKITRGLARIDAGLEDCLYMGNLDSLRDWGHARDYVEMQWRMLQQEGPPEDFVIATGRQESVRRFIELTALELGWGAIEWEGKGLEETGKRSTGEVVVRIDPRYFRPAEVETLLGDPAKAKQKLGWTPTTTLEELVAEMVATDKEEAKKEAYLKLKGFNVVGSMENPPTNPDAVKAAGGKA

SEQ ID NO: 104487 - DNA, 978 bp, Hyphomonas neptunium ATCC 15444
  CDS (1)..(978): transl_table=11
atgacgcgtaagaccgctttcatcacaggcataaccgggcaggacggggcttatctgtccgcgttgctgctaagtaaaggctaccgggtgaccggacttgttcgcaggtcttcaacggctgaaatcaacaacttgcgcctgcgctggcttggtatcgagaacgatgtcgaattgatcgacggcgacctgacggatctttctggactgttgcgttctgtcaaagaaatccggcccgatgaaatttacaacctgggtgcccagtcctttgtgaaatcgtcttggcagcagcccatcctgacggggcaggtgacggggcttgcggtcaccaatattcttgaggctatgcgcatcgaagcgccggaggcgcgtctctatcaggcatcgtcctccgagatgtacggccttatccaagaagacatgcagtcggagacgacaccattctatccccggtcgccttacgccgtcgctaagctgtatgggcattggatcaccgtgaactatcgcgagagcttcggtttgcacgcttccagcggtatcttgttcaaccacgaaagcccgctgcgcggaatcgagttcgtgacacgaaaagtgactgatggagttgcccgaatcaaacttggcctctccagcgagcttcgccttggaaacatcgatgccaagcgcgattggggccacgcaaaggattatgttcgggcaatgtggttgatgttgcagcaggaaacgccagacgattacgtggtggccaccggtgtaaccacgaccgttcgtgatatgtgccttatcgcgttcgatcatgttggccttgagattgacaagcacttagtgatcgaccccgcactttttcgtccggccgaggtggacgtgttgcttggcaatccggccaaggcaaaggcaaaattggggtgggagccggaaatttcgcttgaaaagctcatccgtgagatggtcgatgcggatatggaacggctgaagccgtaa

SEQ ID NO: 104488 - protein, 325 aa, Hyphomonas neptunium ATCC 15444
MTRKTAFITGITGQDGAYLSALLLSKGYRVTGLVRRSSTAEINNLRLRWLGIENDVELIDGDLTDLSGLLRSVKEIRPDEIYNLGAQSFVKSSWQQPILTGQVTGLAVTNILEAMRIEAPEARLYQASSSEMYGLIQEDMQSETTPFYPRSPYAVAKLYGHWITVNYRESFGLHASSGILFNHESPLRGIEFVTRKVTDGVARIKLGLSSELRLGNIDAKRDWGHAKDYVRAMWLMLQQETPDDYVVATGVTTTVRDMCLIAFDHVGLEIDKHLVIDPALFRPAEVDVLLGNPAKAKAKLGWEPEISLEKLIREMVDADMERLKP

SEQ ID NO: 104489 - DNA, 1092 bp, Rhizobium leguminosarum bv. viciae 3841
  CDS (1)..(1092): transl_table=11
gtgaaaaacgaaaataaagtcgcgctgattaccggtataacgggtcaggacggtgcgtatttggccgaattgctcctggagaagggctatattgttcacggcctcaagcgacgctcatcgtctttcaacaccagtcgcatcgagcatctatacgaggatccccatgtcgaaaatcctcgctttattctgcattacggggacatgaccgattcaacgaatctcatccgcgtcgttcaggaaacgcagccggacgagatctacaatctcgccgcacagagccacgttcaagtctctttcgagacgccggaatatacggctaacgccgatggaaccggcacccttcggctccttgaagcaattcgcctcctggggctgaccaagaagacgcgcttctatcaagcgtccacctcagagctctatggcaaagttcaggaagtcccgcagagcgaaacgacacctttctacccccgatccccctacgcggcggccaagctctacgcctattggattgtggtcaattatcgcgaggcatatggcatgcacgcctcgaacggcattttgttcaatcatgaaagcccgatccgcggcgaaacattcgtgacacgtaaaatcacccgggcggcggctgcgatccatcttgggctgcaggaaaggctctatctcggcaacttggacgccaagcgcgactggggacatgcacgagaatatgtccgtggcatgtggctgatgctgcaacaggacgaaccggaggactatgtccttgcgaccggcgaaacgcactcggttcgttcctttgtcgacaaagcctttgccaaggtgggcatgccgattgattggcgtgggaacggggttgaggaaaagggatacgataagacatccggccggtgtgtggtggagatcgatccagcttacttccgtccgactgaagttgatcttctgatcggcgatccgacgaaggcgcacacgaagcttggctggaaacatgagaccagtcttgatcagctggttgcggagatggttcgcgaggatctgaaagtcatggcacgaaacgtgccgtcggtcggcgcaaccaaaggttttgcctatgcctga

SEQ ID NO: 104490 - protein, 363 aa, Rhizobium leguminosarum bv. viciae 3841
MKNENKVALITGITGQDGAYLAELLLEKGYIVHGLKRRSSSFNTSRIEHLYEDPHVENPRFILHYGDMTDSTNLIRVVQETQPDEIYNLAAQSHVQVSFETPEYTANADGTGTLRLLEAIRLLGLTKKTRFYQASTSELYGKVQEVPQSETTPFYPRSPYAAAKLYAYWIVVNYREAYGMHASNGILFNHESPIRGETFVTRKITRAAAAIHLGLQERLYLGNLDAKRDWGHAREYVRGMWLMLQQDEPEDYVLATGETHSVRSFVDKAFAKVGMPIDWRGNGVEEKGYDKTSGRCVVEIDPAYFRPTEVDLLIGDPTKAHTKLGWKHETSLDQLVAEMVREDLKVMARNVPSVGATKGFAYA

SEQ ID NO: 104491 - DNA, 1119 bp, Rhizobium leguminosarum bv. viciae 3841
  CDS (1)..(1119): transl_table=11
atgtctaaagtcgctctcataaccggcgttaccggtcaggacggttcctatctagcggaatttcttctcgaaaagggatacaccgttcatggaatcaagcgacgcatgagttcgttcaacacgcaacgcgtcgatcatatttaccaggatccacacagcaagaatatgttgttcaagctgcattacggggatctgacggatacaagcaatctcatccgcatcatgcaagagacgcagccggacgaggtctataatctcggcgcccagagccatgttgccgtaagcttcgagagcccggaatatacaggcgataccgacgcactcggaacactccgcctgctggaagccatacgcatactgggatttgaaaagaaaacgcgattttatcaggcgagtacgagcgaactctacggacttgtacaagaaacccctcagaaggaaactacgccattctatccgcgtagtccctacgcggttgcgaagctctatgcttactggatcaccatcaactatcgcgaatcctatggcttatacgcgtgcaatggaatcctattcaatcatgagagccctcgtcgtggcgaaacgtttgtgacgagaaaaatcacgcgtggtctttccaatatcgcgcaaggtcttgaagattgcctgtacatgggcaatctcgatgcgttgcgtgattggggtcacgccaaagactacgttcgcatgcaatggatgatgcttcagcaggatcagccgcgggatttcgtaatcgcgagcggcaaacaatacagcgtacgtcagttcatccaatgggctgcagaggatctcggaattacccttcgcttcgagggagaaggcttgaatgagcgagggatcgttgagaccgtcacaggcgacaaggcccatggcgtgaaacccggctccgtagtcgtacagatcgatcctcgctattttcgtccggccgaagtcgaaacacttctcggagatcctacgaaggcccgcgaactgctcggctgggttccggaaatttctgcgagagaaatgtgccgggaaatggtgatgcatgatttggggcatgcacagagacatgccttgcttaagcagcatggcttcgatgttaacgtaagtgccgagtga

SEQ ID NO: 104492 - protein, 372 aa, Rhizobium leguminosarum bv. viciae 3841
MSKVALITGVTGQDGSYLAEFLLEKGYTVHGIKRRMSSFNTQRVDHIYQDPHSKNMLFKLHYGDLTDTSNLIRIMQETQPDEVYNLGAQSHVAVSFESPEYTGDTDALGTLRLLEAIRILGFEKKTRFYQASTSELYGLVQETPQKETTPFYPRSPYAVAKLYAYWITINYRESYGLYACNGILFNHESPRRGETFVTRKITRGLSNIAQGLEDCLYMGNLDALRDWGHAKDYVRMQWMMLQQDQPRDFVIASGKQYSVRQFIQWAAEDLGITLRFEGEGLNERGIVETVTGDKAHGVKPGSVVVQIDPRYFRPAEVETLLGDPTKARELLGWVPEISAREMCREMVMHDLGHAQRHALLKQHGFDVNVSAE

SEQ ID NO: 104493 - DNA, 981 bp, Solibacter usitatus Ellin6076
  CDS (1)..(981): transl_table=11
atggcctccaaatgcgctctgcttacagggattaccggccaggacggctcgtatctttcggagtggctcctttcccagggctacgacgtgcacggaattgtacgccgggtggccctggaggacccggaccaccggctcagccggttgaaagaggtccgcgaacggctgcacctgcacgcggcctcgctggaaagctacggcagcatccaccgggtggttcacgaggttcaacccgatgaatgctatcaccttgcggctcaaagctttgtgagctattcgtttgacgacgagttctccactcttaatgccaatatcaacggcacacactacctgctctcggcgctgaaggcgctgaccccggattgccggttctacttcgcgggctcgagcgaaatgttcgggatggcggaaaccgtgccgcagaacgaggatacgcggtttcatccgcgctcttcttatggcattagtaaggttgccggcttcgatttgacgcgcaactaccgggaagcatatgggatgcatgcttccagcggaatcctgttcaaccacgagtcgccacgccgcggcttcgagttcgtgacgcggaagatcgctgccggagtggcccggatcgtagcgggcaaaagcagggaattgcgtctggggaacctggatgcgaagcgcgattggggacacgcgcgagaatacgtgaccgcgatgtggatgatgttacaacagaccacgccggacgactatgttgtggcgaccggcgactgccactcggttcgcgagttcgcggagctcgcgttttcgcacgtgggactggactacacgaagtacatcaccaccgatccgcaactctttcgtccggccgaggtcaacttgttgaagggggatgccgccaaggcgcagcgcgtactcggctggcgccaccgcgtgacttttccggagttggtgcgggagatggtggacgaggattgccgcgcgctggggatcgggtag

SEQ ID NO: 104494 - protein, 326 aa, Solibacter usitatus Ellin6076
MASKCALLTGITGQDGSYLSEWLLSQGYDVHGIVRRVALEDPDHRLSRLKEVRERLHLHAASLESYGSIHRVVHEVQPDECYHLAAQSFVSYSFDDEFSTLNANINGTHYLLSALKALTPDCRFYFAGSSEMFGMAETVPQNEDTRFHPRSSYGISKVAGFDLTRNYREAYGMHASSGILFNHESPRRGFEFVTRKIAAGVARIVAGKSRELRLGNLDAKRDWGHAREYVTAMWMMLQQTTPDDYVVATGDCHSVREFAELAFSHVGLDYTKYITTDPQLFRPAEVNLLKGDAAKAQRVLGWRHRVTFPELVREMVDEDCRALGIG

SEQ ID NO: 104495 - DNA, 1029 bp, Solibacter usitatus Ellin6076
  CDS (1)..(1029): transl_table=11
atgaagaaggcattgatcacaggtatcaccggccaggatggctcgtttttggccgagttcctcctcgaaaaaggctacgaagttcacgggctcgtccgtcgatcgtcaacgtttaccaccgggcgtctcgagcacctgtacatcgatccccacactcctcatgcccggctcctcctgcactacggcgacttgagcgacggaggaggaattcggcggctcctggaacagattcagccggacgaagtctacaatctcgcagcccagtcccacgtacgcgtcagcttcgaccaggccgagtttacggctgatgtggtcggtcttggagccttgcggattttggaagccgtccgaaatgcggcggaagcaggcaataaccccatccgcttttatcaggctggctcgtcggagatgttcggcgccgcggcgcctcctcagaacgaagccactcccttttacccccgcagtccgtacgctgcctccaaagtcgcggcacactggtacgccatcaattaccgcgagtcgtatggcctcttcattgcgaacggtattctctttaaccatgaatccgaacggcgcggcgagactttcgtaactcgcaaaatcacccgtgctctgacgcgcattcacctcggcctgcaagacaagctctacctcggaaatcttgatgcacgccgcgattggggtcacgcagcggactatgtgcgcgctatgtggctcatgctgcagcaggaccggcccgacgactacgtgatcgccacaggggaatcttactcggtgcgggaattcctcgaacgtgcggccgctcatcttggaatggactggcagaaggtcgtcgaacaggatccacgctacctgcgccccaccgaagtggatttcctgaaaggtgatccctccaaggcgcgcgaacaactcggttggaagccggaggtcacgttcgatcaattggtgaagcgcatggtcgagcacgatctggagttggcgcaccgggagcaattgctggcggcccgtgtgagggttgggcatgcatga

SEQ ID NO: 104496 - protein, 342 aa, Solibacter usitatus Ellin6076
MKKALITGITGQDGSFLAEFLLEKGYEVHGLVRRSSTFTTGRLEHLYIDPHTPHARLLLHYGDLSDGGGIRRLLEQIQPDEVYNLAAQSHVRVSFDQAEFTADVVGLGALRILEAVRNAAEAGNNPIRFYQAGSSEMFGAAAPPQNEATPFYPRSPYAASKVAAHWYAINYRESYGLFIANGILFNHESERRGETFVTRKITRALTRIHLGLQDKLYLGNLDARRDWGHAADYVRAMWLMLQQDRPDDYVIATGESYSVREFLERAAAHLGMDWQKVVEQDPRYLRPTEVDFLKGDPSKAREQLGWKPEVTFDQLVKRMVEHDLELAHREQLLAARVRVGHA

SEQ ID NO: 104497 - DNA, 1110 bp, Magnetococcus sp. MC-1
  CDS (1)..(1110): transl_table=11
atgaagtgggagagggaaatcttgaaaaaacgtgcattaatcaccggtgttaccggacaggatggggcctatctcgccgaatttctgctgcaaaaggggtatgaggtgcatggcattaaacggcgcgcctccctctacaataccgagcgggtggatcacctttaccaagatccacaagtggcctcgcgggattttgtgctgcactatggggatctctccgactcaaccaatctcatccgtatcatccaaaccacccaacccgacgaaatttacaatctggccgcccagagccatgtggcggtctcgtttgagacccccgaatataccgccaatgtggatgccctgggcaccctgcgtatcctggaggctatccgtatcttggggttggagaaaaagagccgtttttaccaagcctcgacctcagagctgtttggtaaggtgcaggagatcccccaaaaggagaccacccccttctatccgcgctcgccctatgccgtggctaaactatatgcctattggatcaccgttaactatcgtgaagcctacggtatttttggttgtaacggcattttgtttaaccatgaatcccccaagcgtgggggcacctttgtgacccgtaaaattacccgtgccatgtgccgtattaagctgggtatgcaagattgcctctaccttggcaacatgaacgccaaacgggattggggccacgctaaagattatgtggagatgcagtggttgatgctgcaacaggatgagccggtggattatgtcattgccaccggggagcaatattcggtgcgggcctttgtcgaagcggtgggcaaagagttggagatgtccatacgctggcagggtgagggcattgacgaagtgggcattgacgaaaccagtggcaaaaccgtggtacgggttaatccccgttatttccgccccaccgaggttgaaaccctgttgggagaccccagcaaagcccgccgtgaattgggctggcagccccgcatcacctttcaagagttggtggaagagatggtggccgaggatcttaaattggcccagcgggaccaactggtgcagcagggtggttatgaggtctatcccgattttgaatga

SEQ ID NO: 104498 - protein, 369 aa, Magnetococcus sp. MC-1
MKWEREILKKRALITGVTGQDGAYLAEFLLQKGYEVHGIKRRASLYNTERVDHLYQDPQVASRDFVLHYGDLSDSTNLIRIIQTTQPDEIYNLAAQSHVAVSFETPEYTANVDALGTLRILEAIRILGLEKKSRFYQASTSELFGKVQEIPQKETTPFYPRSPYAVAKLYAYWITVNYREAYGIFGCNGILFNHESPKRGGTFVTRKITRAMCRIKLGMQDCLYLGNMNAKRDWGHAKDYVEMQWLMLQQDEPVDYVIATGEQYSVRAFVEAVGKELEMSIRWQGEGIDEVGIDETSGKTVVRVNPRYFRPTEVETLLGDPSKARRELGWQPRITFQELVEEMVAEDLKLAQRDQLVQQGGYEVYPDFE

SEQ ID NO: 104499 - DNA, 981 bp, Nocardioides sp. JS614
  CDS (1)..(981): transl_table=11
atgcccaccgcgctcatcaccggcatcaccggccaggacggcctctacctggccgagttcctgctcgccaaggggtacgacgtccatggcgtgatccgcgggcagaacaaccccaagcgcgacctcgtcgaacagctgctgccggacgtccggctccacaacggcgatctcaccgacatgtccagcctgatccgggcgctgcgcgactcctgccccgacgaggtctacaacctgggcgcggtctcgttcgtggcctactcctgggagaacgcccagctgaccaccgacgtcaccgccaagggtgtgctgaacatgctggaggcggtgcgcctgcacaccggggacgagccggaggagatccggttctaccaagcgtcgagctcggagatgttcggcaaggtccaggaggtgccccagcacgagcggaccctgctgtggccgcgctccccgtacggcgtcagcaaggtgttcgggcactacatgacgatcaactaccgcgagtcctacggcatgcacgcctcctccgggatcctgttcaaccacgagtcgccgcgccgcggcccggagttcgtgacccgcaagatcagtgaggcggtcgcccggatcaagttgggcgtgcagaaggagctggtgctcggcaacctggacgccgagcgggactgggggttcgccggcgactacgtcgaggcgatgtggttgatgttgcagcagccggcggccgacgactacgtgatcgcgaccggcgaggcgcactcgatccgcgacttcctcgacgccgcgttcgcgcacatcggcatcgacgactgggcgccctacgtgcgccaggacccgcgcttcatgcggcccgcggaggtcgaccacctgatcggcgacgccagcaaggcccgcgaggtgctcggctggaagccgaaggtctccttccacgagctggtcgccctgatggtcgacgccgacctcgcggccacccagcagggctggtag

SEQ ID NO: 104500 - protein, 326 aa, Nocardioides sp. JS614
MPTALITGITGQDGLYLAEFLLAKGYDVHGVIRGQNNPKRDLVEQLLPDVRLHNGDLTDMSSLIRALRDSCPDEVYNLGAVSFVAYSWENAQLTTDVTAKGVLNMLEAVRLHTGDEPEEIRFYQASSSEMFGKVQEVPQHERTLLWPRSPYGVSKVFGHYMTINYRESYGMHASSGILFNHESPRRGPEFVTRKISEAVARIKLGVQKELVLGNLDAERDWGFAGDYVEAMWLMLQQPAADDYVIATGEAHSIRDFLDAAFAHIGIDDWAPYVRQDPRFMRPAEVDHLIGDASKAREVLGWKPKVSFHELVALMVDADLAATQQGW

SEQ ID NO: 104501 - DNA, 954 bp, Nocardioides sp. JS614
  CDS (1)..(954): transl_table=11
atgacccgaccgctgcgcgccttcgtcaccgggatcagcggccaggacggccgctacctcgccgagcggctcctcggcgagggcgtcgaggtgcacgcgctcgcgcacgccctcgagccgctccccgaccttcccggcgtcgagctgcaccgcggcgacctcaccgccgtcgaggaggtgcgcgcgctcctggtcgacgtcgccccggacgaggtctacaacctggctgcgctcagctcggtcgcccgctcttgggaggagccagacctgaccgcccgggtcaacggcctggccgccgcgggcctgctcgagtcggccctccaggtccaggacaagctcggccgcccggtgcgcttcgtgcaggcctcgagcgccgagatcttcggccagcccgaccgctcgccccaggacgagtccacgccactgcgaccggtcaacccgtacggcgcggccaaggcgtacgcccacctgatggtcgacgtgtaccgccgccgcgacctgcacgcggtcagcgcgatcctctacaaccacgagtcgccgcaccgcccgcccgagttcgtcacccgcaagatcacctcgaccgtcgccgccatcgcgcacggccgcgccggcaccctggccctcggcaacctggacgcccgccgcgactggggctgggctcccgactacgtcgacgccatggtccgcgccgtccgcgccgacgtcgctcgcgactacgtggtcgccaccggcgtctcccgctcggtgcgcgacttcgtcgccgccgccttcgcccgcgccggcatcgaggactggcagcacctggtcacggtcgaccccgagttcgtgcgccccgccgacccgaccgagctggtcggcgacgccaccctcgcccgcgagaccctcggctgggcgccgacggtggagttcgacgagatcgtcggccggatggtcgacgccgacctcgccacctga

SEQ ID NO: 104502 - protein, 317 aa, Nocardioides sp. JS614
MTRPLRAFVTGISGQDGRYLAERLLGEGVEVHALAHALEPLPDLPGVELHRGDLTAVEEVRALLVDVAPDEVYNLAALSSVARSWEEPDLTARVNGLAAAGLLESALQVQDKLGRPVRFVQASSAEIFGQPDRSPQDESTPLRPVNPYGAAKAYAHLMVDVYRRRDLHAVSAILYNHESPHRPPEFVTRKITSTVAAIAHGRAGTLALGNLDARRDWGWAPDYVDAMVRAVRADVARDYVVATGVSRSVRDFVAAAFARAGIEDWQHLVTVDPEFVRPADPTELVGDATLARETLGWAPTVEFDEIVGRMVDADLAT

SEQ ID NO: 104503 - DNA, 1023 bp, Nocardioides sp. JS614
  CDS (1)..(1023): transl_table=11
gtggcgaagacggcgttgatcacggggatcacggggcaggacgggtcctacctggccgagctgttgctggccaagggctacgtggtgcacgggctgcggcggcggtcgtcgacgttcaacagctcgcggatcgagcatctctaccaggacccgcacgacccggacacgcggttgttcctgcactacgcggacctcacggatgccgcgaacctgatccggctgctgcaccggatccaaccggacgaggtctacaacctcgccgggcagtcgcacgtgggcgccagcttcgacgagcccgagcacacggcgatcacgacgggcgtcggcccgctgacgctgctggaggcgatccgcacggtcgggatcgactgccgcttctaccaggcatccagctcggcgatgtacggcgccgcgaccggggcgcaggacgagtgctcgccgttccgtccgctctcgccctacggcgccgcgaagctgcacgcgtactggtcgacggtgacctatcgcgagggctacgggatgttcgcggtcagcggcatcctcttcaaccacgagtcgccccggcgcggagagaccttcctgacccggaaggtgacccgtgcagtggcacggatccaggcggggctcgatgacttcctctatctcgggaacctcgagcccacccgcgactggggctacgccccggagtacgtcgaggggatgtggcggatgctgcaggccgacgagccggacgactacgtgctggcgaccggcacgtcgtacagcgtccgcgacttcgtggtcgcggccttcgagcacgccggcctcgactgggagaagcacgtgcgacgcgacgagcgctacgtgcggccgaacgagaacccgtcgctggtcggcgacgcgtccaaggccgaggcgagactcggctggaaggcgcacgtgaacgcggacgagctcgtgcggctgatggtcgacgccgacgtccaggcagtggccagcgagggccggccctggatcgacaccccgccgccgagcgtgggctga

SEQ ID NO: 104504 - protein, 340 aa, Nocardioides sp. JS614
MAKTALITGITGQDGSYLAELLLAKGYVVHGLRRRSSTFNSSRIEHLYQDPHDPDTRLFLHYADLTDAANLIRLLHRIQPDEVYNLAGQSHVGASFDEPEHTAITTGVGPLTLLEAIRTVGIDCRFYQASSSAMYGAATGAQDECSPFRPLSPYGAAKLHAYWSTVTYREGYGMFAVSGILFNHESPRRGETFLTRKVTRAVARIQAGLDDFLYLGNLEPTRDWGYAPEYVEGMWRMLQADEPDDYVLATGTSYSVRDFVVAAFEHAGLDWEKHVRRDERYVRPNENPSLVGDASKAEARLGWKAHVNADELVRLMVDADVQAVASEGRPWIDTPPPSVG

SEQ ID NO: 104505 - DNA, 1086 bp, Azoarcus sp. BH72
  CDS (1)..(1086): transl_table=11
atgaaaaaagtcgcgttgatcacgggtgtaaccggccaggacggctcctatctcgccgagttgctgttggccaagggctatgaggtccacggcatcaagcgccgcacgtcgctcttcaacaccgaccggatcgaccatctgtatcaggacccgcacgaagaagggcgccgcttcattcttcactacggcgacatgacggactcatccagcctgatccgcatcatccagcaggtgcagccggacgaaatctacaacctcgcggcgcagtcccatgtcgcggtctcgttcgaagaacctgagtacaccgccaactcggacgcgcttggcgccttgcgcatccttgaggcgatccgcatcctcggcctggagaagaagtcccgcttctatcaggcgtcgacctccgagttgtacggcttggtccaggagatcccgcagaaggagacgacgccgttctacccgcggtcgccctatgccgtcgccaagatgtatgcgtactggatcacggtgaattaccgcgaggcctatgggatctatgcctgcaacggcatcttgttcaaccacgagagcccggtgcggggtgaaacctttgttacccgcaaaatcacccgcgcgctcgcgcgcatcaaactcgggctgcaagactgccttttcctcggcaacctgaacgcgaagcgcgattggggccatgccaaggactacgtggagatgcagtggatgatgctgcagcaggacaagccggaggatttcgtcatcgccacgggtgtgcaatacagcgtgagggagttcgtcgacgcggctgcgcgcgagatcggcatccgcatcacctggaagggcgaaggggtggacgagaaggggtatgacgaaagcggccgctgcatcgtcgcagtcgatgagcgctacttcaggcctaccgaggtcgagacgctgctgggcgatgcctccaaggcccggcgcctgcttggttggacaccacggatttcgtttagcgaacttgtgtcggagatgatgcgcgaagacatgaaggcggcggagcgtgatgaactcgtcaagacgcatggctattcggcctatgactaccacgaataa

SEQ ID NO: 104506 - protein, 361 aa, Azoarcus sp. BH72
MKKVALITGVTGQDGSYLAELLLAKGYEVHGIKRRTSLFNTDRIDHLYQDPHEEGRRFILHYGDMTDSSSLIRIIQQVQPDEIYNLAAQSHVAVSFEEPEYTANSDALGALRILEAIRILGLEKKSRFYQASTSELYGLVQEIPQKETTPFYPRSPYAVAKMYAYWITVNYREAYGIYACNGILFNHESPVRGETFVTRKITRALARIKLGLQDCLFLGNLNAKRDWGHAKDYVEMQWMMLQQDKPEDFVIATGVQYSVREFVDAAAREIGIRITWKGEGVDEKGYDESGRCIVAVDERYFRPTEVETLLGDASKARRLLGWTPRISFSELVSEMMREDMKAAERDELVKTHGYSAYDYHE

SEQ ID NO: 104507 - DNA, 1080 bp, Nostoc punctiforme PCC 73102
  CDS (1)..(1080): transl_table=11
atgacgcaacagaagcgagcgttgattactggtattactggtcaagatggttcatatctaagtgagtttttactagaacaaggttatgaggttcatggcatcattcgccggacttctaccttcaacacagaccgcatcgatcacatttacgaagacccccacaaacagggagtacggttgtttcttcactatggtgacttgacagatggtacgacgttgcgacgtattttagaagaagtcaaaccagtagagatttacaacctcggcgctcaatcccatgtcagagtaagctttgattcaccagaatatacggtggatgctgtaggaatggggacgctgcgtctgttggaagcaattcgagactaccaacaccggactggaattcaggtgcgattttaccaggcgggttcttcagaaatgtatggtttagtacaagcaataccgcaaagtgagacaacgcccttttatccccgcagtccttacgcctgtgcaaaagtttacgcccactggcaaactgtaaattatcgtgagtcctacgatttgtttgcttgtaacggcatactttttaaccatgagtcaccaagacgtggtgaaacctttgtaacccgcaaaattactagagcagttgctggtatagttgctggtaagcaaaaaaagatttacatgggtaatctagactcaaagcgagattggggctatgcgaaggattacgtaaaagcaatgtggttgatgttgcagcaagaccagccagacgattatgtaattgctactggtgaaacccattcagtgcgagaatttttggaactagcatttagttacgtaaatctcaattggcaagattatgtagagtttgatgagcgttacctccgtccatctgaggtagatttattgattggcgatgctaccaaagcacgtcagaatttgggctggaaaacatcagtaacctttaaagaattagtttccttaatggtagaagcagacttacaagcattgggtcacacttcacccaatggaaatggttcgcaatttccattagatattgccactgttcgtcaagaactcggcgctttgcacttctga

SEQ ID NO: 104508 - protein, 359 aa, Nostoc punctiforme PCC 73102
MTQQKRALITGITGQDGSYLSEFLLEQGYEVHGIIRRTSTFNTDRIDHIYEDPHKQGVRLFLHYGDLTDGTTLRRILEEVKPVEIYNLGAQSHVRVSFDSPEYTVDAVGMGTLRLLEAIRDYQHRTGIQVRFYQAGSSEMYGLVQAIPQSETTPFYPRSPYACAKVYAHWQTVNYRESYDLFACNGILFNHESPRRGETFVTRKITRAVAGIVAGKQKKIYMGNLDSKRDWGYAKDYVKAMWLMLQQDQPDDYVIATGETHSVREFLELAFSYVNLNWQDYVEFDERYLRPSEVDLLIGDATKARQNLGWKTSVTFKELVSLMVEADLQALGHTSPNGNGSQFPLDIATVRQELGALHF

SEQ ID NO: 104509 - DNA, 990 bp, Nostoc punctiforme PCC 73102
  CDS (1)..(990): transl_table=11
atgactaaaacagccctagttacaggaataactggtcaagatggctactatctcagccatttgctcctcaaccgtggttatcgagttgtaggattagtacccccgcatcgacaacctaatttgacaaagctgggaacactggcgaatcaggtagaaatttttacggttgacttgagggatagtagggcgctattgacagcagttgagcaactacgtcctcaagaaatttataatttggcggctcccagttttgtacccgactcctggaacgacccattaggaaccctggatttgatcactggtacagctaccagacttttggaagctgtacgacaggttggtttgtctaccagattttatcaagccagcagttcggaaatgtttggcgatgtatttagttcgcctcaagatgaagaaacgccttttcgtcccaaaaatccttatgctgcggccaagatgcacgcccactggacgatggtgcatcacagacagcgctatggattatttgcctgtagtggaattctatataaccatgagtctcctctacgcgcacctcagtttgtaacccgaaaagtttctttagcagccgcatcgattaaattgggtttaactgacaccttagaaatgggtaatttagatgccaaacgtgattggggctttgctggagattacgtagaagctatgtggctgatgttgcaagtcgatgaaccagaagaatatgtgattggcactggtaaactgcacagtgttagagatttagttgccacagcttttgagtctgtcggattggattggacgcgctatatagttttaaataccagtttattgagacaagatgagcattttcaactagtagctgaccccagtaaagctaaaagaaatcttggctgggaaccccaagtgagctttgaagaacttttagaaaaaatggtaaaaacagatttagagcggttacaaagcggtgccatcgcgcctttaacccaagtgtaa

SEQ ID NO: 104510 - protein, 329 aa, Nostoc punctiforme PCC 73102
MTKTALVTGITGQDGYYLSHLLLNRGYRVVGLVPPHRQPNLTKLGTLANQVEIFTVDLRDSRALLTAVEQLRPQEIYNLAAPSFVPDSWNDPLGTLDLITGTATRLLEAVRQVGLSTRFYQASSSEMFGDVFSSPQDEETPFRPKNPYAAAKMHAHWTMVHHRQRYGLFACSGILYNHESPLRAPQFVTRKVSLAAASIKLGLTDTLEMGNLDAKRDWGFAGDYVEAMWLMLQVDEPEEYVIGTGKLHSVRDLVATAFESVGLDWTRYIVLNTSLLRQDEHFQLVADPSKAKRNLGWEPQVSFEELLEKMVKTDLERLQSGAIAPLTQV

SEQ ID NO: 104511 - DNA, 1119 bp, Burkholderia vietnamiensis G4
  CDS (1)..(1119): transl_table=11
atgaatcgtaaagttgctttgattaccggcgtaacggggcaggacggctcatacctcgcagagctgctgcttaacaagggttacgaggtgcatggcatcaagcgccgcgcctctctgttcaataccgaccggatcgatcatctctatcaagatcctcacgtgtcggaccggcgcttcgtgctccatcacggcgacctgaccgattcgacgagcctcgtgcgcatcatccagcgtgtgcagcctgacgagatttacaacctcgcggcgcagagtcacgttgccgtgtcgttcgaggaaccggaatacacggcgaacgcggacggtatcggcgcgcttcgtatcctggaggcgatccggattctcgggctcgagaagaagacgcgcttttaccaggcgtcgacgtcggagctttacggtctcgtgcaggagattccgcagaaggagacgacgccgttctacccgcgcagcccgtatgcggtcgcgaagatgtatgcgtactggatcaccgtcaactaccgcgaggcatatggaatctacgcgtgcaacggcatcctgttcaatcatgaatcgccggtgcgtggcgagaccttcgtgacgcgcaagatcacgcgcgccatcgcacgtattgccgccggcctgcaggactgcctttacctcgggaacatgtcggcgctgcgcgactggggccacgcgcgcgattacgtcgagatgcagtggctgatgctgcagcaagagcaacctgaagacttcgttatcgcgacgggggttcagtacagcgtgcgggacttcgtcaagcaggcggctgccgagctcggtattaccgtgagattcgacggcgaaggcgttgacgaggtcggcatcgtcgacaaggtggaaggctcggaggcaaaagtgaagcccggcgccgtgatcgtgcgtgtcgatccgcgctatttccgcccgaccgaggtcgagacgctgttgggcgaccccaccaaggcacatgaaaagctgggctggaagccgacgacatcgtttgagtcgctggtcaccgaaatggtacgcgcggactatcaggtggcgaagcgcgacgccctcgtgaccctcgcgggtttcaagacgttcgaatacaacgagtga

SEQ ID NO: 104512 - protein, 372 aa, Burkholderia vietnamiensis G4
MNRKVALITGVTGQDGSYLAELLLNKGYEVHGIKRRASLFNTDRIDHLYQDPHVSDRRFVLHHGDLTDSTSLVRIIQRVQPDEIYNLAAQSHVAVSFEEPEYTANADGIGALRILEAIRILGLEKKTRFYQASTSELYGLVQEIPQKETTPFYPRSPYAVAKMYAYWITVNYREAYGIYACNGILFNHESPVRGETFVTRKITRAIARIAAGLQDCLYLGNMSALRDWGHARDYVEMQWLMLQQEQPEDFVIATGVQYSVRDFVKQAAAELGITVRFDGEGVDEVGIVDKVEGSEAKVKPGAVIVRVDPRYFRPTEVETLLGDPTKAHEKLGWKPTTSFESLVTEMVRADYQVAKRDALVTLAGFKTFEYNE

SEQ ID NO: 104513 - DNA, 1089 bp, Crocosphaera watsonii WH 8501
  CDS (1)..(1089): transl_table=11
atgaccgaaacaaaacgcgccctgatcactggtattactggacaagatggttcttatctcagcgagttgttattagaaaaaggttacgaagttcatgggattatccgtcgaacctcaacctttaacaccgatcgcatcgatcatatgtacattgatccccatcaaaacgacgctcagttatttctccactacggagacttaaccgatgggactaccctgagacgtattttagaagaagtacaaccctttgagatttacaatttaggggcccaatctcacgttagggttagttttgactctccagaatataccgtggaatctgtgggtatgggaactctccgcatcttagaggcgatccgagactatcaacaacgaactgggatcgaagtccgtttctatcaagctggctcctcagaaatgtttggtaaggttcaagatgtcccccaaaaggaaaccacccctttttatccccgtagtccctacggctgtgctaaagtatatgcccattggcaaaccttgaactatcgtgaatcctacgatttatttgcctgtaacggtattctctttaaccatgagtccccccgtcgtggagaaacctttgtgactcgtaaaatcaccagggcgatcgctcgcattgtggctaaaactcagaaaaaactctatttaggaaacctcgactcaaaacgagactggggctacgccaaagactatgtcagagcaatgtggttgatgctacaacagaatgaagctgatgattatgttgtggccacaggagaaacccattctgtgcgagaattcttgaaaattgcttttgaatacgtaaacttgaactgggaagattacgtagactttgataagcgttatctacgcccggccgaagtagatttattaatcggtgatcccaacaaagcaaaaacaaaattaggatgggaaccctctgtcacctttgagcagttagttcacctcatggtagaagcggatctgactgctttaggtctctcttctcctaacgaaacatctaatgacaaagcgttactcttcaaggataatgcttatgtgcgtcaacctatgagtgtcatggtggactaa

SEQ ID NO: 104514 - protein, 362 aa, Crocosphaera watsonii WH 8501
MTETKRALITGITGQDGSYLSELLLEKGYEVHGIIRRTSTFNTDRIDHMYIDPHQNDAQLFLHYGDLTDGTTLRRILEEVQPFEIYNLGAQSHVRVSFDSPEYTVESVGMGTLRILEAIRDYQQRTGIEVRFYQAGSSEMFGKVQDVPQKETTPFYPRSPYGCAKVYAHWQTLNYRESYDLFACNGILFNHESPRRGETFVTRKITRAIARIVAKTQKKLYLGNLDSKRDWGYAKDYVRAMWLMLQQNEADDYVVATGETHSVREFLKIAFEYVNLNWEDYVDFDKRYLRPAEVDLLIGDPNKAKTKLGWEPSVTFEQLVHLMVEADLTALGLSSPNETSNDKALLFKDNAYVRQPMSVMVD

SEQ ID NO: 104515 - DNA, 993 bp, Kineococcus radiotolerans SRS30216
  CDS (1)..(993): transl_table=11
gtgcggaagacggcactcatcacgggcatcaccggccaggacgggtcgtacctggccgagctgctgctggagaagggctacgaggttcacgggctgatccggcggtcgtcgtcgttcaacacgacgcggatcgaccacctctaccaggacccgcacgacccgcacgcccggttcttcctgcactacggggacctcaccgacggcagccggatggtgaccctgctcgacgacatccggcccgacgaggtctaccacctggccgcgcagtcgcacgtgcgggtcagcttcgacgaacccgagttcaccggggacaccaccggtctcggcaccacgcgcatcctcgaggccatccggatgatcgggcttcagtgccggttctaccaggcgtcgagctcggagatgttcggggcgacccctcccccccagtcggagacgacgcccttccacccccgcagcccctacggggccgcgaaggtctacggctactggatgacccgcaactaccgcgaggcgtacggcatgttcgccgtcaacgggatcctcttcaaccacgagtccccgcgccgcggcgagacgttcgtcacccgcaagatcgccgcggccgccgcccggatcgccgccggcaagcaggagacgctgtacctggggaacctcgacgccgtgcgcgactggggttacgccaaggagtacgtcgagggcatgtggcggatgctgcagcaggacgaggccagcgactacgtcctggccaccggggtcgggacgaccgtgcgggagttcacccaggactgcttcgagtccgtcggcctcgactggcgcgaccacgtcgcccacgacgagcgctacgtgcggcccgccgaggtcgacgcgctgatcggcgacgcctcgaaggcgcggcgggagctgggctggaccgctaccgtgcaggcgagcgagctcgcccggttgatgaccgaggccgagcggcgcgccctgctgtcgtccaccagccgctag

SEQ ID NO: 104516 - protein, 330 aa, Kineococcus radiotolerans SRS30216
MRKTALITGITGQDGSYLAELLLEKGYEVHGLIRRSSSFNTTRIDHLYQDPHDPHARFFLHYGDLTDGSRMVTLLDDIRPDEVYHLAAQSHVRVSFDEPEFTGDTTGLGTTRILEAIRMIGLQCRFYQASSSEMFGATPPPQSETTPFHPRSPYGAAKVYGYWMTRNYREAYGMFAVNGILFNHESPRRGETFVTRKIAAAAARIAAGKQETLYLGNLDAVRDWGYAKEYVEGMWRMLQQDEASDYVLATGVGTTVREFTQDCFESVGLDWRDHVAHDERYVRPAEVDALIGDASKARRELGWTATVQASELARLMTEAERRALLSSTSR

SEQ ID NO: 104517 - DNA, 1041 bp, Xylella fastidiosa Ann-1
  CDS (1)..(1041): transl_table=11
atgtgtaataaaagcgtggtcattacgggtattacaggacaggatggggcttatttagcgcagttgctcctcgaaatgggttatgtggtttatggtacgtatcgtcgttctagctcattgaatttctggcgtattaatgaacttgggattgcacagcatcccaatttacatctggtcgaatatgatttgaccgatctgtcttcgagtgtgcgactgctcgaattggccgctcctaaagaggtctataatcttgccgcacagagctttgttggcgtctcttttgaccagccattgaccacgacggatattaccggagtgggtgcggtcaacctgttggaagccattcggattgttaatcctaagattcgcttctatcaggcatcgacttctgagatgtttggaaaagtccagcagactccgcagattgaggaaacgcctttctatccgcgtagcccatacggtattgccaagttgtatgctcactggatgacggttaattatcgtgagtcgtacggtatctttgctgctagtggtattttgtttaatcacgaatcgccgttgcgagcgcgtgattttgttactcgtaaaatcactcatgcgattgccatgattaaattagggaagctagacgtattagagcttggtaatttggatgccaaacgtgattggggttttgcgaaggaatatgttgagggaatgtggcgtatgcttcaggctgatgagccagatactttcgtgctggcaaccaaccgaactgaaactgtccgtgatttcgtcagcctggctgccagtgccgttgatatccagttggagtggaagggacaagccgaacgggaatgtggtgttgatgttgcatcgggaaaaactttagtcacaatcaatcctaagttttatcgaccggcggaggtggatttgttgatcggtaatccggccaaagctagaacgaagctgggttgggaaccaaagaccacacttgaggagctttgtcacatgatgatggaagcagatgtgcgccgcagcgaacgcgatttccccttctaa

SEQ ID NO: 104518 - protein, 346 aa, Xylella fastidiosa Ann-1
MCNKSVVITGITGQDGAYLAQLLLEMGYVVYGTYRRSSSLNFWRINELGIAQHPNLHLVEYDLTDLSSSVRLLELAAPKEVYNLAAQSFVGVSFDQPLTTTDITGVGAVNLLEAIRIVNPKIRFYQASTSEMFGKVQQTPQIEETPFYPRSPYGIAKLYAHWMTVNYRESYGIFAASGILFNHESPLRARDFVTRKITHAIAMIKLGKLDVLELGNLDAKRDWGFAKEYVEGMWRMLQADEPDTFVLATNRTETVRDFVSLAASAVDIQLEWKGQAERECGVDVASGKTLVTINPKFYRPAEVDLLIGNPAKARTKLGWEPKTTLEELCHMMMEADVRRSERDFPF

SEQ ID NO: 104519 - DNA, 1119 bp, Croceibacter atlanticus HTCC2559
  CDS (1)..(1119): transl_table=11
ttgagccaaaaaattgctttaataactggagttaccggacaagatggtgcctatttaagtgaatttcttttaaaaaaaggttatatagtacacggcataaaacgaagatcttctttatttaatacagatagaatagatcacttatatcaagatccacacgtagaaaatcaaaatttctttttacactatggtgatttaacagacagcacaaatctcattaggatcatacaagaagtaaagccggatgaaatatacaatttggcggctatgagccatgtgcaggtgtcttttgagatgccagaatatacagctaatacagacggtttaggtgcgttacgtctcttagaagctatacgcatattaggaatggaaaataacgttaaactttatcaagcctcaacatctgagctttatggtaaagttcaagaagttcctcaaaccgaaaacactcctttttatcctagaagtccttatgctgttgcaaaactctatgcatattgggcaacagtaaattatcgtgaagcttataacatgtttgcttgtaatggtattttatttaatcacgaatctcctataagaggcgaaacatttgttacaagaaaaataactagagctgcgtctaaaattgcacttggattacaagataaaatgtatttaggaaatttagatgctaaaagagattgggggcacgctaaggattatgtaaaaatgatgtggatgattttacaagctgaagagcccgaagattgggtgattgctactggtaaaactacatctgttcgtgattttgttacaatggcttttgattatcttggagttacattaaagtttgaaggaaaaggcattcatgaaaaaggtattgtaacagctgtttcaaaatcagaatacaacatttctttaggacaagaagtaattggaatagatgaaaaatattttaggccaactgaagttgagctacttataggcgatgcttctaaagcatttaaaaaactaggttggaaacccgatcataaattagaagaccttgtgtatgatatgatgaaaagtgacctaaaccttatgaaaaaggaaagctatcttaagaaaggcggttatacaattatgaattattttgaataa

SEQ ID NO: 104520 - protein, 372 aa, Croceibacter atlanticus HTCC2559
MSQKIALITGVTGQDGAYLSEFLLKKGYIVHGIKRRSSLFNTDRIDHLYQDPHVENQNFFLHYGDLTDSTNLIRIIQEVKPDEIYNLAAMSHVQVSFEMPEYTANTDGLGALRLLEAIRILGMENNVKLYQASTSELYGKVQEVPQTENTPFYPRSPYAVAKLYAYWATVNYREAYNMFACNGILFNHESPIRGETFVTRKITRAASKIALGLQDKMYLGNLDAKRDWGHAKDYVKMMWMILQAEEPEDWVIATGKTTSVRDFVTMAFDYLGVTLKFEGKGIHEKGIVTAVSKSEYNISLGQEVIGIDEKYFRPTEVELLIGDASKAFKKLGWKPDHKLEDLVYDMMKSDLNLMKKESYLKKGGYTIMNYFE

SEQ ID NO: 104521 - DNA, 1125 bp, Sulfitobacter sp. EE-36
  CDS (1)..(1125): transl_table=11
atggtaaaacgcgcgctgatcaccggtatcaccggtcaagacgggtcctatctggcggagttgttgctggacaaaggatacgaggtgcacgggatcaagcggcggtcttcatcccttaatacgcagcggattgatcatatttatcaagaccctcacgaggatgaccccgatctgatcctgcattatggcgatcttaccgatagctcgaacttgacgcggattatgcgcgaggtgcagccggacgaggtctataaccttggcgcgcaaagccatgtcgcggtcagtttcgagacgcccgaatatacgacagaggtgaacgccaacggggccctgcggctgttagaggcgatccggtttctggggctggaaaaaaagacccgcttttaccaagcatcaacttctgagctgtatggcttggtgcaagagacaccacagacggaggaaacaccctttcacccgcgtagcccctatgcggttgccaagatgtacgcctattggatcacggttaattatcgtgaggcctatgggatctatgcctgcaacggcatcctttttaaccatgaaagcgcccgccggggcgaaacctttgtcacgcgcaagatcacgcgcggcttggcaaatatcgcgcaggggttggaggggtgtctttatatgggcaatatcgacgcgctgcgcgattgggggcacgccaaggattatgtgcgcatgcagtggatgatgctacagcaggacgtggcagaggatttcgtgatcgccaccggcgtgcagtattccgtgcgccagttcatcacgtggtcggcggcagagcttgggattacgctgcggttcgaaggcacgggcgtggatgaatgtgcgattgtcgatagcgtcattggggaggatgcccccgcggtcagccccggcgatgtggtgatgcgcattgatccgcagtatttccgccccgccgaggtggagacgctgctgggatcgcccgccaaggcgaagaagaaactcgggtgggagccgcaaatcaccgcgcaagagatgtgtgcagagatggtggcgaatgacctcaaggtcgcgcggcggcatgcgctgttgaaagaacacgggctggatctgccgatcccgctcgagaacgggtag

SEQ ID NO: 104522 - protein, 374 aa, Sulfitobacter sp. EE-36
MVKRALITGITGQDGSYLAELLLDKGYEVHGIKRRSSSLNTQRIDHIYQDPHEDDPDLILHYGDLTDSSNLTRIMREVQPDEVYNLGAQSHVAVSFETPEYTTEVNANGALRLLEAIRFLGLEKKTRFYQASTSELYGLVQETPQTEETPFHPRSPYAVAKMYAYWITVNYREAYGIYACNGILFNHESARRGETFVTRKITRGLANIAQGLEGCLYMGNIDALRDWGHAKDYVRMQWMMLQQDVAEDFVIATGVQYSVRQFITWSAAELGITLRFEGTGVDECAIVDSVIGEDAPAVSPGDVVMRIDPQYFRPAEVETLLGSPAKAKKKLGWEPQITAQEMCAEMVANDLKVARRHALLKEHGLDLPIPLENG

SEQ ID NO: 104523 - DNA, 1119 bp, Roseovarius nubinhibens ISM
  CDS (1)..(1119): transl_table=11
atgaagcgcgcattgatcaccgggatcaccgggcaggacggatcctatctggccgaatttcttctggagaaaggctatgaggtgcatgggatcaagcgccgcgcctcgctgttcaacaccgaccggatcgatcatatctttgaggacccgcatgcgccggacccgaagctcaagctgcattatggcgatctgtcggacacgtcgaacctgacccggctcattgccgagatcaagccggatgaggtctataacctcggggcacagagccatgtggcggtgagtttcgagagcccggaatataccgccgatgtggatgggatgggcacgctacggctgttggaggcgatccgctttctcgggatggagaagacctgtcggttctatcaggcctcgacctcggagctctatgggctggtgcaggagacgccgcagcgcgagacgacgccgttttacccgcggtcgccctatgcggtggcgaagctctattcctattggatcacggtcaattaccgcgaaagctatggcatgtatgcctgcaacggcattctcttcaaccatgagagcccgcgccggggcgagacctttgtgacccgcaagatcacccgtggcctcgccaatatcgcgcaggggctcgagccctgtctctacatgggcaatatcgatgcgctgcgcgattggggccatgccaaggattatgtgcggatgcagtggatgatgctgcagcaagatgcgcccgaggatttcgtcatcgccaccggtaagcaatatagcgtgcgcgatttcatccgctggtcggcggcggagctggggatcgagctcgcgttttccgggacgggcgtcgaagaggtcgcgaccgtggcggcggtcacttcggacaaggcgccggcggtcaaggtgggcgatgtgatcctgcgcatcgatccgcgctatttccggcctgccgaggtcgagacgctgcttggcgatccggcgaaggccaaggagaagcttggctgggtgccgcagatcaccgcgcaggagatgtgcgccgagatggtcgaggccgatcttgtggcggcgcggcgggcgcggctgttgcgggatcatggctatgagacctctgtgacgcgcgagggctga

SEQ ID NO: 104524 - protein, 372 aa, Roseovarius nubinhibens ISM
MKRALITGITGQDGSYLAEFLLEKGYEVHGIKRRASLFNTDRIDHIFEDPHAPDPKLKLHYGDLSDTSNLTRLIAEIKPDEVYNLGAQSHVAVSFESPEYTADVDGMGTLRLLEAIRFLGMEKTCRFYQASTSELYGLVQETPQRETTPFYPRSPYAVAKLYSYWITVNYRESYGMYACNGILFNHESPRRGETFVTRKITRGLANIAQGLEPCLYMGNIDALRDWGHAKDYVRMQWMMLQQDAPEDFVIATGKQYSVRDFIRWSAAELGIELAFSGTGVEEVATVAAVTSDKAPAVKVGDVILRIDPRYFRPAEVETLLGDPAKAKEKLGWVPQITAQEMCAEMVEADLVAARRARLLRDHGYETSVTREG

SEQ ID NO: 104525 - DNA, 1071 bp, Synechococcus sp. RS9917
  CDS (1)..(1071): transl_table=11
atgaaaacagctttggttacaggcgtaacaggccaagatggtagttatcttgttgaattattgctcagcaagggatatatagttcatggcattaagcgacgatcgagtctgtccaatacatcgcgaattgacagcctatcgctggattctggcatttacaagaaaaggtttgatttgcattatgctgaccttaccgattccgccagtatcataaatgtaattgccaaaacagaacctgatgaaatttataatttaggcgctcaaagccatgttgctgtaagttttaaccagcccgagtatactgctgactctaatgcacttggaaccctgcgcatcttggaagcagtaagagctttgaatatgtcatctaaagttagaatatatcaagcaagtactagtgaattatttggcaaagtacaagaagttccacagagagaaactacccctttttacccaagaagcccatatgccgttgctaaactttacgcatattggattacaattaactatagagaatcatacggtatttatgcctgcaatgggatacttttcaaccatgaaagtccacgaagagggctaaactttgttactagaaaaattactcttacacttagtagaataaatgaatttgggcatggatgcctcatgttaggtaacttggattctttgcgagattggggtcatgccaaagattatgttgaaatgcaatggttaatgttgcagcaagacaaaccccaagattatgtgattgccaccggtattcaagcttctgttcgtcaatttgttgattattcagcagaggccttgggttgggggcctttacgttgggatggccacggcctcgatgaagttgggatccgccgtgatacaaatgaaattgtcgttagagttgattcacattattttaggccatctgaagttgcctctcttcttggtgattcttttcttgccaataagaacctaggctggaagccaacttattctttaaaagaacttgttcatgacatgatacaaagcgatagcctgattgcgaaaaatgaaaatattacaaactctattcttgcgacataa

SEQ ID NO: 104526 - protein, 356 aa, Synechococcus sp. RS9917
MKTALVTGVTGQDGSYLVELLLSKGYIVHGIKRRSSLSNTSRIDSLSLDSGIYKKRFDLHYADLTDSASIINVIAKTEPDEIYNLGAQSHVAVSFNQPEYTADSNALGTLRILEAVRALNMSSKVRIYQASTSELFGKVQEVPQRETTPFYPRSPYAVAKLYAYWITINYRESYGIYACNGILFNHESPRRGLNFVTRKITLTLSRINEFGHGCLMLGNLDSLRDWGHAKDYVEMQWLMLQQDKPQDYVIATGIQASVRQFVDYSAEALGWGPLRWDGHGLDEVGIRRDTNEIVVRVDSHYFRPSEVASLLGDSFLANKNLGWKPTYSLKELVHDMIQSDSLIAKNENITNSILAT

SEQ ID NO: 104527 - DNA, 1095 bp, Synechococcus sp. WH 5701
  CDS (1)..(1095): transl_table=11
atgacctcgccgacggccctgatcaccggcatcaccggccaggacgggtcatatctagctgagctgctgctggagaagggctaccgggtgcatggcctcaagcgccgggccagcagcttcaacacggctcgcatcgatcacctctaccaggatccccatgagcgtgatccccgacttaccctccattacggcgatctcaccgacagcagtaacctgatccggatcatcggtgaggtgcgtcccgatgagatctacaacctcggtgcccagagccacgtggcggtgagtttcgaagcgccggaatacacggccaactgtgatggcctcggcaccctgcgcatccttgaggcggtgcggctgctggggctcaccagcaccacccgcttctaccaggccagcaccagtgagctgtatggattggtgcaggagacgccccagcgggagaccaccccatttcatccccgtagcccttatggcgtggccaagctgtatgcctactggatcacggtgaattaccgcgaggcctacggaatgtatgcctgcaacggcatcctctttaatcacgaaagtccgcgccgcggtgaaaccttcgtgacccgcaagatcacccgcggcatggcgcggatcgctgctggtcttgagccttgtctttttctgggcaacctcgattcccggcgtgactggggtcacgcccgcgactacgtggagatgcagtggcggatgctgcagcagcccacacccgaggacttcgtaatcgccacggggcggcaagagagcgtgcgccggttcatcgaactgtcggccatggccctgggctggggcggcatccactggcagggccaggggctggaggagttgggccgccgcgacgacagcggggccgtggtggtgcgaatcgatccccgctatttccgcccggcggaggtggagactttgctgggtgatcccagccacgcccatgcccggctgggctgggctcccaccaccacactggagcagctggtggaagagatggtggcggctgatgtagaggaggccgccaaggaatccaccctgcgccgggagggtttcccggtggtggtcagccgcgaatga

SEQ ID NO: 104528 - protein, 364 aa, Synechococcus sp. WH 5701
MTSPTALITGITGQDGSYLAELLLEKGYRVHGLKRRASSFNTARIDHLYQDPHERDPRLTLHYGDLTDSSNLIRIIGEVRPDEIYNLGAQSHVAVSFEAPEYTANCDGLGTLRILEAVRLLGLTSTTRFYQASTSELYGLVQETPQRETTPFHPRSPYGVAKLYAYWITVNYREAYGMYACNGILFNHESPRRGETFVTRKITRGMARIAAGLEPCLFLGNLDSRRDWGHARDYVEMQWRMLQQPTPEDFVIATGRQESVRRFIELSAMALGWGGIHWQGQGLEELGRRDDSGAVVVRIDPRYFRPAEVETLLGDPSHAHARLGWAPTTTLEQLVEEMVAADVEEAAKESTLRREGFPVVVSRE

SEQ ID NO: 104529 - DNA, 1140 bp, Synechococcus sp. WH 7805
  CDS (1)..(1140): transl_table=11
atgataaaaaaagccttaattaccggtatcaccggtcaagacggcagctacttagcggagctcctcctggagaaaggttacgaggtgcacggcatcaagcgacggactagcagcttcaacaccaatcggattgatcacctatatcaggatccccatgaagaagatccaaggttgatcctccactacggcgatctcaccgacagcaccaacctgattcggatcgtccagcaggtgcagccggatgagatttacaaccttggggcccaaagccatgtggcggtgagcttcgaagcgccggagtacaccgccaacagcgatgctctcggcaccctcaggatcctggaggctgtgcggattctggggttatcagacacaacccggatttatcaggccagtaccagtgagctgtatggcctggtgcaagaggtgccacagaaagagagcacgcctttctatccgagaagtccctatggcgtggccaagctctacggctactggatcacggtgaactaccgcgaggcctacggcatgtatgcctgcaacggcatcctgttcaatcacgagagccccaggcgcggtgaaaccttcgtgacccgcaaaatcacacgaggcttagcgcggatcaatgaagggcttgaggattgcctatttatgggcaatctcgattccctgcgggactggggtcatgcccgggattacgtggagatgcagtggcggatgctgcagcaggaggggccaccagaagacttcgtgattgccactggccggcaggagagcgtgcggcgcttcatcgagctcaccgcagatgcactgggatggggtgcgctggaatgggtaggccaggggctggatgaagtgggtcgccgcagcaccggcgaagtggtggtgcggattgatccgcgctatttccgcccagcggaggtggagacgttgctgggtgatcccagcaaggcccatgagaaactgggttggacacctaccaccactcttgaagagctggttgctgacatggtgaaagccgatagagaggaagcacgcaaagaggcgatcctgaggttgaaaggattcaatgtggtgggatcaatggagaacccaccgacgaatccagctgcaattcggggcaagcggagccaaggctga

SEQ ID NO: 104530 - protein, 379 aa, Synechococcus sp. WH 7805
MIKKALITGITGQDGSYLAELLLEKGYEVHGIKRRTSSFNTNRIDHLYQDPHEEDPRLILHYGDLTDSTNLIRIVQQVQPDEIYNLGAQSHVAVSFEAPEYTANSDALGTLRILEAVRILGLSDTTRIYQASTSELYGLVQEVPQKESTPFYPRSPYGVAKLYGYWITVNYREAYGMYACNGILFNHESPRRGETFVTRKITRGLARINEGLEDCLFMGNLDSLRDWGHARDYVEMQWRMLQQEGPPEDFVIATGRQESVRRFIELTADALGWGALEWVGQGLDEVGRRSTGEVVVRIDPRYFRPAEVETLLGDPSKAHEKLGWTPTTTLEELVADMVKADREEARKEAILRLKGFNVVGSMENPPTNPAAIRGKRSQG

SEQ ID NO: 104531 - DNA, 1128 bp, Flavobacteria bacterium BBFL7
  CDS (1)..(1128): transl_table=11
atgtctgaaaagaatcataaagttgcattgattactggtgtaaccggtcaagatggtgcttatttaagtgagtttttattaaaaaaaggatatgaagtacacggtatcaagcgccgtgcttcattgtttaatacagatcgtatcgatcatctgtatcaagatccgcatgagactgatgtaaagtttaaattacattacggcgatcttacagatactactaacttaactagaatcatcaaagaaacacaaccagacgagatttataatcttgcggctatgtcacatgtacaagtttcttttgaaatgccagaatacaccgcaaatgccgacggaataggtgcgttacgtatcctagaatctgtacgcttgctaggaatggaaaagaagactaaagtttatcaagcttctacatcagaattgtatggtaaggtgcaagaaattccacaatcagaaacgactccattctatccgcgcagtccatatgcggtagcaaaaatgtatgcctactgggcaacggtaaattaccgtgaagcttatggtatgtttgcttgtaatgggattctttttaaccatgaatctccagtacgtggagagacatttgtaaccagaaaaattactcgtgcgacttccaaaatcgtaaaaggacttcaagataaagtgtatttaggtaacctagatgcaaaacgagattggggacacgctaaggattatgtacgcatgatgtggatgatcttacaacacgatgagccagaagattgggttatcgccacaggaacaacgactagcgtgcgtgattttgtacgtatggcttttcagtacgtaggaatagaaatagaatttaatggtgaaggcgtggatgagaaaggaatggtgaagtcctgctcaaatccagattatcaactagaaataggaaaagaagtagtggcggtagatccacgatatttccgtcctacagaggtggatttattaatcggtgaccctactaaagccaaagaaaaactgggttgggttccagaaatcgtccttcaagaactcgttaacgacatgatgaaaagtgatttacacttaatgtctcgggaagaatatttaaaaagtggtggttatagaattaacaactactttgaataa

SEQ ID NO: 104532 - protein, 375 aa, Flavobacteria bacterium BBFL7
MSEKNHKVALITGVTGQDGAYLSEFLLKKGYEVHGIKRRASLFNTDRIDHLYQDPHETDVKFKLHYGDLTDTTNLTRIIKETQPDEIYNLAAMSHVQVSFEMPEYTANADGIGALRILESVRLLGMEKKTKVYQASTSELYGKVQEIPQSETTPFYPRSPYAVAKMYAYWATVNYREAYGMFACNGILFNHESPVRGETFVTRKITRATSKIVKGLQDKVYLGNLDAKRDWGHAKDYVRMMWMILQHDEPEDWVIATGTTTSVRDFVRMAFQYVGIEIEFNGEGVDEKGMVKSCSNPDYQLEIGKEVVAVDPRYFRPTEVDLLIGDPTKAKEKLGWVPEIVLQELVNDMMKSDLHLMSREEYLKSGGYRINNYFE

SEQ ID NO: 104533 - DNA, 1101 bp, delta proteobacterium MLMS-1; identical to SEQ ID NO: 73005
  CDS (1)..(1101): transl_table=11

SEQ ID NO: 104534 - protein, 366 aa, delta proteobacterium MLMS-1; identical to SEQ ID NO: 73006

SEQ ID NO: 104535 - DNA, 1104 bp, Synechococcus sp. RS9916
  CDS (1)..(1104): transl_table=11
atgaaaaaagctctgatcactgggatcaccggccaggacggctcctatctcgctgagctcctcctggagaagggctacgccgtccacggcatcaaacgccgcgcctcctccttcaacaccacccgcatcgatcacctctatcaagatcctcacgagactgatcggtcaggacagcctccgcgcctcacccttcattacggagatctctctgacggcagcaacctgcagcgcatcatcgagcaggttcaacccgatgagatctacaacctcggcgcacagagccatgtggccgtgagtttcgaggcacctgaatacaccgccaacgtcgatgccctcggcaccctgcgcatcctcgaggccgtgcggatctgcggtctcacagcaaaaacgcgcatctatcaagcctccacctccgagctctacggcctggttcaggaggtcccgcaaaaggaaaccaccccgtttcacccccgtagtccctacggcgtggccaagctttacgcctactggatcaccgtcaactaccgcgaggcctacggcatgtatgcctgcaatggcctgctgttcaatcacgagagccccaggcggggtgaaaccttcgtcacccgcaagatcacccgtggcctggcccgcattgatgccggcctcgaccagtgcctctacatgggcaacctcgattccctgcgcgactggggccacgcccgcgactacgtcgaaatgcagtggcgcatgctccagcaggagaccccagaagacttcgtgattgccaccggccgccaagaatcggtgcgccgcttcattgagctcgccgcccaggccctcggttggggtcagctccaatgggagggctcaggtgtaagagaaaccggccgccgcagcgacaccggagccatcgtggtgcgcatcgatcctcgttatttccgccccgcggaagtggagaccctgctcggggatcccaccaacgcccgcgagaagcttggctggacgcccaccaccaccctggaagaactggtcaacgagatgatcgccgtcgaccaggaagaagcccgtaaagaggcctacctccaagccaaaggcttccaggtggtgggggcacgggaatga

SEQ ID NO: 104536 - protein, 367 aa, Synechococcus sp. RS9916
MKKALITGITGQDGSYLAELLLEKGYAVHGIKRRASSFNTTRIDHLYQDPHETDRSGQPPRLTLHYGDLSDGSNLQRIIEQVQPDEIYNLGAQSHVAVSFEAPEYTANVDALGTLRILEAVRICGLTAKTRIYQASTSELYGLVQEVPQKETTPFHPRSPYGVAKLYAYWITVNYREAYGMYACNGLLFNHESPRRGETFVTRKITRGLARIDAGLDQCLYMGNLDSLRDWGHARDYVEMQWRMLQQETPEDFVIATGRQESVRRFIELAAQALGWGQLQWEGSGVRETGRRSDTGAIVVRIDPRYFRPAEVETLLGDPTNAREKLGWTPTTTLEELVNEMIAVDQEEARKEAYLQAKGFQVVGARE

SEQ ID NO: 104537 - DNA, 1041 bp, marine gamma proteobacterium HTCC2080
  CDS (1)..(1041): transl_table=11
atgacctcaaagactgctctcgttaccggcatcaccggtcaagatggtgcctatctgtctaagcttctcctcgaaaagggttacaccgtttacggtgcttttcggcgcaccagcagcgttatgttctggcgaactgatgaagtgggcattcaggaccaccccaactttataaaggtggaatacgacctcaccgatttgggcgcgacaattcgcctgctgcagaagaccgaggcaacggaggtctacaatttagcggcacaaagcttcgtgggcgtctcctttgaacagcccattaccaccgctgaaataaccgggcttggcgcgcttaacctgctcgaggcaattcgcatcgtaaaccccaagatacgtttttatcaggcttcgacctcggaaatgtttggcgacgtgcaggccatcccccagaaagaagacacccccttttacccccgcagcccctatggtgtcgccaagttgtttgcgcactggagcacggttaattaccgcgagtcgtatgatttgttcgccaccagcggtattctttttaatcatgaatcgccactgcgtggcctcgagtttgttacccgaaaaattaccgacggtatagccagaattaaattgggtaagctcgatcatctcgagctgggcaacatggatgcaaagcgcgactggggcttcgccggtgactacgttgaaggtatgtggcgtatgctgcaggtcgatacgcccgataccttcgtactggcaaccggccgcactgaaagcgttcgcgattttgtacgtatggcgtgtaaagccgccgagatcgacgtggaatttgaggggtccggcaccgaagaggttgcccgggatactgatagcggccaaatcattgtgcaggtaaacccaaaattctatcgccccgcggaagttgaccttttgattggtgatgccagcaaagccaaagagattctgggctgggaggccaccacaacactggaagcgctctgtaaaatgatggtcgaggccgaccttacccgcgtcgcaaacggaacgtcttactaa

SEQ ID NO: 104538 - protein, 346 aa, marine gamma proteobacterium HTCC2080
MTSKTALVTGITGQDGAYLSKLLLEKGYTVYGAFRRTSSVMFWRTDEVGIQDHPNFIKVEYDLTDLGATIRLLQKTEATEVYNLAAQSFVGVSFEQPITTAEITGLGALNLLEAIRIVNPKIRFYQASTSEMFGDVQAIPQKEDTPFYPRSPYGVAKLFAHWSTVNYRESYDLFATSGILFNHESPLRGLEFVTRKITDGIARIKLGKLDHLELGNMDAKRDWGFAGDYVEGMWRMLQVDTPDTFVLATGRTESVRDFVRMACKAAEIDVEFEGSGTEEVARDTDSGQIIVQVNPKFYRPAEVDLLIGDASKAKEILGWEATTTLEALCKMMVEADLTRVANGTSY

SEQ ID NO: 104539 - DNA, 1119 bp, Vibrio cholerae
  CDS (1)..(1119): transl_table=11
atgaagaaaaaagcccttatcactggtgtaactggtcaagacggttcttatttagccgagtttttgttagcaaaaggctacgaagtgcatggtattaaacgtcgtgcgtcttcttttaacactcagcgtgtggatcacatctatcaagatccgcatgtggataatgcgagttttattcttcattatggtgatttgactgactcttctaatttgacgcgtattttgcaggaagtgaaaccagatgaagtgtacaacctaggcgctcagtctcatgtggctgtgtcgtttgaatctcctgaatacacagcggatgtggatgccatgggcacactgcgtttgttggaagcgattcgtttgctaggattggagaagacgaccaagttttatcaagcgtcgacgtctgagctttacggtcttgtgcaagaaaccccacaaaaagaaaccacgccattttatcctcgctccccttatgcggtggcgaaaatgtacgcttactggatcgtggtgaattaccgtgaatcctatggcatgtacgcgtgcaacggtattttgtttaaccatgaatcgccacgtcgtggtgagacctttgtgactcgtaagattacccgtggtttggcgaacatcgcccagggtttagagaagtgcttgtacatgggcaacatggatgcgctgcgtgactggggccatgcgaaagattacgtgcgtatgcagtggatgatgttgcaacaagatcaacctgaagactttgttatcgcaacgggtgtgcaatattccgtgcgtcagtttattgaatggtctgcaaaagagttgggtgtgacgttaacattcgaaggccaaggcgtggatgaaaaagggattgtttcggcaatcgaaggcgataaagcgccagccctgaaagtcggtgatgtggtagtacagatcgacccacgttatttccgccctgcggaagtggaaaccttgttaggtgatccaagcaaagcgaaacagaagctaggctggacaccagaaatcacagtacaagaaatgtgcgctgagatgatgatggaagatctgaaagtggcgcaacgccatgcgctattgaagcttcatggacatgatgtacctgtatcggtagagtaa

SEQ ID NO: 104540 - protein, 372 aa, Vibrio cholerae
MKKKALITGVTGQDGSYLAEFLLAKGYEVHGIKRRASSFNTQRVDHIYQDPHVDNASFILHYGDLTDSSNLTRILQEVKPDEVYNLGAQSHVAVSFESPEYTADVDAMGTLRLLEAIRLLGLEKTTKFYQASTSELYGLVQETPQKETTPFYPRSPYAVAKMYAYWIVVNYRESYGMYACNGILFNHESPRRGETFVTRKITRGLANIAQGLEKCLYMGNMDALRDWGHAKDYVRMQWMMLQQDQPEDFVIATGVQYSVRQFIEWSAKELGVTLTFEGQGVDEKGIVSAIEGDKAPALKVGDVVVQIDPRYFRPAEVETLLGDPSKAKQKLGWTPEITVQEMCAEMMMEDLKVAQRHALLKLHGHDVPVSVE

SEQ ID NO: 104541 - DNA, 1032 bp, Mycobacterium paratuberculosis
  CDS (1)..(1032): transl_table=11
gtgaagcgagcgcttataacagggatcacggggcaggatggttcctacctcgccgagctactactgagcaagggatacgaggttcacgggctcgttcgtcgagcttcgacgtttaacacgtcgcggatcgatcacctctacgttgacccacaccaaccgggcgcgcgcttgttcttgcactatgcagacctcactgacggcacccggttggtgaccctgctcagcagtatcgacccggatgaggtctacaacctcgcagcgcagtcccatgtgcgcgtcagctttgacgagccagtgcataccggagacaccaccggcatgggatcgatccgacttctggaagcagtccgcctttctcgggtggactgccggttctatcaggcttcctcgtcggagatgttcggcgcatctccgccaccgcagaacgaatcgacgccgttctatccccgttcgccatacggcgcggccaaggtcttctcgtactggacgactcgcaactatcgagaggcgtacggattattcgcagtgaatggcatcttgttcaaccatgagtccccccggcgcggcgagactttcgtgacccgaaagatcacgcgtgccgtggcgcgcatccgagctggcgtccaatcggaggtctatatgggcaacctcgatgcgatccgcgactggggctacgcgcccgaatatgtcgaggggatgtggaggatgttgcaagcgcctgaacctgatgactacgtcctggcgacagggcgtggttacaccgtacgtgagttcgctcaagctgcttttgaccacgtcgggctcgactggcaaaagcacgtcaagtttgacgaccgctatttgcgccccaccgaggtcgattcgctagtaggagatgccgacagggcggcccagtcactcggctggaaagcttcggttcatactggtgaactcgcgcgcatcatggtggacgcggacatcgccgcgtcggagtgcgatggcacaccatggatcgacacgccgatgttgcctggttggggcggagtaagttga

SEQ ID NO: 104542 - protein, 343 aa, Mycobacterium paratuberculosis
MKRALITGITGQDGSYLAELLLSKGYEVHGLVRRASTFNTSRIDHLYVDPHQPGARLFLHYADLTDGTRLVTLLSSIDPDEVYNLAAQSHVRVSFDEPVHTGDTTGMGSIRLLEAVRLSRVDCRFYQASSSEMFGASPPPQNESTPFYPRSPYGAAKVFSYWTTRNYREAYGLFAVNGILFNHESPRRGETFVTRKITRAVARIRAGVQSEVYMGNLDAIRDWGYAPEYVEGMWRMLQAPEPDDYVLATGRGYTVREFAQAAFDHVGLDWQKHVKFDDRYLRPTEVDSLVGDADRAAQSLGWKASVHTGELARIMVDADIAASECDGTPWIDTPMLPGWGGVS

SEQ ID NO: 104543 - DNA, 1032 bp, Mycobacterium avium subsp
  CDS (1)..(1032): transl_table=11
gtgaagcgagcgcttataacagggatcacggggcaggatggttcctacctcgccgagctactactgagcaagggatacgaggttcacgggctcgttcgtcgagcttcgacgtttaacacgtcgcggatcgatcacctctacgttgacccacaccaaccgggcgcgcgcttgttcttgcactatgcagacctcactgacggcacccggttggtgaccctgctcagcagtatcgacccggatgaggtctacaacctcgcagcgcagtcccatgtgcgcgtcagctttgacgagccagtgcataccggagacaccaccggcatgggatcgatccgacttctggaagcagtccgcctttctcgggtggactgccggttctatcaggcttcctcgtcggagatgttcggcgcatctccgccaccgcagaacgaatcgacgccgttctatccccgttcgccatacggcgcggccaaggtcttctcgtactggacgactcgcaactatcgagaggcgtacggattattcgcagtgaatggcatcttgttcaaccatgagtccccccggcgcggcgagactttcgtgacccgaaagatcacgcgtgccgtggcgcgcatccgagctggcgtccaatcggaggtctatatgggcaacctcgatgcgatccgcgactggggctacgcgcccgaatatgtcgaggggatgtggaggatgttgcaagcgcctgaacctgatgactacgtcctggcgacagggcgtggttacaccgtacgtgagttcgctcaagctgcttttgaccatgtcgggctcgactggcaaaagcgcgtcaagtttgacgaccgctatttgcgtcccaccgaggtcgattcgctagtaggagatgccgacaaggcggcccagtcactcggctggaaagcttcggttcatactggtgaactcgcgcgcatcatggtggacgcggacatcgccgcgttggagtgcgatggcacaccatggatcgacacgccgatgttgcctggttggggcagagtaagttga

SEQ ID NO: 104544 - protein, 343 aa, Mycobacterium avium subsp
MKRALITGITGQDGSYLAELLLSKGYEVHGLVRRASTFNTSRIDHLYVDPHQPGARLFLHYADLTDGTRLVTLLSSIDPDEVYNLAAQSHVRVSFDEPVHTGDTTGMGSIRLLEAVRLSRVDCRFYQASSSEMFGASPPPQNESTPFYPRSPYGAAKVFSYWTTRNYREAYGLFAVNGILFNHESPRRGETFVTRKITRAVARIRAGVQSEVYMGNLDAIRDWGYAPEYVEGMWRMLQAPEPDDYVLATGRGYTVREFAQAAFDHVGLDWQKRVKFDDRYLRPTEVDSLVGDADKAAQSLGWKASVHTGELARIMVDADIAALECDGTPWIDTPMLPGWGRVS

SEQ ID NO: 104545 - DNA, 1110 bp, Thellungiella halophila
  CDS (1)..(1110)
atggcgtccgaagacaaagtgtccagatccgaagctgagaccactccaaacggtggttcttctgagatgaggaagattgcactggtaaccggaatcacggggcaggatggatcatacctgacggagttcctgctggggaaaggctatgaagttcacgggcttatcagacgatcgtcaaattacaacacgcagcgaatcaaccatatctacgtggatccccacaatgtgaacaaagctcgcatgaagctccactacgccgatctctcagacgcctcctcgctccggcgctggctcgacgtgatcaagccagacgaggtttacaaccttgctgctcagtcgcatgtggccgtctccttcgagatccctgactacaccgccgatgtcgtcgccactggagctctccgcctcctggaggctgtcagatctcacatctccgacaatggccgcaacatcaagtactaccaggccggatcctcggagatgttcgggtcaactcctcctccgcaatctgagaccacgccctttcaccctcgatctccctacgctgcctccaaatgcgccgctcactggtacaccgtcaattacagggaagcttacggcctctacgcctgcaacggcatcctcttcaaccacgagtctcctcgccgtggagagaacttcgtgaccaggaagataaccagggccttgggcaggatcaaggtcggattgcagaccaagctcttcctgggaaacatacaggcctcgagagactggggattcgctggggactacgtcgaggcaatgtggctcatgctccagcaggagaaaccagatgactacgtggtcgcaactgaggaatcacacaccgtcgaggagtttctggaggtgtccttcggctacgtcgggctcaactggagagaccatgttgagatcgacaagaggtacttcaggccaacggaggtcgacaatctcaaaggagacgcaaccaaggctaagcaggtgttgaagtggacccctaaagtagggttcgagcagctcgtcaagatgatggtcgacgaagatctcgacatggctaagagggagaaagtcctcgtcgatgctggttacatggacgctcagcagcaaccttaa

SEQ ID NO: 104546 - protein, 369 aa, Thellungiella halophila
MASEDKVSRSEAETTPNGGSSEMRKIALVTGITGQDGSYLTEFLLGKGYEVHGLIRRSSNYNTQRINHIYVDPHNVNKARMKLHYADLSDASSLRRWLDVIKPDEVYNLAAQSHVAVSFEIPDYTADVVATGALRLLEAVRSHISDNGRNIKYYQAGSSEMFGSTPPPQSETTPFHPRSPYAASKCAAHWYTVNYREAYGLYACNGILFNHESPRRGENFVTRKITRALGRIKVGLQTKLFLGNIQASRDWGFAGDYVEAMWLMLQQEKPDDYVVATEESHTVEEFLEVSFGYVGLNWRDHVEIDKRYFRPTEVDNLKGDATKAKQVLKWTPKVGFEQLVKMMVDEDLDMAKREKVLVDAGYMDAQQQP

SEQ ID NO: 104547 - DNA, 1188 bp, Drosophila melanogaster
  CDS (1)..(1188)
atgctaaatacccggctaattgcaatgtcgacttccgatggagccccggaaaccaagaaacaacgtcctgaaagcagcagcaacggcagcaaggaccaaaacggaacggaagccggcgccgaaggcgactcccgtgataaagtggcgctgataacaggcataacgggccaggatggctcctatttggcagagtttctgctcaagaaggactacgaggtgcacggcattattcggcgggccagcaccttcaacaccacccgcattgagcatctatatgccgatccaaaggcgcacaaaggtgggcgtatgaagctccactatggcgacatgacggacagcagcagcctggtgaagatcatcaatatggtgaagcccacggagatttacaatttggcagcacaatcccatgtcaaggtctccttcgatctcagtgagtacacggccgaggtggacgccgtgggcacgttgcgcattctggacgccatccgcacttgtggcatggaaaagaacgtgaggttttaccaagcctccacttcggagctatatggtaaagtagtggagacgccacagaacgaacagacgcccttctatcccaggtcgccatatgcctgcgctaagatgtacggcttttggatcgtcatcaactaccgggaagcctacaacatgtacgcctgtaatggaatcctcttcaaccatgaaagtccacgacgtggcgagaactttgtgactagaaaaatcacccgtagcgtggccaagatttatcacaagcaaatggagtattttgaactgggaaatctcgactcaaagcgcgactggggacatgccagcgactacgtggaggccatgtggatgatgctgcaacgggagtctccttccgactacgtcatagctacaggcgaaacgcacagtgtgcgcgaattcgtggaagccgcgttcaagcatattgatcgagagataacgtggaagggcaagggtgtggacgaggtgggagtggagagcggcacgggtattgtgcgcgtccgcataaatccaaagtattttcggccgacggaggtcgatctgctgcaaggcgacgcgtccaaagccaatcgagagctaaactggacgcctaaagttaccttcgtggaattggttagcgacatgatgaaggctgacatcgaattaatgaggaaaaatccaatcgcttaa

SEQ ID NO: 104548 - protein, 395 aa, Drosophila melanogaster
MLNTRLIAMSTSDGAPETKKQRPESSSNGSKDQNGTEAGAEGDSRDKVALITGITGQDGSYLAEFLLKKDYEVHGIIRRASTFNTTRIEHLYADPKAHKGGRMKLHYGDMTDSSSLVKIINMVKPTEIYNLAAQSHVKVSFDLSEYTAEVDAVGTLRILDAIRTCGMEKNVRFYQASTSELYGKVVETPQNEQTPFYPRSPYACAKMYGFWIVINYREAYNMYACNGILFNHESPRRGENFVTRKITRSVAKIYHKQMEYFELGNLDSKRDWGHASDYVEAMWMMLQRESPSDYVIATGETHSVREFVEAAFKHIDREITWKGKGVDEVGVESGTGIVRVRINPKYFRPTEVDLLQGDASKANRELNWTPKVTFVELVSDMMKADIELMRKNPIA

SEQ ID NO: 104549 - DNA, 1122 bp, Escherichia coli
  CDS (1)..(1122): transl_table=11
  misc_feature (968)..(968): n is a, g, c or t
atggctaaagtcgctctcattactggcataaccggacaagacggttcttacctggcagagtttctgctggaaaaaggttacgaggtgcatggtattaagcgtcgtgcatcgtcattcaacaccgagcgcgtggatcacatttatcaggatccgcacacctgcaacccgaaattccatctgcattatggcgatctgacagatacctccaacctgacgcgcattttgtgtgaagtgcagccggatgaagtgtacaacctgggcgcaatgagtcacgttgcggtttcttttgagtcaccggaatatatcgctgacgtcgatgcgatgggtacgctgcgcctgctggaggcgatccgcttcctcggtctggaaaagaaaacccgtttttatcaggcttccacctctgaactgtacggtctggtgcaggaaattccgcagaaagaaaccacgccgttctacccacgctctccgtatgcggtcgccaaactgtatgcctactggatcaccgttaactaccgcgaatcctacggcatgtacgcctgtaacggtattctcttcaaccatgaatccccgcgccgcggcgaaaccttcgttacccgcaaaatcacccgcgcaatcgcaaacatcgcccaggggctggaatcgtgcctgtacctcggcaatatggattccctgcgtgactggggccatgccaaagactacgtaaaaatgcagtggatgatgctgcaacaggaacagccggaagatttcgttatcgcgaccggcgttcagtactccgtgcgtcagttcgtggaaatggcggcggagcgagtcggaatcaaactgcgttttgaaggcacaggtgtagatgagaaggggatagtggtttctgttaatggtgaggatgctccagcagttaaacctggagatgtaatcgttaaggttgatccgcgctacttccgtccggctgaagttgaaacgctgctcggcgnaccgaccaaagcgcacgaaaaactgggctggaaaccagaaatcaccctcagagagatggtgtctgaaatggtggctaatgacctcgaagcggcgaaaaaacactctctgctgaaatctcacggctacgacgtggcgatcgcgctggagtcataa

SEQ ID NO: 104550 - protein, 373 aa, Escherichia coli
  misc_feature (323)..(323): The Xaa at location 323 stands for Ala, Glu, Gly, or Val.
MAKVALITGITGQDGSYLAEFLLEKGYEVHGIKRRASSFNTERVDHIYQDPHTCNPKFHLHYGDLTDTSNLTRILCEVQPDEVYNLGAMSHVAVSFESPEYIADVDAMGTLRLLEAIRFLGLEKKTRFYQASTSELYGLVQEIPQKETTPFYPRSPYAVAKLYAYWITVNYRESYGMYACNGILFNHESPRRGETFVTRKITRAIANIAQGLESCLYLGNMDSLRDWGHAKDYVKMQWMMLQQEQPEDFVIATGVQYSVRQFVEMAAERVGIKLRFEGTGVDEKGIVVSVNGEDAPAVKPGDVIVKVDPRYFRPAEVETLLGXPTKAHEKLGWKPEITLREMVSEMVANDLEAAKKHSLLKSHGYDVAIALES

SEQ ID NO: 104551 - DNA, 1119 bp, Yersinia aldovae
  CDS (1)..(1119): transl_table=11
atgaaaaaggcattaataacaggaattactggacaagatggttcctaccttgcggagcttttattagataaaggctatgaagttcatggaattcagcgtcgttcatcctctttcaataccagccgaattgatcatatttttcagaattatcaaggcgcagatactcgcttcttccttcattatggtgatttaactgatacctctaatctagtaaggctggttcgagaaattcagccagatgagatttataatttaggagcacaatctcacgttgcggtatcatttgaatccccagaatataccgctgatgtagatgcaatgggtactcttcgccttcttgaagccatacgaattaatggatttgaaaagaaaactcgtttttatcaagcctcaacgtcagagctttatggattggtacaagaaacaccacagcgggagaccactcccttttatccgcgttcaccttacgcagttgcaaaaatgtatgcatattggattactgtaaattacagagaatcatatggcatgtatgcatgtaacggtattttatttaatcacgagtcagcacgccgtggggaaacgttcgtcacacgaaaaattaccagagcgatagcaaatatagctttgggtctacaagagtgcctttatttagggaatatagactctttacgtgattggggtcatgcgaaggactatgttcgtatgcaatggttaatgttacaacaagatcagccagaggattttgttattgccaccggtaagcaaattacagttcgtgaatttgtgtgtatgtcagcacgagaagtcggtatcgaacttgaatttactggggaaggaatcgatgaaattggtagaattatttcaatagagggtgatagtgcacccactgctcgcatcggtgacattgtcgtacgcatagatccaaaatatttccgcccatcagaagttgaaactcttcttggggatcctggcaaagccaaacaaaaattaggttggctacccgaaattagtgttgaagagttgtgtgctgaaatggtagctaatgacttgctacaagctaagcaacatgcattattgaaagctaatggctttgatgtctccatttcaatagagagctaa

SEQ ID NO: 104552 - protein, 372 aa, Yersinia aldovae
MKKALITGITGQDGSYLAELLLDKGYEVHGIQRRSSSFNTSRIDHIFQNYQGADTRFFLHYGDLTDTSNLVRLVREIQPDEIYNLGAQSHVAVSFESPEYTADVDAMGTLRLLEAIRINGFEKKTRFYQASTSELYGLVQETPQRETTPFYPRSPYAVAKMYAYWITVNYRESYGMYACNGILFNHESARRGETFVTRKITRAIANIALGLQECLYLGNIDSLRDWGHAKDYVRMQWLMLQQDQPEDFVIATGKQITVREFVCMSAREVGIELEFTGEGIDEIGRIISIEGDSAPTARIGDIVVRIDPKYFRPSEVETLLGDPGKAKQKLGWLPEISVEELCAEMVANDLLQAKQHALLKANGFDVSISIES

SEQ ID NO: 104553 - DNA, 1119 bp, Citrobacter freundii
  CDS (1)..(1119): transl_table=11
atgtcaaaagttgctcttattactggtgtaaccggccaagatggttcttacttggcagaatttctgctagaaaaaggttatgaagttcatggtatcaaacgtcgagcatcatcattcaacacaggtagagttgatcatatttaccaagatccacatttgggtaatccaaagtttaatctgcattatggtgacctgacggatacttccaacctgactcgtattttgaaagaagttcagccggatgaggtctataacttgggagccatgagtcatgtagctgtgtcgtttgagtcccctgaatatactgctgacgtagatgctatggggacattgcgcctattggaagctattcgtttcttaggactagaaaagaagactcgcttttatcaagcctccacttctgaactgtacggtttggtacgagagatcccgcagaaagaaacaacaccgttttatccgagatcaccttatgccgttgccaaactctatgcttactggataaccgtcaactaccgtgaatcctacgggatgtatgcctgcaacggtattctgttcaaccacgaatctcctcgtcgcggcgaaacgttcgtaactcgcaaaattacccgcgcaatggctaatattgctcagggattggaatcctgcctctaccttggcaatatggactccttgcgtgactgggggcatgccaaagattatgtccggatgcaatggatgatgctgcaacaagaacagccagaagactttgtgattgctactggtgtacagtattccgtccgtgattttgttgaaatgtctgccgcgcaattggggattaaattgagctttgagggcgatggcgtgaatgagaaaggcattgtagcttcagtgaccggacatgatgctccgggtgttaaagtgggggatgtgattgtggaagtagatccgcgttatttccgtcctgcagaagttgaaacacttcttggagatccaagtaaagcacatgaaaagctagggtggaagcctgaaattactcttcaggagatggttgctgagatggtcgcttctgaccttgaggccgctaagaagtattctctcctgaaagagagtgggtttgatgtcaatttatctttggaataa

SEQ ID NO: 104554 - protein, 372 aa, Citrobacter freundii
MSKVALITGVTGQDGSYLAEFLLEKGYEVHGIKRRASSFNTGRVDHIYQDPHLGNPKFNLHYGDLTDTSNLTRILKEVQPDEVYNLGAMSHVAVSFESPEYTADVDAMGTLRLLEAIRFLGLEKKTRFYQASTSELYGLVREIPQKETTPFYPRSPYAVAKLYAYWITVNYRESYGMYACNGILFNHESPRRGETFVTRKITRAMANIAQGLESCLYLGNMDSLRDWGHAKDYVRMQWMMLQQEQPEDFVIATGVQYSVRDFVEMSAAQLGIKLSFEGDGVNEKGIVASVTGHDAPGVKVGDVIVEVDPRYFRPAEVETLLGDPSKAHEKLGWKPEITLQEMVAEMVASDLEAAKKYSLLKESGFDVNLSLE

SEQ ID NO: 104555 - DNA, 972 bp, Aneurinibacillus thermoaerophilus
  CDS (1)..(972): transl_table=11
atgaaaaaagctttaattacaggaattacaggacaagatggctcttatttagcagaactactattagaaaaaggatatgaagtgtacggtttaattcgtcgcactagtactcctattatggttaatatcgagcatttaaaagataaaatcacactagtttccggtgatctgacagatttatcttcgctagtggcaattataaaaaagattcaaccggatgaagtatataacttaggagcgcaatcttttgtagcaacatcatgggaacagtctattttaactggtcaagtaacggcgctgggagttacaaatattttagaggcattgcgaatggaaaaaccagatgctaagttttatcaagcatcttctagtgaaatgtttggaaaagttgttgaaatgccacaaaaagaaacgactccattttatccgcgtagcccatatggtgtagcaaaagtatacggacactggattactgtgaattaccgcgagagttttgatatgttcgcatgttcagggattttatttaatcacgaatctccgagacgtggtatagaattcgttacacgtaaaattacagacggggtagcgagaattaaacacggtttacaaaaagaacttcgtcttgggaacttggatgcacagcgtgattggggctttgcaaaagactatgttgaatgtatgtggttgatgttacagcaagaaaaagcagatgattatgtgattgcgacaggagaaatgcattccgttcgtgaattctgtgagattgcttttggacatgtagggctgaattatgaggattacgtagttgttgatccaaaattcttccgggctgccgaggtagatgtattgttgggagatgctagtaaagcaattaacaaactaggatggaatccacgtaaaacatcttttgaacaattagtaacaatgatggtggataatgatatggatttaatccgtaaacagttaaaataa

SEQ ID NO: 104556 - protein, 323 aa, Aneurinibacillus thermoaerophilus
MKKALITGITGQDGSYLAELLLEKGYEVYGLIRRTSTPIMVNIEHLKDKITLVSGDLTDLSSLVAIIKKIQPDEVYNLGAQSFVATSWEQSILTGQVTALGVTNILEALRMEKPDAKFYQASSSEMFGKVVEMPQKETTPFYPRSPYGVAKVYGHWITVNYRESFDMFACSGILFNHESPRRGIEFVTRKITDGVARIKHGLQKELRLGNLDAQRDWGFAKDYVECMWLMLQQEKADDYVIATGEMHSVREFCEIAFGHVGLNYEDYVVVDPKFFRAAEVDVLLGDASKAINKLGWNPRKTSFEQLVTMMVDNDMDLIRKQLK

SEQ ID NO: 104557 - DNA, 1209 bp, Streptomyces sp
  CDS (1)..(1209): transl_table=11
atgtccgcgacgaggacggctcgtgagcgcagccgtgcgtctcgtgctccggaggggggcaaggctctgccctccgccggagcgtgtcagtacgcatgggggtccatcagtccgcccccgccggcgcggacacccgcccgaccggtcctcaccgtggcggtggaaagaggaaagatgtccaagcgtgcactcatcaccggaatcaccggacaggacggttcgtacctggccgaacacctcctcgaccaggggtaccaggtctgggggctctgccggggtcaggccaacccccgcaaggaccggatcgccaagctgatcccggagctgtccttcgtggacggcgacctcatggaccagggcagcctggtctcggcggtcgacctggtccagcccgacgaggtctacaacctgggcgccatctccttcgtgccgatgtcctggcaacagcccgaactggtcacggaggtcaacggcaccggcgtgctgcgcatgctggaggcggtccgcatcgtctccggcctcaccaagtcctccggcggctcgccccgcggccagatccgcttctaccaggcgtcctcctccgagatgtacggcaaggtggcggagagcccgcagcgggagaccacctccttccacccccgcagcccgtacggcgtggccaaggccttcggccactacatcacccagaactaccgcgagtcgtacgggatgtacggggtctccgggatcctgttcaaccacgagtcgccgcgccgtggcgccgagttcgtcacccgcaagatctcgctggccgtcgcccagatcaaactgggccagatggacaagctgcacctcggcaacctcgacgccgagcgcgactggggcttcgcgggtgactacgtccgcgccatgcacctgatgctccagcaggagcaggccggtgactacgtggtggggaccggagccatgcaccaggtccgcgacgcggcccggatcgccttcgagcacgtcggcctcgactggcaggagcacgtcgtcgtcgaccccggcctggtgcgccccgccgaggtcgagaccctctgcgccgactcgggcaacgcccggcgcgaactgggctgggagcccgaggtcgacttcgagcagctgatgcgcatgatggtcgagtccgacctgcgccaggcatcgcgggagcgggactacagccagctcctggccaccggcagctggtag

SEQ ID NO: 104558 - protein, 402 aa, Streptomyces sp
MSATRTARERSRASRAPEGGKALPSAGACQYAWGSISPPPPARTPARPVLTVAVERGKMSKRALITGITGQDGSYLAEHLLDQGYQVWGLCRGQANPRKDRIAKLIPELSFVDGDLMDQGSLVSAVDLVQPDEVYNLGAISFVPMSWQQPELVTEVNGTGVLRMLEAVRIVSGLTKSSGGSPRGQIRFYQASSSEMYGKVAESPQRETTSFHPRSPYGVAKAFGHYITQNYRESYGMYGVSGILFNHESPRRGAEFVTRKISLAVAQIKLGQMDKLHLGNLDAERDWGFAGDYVRAMHLMLQQEQAGDYVVGTGAMHQVRDAARIAFEHVGLDWQEHVVVDPGLVRPAEVETLCADSGNARRELGWEPEVDFEQLMRMMVESDLRQASRERDYSQLLATGSW

SEQ ID NO: 104559 - DNA, 1125 bp, Escherichia coli
  CDS (1)..(1125): transl_table=11
atggacaaaaataaaattgcactcatcaccggtgtaaccggacaagatggttcttacctggcagagtttctgctggaaaaaggttacgaggtgcatggtattaagcgtcgcgcatcgtcattcaacaccgagcgcgtggatcacatttatcaggatccgcacacctgcaacccgaaattccatctgcattatggcgacctgagtgatacctctaacctgacgcgcattttgcgtgaagtacagccggatgaagtgtacaacctgggcgcaatgagccacgttgcggtctcttttgagtcaccagaatataccgctgacgtcgacgcgatgggtacgctgcgcctgctggaggcgatccgcttcctcggtctggaaaagaaaacccgtttctatcaggcttccacctctgaactgtatggtctggtgcaggaaattccgcagaaagaaaccacgccgttctacccgcgatctccgtatgcggtcgccaaactgtacgcctactggatcaccgttaactaccgcgaatcctacggcatgtacgcctgtaacggtattctcttcaaccatgaatccccgcgccgcggtgaaactttcgttacccgcaaaatcacccgcgcaatcgccaacatcgcccaggggctggagtcgtgcctgtacctcggcaatatggattccctgcgtgactggggccatgccaaagactacgtaaaaatgcagtggatgatgctgcaacaggaacagccggaagatttcgttattgccaccggcgttcagtactccgtgcgtcagttcgtggaaatggcagcagagcaagtcggaatcaaattgcgctttgaaggtgtcggcgtaaatgagaagggaatcgttgtttctgttactggtaaggatgccccagccgttaaatccggagatataattgttaaggttgacccgcgctatttccgtccggcagaagtagaaacgctgctcggcgacccgaccaaagcgcacgaaaaactgggctggaaaccggaaatcaccctcagagagatggtgtctgaaatggtggctaatgacctcgaagcggcgaaaaaacactctctgctgaaatctcatggatttaatgttagtttatctcaggaataa

SEQ ID NO: 104560 - protein, 374 aa, Escherichia coli
MDKNKIALITGVTGQDGSYLAEFLLEKGYEVHGIKRRASSFNTERVDHIYQDPHTCNPKFHLHYGDLSDTSNLTRILREVQPDEVYNLGAMSHVAVSFESPEYTADVDAMGTLRLLEAIRFLGLEKKTRFYQASTSELYGLVQEIPQKETTPFYPRSPYAVAKLYAYWITVNYRESYGMYACNGILFNHESPRRGETFVTRKITRAIANIAQGLESCLYLGNMDSLRDWGHAKDYVKMQWMMLQQEQPEDFVIATGVQYSVRQFVEMAAEQVGIKLRFEGVGVNEKGIVVSVTGKDAPAVKSGDIIVKVDPRYFRPAEVETLLGDPTKAHEKLGWKPEITLREMVSEMVANDLEAAKKHSLLKSHGFNVSLSQE

SEQ ID NO: 104561 - DNA, 1125 bp, Klebsiella pneumoniae
  CDS (1)..(1125): transl_table=11
atgactaatgtaaaaaaagctctgattaccggtatcactgggcaagatggttcatatctcgcagaatttctgttagaaaagggatatgaagttcacgggattaaaagacgttcttcttcttttaacactgatcgcgtagatcatatttatcaagatccacattcatcaaacccaaaatttcatttacactatggtgatttatcagacacatcaaacttaactcgtttgatctccgagattcaacccgatgaagtgtataacttgggggctatgagtcatgtcgctgtgtctttcgaatctcctgaatacacagcggacgtcgatgctattggcacattacgtcttttagaggctattcgttttctgggactagagaagaaaactcgtttctatcaagcatcaacttctgaactttatggtttagtgcaggaaattccgcaaaaagagacaactccattctatccgcgttctccgtacgcagttgccaagctttatgcatattggattactgttaactatcgtgagtcatatggaatgtacgcgtgtaatggtattctgtttaaccatgaatcgccacgccgtggtgaaacgtttgtaacaagaaaaattacacgtgggctttccaatattgctcaaggattagaaaaatgtctttatcttggtaacatggattctttgcgagattggggtcatgcgaaagattacgttaaaatgcaatggctaatgcttcaacaagaacaaccggaagattatgttattgcgaccggcgtccaatactctgtacgtcaattcgtagattttgctgcatcagagttgggtattaaattgcgttttgaggggcatggcgttgatgaagtggggattgtagaaagtgtttctggtgaagacgcacctgcagttaaagtaggtgatataattgtagctgttgatccacgatatttccgtcctgctgaagtggaaaccttgcttggagacccttcgaaagcccacgataaattaggatggaaacctgaaacaacattacaagaaatggttgtcgaaatggtaagaaaggatcttgaggccgctaaaaagcattctcttctcaaatcacatggttacgaggtttcaatttctctggagtaa

SEQ ID NO: 104562 - protein, 374 aa, Klebsiella pneumoniae
MTNVKKALITGITGQDGSYLAEFLLEKGYEVHGIKRRSSSFNTDRVDHIYQDPHSSNPKFHLHYGDLSDTSNLTRLISEIQPDEVYNLGAMSHVAVSFESPEYTADVDAIGTLRLLEAIRFLGLEKKTRFYQASTSELYGLVQEIPQKETTPFYPRSPYAVAKLYAYWITVNYRESYGMYACNGILFNHESPRRGETFVTRKITRGLSNIAQGLEKCLYLGNMDSLRDWGHAKDYVKMQWLMLQQEQPEDYVIATGVQYSVRQFVDFAASELGIKLRFEGHGVDEVGIVESVSGEDAPAVKVGDIIVAVDPRYFRPAEVETLLGDPSKAHDKLGWKPETTLQEMVVEMVRKDLEAAKKHSLLKSHGYEVSISLE

SEQ ID NO: 104563 - DNA, 1023 bp, Mycobacterium avium
  CDS (1)..(1023): transl_table=11
gtgaagcgagcactcataaccggcatcacgggccaggacggttcctacctcgccgagttgttgttgagcaaggggtatgaagtccacgggctcatccgacgggcatcgacgttcaacacgacacggatcgaccacctctacgttgacccgcaccaacagggcgcccggctgttcttgcattatggcgatctcaccgacgggactcgcctggtcaccttgctgagcacgatcgatcctgacgaagtttataacctcgcggcgcagtcccacgtgcgcgtcagcttcgacgaacccgtatacacggcagatacgactgggatgggatcgatccggctgctcgaagcggtccggctttcccgagtggaatgccgcttctaccaagcatcgtcgtcggagatgttcggcgcttcgccgccgccacagaacgagctaacgccgttctatccgcgctctccctacggtgcggcgaaggtttactcgtattgggtgactcgcaactaccgggaagcatacggaatgtttgccgtcaacgggatcttgttcaaccatgaatcaccgaggcgtggtgaaacattcgtcacccggaagatcacgcgcgccgtcgcccggatcaaagccggcgtccagtcagatgtctacctgggcaatctcgacgcagtccgcgactgggggtatgcgcccgaatatgtggaagggatgtggcggatgctgcaggcacctgagcccgacgatttcgttttggccacggggcgtggttacacagtgcgcgagttcgcgcagaccgccttcgagcgcgcagggcttgactgggagagacacgtcaaatttgacgaccgttacctgcggcctacagaggtggattcgctgatcggcgatgcatccaaagccgcccgtgacctcgggtggaaggccgccgtgcacaccggcgaactggcccgaatcatggtggacgccgacattgccgcgttggaatgcgacggcagaccatggattgaccggccgaacttgcctgcatggagctga

SEQ ID NO: 104564 - protein, 340 aa, Mycobacterium avium
MKRALITGITGQDGSYLAELLLSKGYEVHGLIRRASTFNTTRIDHLYVDPHQQGARLFLHYGDLTDGTRLVTLLSTIDPDEVYNLAAQSHVRVSFDEPVYTADTTGMGSIRLLEAVRLSRVECRFYQASSSEMFGASPPPQNELTPFYPRSPYGAAKVYSYWVTRNYREAYGMFAVNGILFNHESPRRGETFVTRKITRAVARIKAGVQSDVYLGNLDAVRDWGYAPEYVEGMWRMLQAPEPDDFVLATGRGYTVREFAQTAFERAGLDWERHVKFDDRYLRPTEVDSLIGDASKAARDLGWKAAVHTGELARIMVDADIAALECDGRPWIDRPNLPAWS

SEQ ID NO: 104565 - DNA, 1119 bp, Erwinia chrysanthemi
  CDS (1)..(1119): transl_table=11
atgaagaaagttgctttgatttccggtgtaacagggcaggatggttcttatcttgctgagttccttttggaaaaaggttacgaagttcacggtattaagcgccgttcatcactatttaatacacagcgtgttgaccatttgtatcaggatccgcatgaagagaatgtaaaattcaaccttcattatggcgatctgactgatacctccaacctgactcgtattattgctgaagttcagcctgacgaaatttacaacctaggcgcacagtcacacgttgcagtcagcttcgaatccccagaatacaccgcggatgttgatgctatcggtaccgttcgcctgctggaatctatccgtttcctgggcctggccaacaagacccgtttttatcaggcatcaacttctgaactgtatggtctggtgcaggaaatcccgcagaaagaaaccacgccgttctacccgagaagcccttacgccgtagctaaaatgtacgcttactggattacagtaaactacagagaatcctatggtatgtacgcctgtaacggcatcctcttcaaccatgaatctccgcgtcgcggcgaaacgtttgtgacccgtaaaatcacacgcggcctgtccaacatcgcacaaggcctggaaaaatgcatttacatgggcaacctcgattctctgcgcgactggggtcacgctcgtgactacgtcaaaatgcagtggatgatgctgcagcaggaaaaaccggaagacttcgtcatcgcgaccggcgttcagtatagcgtacgtgacttcatcagaatgtctgccgccaaactgggtattgaactggaattcaccggtactggcgtcaacgaaaaagcggtagtatccaaaatcacgggcaataatgcgccggcactgaaagtaggtgatgtgatcgtggctgtcgacccgcgttacttccgtcctgccgaagtagatacgctgctgggtgacccgagcaaagcgaaaaatgtactgggctgggtaccggaaacgacactggaagaaatgatcgatgaaatggtcgcttatgacctggaaaaagctaagcaattcgctttgctgaaatccaacggttacgatgtaagcgtaagcgtagaataa

SEQ ID NO: 104566 - protein, 372 aa, Erwinia chrysanthemi
MKKVALISGVTGQDGSYLAEFLLEKGYEVHGIKRRSSLFNTQRVDHLYQDPHEENVKFNLHYGDLTDTSNLTRIIAEVQPDEIYNLGAQSHVAVSFESPEYTADVDAIGTVRLLESIRFLGLANKTRFYQASTSELYGLVQEIPQKETTPFYPRSPYAVAKMYAYWITVNYRESYGMYACNGILFNHESPRRGETFVTRKITRGLSNIAQGLEKCIYMGNLDSLRDWGHARDYVKMQWMMLQQEKPEDFVIATGVQYSVRDFIRMSAAKLGIELEFTGTGVNEKAVVSKITGNNAPALKVGDVIVAVDPRYFRPAEVDTLLGDPSKAKNVLGWVPETTLEEMIDEMVAYDLEKAKQFALLKSNGYDVSVSVE

SEQ ID NO: 104567 - DNA, 1119 bp, Escherichia coli
  CDS (1)..(1119): transl_table=11
atgactaaagttgctcttattactggtgtaaccggacaagatggatcatacttggcagagtttctgctggaaaaaggttatgaagttcatggtattaagcgtcgtgcatcgtcgtttaatactgaacgtgttgatcatatttatcaagatccgcattcagccaagccaaacttccatttgcactatggtgatctcacggatacttccaacattacgcgtattctgcaagaagttaaaccggatgaagtctacaacttgggggctatgagtcacgtggctgtgtcatttgaatcaccagagtataccgcggatgttgatgctattggtacattacgcctactggaagcgatccgtatccttggcttagagaagaaaacacgcttttatcaagcgtccacatctgaactttatggtctggtacaagaaatacctcagaaagagacgacacctttttacccacgttcaccgtatgctgtagccaaactgtatgcttactggatcaccgttaactaccgtgagtcttacggtatatatgcttgtaacggaattctatttaaccatgaatctccgcgtcgtggcgaaactttcgttacgcgcaaaattacccgtgcaattgccaacattgctcaggggctagagtcttgcctttacttggggaatatggattcactacgtgactggggacatgctaaagattatgtcaggatgcagtggatgatgctacagcaggaacaacctgaagatttcgttattgccactggtgttcagtactctgtacgtgagtttgtggaaatgactgcagagcaacttggcatcaaattgagctttgaaggaaaaggtgtagatgaaaaaggtattgttgtttccgtgacgggcgataaagcacctggcgtcaaaacaggagacgtcatagttgcggttgacccgcgttatttccgcccggcagaagtagaaacattgttgggtgatccagcaaaagcgcatgaaaaacttggctggaagcctgaaattactttacgtgagatgatctcagaaatggtcgctaatgatttgcagacagcaaaaaaacacgtactgttgaaatcgcacggttttaatgccaatttagcccaagagtaa

SEQ ID NO: 104568 - protein, 372 aa, Escherichia coli
MTKVALITGVTGQDGSYLAEFLLEKGYEVHGIKRRASSFNTERVDHIYQDPHSAKPNFHLHYGDLTDTSNITRILQEVKPDEVYNLGAMSHVAVSFESPEYTADVDAIGTLRLLEAIRILGLEKKTRFYQASTSELYGLVQEIPQKETTPFYPRSPYAVAKLYAYWITVNYRESYGIYACNGILFNHESPRRGETFVTRKITRAIANIAQGLESCLYLGNMDSLRDWGHAKDYVRMQWMMLQQEQPEDFVIATGVQYSVREFVEMTAEQLGIKLSFEGKGVDEKGIVVSVTGDKAPGVKTGDVIVAVDPRYFRPAEVETLLGDPAKAHEKLGWKPEITLREMISEMVANDLQTAKKHVLLKSHGFNANLAQE

SEQ ID NO: 104569 - DNA, 1035 bp, Streptomyces nodosus
  CDS (1)..(1035): transl_table=11
atgcccaagcgcgcactgatcaccggaattaccggccaggacgggtcctatctggcggagcacctgctgtcgcaggggtaccaggtgtggggtctcatccgtggccaggccaacccacgcaagttccgggtgagccggctcgcctccgaactctccttcgtcgacggtgacctcatggaccagggcagcctggtctcggcggtcgacaaggtacagccggacgaggtgtacaacctcggcgcgatctcgttcgtgccgatgtcctggcagcaggccgagctggtcaccgaggtgaacggcatgggcgtgctgcgggtcctggaggccatccgcatggtgagcggactgagcatgtcccgcaccgcgggcaccgagggccagatccgtttctaccaggcgtcctcctcggagatgttcggcaaggtcgccgagacgccgcagcgggagaccacgctcttccacccgcgcagcccctacggcgcggccaaggcgtacggtcacttcatcacccgcaactaccgtgagtccttcggcatgtacgcggtctccgggatgctgttcaaccatgaatcgccccgccgtggccaggagttcgtgacccgcaagatctccctcgcggtcgcccgcatcaagctggggctccaggacaagctggccctcggcaacatggacgcggtccgcgactggggttacgcgggcgactacgtccgcgccatgcatctgatgctccagcaggacgcccccgacgactatgtgatcggcaccggggagatgcacaccgtgcgcgacgcggtccgcttcgccttcgagcacgtgggcctcgactggaaggactacgtcgtcgtcgaccccgacctcgtgcggcccgccgaggtcgaggtgctgtgcgccgacagctccaaggcacaggcccagctgggctggaagccgagcgtcgatttccaggaactcatgcggatgatggtcgacgccgacctcgcgtccgtttcccggcagaacgaactcgacgaccttctgctggcacacagctggtaa

SEQ ID NO: 104570 - protein, 344 aa, Streptomyces nodosus
MPKRALITGITGQDGSYLAEHLLSQGYQVWGLIRGQANPRKFRVSRLASELSFVDGDLMDQGSLVSAVDKVQPDEVYNLGAISFVPMSWQQAELVTEVNGMGVLRVLEAIRMVSGLSMSRTAGTEGQIRFYQASSSEMFGKVAETPQRETTLFHPRSPYGAAKAYGHFITRNYRESFGMYAVSGMLFNHESPRRGQEFVTRKISLAVARIKLGLQDKLALGNMDAVRDWGYAGDYVRAMHLMLQQDAPDDYVIGTGEMHTVRDAVRFAFEHVGLDWKDYVVVDPDLVRPAEVEVLCADSSKAQAQLGWKPSVDFQELMRMMVDADLASVSRQNELDDLLLAHSW

SEQ ID NO: 104571 - DNA, 1119 bp, Salmonella enterica
  CDS (1)..(1119): transl_table=11
atgaataaagttgcattaattactggcatcactgggcaagatggttcttatttagcagaactgttgctggaaaaaggttatgaagttcatggtattaagcgtcgagcgtcttcatttaatacagagcgagtagatcatatttatcaagatatacatttgaataatcctaaactctatctacactatggcgatttaacagatacttctaatctgacccgtattttacaggaagttcaacctgatgaagtttataatttgggagcgatgagccacgtagctgtatcatttgaatcaccagagtatacagctgacgttgatgcgctcggaacattgcgtcttttagaagcgattaggatattaggactggaaaaaaagacaaaattttatcaggcttcaacatctgaactttatggtttagttcaagaaatcccgcaaaaagaaactacacctttttatccgcgatctccttatgctgttgcgaaactatacgcatactggatcactgttaattatcgtgagtcttatggaatgtttgcatgcaatggtattctttttaaccatgaatctcctcgccgtggtgaaacttttgttactcgaaaaataacgcgaggaattgcaaatattgcgcaaggactcgacaaatgtttatatctcggtaatatggactctcttcgtgattgggggcatgctaaagattatgtaaaaatgcaatggatgatgctgcagcaagaagctcccgaagactttgtaattgcaacaggagttcaatattcggttcgtgactttgttacaatggcagcaaaacaagtaggcatagagttagtatttgaaggtgagggaataaatgaaaaaggtattgttgcttcagtcaatggcaatgatgcaaaagctgtaaaagcgggcgatgtaattatatctgtagatccaagatattttaggcctgctgaagttgaaactttacttggtgatcctactaatgcgcataaaaaattaggctggagtcctgaaattactttatgtgagatggtgaaagagatggtttccagcgatctagctatagcgaaaaagaacgtcttgctgaaaacgaataacattcctactaatattccgcaagaataa

SEQ ID NO: 104572 - protein, 372 aa, Salmonella enterica
MNKVALITGITGQDGSYLAELLLEKGYEVHGIKRRASSFNTERVDHIYQDIHLNNPKLYLHYGDLTDTSNLTRILQEVQPDEVYNLGAMSHVAVSFESPEYTADVDALGTLRLLEAIRILGLEKKTKFYQASTSELYGLVQEIPQKETTPFYPRSPYAVAKLYAYWITVNYRESYGMFACNGILFNHESPRRGETFVTRKITRGIANIAQGLDKCLYLGNMDSLRDWGHAKDYVKMQWMMLQQEAPEDFVIATGVQYSVRDFVTMAAKQVGIELVFEGEGINEKGIVASVNGNDAKAVKAGDVIISVDPRYFRPAEVETLLGDPTNAHKKLGWSPEITLCEMVKEMVSSDLAIAKKNVLLKTNNIPTNIPQE

SEQ ID NO: 104573 - DNA, 1032 bp, Streptomyces natalensis
  CDS (1)..(1032): transl_table=11
atgtccaagcgtgcgctgatcaccggaatcaccgggcaggacggctcctatctggccgagcacctgctcgcccaggggtaccaggtatggggtctgatacgaggtcaggcgaaccccaggaagtcgagggtcagccggctggtgtccgaactgtccttcgtcgacggcgacttgatggaccagtccagcctgtgctccgccgtcgacaaggtgcagcccgacgagatctacaacctcggtgcgatctccttcgtaccgatgtcctggcagcagcccgaactcgtcaccgagatcaacggcatgggcgtcctgcgcatgctggaggcgatccgcatggtcagcgggctgaacggctcccggagtgacggcggcggccagatccggttctaccaggcgtcctcgtcggagatgttcggcaaggtcgccgagaccccgcagcgcgagaccacgatcttccgcccgcgcagcccctacggcgtggcgaagacctacgggcacttcatcacccgcaactaccgtgagtcgttcggtatgtacgcggtctccgggatgctgttcaaccacgaatccccgcgccgtggtgcggagttcgtgacccggaagatctccctcgcggtggcccgtatcaagctcggctaccaggacaagctgtccctgggaaacctcgacgccgtacgcgactggggcttcgccggcgactacgtccgtgccatgcatctgatgctgcaacaggacgagccgggcgactatgtgatcgggaccggcgagatgcactcggtccgcgacgccgtccgcatcgccttcgagcatgtgggcctgaactgggaggactacgtcagcatcgacccctcgctggtgcgcccggccgaggtggagatcctgtgcgcggacgccgagcgcgcccgcacccagctgggctgggagcccagcgtcgacttccccgaactgatgcgcatgatggtcgactccgacctgcgccaggcatcccgcgagcgggagtacggggacctgctgctggcggccagctggtag

SEQ ID NO: 104574 - protein, 343 aa, Streptomyces natalensis
MSKRALITGITGQDGSYLAEHLLAQGYQVWGLIRGQANPRKSRVSRLVSELSFVDGDLMDQSSLCSAVDKVQPDEIYNLGAISFVPMSWQQPELVTEINGMGVLRMLEAIRMVSGLNGSRSDGGGQIRFYQASSSEMFGKVAETPQRETTIFRPRSPYGVAKTYGHFITRNYRESFGMYAVSGMLFNHESPRRGAEFVTRKISLAVARIKLGYQDKLSLGNLDAVRDWGFAGDYVRAMHLMLQQDEPGDYVIGTGEMHSVRDAVRIAFEHVGLNWEDYVSIDPSLVRPAEVEILCADAERARTQLGWEPSVDFPELMRMMVDSDLRQASREREYGDLLLAASW

SEQ ID NO: 104575 - DNA, 1035 bp, Actinobacillus actinomycetemcomitans
  CDS (1)..(1035): transl_table=11
atgaaaacagcaattgtaactggtgcatcaggtcaagatggtgcttatttaagccagcttttattagataaagggtataaagtgtatgccacttatcggcgtagcagctcagtaaatttatggaggattgatgaactaaatatcaggaatcatccgaatttgcatttatttgaatttgatttaactgatatgagttcatgtatttctttagttacaaaagctcaacctggtgaagtatataatttggccgctcaaagttttgtgggtgttagtttttctcagccggtgactactgcagagattacagcaattggggttctaaatttattagaagcaatccggatcattaatcctaagatcaaattctaccaggcaagtacatcggaaatgtttggtaaagtgcaacaaattccacaaacagagaagactccattttatccacgtagtccatatggtgttgcgaaattatatgggcattggattacattaaattatcgagaaagttacgatattttcggctgtagtggaattttgtttaatcatgaaagccctttgcgcggtagagagtttgtgactagaaaaatcaccgacactgtagctaaaattgcactaaacaagcagtcttgtctagaattgggaaatctagatgctaaaagagattgggggtttgcaaaagagtatgtcgaaggtatgtggagaatgttacaagaagatcaaccagatacttatgtcttagctactaatagaactgaaactgtgagagattttgttgctatggcatttcaggctgttaatattcctcttgaatttaatggaaaaggtgagaatgaaattggtgttaatactgataccggggatgtcctggttcgagtgaataaagaatactatagacctgctgaagttgatctattgattggtgattattctaaagcaaaaagaattttaggttgggagccaaaaacttcattagaagagttatgtaaaatgatgattgaagcagatattgaaagaaataaattaggtttttctttttaa

SEQ ID NO: 104576 - protein, 344 aa, Actinobacillus actinomycetemcomitans
MKTAIVTGASGQDGAYLSQLLLDKGYKVYATYRRSSSVNLWRIDELNIRNHPNLHLFEFDLTDMSSCISLVTKAQPGEVYNLAAQSFVGVSFSQPVTTAEITAIGVLNLLEAIRIINPKIKFYQASTSEMFGKVQQIPQTEKTPFYPRSPYGVAKLYGHWITLNYRESYDIFGCSGILFNHESPLRGREFVTRKITDTVAKIALNKQSCLELGNLDAKRDWGFAKEYVEGMWRMLQEDQPDTYVLATNRTETVRDFVAMAFQAVNIPLEFNGKGENEIGVNTDTGDVLVRVNKEYYRPAEVDLLIGDYSKAKRILGWEPKTSLEELCKMMIEADIERNKLGFSF

SEQ ID NO: 104577 - DNA, 1035 bp, Streptomyces noursei
  CDS (1)..(1035): transl_table=11
atgtccaaacgagcgctgatcaccggaatcaccggccaggacggctcctatctcgcggagcacctgctgtcccagggctaccaggtgtggggtctgatccgcggccaggccaatccccgcaagtcccgggtcagccgcctcgcctccgaactcgacttcatcgacggggacctgatggaccagggcagcctggtctccgccgtcgacaccgtgcagcccgacgaggtctacaacctcggcgccatctcgttcgtgccgatgtcctggcagcaggccgagctggtcaccgaggtcaacggcatgggcgtgctgcgcatgctggaagccatccgcatggtcagcggactgtccacctcccgcacggtcagcccgcgcggccagatccgcttctaccaggcgtccagctcggagatgttcggcaaggccgccgagacgccgcagcgcgagaccaccctcttccacccgcgcagcccctacggcgcggcaaaggcgtacgggcactacatcacccgcaactaccgcgagtccttcggcatgtacgcggtctccggcatgctcttcaaccacgaatccccgcgccgcggccaggaattcgtcacccgcaagatcagcctggcggtcgcccgcatcaagcaaggcctccaggacaagctggcactcggcaacctcgacgcggtgcgcgactggggctatgccggcgactacgtccgcgccatgcacctgatgctccagcaggacgccggcgacgactacgtcatcggcaccgggcagatgcactcggtgcgcgacgcggttcggatcgcgttcgaacacgtcggcctgaactgggaggactacgtcgtcatcgaccccgacctggtgcggcccgccgaggtcgaggtgctgtgcgccgacagcgccaaggcccaggaccgcctcggctggaagccggacgtcgacttccccaccctcatgcgcatgatggtcgattccgacctggcgcaggtttcccgcgaaaaccaatacggcgacgtgctgctcgccgccaactggtag

SEQ ID NO: 104578 - protein, 344 aa, Streptomyces noursei
MSKRALITGITGQDGSYLAEHLLSQGYQVWGLIRGQANPRKSRVSRLASELDFIDGDLMDQGSLVSAVDTVQPDEVYNLGAISFVPMSWQQAELVTEVNGMGVLRMLEAIRMVSGLSTSRTVSPRGQIRFYQASSSEMFGKAAETPQRETTLFHPRSPYGAAKAYGHYITRNYRESFGMYAVSGMLFNHESPRRGQEFVTRKISLAVARIKQGLQDKLALGNLDAVRDWGYAGDYVRAMHLMLQQDAGDDYVIGTGQMHSVRDAVRIAFEHVGLNWEDYVVIDPDLVRPAEVEVLCADSAKAQDRLGWKPDVDFPTLMRMMVDSDLAQVSRENQYGDVLLAANW

SEQ ID NO: 104579 - DNA, 1134 bp, Aeromonas hydrophila; identical to SEQ ID NO: 73027
  CDS (1)..(1134): transl_table=11

SEQ ID NO: 104580 - protein, 377 aa, Aeromonas hydrophila; identical to SEQ ID NO: 73028

SEQ ID NO: 104581 - DNA, 1502 bp, Zea mays
  CDS (1)..(1134)
  misc_feature (154)..(154): n is a, g, c or t
  misc_feature (250)..(250): n is a, g, c or t
  misc_feature (264)..(264): n is a, g, c or t
  misc_feature (279)..(279): n is a, g, c or t
  misc_feature (532)..(532): n is a, g, c or t
  misc_feature (1350)..(1350): n is a, g, c or t
  misc_feature (1488)..(1488): n is a, g, c or t
atggctcattccaacggcgcggccgccactgccactgccggcggcggcgacatggacgacgagaccgccccggtgccgcgggccctcgcgccggcgcggaaggtggcgctgatcacgggcatcacggggcagaacgggagctacctcacggagntgctcctgtccaagggatacgaggtgcacggcctcatcctccgctcctccaacttcaacacgcagcggctggaccacatctaccacgacccgcacncggtgccgtcggcnccgcgtcccccgatncggctcttctacgccgacctgtccgactcctcttccctccgccgcgcgctcgacgccacttcccccgacgaggtctacaaccctgccgcgcagtcgcacgtcgccgtctccttcgagatcccgcactactccgccgacgtcaccgccacgggggcgctccgcctcctcgaggccgtccgcctgtcgcgcaagcccatgcgctactaccaggccggttcctcggagatgttcggctccacgccgccgccgcagngcgaggacagccccttccacccgcgctcgccctacgccgccgccaaggtcgccgcgcactggtacaccgtcaactaccgcgaggcctacggcgtattcgcctgcaacggcgtgctcttcaaccacgagtccccgcgccgcggcgagaacttcgtcacgcgcaacatcacgcgcgccgtcggccgcatcaaggtcgggctgcagaccagggtcttcctcggcaacctctcggccgccagggactgggggttcgcgggggactacgtcgaggcaatgtggctcatgctgcagcaggaacagccgggggattacgtcgtcgccactgaggagtcccacaccgtcgaggagttcctgcaggctgccttcggctacgccggcctcagctggaaggatcacgtggtcattgacaagaagtacttccggcctgcagaagtcgacagcctcaagggggacgccaccaaggcgaggaaggtgctcaagtggaagcccaaggttgggttccaggagctcgtggagatgatggtcgatcacgacattgagctcgccaagaaggagaaggtcctggtggatgctgggtaccgtgatcccaagcagcagccatagaaacatcccagttgcttcttgctctgttggggctcggattcagattgttcccctcatacatggtgggtctcaggggtagaggttgactgaagttactatcgatatttatcctggtaagaaataaggattgttgcagtatgatcttacagtgtgttcatttagttttctgactatgttatgtgctttaatcgaatgaatgaataatccgtgccaatntggtatttggaagaggatgatatgcctgcctgattgcagctgttgatgttaagagcaaaagtgtcctcctgatagcagctgcttcagtttgtattgttccacttcagctactcccacacttgttctgatacatggcanaaaagctgttgtag

SEQ ID NO: 104582 - protein, 377 aa, Zea mays
  misc_feature (52)..(52): The Xaa at location 52 stands for Leu, Met, or Val.
  misc_feature (84)..(84): The Xaa at location 84 stands for Ala, Pro, Ser, or Thr.
  misc_feature (93)..(93): The Xaa at location 93 stands for Ile, or Met.
  misc_feature (178)..(178): The Xaa at location 178 stands for Arg, Cys, Gly, or Ser.
MAHSNGAAATATAGGGDMDDETAPVPRALAPARKVALITGITGQNGSYLTEXLLSKGYEVHGLILRSSNFNTQRLDHIYHDPHXVPSAPRPPXRLFYADLSDSSSLRRALDATSPDEVYNPAAQSHVAVSFEIPHYSADVTATGALRLLEAVRLSRKPMRYYQAGSSEMFGSTPPPQXEDSPFHPRSPYAAAKVAAHWYTVNYREAYGVFACNGVLFNHESPRRGENFVTRNITRAVGRIKVGLQTRVFLGNLSAARDWGFAGDYVEAMWLMLQQEQPGDYVVATEESHTVEEFLQAAFGYAGLSWKDHVVIDKKYFRPAEVDSLKGDATKARKVLKWKPKVGFQELVEMMVDHDIELAKKEKVLVDAGYRDPKQQP

SEQ ID NO: 104583 - DNA, 1119 bp, Escherichia coli
  CDS (1)..(1119): transl_table=11
atgaataaagtggcattaattactggtatcactgggcaagatggctcctatttggcagaattattgttagaaaaaggttatgaagttcatggtattaaacgccgtgcatcttcatttaatactgagcgagtggatcacatctatcaggattcacatttagctaatcctaaactttttctacactatggcgatttgacagatacttccaatctgacccgtattttaaaagaagttcaaccagatgaagtttacaatttgggggcgatgagccatgtagcggtatcatttgagtcaccagaatacactgctgatgttgatgcgataggaacattgcgtcttcttgaagctatcaggatattggggctggaaaaaaagacaaaattttatcaggcttcaacttcagagctttatggtttggttcaagaaattccacaaaaagagactacgccattttatccacgttcgccttatgctgttgcaaaattatatgcctattggatcactgttaattatcgtgagtcttatggtatgtttgcctgcaatggtattctctttaaccacgaatcacctcgccgtggcgagacctttgttactcgtaaaataacacgcgggatagcaaatattgctcaaggtcttgataaatgcttatacttgggaaatatggattctctgcgtgattggggacatgctaaggattatgtcaaaatgcaatggatgatgctgcagcaagaaactccagaagattttgtaattgctacaggaattcaatattctgtccgtgagtttgtcacaatggcggcagagcaagtaggcatagagttagcatttgaaggtgagggagtaaatgaaaaaggtgttgttgtttcggtcaatggcactgatgctaaagctgtaaacccgggcgatgtaattatatctgtagatccaaggtattttaggcctgcagaagttgaaaccttgcttggcgatcctactaatgcgcataaaaaattaggatggagccctgaaattacattgcgtgaaatggtaaaagaaatggtttccagcgatttagcaatagcgaaaaagaacgtcttgctgaaagctaataacattgccactaatattccgcaagaataa

SEQ ID NO: 104584 - protein, 372 aa, Escherichia coli
MNKVALITGITGQDGSYLAELLLEKGYEVHGIKRRASSFNTERVDHIYQDSHLANPKLFLHYGDLTDTSNLTRILKEVQPDEVYNLGAMSHVAVSFESPEYTADVDAIGTLRLLEAIRILGLEKKTKFYQASTSELYGLVQEIPQKETTPFYPRSPYAVAKLYAYWITVNYRESYGMFACNGILFNHESPRRGETFVTRKITRGIANIAQGLDKCLYLGNMDSLRDWGHAKDYVKMQWMMLQQETPEDFVIATGIQYSVREFVTMAAEQVGIELAFEGEGVNEKGVVVSVNGTDAKAVNPGDVIISVDPRYFRPAEVETLLGDPTNAHKKLGWSPEITLREMVKEMVSSDLAIAKKNVLLKANNIATNIPQE

SEQ ID NO: 104585 - DNA, 1032 bp, Mycobacterium avium
  CDS (1)..(1032): transl_table=11
gtgaagcgagcgcttataacagggatcacggggcaggatggttcctacctcgccgagctactactgagcaagggatacgaggttcacgggctcgttcgtcgagcttcgacgtttaacacgtcgcggatcgatcacctctacgttgacccacaccaaccgggcgcgcgcttgttcttgcactatgcagacctcactgacggcacccggttggtgaccctgctcagcagtatcgacccggatgaggtctacaacctcgcagcgcagtcccatgtgcgcgtcagctttgacgagccagtgcataccggagacaccaccggcatgggatcgatccgacttctggaagcagtccgcctttctcgggtggactgccggttctatcaggcttcctcgtcggagatgttcggcgcatctccgccaccgcagaacgaatcgacgccgttctatccccgttcgccatacggcgcggccaaggtcttctcgtactggacgactcgcaactatcgagaggcgtacggattattcgcagtgaatggcatcttgttcaaccatgagtccccccggcgcggcgagactttcgtgacccgaaagatcacgcgtgccgtggcgcgcatccgagctggcgtccaatcggaggtctatatgggcaacctcgatgcgatccgcgactggggctacgcgcccgaatatgtcgaggggatgtggaggatgttgcaagcgcctgaacctgatgactacgtcctggcgacagggcgtggttacaccgtacgtgagttcgctcaagctgcttttgaccatgtcgggctcgactggcaaaagcacgtcaagtttgacgaccgctatttgcgtcccaccgaggtcgattcgctagtaggagatgccgacaaggcggcccagtcactcggctggaaagcttcggttcatactggtgaactcgcgcgcatcatggtggacgcggacatcgccgcgttggagtgcgatggcacaccatggatcgacacgccgatgttgcctggttggggcagagtaagttga

SEQ ID NO: 104586 - protein, 343 aa, Mycobacterium avium
MKRALITGITGQDGSYLAELLLSKGYEVHGLVRRASTFNTSRIDHLYVDPHQPGARLFLHYADLTDGTRLVTLLSSIDPDEVYNLAAQSHVRVSFDEPVHTGDTTGMGSIRLLEAVRLSRVDCRFYQASSSEMFGASPPPQNESTPFYPRSPYGAAKVFSYWTTRNYREAYGLFAVNGILFNHESPRRGETFVTRKITRAVARIRAGVQSEVYMGNLDAIRDWGYAPEYVEGMWRMLQAPEPDDYVLATGRGYTVREFAQAAFDHVGLDWQKHVKFDDRYLRPTEVDSLVGDADKAAQSLGWKASVHTGELARIMVDADIAALECDGTPWIDTPMLPGWGRVS

SEQ ID NO: 104587 - DNA, 1122 bp, Vibrio cholerae
  CDS (1)..(1122): transl_table=11
atgaataaaaaagttgcgttaatcacaggcattactggacaagatggttcttatctagcggagtttttgctagaaaaagggtatgaagtacatggaattaaaagacgttcatctttattcaatacacaacgtgttgatcatctttacaaagacccacatgaggaagatgtaaatttcaaactacattacggagaccttacggattcctctaacttgactcgtatattagcggaagtacagccagatgaagtctataacttgggcgcgcagtcccatgtggcggttagtttccagtcaccggaatatacagcggacgtagatgctattggaactttaaggctactagaagcaatcagatttttaggtttgacgaaaaaaactaagttttatcaagcctcaacttcagagctttatggcttagtacaagaaatacctcagaaagaaactacccctttttatcctagaagcccttatgctgtggcaaagatgtatgcgtattggataacaattaattatagagaatcgtacggaatatacgcgtgtaatggcatactttttaaccacgaatcccctagacgaggagaaacttttgtaactcgcaaaataactcgggggatggcaaacattgcgcaagggttagaaaaatgcctttttatgggaaatttggacgctcttcgagattgggggcatgctaaagattacgttaagatgcaatggatgatgttacagcaagatgaacctagagattttgttattgctacaggtgtacagtatagcgtaagagagtttattgatatgtcagcacgagaactaggcattgagttagaatttgtcggtaagggtgtagatgaaaaagctgtagtgaagtcagttattggaacgaaagctcctgcaatcaaggttggtgacattattgtagctgtggatcctgcatattttagacccgcagaggtagaaacgctgttaggtgatcctagcctagctaagaaggagcttggatgggtgccagaaattactttacaacagatggtttctgaaatggtagcttctgatttagaacaagctcaaagtcatgcactattgaaaaaacatggctataacgtaaatgtatctgtagagtga

SEQ ID NO: 104588 - protein, 373 aa, Vibrio cholerae
MNKKVALITGITGQDGSYLAEFLLEKGYEVHGIKRRSSLFNTQRVDHLYKDPHEEDVNFKLHYGDLTDSSNLTRILAEVQPDEVYNLGAQSHVAVSFQSPEYTADVDAIGTLRLLEAIRFLGLTKKTKFYQASTSELYGLVQEIPQKETTPFYPRSPYAVAKMYAYWITINYRESYGIYACNGILFNHESPRRGETFVTRKITRGMANIAQGLEKCLFMGNLDALRDWGHAKDYVKMQWMMLQQDEPRDFVIATGVQYSVREFIDMSARELGIELEFVGKGVDEKAVVKSVIGTKAPAIKVGDIIVAVDPAYFRPAEVETLLGDPSLAKKELGWVPEITLQQMVSEMVASDLEQAQSHALLKKHGYNVNVSVE

SEQ ID NO: 104589 - DNA, 1119 bp, Vibrio cholerae
  CDS (1)..(1119): transl_table=11
atgaagaaaaaagcccttatcactggtgtaactggtcaagacggttcttatttagccgagtttttgttagcaaaaggctacgaagtgcatggtattaaacgtcgtgcgtcttcttttaacactcagcgtgtggatcacatctatcaagatccgcatgtggataatgcgagttttattcttcattatggtgatttgactgactcttctaatttgacgcgtattttgcaggaagtgaaaccagatgaagtgtacaacctaggcgctcagtctcatgtggctgtgtcgtttgaatctcctgaatacacagcggatgtggatgccatgggcacactgcgtttgttggaagcgattcgtttgctaggattggagaagacgaccaagttttatcaagcgtcgacgtctgagctttacggtcttgtgcaagaaaccccacaaaaagaaaccacgccattttatcctcgctccccttatgcggtggcgaaaatgtacgcttactggatcgtggtgaattaccgtgaatcctatggcatgtacgcgtgcaacggtattttgtttaaccatgaatcgccacgtcgtggtgagacctttgtgactcgtaagattacccgtggtttagcgaacatcgcccagggtttagagaagtgcttgtacatgggcaacatggatgcgctacgtgactggggccatgccaaagactatgttcgtatgcagtggatgatgttgcaacaagatcaacctgaagactttgttatcgcaacgggtgtgcaatattccgtgcgtcagtttattgaatggtctgcaaaagagttgggtgtgaccttaacattcgaaggccaaggcgtggatgaaaaagggattgttacggcaatcgaaggcgataaagcgccagccctgaaagtcggtgatgtggtagtacagatcgacccacgttatttccgccctgcggaagtggaaaccttgttaggtgatccaagcaaagcgaaacagaagctaggctggacaccagaaatcacagtacaagaaatgtgcgctgagatggtgatggaagatctgaaagtggcgcaacgccatgcgctattgaagcttcatggacatgatgtacctgtatcggtagagtaa

SEQ ID NO: 104590 - protein, 372 aa, Vibrio cholerae
MKKKALITGVTGQDGSYLAEFLLAKGYEVHGIKRRASSFNTQRVDHIYQDPHVDNASFILHYGDLTDSSNLTRILQEVKPDEVYNLGAQSHVAVSFESPEYTADVDAMGTLRLLEAIRLLGLEKTTKFYQASTSELYGLVQETPQKETTPFYPRSPYAVAKMYAYWIVVNYRESYGMYACNGILFNHESPRRGETFVTRKITRGLANIAQGLEKCLYMGNMDALRDWGHAKDYVRMQWMMLQQDQPEDFVIATGVQYSVRQFIEWSAKELGVTLTFEGQGVDEKGIVTAIEGDKAPALKVGDVVVQIDPRYFRPAEVETLLGDPSKAKQKLGWTPEITVQEMCAEMVMEDLKVAQRHALLKLHGHDVPVSVE

SEQ ID NO: 104591 - DNA, 972 bp, Pseudomonas aeruginosa
  CDS (1)..(972): transl_table=11
atgacaagaagtgcactggtaactgggatcaccggtcaggacggagcgtacctggccaagctgctgctggagaagggctaccgggtccacggcctggtggcgcggcgcagcagcgacacgcgctggcgcctgcgtgaactggggatcgaaggcgatatccagtacgaggacggcgacatggccgatgcctgttcggtgcagcgcgcggtgatcaaggcgcagccgcaggaggtctacaacctggcggcacagagcttcgtcggggcttcctggaaccagccggtgaccaccggcgtcgtcgacggcctgggcgtgacccacctgctcgaggcgatccgccagttcagcccggaaacgcgcttctaccaggcctccaccagcgagatgttcggcctgatccaggccgagcgccaggacgagaacacgccgttctacccgcgcagcccctacggcgtggccaagctctatggccactggatcaccgtcaactatcgcgagagcttcggcctgcacgcctccagcggcatcctgttcaaccacgaatcgccgctgcgcggcatcgagttcgtcacgcgcaaggttaccgacgcggtggcccgcatcaagctcggcaagcagcaggaattgcgcctgggcaacgtcgacgccaagcgcgactggggctttgccggggactacgtcgaagccatgtggctgatgttgcagcaggacaaggccgacgactacgtggtggccaccggtgtcactaccaccgtgcgcgacatgtgccagatcgctttcgagcatgtgggcctggactaccgcgacttcctcaagatcgacccggcgttcttccggcccgccgaggtcgacgtgctgctgggtaatccggccaaggcccagcgtgtgctcggctggaagcccaggaccagcctggacgagctgatccggatgatggtcgaggcggacctgcgacgcgtttcccgggagtaa

SEQ ID NO: 104592 - protein, 323 aa, Pseudomonas aeruginosa
MTRSALVTGITGQDGAYLAKLLLEKGYRVHGLVARRSSDTRWRLRELGIEGDIQYEDGDMADACSVQRAVIKAQPQEVYNLAAQSFVGASWNQPVTTGVVDGLGVTHLLEAIRQFSPETRFYQASTSEMFGLIQAERQDENTPFYPRSPYGVAKLYGHWITVNYRESFGLHASSGILFNHESPLRGIEFVTRKVTDAVARIKLGKQQELRLGNVDAKRDWGFAGDYVEAMWLMLQQDKADDYVVATGVTTTVRDMCQIAFEHVGLDYRDFLKIDPAFFRPAEVDVLLGNPAKAQRVLGWKPRTSLDELIRMMVEADLRRVSRE

SEQ ID NO: 104593 - DNA, 1086 bp, Arabidopsis thaliana
  CDS (1)..(1086)
atggcctccagatctctcaatggcgattccgacattgtgaagccgaggaagattgcactggtcaccggaatcactggccaagatggatcttacctgaccgagttcctgctcgagaaaggctacgaagttcacggcctcatccgacgatcctccaattttaacactcagcgactcaaccatatctacgttgatccccacaacgtcaacaaagctctcatgaagctccactacggtgatctctctgatgcctcctccctccgccgttggctcgacgtcatcaagcctgacgaggtctacaaccttgctgctcagtcccacgttgccgtctccttcgagatccctgattacactgctgacgttgtcgctactggagctcttcgtctcctggaggctgtcagatctcacaacattgacaatggccgcgccatcaagtactaccaggctggctcttcggagatgttcgggtcaactcctcctccgcagtcagagaccacgcccttccatccgagatctccctacgctgcgtccaaatgcgctgctcattggtacacagtcaattaccgagaggcctacggtctgtacgcctgcaacggaatcctcttcaaccacgagtcacctcgcagaggcgagaacttcgtgactcggaaaatcactcgggccttgggaaggatcaaggtcggattgcagaccaagctcttcctgggaaatatacaggcttcaagagactggggtttcgcaggagactacgtggaagcaatgtggctgatgctgcagcaggagaaaccagatgactatgtggttgcaactgaggaatcacacaccgtcaaggagtttctggacgtgtctttcgggtacgtggggctcaactggaaagaccatgtcgagatcgacaaaaggtacttccggcccacggaggtcgacaatctgaaaggagacgcaagcaaggcaaaggaaatgttggggtggaagccaaaagtagggttcgagaagctggtgaagatgatggtggacgaagaccttgagctggccaagagggagaaagtgctcgccgacgctggttacatggacgctcagcagcaaccttga

SEQ ID NO: 104594 - protein, 361 aa, Arabidopsis thaliana
MASRSLNGDSDIVKPRKIALVTGITGQDGSYLTEFLLEKGYEVHGLIRRSSNFNTQRLNHIYVDPHNVNKALMKLHYGDLSDASSLRRWLDVIKPDEVYNLAAQSHVAVSFEIPDYTADVVATGALRLLEAVRSHNIDNGRAIKYYQAGSSEMFGSTPPPQSETTPFHPRSPYAASKCAAHWYTVNYREAYGLYACNGILFNHESPRRGENFVTRKITRALGRIKVGLQTKLFLGNIQASRDWGFAGDYVEAMWLMLQQEKPDDYVVATEESHTVKEFLDVSFGYVGLNWKDHVEIDKRYFRPTEVDNLKGDASKAKEMLGWKPKVGFEKLVKMMVDEDLELAKREKVLADAGYMDAQQQP

SEQ ID NO: 104595 - DNA, 1122 bp, Arabidopsis thaliana
  CDS (1)..(1122)
atggcgtcagagaacaacggatccagatccgattccgaatccatcaccgctcccaaagctgattccaccgtcgttgaaccgaggaagatagctctgatcaccggaatcaccggccaggacggatcatacctgacggagttccttctcggaaaaggctacgaagttcatggtctgatccgtcgatcatcgaatttcaacacccagcgaatcaaccatatctacatcgatccacacaatgtcaacaaagctctgatgaaactccactacgccgatctcaccgacgcttcctctctccgtcgttggatcgatgtgatcaaacctgacgaagtttataacctagctgctcaatctcacgtcgctgtctccttcgagatccctgattacacagccgatgtagtcgcaaccggtgctctccgtctccttgaagccgtcagatctcacaccatcgacagtggccgtaccgtcaagtattaccaagccggatcttcggagatgtttggatcaactcctcctccacaatcggagacgacgccgtttcaccccagatctccttacgcagcttccaaatgcgctgctcattggtacacagtgaattacagagaggcgtacggtctcttcgcttgtaacggaatcttgttcaatcacgagtcacctcgccgtggtgagaatttcgtgacgaggaagatcacaagagcattgggaaggatcaaggttggtttgcagacgaagctattccttgggaatttgcaagcgtcaagagattggggatttgcaggagattatgtggaagcaatgtggttgatgttgcagcaagagaagccagatgattacgttgtggcaacagaggaaggacacacagtggaagagtttcttgatgtgtcatttgggtatttgggactcaattggaaagattatgttgagattgaccagaggtactttaggcctgctgaagtagataaccttcaaggagatgcaagcaaggcaaaggaagtgttggggtggaaaccacaagtagggtttgagaagcttgtgaagatgatggttgatgaagatcttgagcttgctaagagggagaaagtgcttgttgatgctggatacatggatgctaagcagcaaccttga

SEQ ID NO: 104596 - protein, 373 aa, Arabidopsis thaliana
MASENNGSRSDSESITAPKADSTVVEPRKIALITGITGQDGSYLTEFLLGKGYEVHGLIRRSSNFNTQRINHIYIDPHNVNKALMKLHYADLTDASSLRRWIDVIKPDEVYNLAAQSHVAVSFEIPDYTADVVATGALRLLEAVRSHTIDSGRTVKYYQAGSSEMFGSTPPPQSETTPFHPRSPYAASKCAAHWYTVNYREAYGLFACNGILFNHESPRRGENFVTRKITRALGRIKVGLQTKLFLGNLQASRDWGFAGDYVEAMWLMLQQEKPDDYVVATEEGHTVEEFLDVSFGYLGLNWKDYVEIDQRYFRPAEVDNLQGDASKAKEVLGWKPQVGFEKLVKMMVDEDLELAKREKVLVDAGYMDAKQQP

SEQ ID NO: 104597 - DNA, 1188 bp, Drosophila melanogaster
  CDS (1)..(1188)
atgctaaatacccggctaattgctatgtcgacttccgatggggccccggaaaccaagaagcaacgtcctgaaagcagcagcaacggcagcaaggaccaaaacggaacggaagccggcgccgaaggcgactcccgtgataaagtggcgctgataacaggcataacgggccaggatggctcctatttggcagagtttctgctcaagaaggactacgaggtgcacggcattattcggcgggccagcaccttcaacaccacccgcattgagcatctatatgccgatccaaaggcgcacaaaggtgggcgtatgaagctccactatggcgacatgacggacagcagcagcctggtgaagatcatcaatatggtgaagcccacggagatttacaatttggcagcacaatcccatgtcaaggtctccttcgatctcagtgagtacacggccgaggtggacgccgtgggcacgttgcgcattctggacgccatccgcacttgtggcatggaaaagaacgtgaggttttaccaagcctccacttcggagctatatggtaaagtggtggagacgccacagaacgaacagacgcccttctatcccaggtcgccatatgcctgcgctaagatgtacggcttttggatcgtcatcaactaccgggaagcctacaacatgtacgcctgtaatggaatcctcttcaaccatgaaagtccacgacgtggcgagaactttgtgactagaaaaatcacccgtagcgtggccaagatttatcacaagcaaatggagtattttgaactgggcaatctcgactcaaagcgcgactggggacatgccagcgactacgtggaggccatgtggatgatgctgcagcgggagtctccttccgactacgtcatagctacaggcgaaacgcacagtgtgcgcgaattcgtggaagccgcgttcaagcatattgatcgagagataacgtggaagggcaagggtgtggacgaggtgggagtggagaacggcacgggtattgtgcgcgtccgcataaatccaaagtattttcggccgacggaggtcgatctgctgcaaggcgacgcgtccaaagccaatcgagagctaaactggacgcctaaagttaccttcgtggaattggttagcgacatgatgaaggctgacatcgaattaatgaggaaaaatccaatcgcttaa

SEQ ID NO: 104598 - protein, 395 aa, Drosophila melanogaster
MLNTRLIAMSTSDGAPETKKQRPESSSNGSKDQNGTEAGAEGDSRDKVALITGITGQDGSYLAEFLLKKDYEVHGIIRRASTFNTTRIEHLYADPKAHKGGRMKLHYGDMTDSSSLVKIINMVKPTEIYNLAAQSHVKVSFDLSEYTAEVDAVGTLRILDAIRTCGMEKNVRFYQASTSELYGKVVETPQNEQTPFYPRSPYACAKMYGFWIVINYREAYNMYACNGILFNHESPRRGENFVTRKITRSVAKIYHKQMEYFELGNLDSKRDWGHASDYVEAMWMMLQRESPSDYVIATGETHSVREFVEAAFKHIDREITWKGKGVDEVGVENGTGIVRVRINPKYFRPTEVDLLQGDASKANRELNWTPKVTFVELVSDMMKADIELMRKNPIA

SEQ ID NO: 104599 - DNA, 1056 bp, Rhizobium sp
  CDS (1)..(1056): transl_table=11
gtgacagaccggaaagtagctttaatatctggcgtaacgggtcaggatggggcttatcttgctgaactgctgttggacgaaggctatattgttcacggcataaagcgtcgttcgtcatcattcaacactcaacggatagagcacatttatcaagaacgtcacgatcctgaagcgagattttttctccactatggggatatgacggattcgaccaatttgctgcgcattgttcagcaaacccagccgcatgagatctacaaccttgcagcgcaaagccacgttcaggtaagcttcgaaacccccgagtacactgcaaacgccgatgcaattggtacattgcgcatgctggaagctattcggattcttgggctgaccaatcggactcgcttttatcaggcatcgacttcagagctatatgggctggctcaagagagcccccaaaacgaaaagacgccattctacccgcgttcaccctacgcggccgcaaagctgtacgcgtactggattgtcgtaaattatagagaggcttacggcatgcatgcctccaacggtattcttttcaaccacgaaagtccgcttcgtggggagacgttcgtgactcgcaagatcacccgggctgcagcggcaatcagtctaggtaaacaagaggtcctttatcttggaaatctagatgctcaacgtgactggggacatgcccgtgagtatgtgcggggcatgtggatgatgtgtcaacaggatagaccaggcgactatgtcctggctaccggggtgacaacatcggttcgcacgtttgtcgaatgggccttcgaggaaaccggaatgacgattgaatgggtgggagaaggcattgaagaaaggggcatagacgccgcgacaggcagatgcgtcgttgcggtggatccgcgctatttcaggcccacggaagtagatttacttttaggcgatgccaccaaggcccggcaggttttgggctggaggcacgagacaagtgtgagagatcttgcttgcgaaatggtaagggaagatctctcttatttgaggggcacccgacagtaa

SEQ ID NO: 104600 - protein, 351 aa, Rhizobium sp
MTDRKVALISGVTGQDGAYLAELLLDEGYIVHGIKRRSSSFNTQRIEHIYQERHDPEARFFLHYGDMTDSTNLLRIVQQTQPHEIYNLAAQSHVQVSFETPEYTANADAIGTLRMLEAIRILGLTNRTRFYQASTSELYGLAQESPQNEKTPFYPRSPYAAAKLYAYWIVVNYREAYGMHASNGILFNHESPLRGETFVTRKITRAAAAISLGKQEVLYLGNLDAQRDWGHAREYVRGMWMMCQQDRPGDYVLATGVTTSVRTFVEWAFEETGMTIEWVGEGIEERGIDAATGRCVVAVDPRYFRPTEVDLLLGDATKARQVLGWRHETSVRDLACEMVREDLSYLRGTRQ

SEQ ID NO: 104601 - DNA, 1128 bp, Oryza sativa
  CDS (1)..(1128)
atggccacgacgcagcactccaacggcggcgccgccggcgacaacggcgaggccgcgccgccgtcggttccgccctccctcgcgccgccgcggaaggtggccctggtgacgggcatcacggggcaggacgggagctacctgacggagctgctcctcggcaagggctacgaggtgcacggcctcatccgccgctcctccaacttcaacacccagcgcctcgaccatatctaccacgacccgcactcccagccgtcgacgccgcgccccccgatgcgcctccactacgctgacctctccgactcctcctccctccgccgcgcgctcgaccacatcctccccgacgaggtctacaacctcgccgcccagtcccacgtcgccgtctccttcgaggtccccgactacaccgccgacgtcaccgccaccggcgcgctccgcctcctcgaggccgtgcgcctcgccagcaagcgcatccgctactaccaggcggggtcctccgagatgttcggctccacgccgccgccgcagagcgagtcctcccccttccacccgcgctccccctacgccgccgccaaggtcgccgcccactggtacaccgtcaactaccgcgaggcctacggcctcttcgcctgcaacggcgtgctcttcaaccacgaatccccacgccgcggcgagaacttcgtcacccgcaagatcacccgcgccgtcggccgaatcaaggtcgggctccagaccaaggtcttcctcggcaacctctccgccgccagggactggggattcgccggggactacgtcgaggcaatgtggcgcatgctgcagcaggacaagcccggcgactacgtcgtcgccaccgaggagtcccacaccgtcgaggagttcctccaggccgccttcggctatgcagggctcaactggaaggatcatgtagtcattgacaagaagtacttccgccccgccgaggtggacagcctccagggggatgcaaccaaggccaggaaggagcttgggtggaagcccaaggtcgggttccagcagctcgtcgagatgatggttgataacgacattgagcttgccaagaaggagaaggtcctcgtcgatgccgggtaccgtgatcccaagcagcagccatag

SEQ ID NO: 104602 - protein, 375 aa, Oryza sativa
MATTQHSNGGAAGDNGEAAPPSVPPSLAPPRKVALVTGITGQDGSYLTELLLGKGYEVHGLIRRSSNFNTQRLDHIYHDPHSQPSTPRPPMRLHYADLSDSSSLRRALDHILPDEVYNLAAQSHVAVSFEVPDYTADVTATGALRLLEAVRLASKRIRYYQAGSSEMFGSTPPPQSESSPFHPRSPYAAAKVAAHWYTVNYREAYGLFACNGVLFNHESPRRGENFVTRKITRAVGRIKVGLQTKVFLGNLSAARDWGFAGDYVEAMWRMLQQDKPGDYVVATEESHTVEEFLQAAFGYAGLNWKDHVVIDKKYFRPAEVDSLQGDATKARKELGWKPKVGFQQLVEMMVDNDIELAKKEKVLVDAGYRDPKQQP

SEQ ID NO: 104603 - DNA, 1125 bp, Brassica napus
  CDS (1)..(1125)
atgggccaccgcgaaacccagatccaaaaacaattaatggcgtcagaaaacaacggatccagatccgatgtggaaatgccgacgaggaagatagcactggtcaccggaatcaccggccaagacggatcgtacctgacggagttcctcctcgaaaaaggctacgaagtccacggcctgatccgccgatcgtcaaacttcaacacccagcggatcaaccacatctacatcgacccgcacaacgccgacaaggctctgatgaagctccactacgccgatctctccgacgcctcctccctccgccgctggctcgacgtgatcaagcccgacgaggtctacaacctcgccgcgcagtcccacgtcgccgtctccttcgagatccctgattacaccgccgacgtcgtcgccaccggcgccctccgcctcctcgaggccgtcagatctcacaccgccgacaccggccgcaccgtcaagtactaccaggccggatcctccgagatgttcggagcgactccgcctccgcagtccgaaacgacgccgtttcaccccagatctccctacgcagcgtccaaagtcgctgcgcattggtacaccgttaactaccgtgaggcctacggtctcttcgcgtgcaacgggatcttgttcaaccacgagtcgccacgccgcggtgagaacttcgtgacgaggaagatcacgagagccttggggaggatcaaggtcggtttgcagaggaagctcttcctcgggaacctacaggcctccagagactgggggttcgcaggggactacgtggaggcaatgtggatgatgctgcagcaggagaaggcggatgattacgtcgtggccacggaggagtcgcatacggtcgaggagtttctcgaggtttcgttcgggtacttggggctcaactggaaggatcacgtggagattgataagaggtactttaggccgtctgaagttgataacttgaaaggagatgcgagcaaggccaaggaagtgttggggtggaagcccaaagtggggtttgagaagctggtgaagatgatggttgatgaagatcttgagcttgctaagagggagaaagtgcttgttgatgctggttacatggatgctcagcagcaaccttga

SEQ ID NO: 104604 - protein, 374 aa, Brassica napus
MGHRETQIQKQLMASENNGSRSDVEMPTRKIALVTGITGQDGSYLTEFLLEKGYEVHGLIRRSSNFNTQRINHIYIDPHNADKALMKLHYADLSDASSLRRWLDVIKPDEVYNLAAQSHVAVSFEIPDYTADVVATGALRLLEAVRSHTADTGRTVKYYQAGSSEMFGATPPPQSETTPFHPRSPYAASKVAAHWYTVNYREAYGLFACNGILFNHESPRRGENFVTRKITRALGRIKVGLQRKLFLGNLQASRDWGFAGDYVEAMWMMLQQEKADDYVVATEESHTVEEFLEVSFGYLGLNWKDHVEIDKRYFRPSEVDNLKGDASKAKEVLGWKPKVGFEKLVKMMVDEDLELAKREKVLVDAGYMDAQQQP

SEQ ID NO: 104605 - DNA, 23 bp, Artificial sequence
  primer
atgtcaaaagtcgctctcatcac

SEQ ID NO: 104606 - DNA, 22 bp, Artificial sequence
  primer
ttatgactccagcgcgatcgcc

SEQ ID NO: 104607 - protein, 390 aa, Artificial sequence
  consensus sequence
  Variant (2)..(2): Xaa in position 2 is any amino acid
  Variant (8)..(8): Xaa in position 8 is any amino acid
  Variant (14)..(14): Xaa in position 14 is any amino acid
  Variant (17)..(17): Xaa in position 17 is any amino acid
  Variant (19)..(19): Xaa in position 19 is any amino acid
  Variant (22)..(22): Xaa in position 22 is any amino acid
  Variant (25)..(25): Xaa in position 25 is any amino acid
  Variant (27)..(27): Xaa in position 27 is any amino acid
  Variant (29)..(29): Xaa in position 29 is any amino acid
  Variant (31)..(32): Xaa in position 31 to 32 is any amino acid
  Variant (35)..(35): Xaa in position 35 is any amino acid
  Variant (37)..(37): Xaa in position 37 is any amino acid
  Variant (38)..(38): Xaa in position 38 is any or no amino acid
  Variant (40)..(40): Xaa in position 40 is any amino acid
  Variant (41)..(41): Xaa in position 41 is any or no amino acid
  Variant (43)..(50): Xaa in position 43 to 50 is any amino acid
  Variant (51)..(63): Xaa in position 51 to 63 is any or no amino acid
  Variant (65)..(65): Xaa in position 65 is any amino acid
  Variant (66)..(67): Xaa in position 66 to 67 is any or no amino acid
  Variant (70)..(70): Xaa in position 70 is any amino acid
  Variant (72)..(83): Xaa in position 72 to 83 is any amino acid
  Variant (85)..(85): Xaa in position 85 is any amino acid
  Variant (87)..(87): Xaa in position 87 is any amino acid
  Variant (91)..(91): Xaa in position 91 is any amino acid
  Variant (95)..(95): Xaa in position 95 is any amino acid
  Variant (97)..(97): Xaa in position 97 is any amino acid
  Variant (101)..(102): Xaa in position 101 to 102 is any amino acid
  Variant (104)..(105): Xaa in position 104 to 105 is any amino acid
  Variant (107)..(112): Xaa in position 107 to 112 is any amino acid
  Variant (114)..(117): Xaa in position 114 to 117 is any amino acid
  Variant (120)..(120): Xaa in position 120 is any amino acid
  Variant (121)..(123): Xaa in position 121 to 123 is any or no amino acid
  Variant (125)..(125): Xaa in position 125 is any amino acid
  Variant (127)..(134): Xaa in position 127 to 134 is any amino acid
  Variant (135)..(145): Xaa in position 135 to 145 is any or no amino acid
  Variant (150)..(150): Xaa in position 150 is any amino acid
  Variant (153)..(154): Xaa in position 153 to 154 is any amino acid
  Variant (156)..(159): Xaa in position 156 to 159 is any amino acid
  Variant (160)..(162): Xaa in position 160 to 162 is any or no amino acid
  Variant (165)..(165): Xaa in position 165 is any amino acid
  Variant (167)..(167): Xaa in position 167 is any amino acid
  Variant (171)..(171): Xaa in position 171 is any amino acid
  Variant (172)..(172): Xaa in position 172 is any or no amino acid
  Variant (178)..(179): Xaa in position 178 to 179 is any amino acid
  Variant (180)..(180): Xaa in position 180 is any or no amino acid
  Variant (183)..(186): Xaa in position 183 to 186 is any amino acid
  Variant (188)..(188): Xaa in position 188 is any amino acid
  Variant (190)..(190): Xaa in position 190 is any amino acid
  Variant (195)..(195): Xaa in position 195 is any amino acid
  Variant (197)..(198): Xaa in position 197 to 198 is any amino acid
  Variant (199)..(199): Xaa in position 199 is any or no amino acid
  Variant (201)..(202): Xaa in position 201 to 202 is any amino acid
  Variant (212)..(212): Xaa in position 212 is any amino acid
  Variant (215)..(216): Xaa in position 215 to 216 is any amino acid
  Variant (224)..(228): Xaa in position 224 to 228 is any amino acid
  Variant (230)..(231): Xaa in position 230 to 231 is any amino acid
  Variant (233)..(238): Xaa in position 233 to 238 is any amino acid
  Variant (239)..(239): Xaa in position 239 is any or no amino acid
  Variant (243)..(246): Xaa in position 243 to 246 is any amino acid
  Variant (251)..(251): Xaa in position 251 is any amino acid
  Variant (253)..(254): Xaa in position 253 to 254 is any amino acid
  Variant (257)..(259): Xaa in position 257 to 259 is any amino acid
  Variant (261)..(261): Xaa in position 261 is any amino acid
  Variant (265)..(267): Xaa in position 265 to 267 is any amino acid
  Variant (269)..(269): Xaa in position 269 is any amino acid
  Variant (270)..(275): Xaa in position 270 to 275 is any or no amino acid
  Variant (277)..(277): Xaa in position 277 is any amino acid
  Variant (279)..(279): Xaa in position 279 is any amino acid
  Variant (282)..(286): Xaa in position 282 to 286 is any amino acid
  Variant (289)..(289): Xaa in position 289 is any amino acid
  Variant (291)..(298): Xaa in position 291 to 298 is any amino acid
  Variant (300)..(304): Xaa in position 300 to 304 is any amino acid
  Variant (305)..(343): Xaa in position 305 to 343 is any or no amino acid
  Variant (345)..(351): Xaa in position 345 to 351 is any amino acid
  Variant (354)..(354): Xaa in position 354 is any amino acid
  Variant (357)..(358): Xaa in position 357 to 358 is any amino acid
  Variant (360)..(360): Xaa in position 360 is any amino acid
  Variant (363)..(364): Xaa in position 363 to 364 is any amino acid
  Variant (367)..(369): Xaa in position 367 to 369 is any amino acid
  Variant (373)..(373): Xaa in position 373 is any amino acid
  Variant (375)..(384): Xaa in position 375 to 384 is any amino acid
  Variant (385)..(385): Xaa in position 385 is any or no amino acid
  Variant (387)..(389): Xaa in position 387 to 389 is any amino acid
KXALITGXTGQDGXYLXEXLLXKGXYXVXGXXRRXSXXNXXRXXXXXXXXXXXXXXXXXXXXXLXXXDLXDXXXXXXXXXXXXPXEXYNLXAQSXVXVSFXXPXXTXXXXXXGXXXXLEXXXXAXRXXXXXXXXXXXXXXXXXXXYQASXSEXXGXXXXXXXPQXEXTPFXXPRSPYXXXAKXXXXWXTXNYREXYXXXAXXGILFNHESPXRGXXFVTRKITXXXXXIXXGXXXXXXXLGNXXXXRDWGXAXXYVXXXWXMLQXXXPXXXXXXXDXVXATXXXXXVRXFXXXXXXXXGXXXXXXXXXXXXXXXXXXXXXXXXXXXXXXXXXXXXXXXXXXXXVXXXXXXXRPXEVXXLXGDXXKAXXXLGWXPXXXXXXXXXXXMXXXD

SEQ ID NO: 104608 - protein, 21 aa, Artificial sequence
  protein pattern
  Variant (2)..(2): Xaa in position 2 is any or no amino acid
  Variant (10)..(10): Xaa in position 10 is any amino acid
  Variant (13)..(13): Xaa in position 13 is any amino acid
  Variant (14)..(14): Xaa in position 14 is Glu, Asn or Thr
  Variant (20)..(20): Xaa in position 20 is Ile or Val
  Variant (21)..(21): Xaa in position 21 is Ser or Thr
GXLFNHESPXRGXXFVTRKXX

SEQ ID NO: 104609 - protein, 29 aa, Artificial sequence
  protein pattern
  Variant (2)..(2): Xaa in position 2 is any amino acid
  Variant (4)..(4): Xaa in position 4 is any amino acid
  Variant (8)..(8): Xaa in position 8 is any amino acid
  Variant (14)..(14): Xaa in position 14 is any amino acid
  Variant (15)..(15): Xaa in position 15 is any or no amino acid
  Variant (17)..(17): Xaa in position 17 is any or no amino acid
  Variant (19)..(20): Xaa in position 19 to 20 is any amino acid
  Variant (21)..(21): Xaa in position 21 is Ala, Gly or Ser
  Variant (22)..(22): Xaa in position 22 is Phe, His or Tyr
  Variant (23)..(23): Xaa in position 23 is Trp or Tyr
  Variant (24)..(24): Xaa in position 24 is any amino acid
  Variant (25)..(25): Xaa in position 25 is Ala, Thr or Val
  Variant (26)..(26): Xaa in position 26 is any amino acid
QXEXTPFXPRSPYXXAXKXXXXXXXXNYR

SEQ ID NO: 104610 - protein, 23 aa, Artificial sequence
  protein pattern
  Variant (3)..(3): Xaa in position 3 is any amino acid
  Variant (4)..(4): Xaa in position 4 is Asp, Glu, Gly, Asn, Gln or Ser
  Variant (5)..(5): Xaa in position 5 is Ala, Pro or Ser
  Variant (6)..(6): Xaa in position 6 is any amino acid
  Variant (11)..(11): Xaa in position 11 is Phe, His or Tyr
  Variant (13)..(13): Xaa in position 13 is any amino acid
  Variant (14)..(14): Xaa in position 14 is Asp or Glu
  Variant (17)..(17): Xaa in position 17 is any amino acid
  Variant (18)..(18): Xaa in position 18 is any or no amino acid
  Variant (20)..(20): Xaa in position 20 is any or no amino acid
  Variant (22)..(22): Xaa in position 22 is any or no amino acid
GNXXXXRDWGXAXXYVXXMXWXM

SEQ ID NO: 104611 - protein, 38 aa, Artificial sequence
  protein pattern
  Variant (2)..(2): Xaa in position 2 is any amino acid
  Variant (4)..(4): Xaa in position 4 is Ile, Leu or Val
  Variant (8)..(8): Xaa in position 8 is any or no amino acid
  Variant (10)..(10): Xaa in position 10 is any amino acid
  Variant (11)..(11): Xaa in position 11 is any or no amino acid
  Variant (13)..(13): Xaa in position 13 is Phe or His
  Variant (15)..(16): Xaa in position 15 to 16 is any amino acid
  Variant (18)..(18): Xaa in position 18 is Phe or Trp
  Variant (19)..(20): Xaa in position 19 to 20 is any amino acid
  Variant (21)..(21): Xaa in position 21 is Ala, Pro or Ser
  Variant (22)..(23): Xaa in position 22 to 23 is any amino acid
  Variant (25)..(28): Xaa in position 25 to 28 is any amino acid
  Variant (29)..(29): Xaa in position 29 is Ala or Gly
  Variant (30)..(30): Xaa in position 30 is any amino acid
  Variant (32)..(35): Xaa in position 32 to 35 is any amino acid
  Variant (37)..(37): Xaa in position 37 is Asp or Glu
  Variant (38)..(38): Xaa in position 38 is Ala, Gly, Ser or Thr
PXEXYNLXAXXSXVXXSXXXXXXTXXXXXXGXXXXLXX

SEQ ID NO: 104612 - protein, 21 aa, Artificial sequence
  protein pattern
  Variant (3)..(3): Xaa in position 3 is Ile or Val
  Variant (9)..(9): Xaa in position 9 is any amino acid
  Variant (12)..(13): Xaa in position 12 to 13 is any amino acid
  Variant (14)..(14): Xaa in position 14 is any or no amino acid
  Variant (17)..(18): Xaa in position 17 to 18 is any amino acid
  Variant (19)..(19): Xaa in position 19 is any or no amino acid
TGXTGQDGXYLXXXLLXXXGY

SEQ ID NO: 104613 - protein, 21 aa, Artificial sequence
  protein pattern
  Variant (3)..(3): Xaa in position 3 is Ala, Ser or Thr
  Variant (6)..(6): Xaa in position 6 is Asp or Glu
  Variant (7)..(7): Xaa in position 7 is any amino acid
  Variant (9)..(9): Xaa in position 9 is any amino acid
  Variant (11)..(14): Xaa in position 11 to 14 is any amino acid
  Variant (16)..(18): Xaa in position 16 to 18 is any amino acid
  Variant (20)..(20): Xaa in position 20 is any amino acid
RPXEVXXLXGXXXXAXXXLXW

SEQ ID NO: 104614 - protein, 26 aa, Artificial sequence
  protein pattern
  Variant (2)..(4): Xaa in position 2 to 4 is any amino acid
  Variant (5)..(5): Xaa in position 5 is Ala or Pro
  Variant (6)..(6): Xaa in position 6 is Ala, Asp, Glu, Gly, Asn, Gln or Ser
  Variant (7)..(7): Xaa in position 7 is Asp, Ser or Thr
  Variant (8)..(8): Xaa in position 8 is Phe, Trp or Tyr
  Variant (10)..(10): Xaa in position 10 is Ile, Leu or Val
  Variant (13)..(13): Xaa in position 13 is Ala, Glu, Gly or Asn
  Variant (14)..(17): Xaa in position 14 to 17 is any amino acid
  Variant (19)..(20): Xaa in position 19 to 20 is any amino acid
  Variant (21)..(25): Xaa in position 21 to 25 is any or no amino acid
QXXXXXXXVXATXXXXXVXXXXXXXF

SEQ ID NO: 104615 - protein, 10 aa, Artificial sequence
  protein pattern
  Variant (5)..(5): Xaa in position 5 is Ser or Thr
  Variant (8)..(8): Xaa in position 8 is Leu or Met
  Variant (9)..(9): Xaa in position 9 is Phe or Tyr
YQASXSEXXG

SEQ ID NO: 104616 - DNA, 600 bp, Escherichia coli
  CDS (1)..(600): transl_table=11
atgaaacagagccatttttttgcccatctctcccgcctgaaactcattaaccgctggccgctcatgcgcaacgtgcggacggaaaatgtgtccgaacacagtttgcaggtagcgatggtcgcccatgcgctggcagctatcaaaaatcgaaaatttggcggtaatgtcaacgccgaacgtatcgctttactggcgatgtaccacgatgcctcagaagtgctcaccggcgatctccctactccggtgaaatacttcaattcgcaaatcgctcaggagtacaaggctattgaaaaaatcgctcagcaaaaactggtcgatatggttccggaagagctgcgggatatctttgcgccgttaattgacgagcatgcatatagcgatgaagaaaaatcgctggtgaaacaggcagatgcactgtgtgcatatctgaaatgtctggaagaactcgcggccggaaataatgaattcttgctggcaaaaacgcgactggaagcgacgcttgaagcgcgtcgcagccaggagatggactacttcatggaaatatttgttcccagcttccatctttcgctcgatgagattagccaggattcaccgctgtaa

SEQ ID NO: 104617 - protein, 199 aa, Escherichia coli
MKQSHFFAHLSRLKLINRWPLMRNVRTENVSEHSLQVAMVAHALAAIKNRKFGGNVNAERIALLAMYHDASEVLTGDLPTPVKYFNSQIAQEYKAIEKIAQQKLVDMVPEELRDIFAPLIDEHAYSDEEKSLVKQADALCAYLKCLEELAAGNNEFLLAKTRLEATLEARRSQEMDYFMEIFVPSFHLSLDEISQDSPL

SEQ ID NO: 104618 - DNA, 702 bp, Vibrio cholerae O1 biovar eltor str. N16961
  CDS (1)..(702): transl_table=11
gtgggtaggcgaagcaggctctctttcggtacactgaagagagcctgtttttttatcttcttttcagcgtcatcggccgttgaaaagccaatccatcagcaaggaagtgagagtgctatgcaagagagccattttttcgcccacctcgcgcgcatgaaactgattcagcgctggccattaatgcgttccatctccagtgaaaatatttctgagcacagcctgcaagtcgcctttgtcgctcatgcactggcggtgatcaaaaacaaaaaatttggtggaacgctcaaccctgagcgcattgcgctgcttgccatgtatcacgataccagtgaagtgctgaccggtgatttgccaacgcccatcaagtatttcaatcccgagatcgctaaagagtacaaaaaaatcgaagcggcggccgagcggcgtttattggatatgctcccagaagaactgcgcgacgattttcgcccgtttcttatctccaatacggccgatcccgatgaaagcgccatcgttaagcaagccgatgcgatttgcgcgtatttgaaatgtttggaagagctcagcgcaggtaaccacgaatacgctcaagcgaaaaaacgcctcgatgtgacgttgcgtgaacggcacagtgaggagatggcgtattttctacaaacctttgccccgagttttgaattaacactggacgaaatcagctaa

SEQ ID NO: 104619 - protein, 233 aa, Vibrio cholerae O1 biovar eltor str. N16961
MGRRSRLSFGTLKRACFFIFFSASSAVEKPIHQQGSESAMQESHFFAHLARMKLIQRWPLMRSISSENISEHSLQVAFVAHALAVIKNKKFGGTLNPERIALLAMYHDTSEVLTGDLPTPIKYFNPEIAKEYKKIEAAAERRLLDMLPEELRDDFRPFLISNTADPDESAIVKQADAICAYLKCLEELSAGNHEYAQAKKRLDVTLRERHSEEMAYFLQTFAPSFELTLDEIS

SEQ ID NO: 104620 - DNA, 621 bp, Vibrio parahaemolyticus RIMD 2210633
  CDS (1)..(621): transl_table=11
gtgagttccttttttataccagaaacggagaaagccatgaaagaaagccattttttcgcccacttggcacgaatgaagcttatccaacgctggcctttgatgcgctctgtatcaccagaaaacgtttcggaacacagcttacaagtcgcatttgtcgctcacgcactcgcgttaattaaaaacaaaaagttcggcggcacgcttaatcctgaacgcattgctcttctcgcgatgtatcacgattcaagtgaagtgctcactggtgatttgcctactcccgttaagtactacaatcccgaaatcgcaaaagaatataagaagatagaagccgctgccgagcacaaattactttctatgttgccggaagaatttcaggaagattttgccccatttctactttctcattcgtctcacgaagaagactctcagatagtaaaacaggccgactccatctgtgcgtacttaaaatgtttggaagaactaagcgcaggtaaccatgagtttgccttagcgaaaaagcgcctagacgtcactttacaagaacgtaaaacgccagaaatggaatacttccttaatacattcgccccaagctttgagctatcgctggatgaaatcagttag

SEQ ID NO: 104621 - protein, 206 aa, Vibrio parahaemolyticus RIMD 2210633
MSSFFIPETEKAMKESHFFAHLARMKLIQRWPLMRSVSPENVSEHSLQVAFVAHALALIKNKKFGGTLNPERIALLAMYHDSSEVLTGDLPTPVKYYNPEIAKEYKKIEAAAEHKLLSMLPEEFQEDFAPFLLSHSSHEEDSQIVKQADSICAYLKCLEELSAGNHEFALAKKRLDVTLQERKTPEMEYFLNTFAPSFELSLDEIS

SEQ ID NO: 104622 - DNA, 600 bp, Photorhabdus luminescens subsp. laumondii TTO1
  CDS (1)..(600): transl_table=11
atgattatgagccacttttttgcccacctttcccgtttgaaactgattaaccgctggcctctgatgcgcaatgtacgtacagaaaatgtatctgaacatagcttacaagtggcctttgtcgcacacgccttagccattatcaaaaaccgcaaatttggcggtaatgtgaatgctgaacgcattgcattgctggctatgtatcacgatgccagcgaagttattaccggagatttacccactccggtcaaatatcacaatccacatatcgcacgggaatacaaaaaaatagaaaaaatcgcgcagaaaaaattactggaaatgctgccaactgagctgcaagaggatttccgtccaatcttggatgacagtcagcatacaacagaagaaacttttatcattaaacaggccgattccctgtgtgcttacctcaaatgtctggaagagttatcagcaggtaaccatgaattcaatctggcgatagcccgacttgaaaaaaccctggctgatcgtcacagccaggagatggattactttatgaaagtttttgtaccgggattcagcctgtcattggacgaaattagtcttgatattccccattag

SEQ ID NO: 104623 - protein, 199 aa, Photorhabdus luminescens subsp. laumondii TTO1
MIMSHFFAHLSRLKLINRWPLMRNVRTENVSEHSLQVAFVAHALAIIKNRKFGGNVNAERIALLAMYHDASEVITGDLPTPVKYHNPHIAREYKKIEKIAQKKLLEMLPTELQEDFRPILDDSQHTTEETFIIKQADSLCAYLKCLEELSAGNHEFNLAIARLEKTLADRHSQEMDYFMKVFVPGFSLSLDEISLDIPH

SEQ ID NO: 104624 - DNA, 594 bp, Vibrio vulnificus YJ016
  CDS (1)..(594): transl_table=11
gtgactatcgtgcaagaaagccattttttcgctcatttggctcgtatgaagctaattcaacgctggccattaatgcgctctgtctccagtgagaatgtctctgagcacagtttgcaggtcgcctttgttgcccatgctttagcgctgatcaaaaacaagaagtttggtggtcacatcaatgcagagcgggtggccgtgttggccatgtatcacgatagtagtgaggttttgacgggggatttgcccacaccagtaaaatattacaaccctgaaatcgcgaaggagtataagaaaatcgaagcggctgcagagcaaaaactgctctccatgctgccggaagaatttcaggaagactttcgtccatttgtcatctcacaacaaacttcggaagaagaagctcaaatcgtcaaacaagctgattccatttgtgcctatctcaaatgtctagaagaactcagtgcaggtaatcacgagtttgctttggcgaaaaagcgcttagacatcactttagcggaaagaaaaacacctgaaatggattatttcctcaatacgtttgcgccaagctttgagctatccctagacgaaatcagttaa

SEQ ID NO: 104625 - protein, 197 aa, Vibrio vulnificus YJ016
MTIVQESHFFAHLARMKLIQRWPLMRSVSSENVSEHSLQVAFVAHALALIKNKKFGGHINAERVAVLAMYHDSSEVLTGDLPTPVKYYNPEIAKEYKKIEAAAEQKLLSMLPEEFQEDFRPFVISQQTSEEEAQIVKQADSICAYLKCLEELSAGNHEFALAKKRLDITLAERKTPEMDYFLNTFAPSFELSLDEIS

SEQ ID NO: 104626 - DNA, 588 bp, Methylococcus capsulatus str. Bath
  CDS (1)..(588): transl_table=11
atgaagcaaagcccgtttttcgcccacctgggccgcctgcgctggatcaagcgctggggcctcatgcgcaacgcctacgaagaaaacgtcatggagcacggctgggaagtggccgtcatcgcccacgccctggcggtgatccgcagcgaaatcttccaccggcccatcgacgccgaccgggtcgcagccgccgcgctttaccacgacgtgagcgaagccatcaccggcgacctgcccaccccgatcaaataccactcccccgccatccgcgacgcctacaaggatctggagcaaaaagcctcgcaggaactgctggccctgctgccggaaacgctgaaaccggcgttcgcccggatactgctgcccgaagccatcccggaagagttccgtgtcctcatcaaagccgccgaccgcatcgccgcctacctgaaatgcggcgccgaacggcgggccggcaacaccgaattcgtcaacgcggaacaagaaatccgggaaaaaatccggcaactggagttgccggaagtcgactatttcatggccgtattcgtgcccggctacgaactgacgctggaccgcctggtgctctga

SEQ ID NO: 104627 - protein, 195 aa, Methylococcus capsulatus str. Bath
MKQSPFFAHLGRLRWIKRWGLMRNAYEENVMEHGWEVAVIAHALAVIRSEIFHRPIDADRVAAAALYHDVSEAITGDLPTPIKYHSPAIRDAYKDLEQKASQELLALLPETLKPAFARILLPEAIPEEFRVLIKAADRIAAYLKCGAERRAGNTEFVNAEQEIREKIRQLELPEVDYFMAVFVPGYELTLDRLVL

SEQ ID NO: 104628 - DNA, 594 bp, Colwellia psychrerythraea 34H
  CDS (1)..(594): transl_table=11
atgcaaagttcatttctagcctggatgtttcgcatgccattaattaaacgatggtcattaatgttttgtgttaaaccagaaaatattgcggaacactcacatcaggttgccattgttgctcatttactggctgtcattaaaaataaaaaatttaatggcaacatcaatgccgataaaatatcaactattgccatgtatcatgaagccagtgaaacccgatacggcgatattgttaatccaacaaagtatgcaaataaagagatagctagagaatttaaaaagattgaattattagcagagcaagaatgtttagcctcacttcctgatgaacttcaagaactatttagcgatattatcgtacaagataacgtctcagaagaatacaaaacgattgttaaagctgctgatatcattgtcgcttatattaaagccctagatgagattaatcataagaatccagagtttgatcatgttgagcaacgattagcgataaaaatatctgaattaaaagaaaacatgcctgaagtagaatactttattgatacctttatggctgcttgtttggccactgtagataagttatcaaaagaataa

SEQ ID NO: 104629 - protein, 197 aa, Colwellia psychrerythraea 34H
MQSSFLAWMFRMPLIKRWSLMFCVKPENIAEHSHQVAIVAHLLAVIKNKKFNGNINADKISTIAMYHEASETRYGDIVNPTKYANKEIAREFKKIELLAEQECLASLPDELQELFSDIIVQDNVSEEYKTIVKAADIIVAYIKALDEINHKNPEFDHVEQRLAIKISELKENMPEVEYFIDTFMAACLATVDKLSKE

SEQ ID NO: 104630 - DNA, 588 bp, Shewanella sp. MR-4
  CDS (1)..(588): transl_table=11
atgagtcatttatttgcccacctcgcccgaatgaaacttatccagcgctggcccttaatgtacaacgtgcgcaccgaaaacgttcaagagcattcactgcaagttgccatggtggcccatgccctagttattatcagtaataagaaatttggcaccacgctcgatgcccatcaggcgaccagtttagcgattttccatgatgccagtgagattttaactggcgacttaccgactccggtaaagtactttaataaagaaatcgaagccgagtataagaagattgaggccattgccgagcagcgtatgctcgatatggtacccgatgaatttaaagaggattatcgcagcctgtttattagcgattacgccgatccgatttacaaagccatagtcaaatccgccgataccctgtgcgcttaccttaaatgtctagaggaaaaccgcgctggcaacaccgaatttaataccgcgcgtaaacgactcgaagccatgctggcggccaattccgatccggcggtgaaatattttatggattgctttgtgccaagtttcaccttgaatttagacgaaattaacaagatgttgtga

SEQ ID NO: 104631 - protein, 195 aa, Shewanella sp. MR-4
MSHLFAHLARMKLIQRWPLMYNVRTENVQEHSLQVAMVAHALVIISNKKFGTTLDAHQATSLAIFHDASEILTGDLPTPVKYFNKEIEAEYKKIEAIAEQRMLDMVPDEFKEDYRSLFISDYADPIYKAIVKSADTLCAYLKCLEENRAGNTEFNTARKRLEAMLAANSDPAVKYFMDCFVPSFTLNLDEINKML

SEQ ID NO: 104632 - DNA, 606 bp, Photobacterium damselae subsp. piscicida
  CDS (1)..(606): transl_table=11
atgtctaattcaaatttcggctttctagctctggccttgcgccaacgcctgatcaaacgctggtcactgatgcactctgttcaaccggagtctgtgttggaacacagcgctgttgttaccctgctttcctacctggctggcaatattgccattcagcaagggaagtcggtggatctggcagtcatgcttgctcatgcttcgttgcatgatgcagccgaggttctctgttcggatgttgtaacaccggtcaagaaagcaaacgctgttttgcagcgtgagtttgaacgactggaaaaggccgcagaggacaaactcatccagactcttcccgaagaactccaggatgcagtcgccatagccttcgctcccggtggctatgaacaatcactggttaaggcctgtgatacctactccgcttacatcaagtgcaaacttgaggtggccgcaggtaatggccttgagttccaggatgctctcagcaaaatggaacgtgttgttgctcaggtgaaatcggacttcccggaaatcgacgctctggacaaatggtttggtaacggactcggccattcagtagataaactgctggcagggggtaacgatgactaa

SEQ ID NO: 104633 - protein, 201 aa, Photobacterium damselae subsp. piscicida
MSNSNFGFLALALRQRLIKRWSLMHSVQPESVLEHSAVVTLLSYLAGNIAIQQGKSVDLAVMLAHASLHDAAEVLCSDVVTPVKKANAVLQREFERLEKAAEDKLIQTLPEELQDAVAIAFAPGGYEQSLVKACDTYSAYIKCKLEVAAGNGLEFQDALSKMERVVAQVKSDFPEIDALDKWFGNGLGHSVDKLLAGGNDD

SEQ ID NO: 104634 - DNA, 585 bp, Photobacterium sp. SKA34
  CDS (1)..(585): transl_table=11
atggaaaaaagtcatttcttcgcccaccttgctcgtatgcgtttaattcaacgctggccattaatgcgaagtgtcgaagctgaaaatatctccgagcacagccttcaagttgcttttgtcgctcacgcacttgcgttaattaaaaatcgtaaatttggtgggaacctaaaccctgaacgtattgcgcttcaaggcatgttccacgatgtcagtgaagtactcacaggtgatatgccaacccctataaaatactacaaccctgcgattgctgaagaatataagaagattgaattagcggcagagaaacgacttattactatgcttcctgaagaatttcaggatgattatgcctctctacttgatagccataaaattgatgctgagaatgcagctattgttaagcaagccgatacattatgcgcttatataaaatgccttgaagagctcagtgcggggaatcatgaatttactcgtgcgaagaaaagattggaagaaacccttgagcagcgaaaaacacctgagatgacctattttcttgagacatttgctgatagctttaatcttactttggacgatattagttaa

SEQ ID NO: 104635 - protein, 194 aa, Photobacterium sp. SKA34
MEKSHFFAHLARMRLIQRWPLMRSVEAENISEHSLQVAFVAHALALIKNRKFGGNLNPERIALQGMFHDVSEVLTGDMPTPIKYYNPAIAEEYKKIELAAEKRLITMLPEEFQDDYASLLDSHKIDAENAAIVKQADTLCAYIKCLEELSAGNHEFTRAKKRLEETLEQRKTPEMTYFLETFADSFNLTLDDIS

SEQ ID NO: 104636 - DNA, 549 bp, Vibrio sp. Ex25
  CDS (1)..(549): transl_table=11
atgaagctgatccaacgctggcctttaatgcggtccgtctcaccagaaaacgtttcagagcacagcttacaagttgcttttgtcgctcatgcccttgccctaattaaaaacaaaaagttcggcggcaaccttaacccagaacgcatcgcgattcttgccatgtaccatgactccagcgaagtattaacgggggaccttccaaccccagtgaagtattacaatcctgaaattgccaaagaatataagaagatagaatcggcagcggaacaaaaattactctcaatgttaccggaagagttccaagatgaatttgccccctaccttctttctcactctgcacacgaagaggacgcaaaaatcgtcaagcaagccgactccatctgtgcctatttaaaatgtctcgaagaactaagcgcaggcaatcatgagttcgctctggcaaaaaaacgcttagacatcactttgcaagaacgtagaacgcctgaaatggattacttcctcaatacctttgccccaagtttcgaattatcgttagatgaaatcagttag

SEQ ID NO: 104637 - protein, 182 aa, Vibrio sp. Ex25
MKLIQRWPLMRSVSPENVSEHSLQVAFVAHALALIKNKKFGGNLNPERIAILAMYHDSSEVLTGDLPTPVKYYNPEIAKEYKKIESAAEQKLLSMLPEEFQDEFAPYLLSHSAHEEDAKIVKQADSICAYLKCLEELSAGNHEFALAKKRLDITLQERRTPEMDYFLNTFAPSFELSLDEIS

SEQ ID NO: 104638 - DNA, 594 bp, Photorhabdus temperata
  CDS (1)..(594): transl_table=11
atgagccacttttttgcccacctttcccgtctgaaactgattaaccgttggcctcttatgcgcaatgtgcgtacagaaaatgtttctgaacacagcctgcaagtggcctttgtcgcacacgctttagcgattatcaaaaaccgcaaattcagcggtaatgtgaatgctgaacgcattgcgctgctggcgatgtatcacgatgccagcgaagttatcaccggggatttgcccacccctatcaaatatcacaacccgcatattgcacgggaatataaaaagatagaaaaaatcgcgcagaaaaaattactggaaatgctgccggcagagttgcaagaagattttcgtccgatattggatgacagccagcatacagaagaagaaatttctattgttaaacaggctgatgccctgtgcgcttatctcaaatgtctggaagagctatcagcaggtaacagtgaattcaatctggcgaaagcccggcttgaaaaaacccttgctgcccgccacagccaagagatggattactttatgacagtttttgtgccggggttcagcctgtcactggacgagattagcctcgacatcccagattag

SEQ ID NO: 104639 - protein, 197 aa, Photorhabdus temperata
MSHFFAHLSRLKLINRWPLMRNVRTENVSEHSLQVAFVAHALAIIKNRKFSGNVNAERIALLAMYHDASEVITGDLPTPIKYHNPHIAREYKKIEKIAQKKLLEMLPAELQEDFRPILDDSQHTEEEISIVKQADALCAYLKCLEELSAGNSEFNLAKARLEKTLAARHSQEMDYFMTVFVPGFSLSLDEISLDIPD

SEQ ID NO: 104640 - DNA, 588 bp, Shewanella oneidensis
  CDS (1)..(588): transl_table=11
atgagtcatttatttgcccacctcgcccgaatgaaacttatccagcgctggcccttaatgtacaacgtgcgcactgaaaacgtccaagaacactcactacaagttgccatggtggcacacgccttggtgattatcagtaatcggaaatttggtacgacactcgatgcccatcaagcgacgagtctggccatcttccatgatgccagcgaaatcttaactggcgatttacccacaccggtgaagtatttcaataaagaaattgaagccgagtataaaaagattgaagccattgcagagcagcgaatgctcgatatggtacccgatgaatttaaagaggattatcgcagcttgtttatcagtgattacgccgacccaacctacaaagccatagtgaaatccgccgatacgctttgtgcttatctaaaatgtttagaagaaaaccgcgcaggcaatactgaatttaacacggcacgtaaacgcctcgaagccatgctcgaatccaacccaaatcctgcggtaaaatattttatggattgctttgtgcccagttttaccttgaatttagacgaaataaacaagatgctctga

SEQ ID NO: 104641 - protein, 195 aa, Shewanella oneidensis
MSHLFAHLARMKLIQRWPLMYNVRTENVQEHSLQVAMVAHALVIISNRKFGTTLDAHQATSLAIFHDASEILTGDLPTPVKYFNKEIEAEYKKIEAIAEQRMLDMVPDEFKEDYRSLFISDYADPTYKAIVKSADTLCAYLKCLEENRAGNTEFNTARKRLEAMLESNPNPAVKYFMDCFVPSFTLNLDEINKML

SEQ ID NO: 104642 - DNA, 594 bp, Yersinia pestis
  CDS (1)..(594): transl_table=11
atgagtcacttcttcgctcatctttcccgcctaaaactcatcaaccgctggccgctgatgcgtaacgttcgcactgaaaatgtgtcagaacacagcttgcaggtcgcatttgtcgctcatgcattggccatcattaagaaccgtaaatttaatggtaatcttaatgccgaacgtatcgccctactggcgatgtatcacgatgccagcgaagtgattaccggggatttgccaacacctatcaaataccacaatcccaaaattgcacatgaatacaaaaaaatagagaaagttgctcaacaaaaactgatcgaaatgctgcccaaagagttacaacatgatttccgctgtctattggatgaacattattacagcgaagaggagaaagcgctggttaaacaagccgatgctctgtgtgcgtacctgaaatgtctggaggaattatccgccggtaataatgaatttattcaggctaaagcccggttggagaagacgttggcaatacgccaaagcccagagatggattactttatggcagtctttgtgccaagttttagtttatctctggatgaaatcagcctcgattcactggattga

SEQ ID NO: 104643 - protein, 197 aa, Yersinia pestis
MSHFFAHLSRLKLINRWPLMRNVRTENVSEHSLQVAFVAHALAIIKNRKFNGNLNAERIALLAMYHDASEVITGDLPTPIKYHNPKIAHEYKKIEKVAQQKLIEMLPKELQHDFRCLLDEHYYSEEEKALVKQADALCAYLKCLEELSAGNNEFIQAKARLEKTLAIRQSPEMDYFMAVFVPSFSLSLDEISLDSLD

SEQ ID NO: 104644 - DNA, 594 bp, Yersinia pseudotuberculosis
  CDS (1)..(594): transl_table=11
atgagtcacttcttcgctcatctttcccgcctgaaactcatcaaccgctggccgctgatgcgtaacgttcgcactgaaaatgtgtcagaacacagcttgcaggtcgcgtttgtcgctcatgcattagccatcattaagaaccgtaaatttaatggtaatcttaatgccgaacgtatcgccctactggcgatgtatcacgatgccagcgaagtgattaccggggatttgccaacccctatcaaataccataatcccaaaattgcacatgaatacaaaaaaatagagaaagttgctcaacaaaaactgatcgaaatgctgcccaaagagttacaacatgatttccgctgtctattggatgaacattattacagcgaagaggagaaagcgctggttaaacaagccgatgctctgtgtgcgtacctgaaatgtctggaggaattatccgccggtaataatgaatttattcaggctaaagcccggttggagaatacgttggcaatacgccaaagcccagagatggattactttatggcagtctttgtgccaagttttagtttatctctggatgaaatcagcctcgattcactggattga

SEQ ID NO: 104645 - protein, 197 aa, Yersinia pseudotuberculosis
MSHFFAHLSRLKLINRWPLMRNVRTENVSEHSLQVAFVAHALAIIKNRKFNGNLNAERIALLAMYHDASEVITGDLPTPIKYHNPKIAHEYKKIEKVAQQKLIEMLPKELQHDFRCLLDEHYYSEEEKALVKQADALCAYLKCLEELSAGNNEFIQAKARLENTLAIRQSPEMDYFMAVFVPSFSLSLDEISLDSLD

SEQ ID NO: 104646 - DNA, 585 bp, Photobacterium profundum
  CDS (1)..(585): transl_table=11
atggaaaaaagtcatttcttcgcacacctagcacgcatgaacctaattcagcgttggccactaatgcgcagtgtgtcgactgaaaacatttcagaacatagccttcaagttgcttttgttgctcacgctctcgccctgataaaaaataaaaaatttgatggcaataccaatccagagcgcattgcactattaggtatgtttcacgataccagcgaggtattgacgggagatatgccaaccccgatcaagtattacaaccctgctattgcagaggaatacaaaaaaattgagttagcagcagaacagaaattgttgtcgatgttaccagaagaatttcaggaagattacgcaccactgcttgatagccattgcatcaataaagatgactatgtgatcgtgaaacaagcagattcattatgcgcttacctgaaatgccttgaagaactcaatgcaggcaatcacgaatttgctcaagcgaaaaaacgcttagaaaaaaccttacaaacacgttctacacctgaaatggaatacttccttaacacttttgtagagagttttaatttaacactggatgaaatcagttaa

SEQ ID NO: 104647 - protein, 194 aa, Photobacterium profundum
MEKSHFFAHLARMNLIQRWPLMRSVSTENISEHSLQVAFVAHALALIKNKKFDGNTNPERIALLGMFHDTSEVLTGDMPTPIKYYNPAIAEEYKKIELAAEQKLLSMLPEEFQEDYAPLLDSHCINKDDYVIVKQADSLCAYLKCLEELNAGNHEFAQAKKRLEKTLQTRSTPEMEYFLNTFVESFNLTLDEIS

SEQ ID NO: 104648 - DNA, 600 bp, Salmonella typhimurium
  CDS (1)..(600): transl_table=11
atgaagcagagccattttttcgcccatctctcccgcatgaagttgattaaccgctggccgctgatgcgtaacgtgcgtacagaaaacgtctccgaacatagtctgcaggtggcgatggtcgcccatgcgttggcggcgataaaaaaccgtaaatttggcggtcagctcaatgctgaacgcatcgcgcttctggcgatgtatcatgatgcctcggaagtactgaccggcgatctgccgacgccggtaaaatattttaattcccagatagcccaggaatataaagcgatcgaaaaaatcgcccagcaaaagctggttgatatggcgccggatgaattacgcgatattttcgcaccgcttattgatgagaatgcctggagcgaagaagaacaggcaatcgtaaaacaggccgatgcgctttgcgcctacctgaaatgcctggaggagctctcagcgggaaacaatgagtttggactggcaaaaacgcggctggaaaaaacgctggaattacgtcgcagccaggagatggactattttatggcggtattcgtaccaagtttccatctttctcttgacgagataagccaggattcaccgctttag

SEQ ID NO: 104649 - protein, 199 aa, Salmonella typhimurium
MKQSHFFAHLSRMKLINRWPLMRNVRTENVSEHSLQVAMVAHALAAIKNRKFGGQLNAERIALLAMYHDASEVLTGDLPTPVKYFNSQIAQEYKAIEKIAQQKLVDMAPDELRDIFAPLIDENAWSEEEQAIVKQADALCAYLKCLEELSAGNNEFGLAKTRLEKTLELRRSQEMDYFMAVFVPSFHLSLDEISQDSPL

SEQ ID NO: 104650 - DNA, 600 bp, Shigella flexneri
  CDS (1)..(600): transl_table=11
atgaaacagagccatttttttgcccatctctcccgcctgaaactcattaaccgctggccgctaatgcgcaacgtgcggacggaaaatgtgtccgaacacagtttgcaggtagcgatggtcgcccatgcgctggcagctatcaaaaatcggaaatttggcggtaatgtcaacgccgaacgtatcgctttactggcgatgtaccacgatgcctcagaagtgctcaccggcgatctccctactccggtgaaatacttcaatgcgcaaatcgctcaggagtacaaggctattgaaaaaatcgctcagcagaaactggtcgatatggttccggaagaactgcgggatatctttgcgccgttaattgacgagcatgcatatagcgatgaagaaaaatcgctggtgaaacaggcagatgcactgtgtgcatatctgaaatgtctggaagaactcgcggccggaaataatgaattcttgctggcaaaaacgcgactggaagcgacgcttgaagcgcgtcgcagccaggagatggactacttcatggaagtatttgttcccagcttccatctttcgctcgatgagattagccaggattcaccgctgtaa

SEQ ID NO: 104651 - protein, 199 aa, Shigella flexneri
MKQSHFFAHLSRLKLINRWPLMRNVRTENVSEHSLQVAMVAHALAAIKNRKFGGNVNAERIALLAMYHDASEVLTGDLPTPVKYFNAQIAQEYKAIEKIAQQKLVDMVPEELRDIFAPLIDEHAYSDEEKSLVKQADALCAYLKCLEELAAGNNEFLLAKTRLEATLEARRSQEMDYFMEVFVPSFHLSLDEISQDSPL

SEQ ID NO: 104652 - DNA, 25 bp, Artificial sequence
  primer
atgaaacagagccatttttttgccc

SEQ ID NO: 104653 - DNA, 23 bp, Artificial sequence
  primer
ttacagcggtgaatcctggctaa

SEQ ID NO: 104654 - protein, 193 aa, Artificial sequence
  consensus sequence
  Variant (2)..(2): Xaa in position 2 is any amino acid
  Variant (8)..(8): Xaa in position 8 is any amino acid
  Variant (10)..(11): Xaa in position 10 to 11 is any amino acid
  Variant (14)..(14): Xaa in position 14 is any amino acid
  Variant (20)..(21): Xaa in position 20 to 21 is any amino acid
  Variant (23)..(24): Xaa in position 23 to 24 is any amino acid
  Variant (27)..(28): Xaa in position 27 to 28 is any amino acid
  Variant (36)..(36): Xaa in position 36 is any amino acid
  Variant (43)..(43): Xaa in position 43 is any amino acid
  Variant (45)..(45): Xaa in position 45 is any amino acid
  Variant (47)..(47): Xaa in position 47 is any amino acid
  Variant (50)..(61): Xaa in position 50 to 61 is any amino acid
  Variant (63)..(64): Xaa in position 63 to 64 is any amino acid
  Variant (67)..(67): Xaa in position 67 is any amino acid
  Variant (70)..(71): Xaa in position 70 to 71 is any amino acid
  Variant (75)..(75): Xaa in position 75 is any amino acid
  Variant (79)..(79): Xaa in position 79 is any amino acid
  Variant (82)..(82): Xaa in position 82 is any amino acid
  Variant (84)..(85): Xaa in position 84 to 85 is any amino acid
  Variant (87)..(88): Xaa in position 87 to 88 is any amino acid
  Variant (92)..(92): Xaa in position 92 is any amino acid
  Variant (95)..(96): Xaa in position 95 to 96 is any amino acid
  Variant (98)..(100): Xaa in position 98 to 100 is any amino acid
  Variant (102)..(103): Xaa in position 102 to 103 is any amino acid
  Variant (105)..(105): Xaa in position 105 is any amino acid
  Variant (107)..(107): Xaa in position 107 is any amino acid
  Variant (109)..(126): Xaa in position 109 to 126 is any amino acid
  Variant (127)..(129): Xaa in position 127 to 129 is any or no amino acid
  Variant (132)..(132): Xaa in position 132 is any amino acid
  Variant (135)..(136): Xaa in position 135 to 136 is any amino acid
  Variant (146)..(147): Xaa in position 146 to 147 is any amino acid
  Variant (151)..(151): Xaa in position 151 is any amino acid
  Variant (152)..(152): Xaa in position 152 is any or no amino acid
  Variant (155)..(156): Xaa in position 155 to 156 is any amino acid
  Variant (158)..(159): Xaa in position 158 to 159 is any amino acid
  Variant (162)..(164): Xaa in position 162 to 164 is any amino acid
  Variant (166)..(171): Xaa in position 166 to 171 is any amino acid
  Variant (172)..(173): Xaa in position 172 to 173 is any or no amino acid
  Variant (175)..(176): Xaa in position 175 to 176 is any amino acid
  Variant (179)..(181): Xaa in position 179 to 181 is any amino acid
  Variant (183)..(185): Xaa in position 183 to 185 is any amino acid
  Variant (187)..(187): Xaa in position 187 is any amino acid
  Variant (189)..(189): Xaa in position 189 is any amino acid
  Variant (192)..(192): Xaa in position 192 is any amino acid
SXFFAHLXRXXLIXRWPLMXXVXXENXXEHSLQVAXVAHALAXIXNXKFXXXXXXXXXXXXAXXHDXSEXXTGDXPTPXKYXNXXIXXEYKXIEXXAXXXLXXMXPXEXXXXXXXXXXXXXXXXXXXXXVKXADXXCAYLKCLEEXXAGNXXEFXXAXXRLXXXLXXXXXXXXEXXYFXXXFXXXFXLXLDXI

SEQ ID NO: 104655 - protein, 40 aa, Artificial sequence
  protein pattern
  Variant (2)..(4): Xaa in position 2 to 4 is any amino acid
  Variant (9)..(9): Xaa in position 9 is any amino acid
  Variant (10)..(10): Xaa in position 10 is Asn or Ser
  Variant (11)..(11): Xaa in position 11 is Ile or Val
  Variant (12)..(12): Xaa in position 12 is Glu, Arg or Ser
  Variant (13)..(13): Xaa in position 13 is Ala, Pro, Ser or Thr
  Variant (16)..(16): Xaa in position 16 is Ile or Val
  Variant (17)..(17): Xaa in position 17 is Gln or Ser
  Variant (25)..(25): Xaa in position 25 is Phe or Met
  Variant (31)..(31): Xaa in position 31 is Ala or Val
  Variant (32)..(32): Xaa in position 32 is Ala, Ile, Leu or Val
  Variant (34)..(34): Xaa in position 34 is any amino acid
  Variant (36)..(36): Xaa in position 36 is Lys or Arg
  Variant (39)..(39): Xaa in position 39 is Asp, Gly, Asn or Ser
  Variant (40)..(40): Xaa in position 40 is Gly or Thr
LXXXWPLMXXXXXENXXEHSLQVAXVAHALXXIXNXKFXX

SEQ ID NO: 104656 - protein, 57 aa, Artificial sequence
  protein pattern
  Variant (2)..(3): Xaa in position 2 to 3 is any or no amino acid
  Variant (5)..(7): Xaa in position 5 to 7 is any amino acid
  Variant (8)..(8): Xaa in position 8 is any or no amino acid
  Variant (11)..(11): Xaa in position 11 is Ala, Ser, Thr or Val
  Variant (14)..(14): Xaa in position 14 is Ile or Val
  Variant (15)..(15): Xaa in position 15 is Ile or Leu
  Variant (19)..(19): Xaa in position 19 is Leu or Met
  Variant (23)..(23): Xaa in position 23 is Ile or Val
  Variant (26)..(26): Xaa in position 26 is Phe, His or Tyr
  Variant (28)..(29): Xaa in position 28 to 29 is any amino acid
  Variant (31)..(31): Xaa in position 31 is Ala or Glu
  Variant (32)..(32): Xaa in position 32 is any amino acid
  Variant (36)..(36): Xaa in position 36 is any amino acid
  Variant (39)..(39): Xaa in position 39 is any amino acid
  Variant (40)..(40): Xaa in position 40 is Ala, Ile or Val
  Variant (42)..(42): Xaa in position 42 is Glu or Gln
  Variant (43)..(43): Xaa in position 43 is any amino acid
  Variant (44)..(44): Xaa in position 44 is Lys or Arg
  Variant (45)..(45): Xaa in position 45 is Leu or Met
  Variant (46)..(46): Xaa in position 46 is Ile, Leu or Val
  Variant (47)..(47): Xaa in position 47 is Asp, Glu, Ser or Thr
  Variant (49)..(49): Xaa in position 49 is Ala, Leu or Val
  Variant (51)..(51): Xaa in position 51 is any amino acid
  Variant (53)..(53): Xaa in position 53 is Phe or Leu
  Variant (54)..(54): Xaa in position 54 is any amino acid
  Variant (55)..(55): Xaa in position 55 is Asp, Glu or His
  Variant (56)..(56): Xaa in position 56 is any amino acid
  Variant (57)..(57): Xaa in position 57 is Phe or Tyr
AXXLXXXXHDXSEXXTGDXPTPXKYXNXXIXXEYKXIEXXAXXXXXXMXPXEXXXXX

SEQ ID NO: 104657 - protein, 22 aa, Artificial sequence
  protein pattern
  Variant (3)..(3): Xaa in position 3 is Ala, Gln or Ser
  Variant (4)..(4): Xaa in position 4 is Ala or Cys
  Variant (6)..(6): Xaa in position 6 is Ala, Ser or Thr
  Variant (7)..(7): Xaa in position 7 is any amino acid
  Variant (8)..(8): Xaa in position 8 is Cys or Ser
  Variant (11)..(11): Xaa in position 11 is Ile or Leu
  Variant (14)..(14): Xaa in position 14 is any or no amino acid
  Variant (17)..(18): Xaa in position 17 to 18 is any amino acid
  Variant (19)..(19): Xaa in position 19 is any or no amino acid
VKXXDXXXAYXKCXLEXXXAGN

SEQ ID NO: 104658 - protein, 28 aa, Artificial sequence
  protein pattern
  Variant (2)..(3): Xaa in position 2 to 3 is any amino acid
  Variant (4)..(4): Xaa in position 4 is Asn or Arg
  Variant (5)..(5): Xaa in position 5 is any amino acid
  Variant (6)..(6): Xaa in position 6 is Asp, Asn, Ser or Thr
  Variant (7)..(7): Xaa in position 7 is Glu, Pro or Gln
  Variant (8)..(8): Xaa in position 8 is Ala or Glu
  Variant (9)..(9): Xaa in position 9 is Met or Val
  Variant (10)..(10): Xaa in position 10 is any amino acid
  Variant (13)..(13): Xaa in position 13 is Leu or Met
  Variant (14)..(15): Xaa in position 14 to 15 is any amino acid
  Variant (17)..(17): Xaa in position 17 is Ala or Val
  Variant (18)..(18): Xaa in position 18 is Asp, Glu or Pro
  Variant (19)..(19): Xaa in position 19 is Gly or Ser
  Variant (21)..(21): Xaa in position 21 is any amino acid
  Variant (23)..(23): Xaa in position 23 is Asn, Ser or Thr
  Variant (26)..(26): Xaa in position 26 is Asp or Glu
  Variant (28)..(28): Xaa in position 28 is Asn or Ser
LXXXXXXXXXYFXXXFXXXFXLXLDXIX

SEQ ID NO: 104659 - protein, 10 aa, Artificial sequence
  protein pattern
  Variant (2)..(2): Xaa in position 2 is any amino acid
  Variant (3)..(3): Xaa in position 3 is Phe or Leu
  Variant (8)..(8): Xaa in position 8 is Ala, Gly or Ser
  Variant (10)..(10): Xaa in position 10 is Leu or Met
SXXFAHLXRX

SEQ ID NO: 104660 - DNA, 423 bp, Escherichia coli
  CDS (1)..(423): transl_table=11
atggatatgattagtgcattcgatattttcaaaattgggattggtccctccagttcgcataccgtggggccaatgaatgccggaaaaagttttattgatcggctggaaagtagcggcttattaaccgcgacgagccatattgtggtcgatctgtacgggtcgttgtcactgacgggcaaaggccatgccacggatgtcgccatcatcatgggactggcaggaaacagtccgcaggatgttgtcattgatgagatccctgcatttatagagttagtaacgcgcagcgggcggctgccagtggcatctggtgcgcatattgttgattttcctgtagcaaagaacattatcttccatcccgaaatgttgcctcgccatgagaacggaatgcggatcactgcctggaaggacaggaagagctattaa

SEQ ID NO: 104661 - protein, 140 aa, Escherichia coli
MDMISAFDIFKIGIGPSSSHTVGPMNAGKSFIDRLESSGLLTATSHIVVDLYGSLSLTGKGHATDVAIIMGLAGNSPQDVVIDEIPAFIELVTRSGRLPVASGAHIVDFPVAKNIIFHPEMLPRHENGMRITAWKDRKSY

SEQ ID NO: 104662 - DNA, 1368 bp, Pasteurella multocida subsp. multocida str. Pm70; identical to SEQ ID NO: 8045
  CDS (1)..(1368): transl_table=11

SEQ ID NO: 104663 - protein, 455 aa, Pasteurella multocida subsp. multocida str. Pm70; identical to SEQ ID NO: 8046

SEQ ID NO: 104664 - DNA, 1377 bp, Pseudomonas aeruginosa PAO1; identical to SEQ ID NO: 8047
  CDS (1)..(1377): transl_table=11

SEQ ID NO: 104665 - protein, 458 aa, Pseudomonas aeruginosa PAO1; identical to SEQ ID NO: 8048

SEQ ID NO: 104666 - DNA, 672 bp, Lactococcus lactis subsp. lactis Il1403
  CDS (1)..(672): transl_table=11
atggataatttaagatataaaagtgtctttgacatcattggtccagtgatgattggaccttcaagctcgcacacagctggtgctgctcgaattggtaaaattgtacgttctattttcggtgaacttccagaaaaattggagatccatctttatgaatcttttgctaaaacctatcggggtcatggaacagatgttgctcttgttgcaggtgttttaggaatggatacagatgatgaacgtctgccaatggcgcctcagcttgcttttgaacaaggaatggaaatttcttatgttccacatccagaagaaaaagcagaacatcccaataccgcacgtttattcgccaaaaaaggggatcgaacaatgaccgtgactggaatttcaatcggtggtggaatgattcaagtgacagaattgaatggatttgatatcgcaatttcggctggtgttccgacatttgtggtcattcatgaagacgttccagggatgattgctagagtttctagtgtcctttcagaacatcaaattaatatcgcacaaatgaatgtaactagagaagctaagggtgaaaaagcgattatgattttagaagttgatacaccaaatgttaaggaagtaattgaggaaatgaaacttattcctcgtttgcacgccgttaatttctttaattaa

SEQ ID NO: 104667 - protein, 223 aa, Lactococcus lactis subsp. lactis Il1403
MDNLRYKSVFDIIGPVMIGPSSSHTAGAARIGKIVRSIFGELPEKLEIHLYESFAKTYRGHGTDVALVAGVLGMDTDDERLPMAPQLAFEQGMEISYVPHPEEKAEHPNTARLFAKKGDRTMTVTGISIGGGMIQVTELNGFDIAISAGVPTFVVIHEDVPGMIARVSSVLSEHQINIAQMNVTREAKGEKAIMILEVDTPNVKEVIEEMKLIPRLHAVNFFN

SEQ ID NO: 104668 - DNA, 1365 bp, Campylobacter jejuni subsp. jejuni NCTC 11168
  CDS (1)..(1365): transl_table=11
atgagtaatttaagcatttttaaaataggtgttggcccttcttcttctcatactttagggcctatgcttgctggaaatttattttgtaaaaaagttgctaaaaagcttgatgaaattgatagagttgaggttactctttatggttctttgtcgttaacaggcaaaggacacttgagtgataaggctgtgatttgggggttaaatggcttagaagctaaaaatttaagtgcggcaatacaagatgaagtaaataaaaatgctattgaaaatgctcaaattgatttttgtggcgagaaaaaacttagttttaattatgaaaaagatttgatattttctaaagattttttacctttacatgagaatggtatgaaaattaaagcttatgattgtaaaggtgggttagttgatgaggaaacttattattctgtaggtggaggctttgttttaacagctgcggaattagaaaaaaaaggtaaaaattctaaccaaaataaaaagaaaaaactagatatagagcttaataacgctaaagaagctttagagctttgcgataaaagagattgggatttggcagagctttcttatcgttatgaattgcaatttcacactaaagaggaaatttgtgcttattgtcttgaaatttgggaagtgatgcaagaagtgtattataatggtacgcacccgaatgaagattatttgcctggaaaacttcatttaaagcgtagagctaaaggacttaaagaaagagtagcgatgacagctgatcctatgggtattatcgattttatttctttatatgctattgcgattgctgaagaaaatgctagcggagcaaaagtcgtaaccgcaccaacaaatggagcatgtgctgttatccctgctgttatgctttatcttaaaaatcatactataggttttagtgatgaaaaggttatagagtttttattaacagcaatgcttataggttctttttataagaaaaatgcaagtattagcggagcagaagcaggttgtcaagcagaaattggtagtgctagttctatggcagctgcggctatggcaacagttttaggagctaatgcttttaaagcatgtaatgctgctgaaatggcaatggaacatcatctaggtctaacttgcgatccagttgcaggacttgtgcaaattccttgcatagaaagaaatgcctttggagccattaaggccataagtgctgctagaatggcaatgacacgcaaatccactcctatggtaagccttgatgaggttatagaaaccatgtatgaaacaggaaaagatatgaattataaatataaagaaacttctttaggtggtcttgctacaaatttaaaaacagtatgctaa

SEQ ID NO: 104669 - protein, 454 aa, Campylobacter jejuni subsp. jejuni NCTC 11168
MSNLSIFKIGVGPSSSHTLGPMLAGNLFCKKVAKKLDEIDRVEVTLYGSLSLTGKGHLSDKAVIWGLNGLEAKNLSAAIQDEVNKNAIENAQIDFCGEKKLSFNYEKDLIFSKDFLPLHENGMKIKAYDCKGGLVDEETYYSVGGGFVLTAAELEKKGKNSNQNKKKKLDIELNNAKEALELCDKRDWDLAELSYRYELQFHTKEEICAYCLEIWEVMQEVYYNGTHPNEDYLPGKLHLKRRAKGLKERVAMTADPMGIIDFISLYAIAIAEENASGAKVVTAPTNGACAVIPAVMLYLKNHTIGFSDEKVIEFLLTAMLIGSFYKKNASISGAEAGCQAEIGSASSMAAAAMATVLGANAFKACNAAEMAMEHHLGLTCDPVAGLVQIPCIERNAFGAIKAISAARMAMTRKSTPMVSLDEVIETMYETGKDMNYKYKETSLGGLATNLKTVC

SEQ ID NO: 104670 - DNA, 1365 bp, Escherichia coli O157:H7 EDL933; identical to SEQ ID NO: 8053
  CDS (1)..(1365): transl_table=11
  misc_feature (481)..(481): n is a, g, c or t
  misc_feature (722)..(722): n is a, g, c or t

SEQ ID NO: 104671 - protein, 454 aa, Escherichia coli O157:H7 EDL933; identical to SEQ ID NO: 8054
  misc_feature (161)..(161): The Xaa at location 161 stands for Ala, Pro, Ser, or Thr.
  misc_feature (241)..(241): The Xaa at location 241 stands for Cys, Phe, Ser, or Tyr.

SEQ ID NO: 104672 - DNA, 1368 bp, Escherichia coli O157:H7 EDL933; identical to SEQ ID NO: 8055
  CDS (1)..(1368): transl_table=11

SEQ ID NO: 104673 - protein, 455 aa, Escherichia coli O157:H7 EDL933; identical to SEQ ID NO: 8056

SEQ ID NO: 104674 - DNA, 1371 bp, Escherichia coli O157:H7 EDL933; identical to SEQ ID NO: 8057
  CDS (1)..(1371): transl_table=11

SEQ ID NO: 104675 - protein, 456 aa, Escherichia coli O157:H7 EDL933; identical to SEQ ID NO: 8058

SEQ ID NO: 104676 - DNA, 1377 bp, Mycobacterium leprae TN; identical to SEQ ID NO: 8059
  CDS (1)..(1377): transl_table=11

SEQ ID NO: 104677 - protein, 458 aa, Mycobacterium leprae TN; identical to SEQ ID NO: 8060

SEQ ID NO: 104678 - DNA, 1467 bp, Agrobacterium tumefaciens str. C58; identical to SEQ ID NO: 8061
  CDS (1)..(1467): transl_table=11

SEQ ID NO: 104679 - protein, 488 aa, Agrobacterium tumefaciens str. C58; identical to SEQ ID NO: 8062

SEQ ID NO: 104680 - DNA, 1401 bp, Sinorhizobium meliloti 1021; identical to SEQ ID NO: 8063
  CDS (1)..(1401): transl_table=11

SEQ ID NO: 104681 - protein, 466 aa, Sinorhizobium meliloti 1021; identical to SEQ ID NO: 8064

SEQ ID NO: 104682 - DNA, 1389 bp, Caulobacter crescentus CB15; identical to SEQ ID NO: 8065
  CDS (1)..(1389): transl_table=11

SEQ ID NO: 104683 - protein, 462 aa, Caulobacter crescentus CB15; identical to SEQ ID NO: 8066

SEQ ID NO: 104684 - DNA, 1365 bp, Salmonella typhimurium LT2; identical to SEQ ID NO: 8067
  CDS (1)..(1365): transl_table=11

SEQ ID NO: 104685 - protein, 454 aa, Salmonella typhimurium LT2; identical to SEQ ID NO: 8068

SEQ ID NO: 104686 - DNA, 1368 bp, Salmonella typhimurium LT2; identical to SEQ ID NO: 8069
  CDS (1)..(1368): transl_table=11

SEQ ID NO: 104687 - protein, 455 aa, Salmonella typhimurium LT2; identical to SEQ ID NO: 8070

SEQ ID NO: 104688 - DNA, 1368 bp, Salmonella typhimurium LT2; identical to SEQ ID NO: 8071
  CDS (1)..(1368): transl_table=11

SEQ ID NO: 104689 - protein, 455 aa, Salmonella typhimurium LT2; identical to SEQ ID NO: 8072

SEQ ID NO: 104690 - DNA, 1365 bp, Salmonella typhimurium LT2; identical to SEQ ID NO: 8073
  CDS (1)..(1365): transl_table=11

SEQ ID NO: 104691 - protein, 454 aa, Salmonella typhimurium LT2; identical to SEQ ID NO: 8074

SEQ ID NO: 104692 - DNA, 1377 bp, Ralstonia solanacearum GMI1000; identical to SEQ ID NO: 8075
  CDS (1)..(1377): transl_table=11

SEQ ID NO: 104693 - protein, 458 aa, Ralstonia solanacearum GMI1000; identical to SEQ ID NO: 8076

SEQ ID NO: 104694 - DNA, 1350 bp, Corynebacterium glutamicum ATCC 13032
  CDS (1)..(1350): transl_table=11
atggctatcagtgttgttgatctatttagcatcggtatcggaccatcatcctcacataccgtcggccccatgagagccgccctcacgtatatctctgaatttcccagctcgcatgtcgatatcacgttgcacggatcccttgccgccaccggtaaaggccactgcactgaccgggcggtattactgggtctggtgggatgggaaccaacgatagttcccattgatgctgcaccctcacccggcgcgccgattcctgcgaaaggttctgtgaacgggccaaagggaacggtgtcgtattccctgacgtttgatcctcatcctcttccagaacaccccaatgccgttacctttaaaggatcaaccacaaggacttatttgtcggtgggtggtgggttcattatgacgttggaggatttccggaagctggacgatatcggatcaggtgtgtcaaccattcatccagaggcagaggtgccttgtccttttcagaagagttcccaattactcgcatatggtcgcgattttgcggaggtcatgaaggataatgagcgcttaatccacggggatcttggcacagtggatgcccatttggatcgagtgtggcagattatgcaggagtgcgtggcacaaggcatcgcaacgccggggattttaccgggtgggttgaatgtgcaacgtcgggcgccgcaggtacacgcgctgattagcaacggggatacgtgtgagctgggtgctgatcttgatgctgtggagtgggtgaatctgtacgccttggcggtgaatgaagaaaacgccgctggtggtcgtgtggttactgctccgactaatggtgctgcggggattattccggcggtgatgcactatgcgcgggattttttgacaggttttggggcggagcaggcgcggacgtttttgtataccgcgggtgcggtgggcatcatcattaaggaaaatgcctcgatctctggcgcggaggtggggtgtcagggtgaggttggttcagcgtccgcgatggcggctgccgggttgtgtgcagtcttaggtggttctccgcaacaggtggaaaacgccgcggagattgcgttggagcacaatttgggattgacgtgcgatccggtgggcgggttagtgcagattccgtgtattgaacgcaacgctattgctgccatgaagtccatcaatgcggcaaggcttgcccggattggtgatggcaacaatcgcgtgagtttggatgatgtggtggtcacgatggctgccaccggccgggacatgctgaccaaatataaggaaacgtcccttggtggtttggcaaccaccttgggcttcccggtgtcgatgacggagtgttag

SEQ ID NO: 104695 - protein, 449 aa, Corynebacterium glutamicum ATCC 13032
MAISVVDLFSIGIGPSSSHTVGPMRAALTYISEFPSSHVDITLHGSLAATGKGHCTDRAVLLGLVGWEPTIVPIDAAPSPGAPIPAKGSVNGPKGTVSYSLTFDPHPLPEHPNAVTFKGSTTRTYLSVGGGFIMTLEDFRKLDDIGSGVSTIHPEAEVPCPFQKSSQLLAYGRDFAEVMKDNERLIHGDLGTVDAHLDRVWQIMQECVAQGIATPGILPGGLNVQRRAPQVHALISNGDTCELGADLDAVEWVNLYALAVNEENAAGGRVVTAPTNGAAGIIPAVMHYARDFLTGFGAEQARTFLYTAGAVGIIIKENASISGAEVGCQGEVGSASAMAAAGLCAVLGGSPQQVENAAEIALEHNLGLTCDPVGGLVQIPCIERNAIAAMKSINAARLARIGDGNNRVSLDDVVVTMAATGRDMLTKYKETSLGGLATTLGFPVSMTEC

SEQ ID NO: 104696 - DNA, 1383 bp, Xanthomonas campestris pv. campestris str. ATCC 33913
  CDS (1)..(1383): transl_table=11
atggctgtcagtacgttcgacctgttcaagatcggtatcggtccgagttcctcgcataccgtggggccgatgcgcgccgccgagcgcttcgtccaccgctggttgctcgataccggccgcttgcaggaggtgacacgtctgcgcgccgaagttttcggctcgctggcattgaccgggcgcggccatggcaccgacaaggcggtgctgctcgggctggaagggcatcgcccgaacctgatcgacccggatgtcatccccgccacgctcgagcgcatccgcagcagcaagcgcatcaacctgatgggccagcatgaaatcagcttcgacgaaaagcgcgacctgccgatgaacaagcggcagaagctgccgtaccacaccaacggcatgcgcttcaccgcctacgatgcaaccgaagcggtgattgccacgcgcgattactattcggtgggcggcggtttcgtggtcaaccaggacgacgccgccgacgaccgcatcgtggccgacgagactccgttgccctacccgttcctcagcggcgacgagctgctggcgcagtgcgcgcgcagcggcctgagcattgcgcaactgatgttcgagaacgaaaagagctggcgtagcgaagacgagatccgcgccggcctgcgggagctgtggaacgccatgcagtcgtgcgtggcacgtggcattcgcgaagaaggcaccctgcccggcggcctgaacgtctcgcgccgtgcgcccgcgctgtaccgcgagctctcctccaagcccgaagcggcgatgcgcgacccgttgaccacgctggattgggtcaacctctacgcactcgccgtcaacgaagaaaatgccgcaggcggccgcgtggtcaccgcgcccaccaacggtgcagccggcatcattccctcggtgctgcattacttcgatcgtttttgcccgggcgcttcggaacaacgcattttcgacttcctgctcaccgcagcggcaatcggcatcctgtacaaggaaaacgcctcgatttccggtgccgaagtgggctgccagggcgaagtgggtgtggcctgctcgatggccgccggcggcctggtcgccgcgctcggcggcaaccccgggcagatcgagaatgcagcggaaatcggcatggagcacaacctcggcctgacctgcgacccgatcggcgggctggtgcagatcccctgcatcgaacgcaacgcgatgggggcagtgaaagccatcaacgccagccgcatggccatgcgtggcgacggcaagcacaaggtgtcactggacaaggtcatcaagaccatgcgcgacaccggccgtgacatgcaggacaagtacaaggaaaccagccgtggcgggctggcggtgaatgtcatcgaatgctga

SEQ ID NO: 104697 - protein, 460 aa, Xanthomonas campestris pv. campestris str. ATCC 33913
MAVSTFDLFKIGIGPSSSHTVGPMRAAERFVHRWLLDTGRLQEVTRLRAEVFGSLALTGRGHGTDKAVLLGLEGHRPNLIDPDVIPATLERIRSSKRINLMGQHEISFDEKRDLPMNKRQKLPYHTNGMRFTAYDATEAVIATRDYYSVGGGFVVNQDDAADDRIVADETPLPYPFLSGDELLAQCARSGLSIAQLMFENEKSWRSEDEIRAGLRELWNAMQSCVARGIREEGTLPGGLNVSRRAPALYRELSSKPEAAMRDPLTTLDWVNLYALAVNEENAAGGRVVTAPTNGAAGIIPSVLHYFDRFCPGASEQRIFDFLLTAAAIGILYKENASISGAEVGCQGEVGVACSMAAGGLVAALGGNPGQIENAAEIGMEHNLGLTCDPIGGLVQIPCIERNAMGAVKAINASRMAMRGDGKHKVSLDKVIKTMRDTGRDMQDKYKETSRGGLAVNVIEC

SEQ ID NO: 104698 - DNA, 1383 bp, Xanthomonas axonopodis pv. citri str. 306; identical to SEQ ID NO: 8081
  CDS (1)..(1383): transl_table=11

SEQ ID NO: 104699 - protein, 460 aa, Xanthomonas axonopodis pv. citri str. 306; identical to SEQ ID NO: 8082

SEQ ID NO: 104700 - DNA, 1365 bp, Yersinia pestis KIM
  CDS (1)..(1365): transl_table=11
gtgattagcgtttttgacatgtttaagattggtatcggtccgtccagctctcataccgttgggccaatgaaagcgggtaagcaatttgtcgatttgctgataaccgaaggattgatgccgtctatcacgcgtgttgccgtcgatgtttacggctcactgtcgctgaccgggaaaggccatcacaccgatatcgccattattatgggtctggcaggtaacctgcctgataccgttgatatcgacagcatccctgcgtttatccgcgatgttgaattacgccaaaaactgatgttggcaaatggcctgcatgaagtcgatttcccccgtgaaggcgggatggtcttccgcagcgataatctgccactgcatgagaatggcatgcaaattcatgcttttgctggcgatgaaaaagtcctcagcaaaacatactactccatcggcggtggttttatcgttgatgaagagaattttggcaaagccagcgtgaatgacgttagcgtcccctacccgtttaactctgctgccgaaatattagccaactgcgagcaaactggcctgtctatctccggtatggtgatgcagaatgaactggcgatgcacagtaaagaagagattgagtcctatttcaccgccatctggcagaccatgcgcgcctgtatcgatcgcggtttgaataccgagggtgtgctgcctgggccactgcgtgtaccacgtcgtgcatcggcattacgccgcctgctggtctcttccgataagctgtccagtgaccccatgattgtcattgactgggtcaatatgttcgcactggccgtgaatgaagaaaatgcggcaggtggacgtgtcgtgacggcacccactaacggggcttgcggtatcgttccggcggttctggcctattacgatcactttatcgaaccggtgacacctgaaatctttattcgttatttcctcgcatctggtgccatcgggattttgtataagatgaatgcttctatttctggtgcagaggtgggttgtcagggcgaagtgggcgttgcctgttcaatggcggccgctggtcttgctgaattgctgggtgctagcccgatccaagtctgtatcgcagccgagattggcatggaacacaacttaggtctgacctgcgacccggttgcgggtcaggtacaggtaccatgtattgaacgcaatgcgattgcatcggtaaaagcgatcaactccgcacggatggcgatgcgccgtaccagtgaaccgcgcgtctccctcgataaagttatcgaaacgatgtttgaaacaggtaaagatatgaatgccaaataccgcgaaacatcgcgtggtggcctggcgattaaagtgcagtgtacttga

SEQ ID NO: 104701 - protein, 454 aa, Yersinia pestis KIM
MISVFDMFKIGIGPSSSHTVGPMKAGKQFVDLLITEGLMPSITRVAVDVYGSLSLTGKGHHTDIAIIMGLAGNLPDTVDIDSIPAFIRDVELRQKLMLANGLHEVDFPREGGMVFRSDNLPLHENGMQIHAFAGDEKVLSKTYYSIGGGFIVDEENFGKASVNDVSVPYPFNSAAEILANCEQTGLSISGMVMQNELAMHSKEEIESYFTAIWQTMRACIDRGLNTEGVLPGPLRVPRRASALRRLLVSSDKLSSDPMIVIDWVNMFALAVNEENAAGGRVVTAPTNGACGIVPAVLAYYDHFIEPVTPEIFIRYFLASGAIGILYKMNASISGAEVGCQGEVGVACSMAAAGLAELLGASPIQVCIAAEIGMEHNLGLTCDPVAGQVQVPCIERNAIASVKAINSARMAMRRTSEPRVSLDKVIETMFETGKDMNAKYRETSRGGLAIKVQCT

SEQ ID NO: 104702 - DNA, 2220 bp, Bifidobacterium longum NCC2705
  CDS (1)..(2220): transl_table=11
atgtggcgttgtgacgatgtacctgatgaaacgaggaatccacatggcttcacgctggaccgatgtcgaacgagtcgaacaaggcgcactgcccaccatgcttgcccaagccgtcattgcgggcactgcactcaccgttggtgccatcgcctgctcgggattctatctgtccatgatcggcaatgtggccgcactcctgccatgggcgactatcgtgatactgatcgccgtggcgttcacctacatcgtcggcttcgccctgttgtggtgtgccgaagccctgaccctgcgtgccaacgacaaactcaagccatggctgtacggcgtcgtcggattaatcggctacggcgtgtggggcatgttcgtgatgagcgcgatgatgaacacgctgaaccagccgctgaacggcgtggtgttgtcgaacggcgatgtgatggccctgaccgtcaactacgcggtgttcggcttcatcgccttcctgttggcacaggcgtacgcgcccaaaatcgccaccaagaagggactgaccatcgggctgatggtggtgcagatcgtattggccatcatcggtatcatcgtactggtcatgatgttctccgcactgtctcactgactgacttatcgctcgccggcatgacgcgcgcggccatcatcgcacaaggcgaaagcgattccgggcgctgggctgggatacgatatcgtgatggtatgacgcctggtaacaccggcatgccgaaccagcaggggagaaggagccaaatgttcagtgtgcttgacatgttcaccatcggcgtcggaccttcatcctcgcacaccgtaggcccgatggtcgcggcacatgctttcgcctcctcgttgcaggccgaccatttggtcgatcgcaccgcacgtgtcaaaatcacgctttatggttctctggcgctgaccggtctcggccacggcaccgatcgtgctgcgatggctgggctcgaaggcaatctgccggccaccgtggataccgaccacatgatgcacatccgcgagatctgcgcgttggatgatactctgaacctcgccggcctcaaacgcatccatttcgactacgaccgtgacgtggtgttcgaacaatggaagcgcatggccgcgcaccccaatggcatgcgattccaggcgttcgacgccgccgcaagcttggtcgacgaacaggtctggtattccatcggcggcggattcgtgcgcaaaggcgctcccgaagacccgatgatcggcattcatgaacgccctccggaaggcgcctcctttgccgatgcggacgagtcatcatccactgatttcggcgtcgaggcaccctacccgttctcatcatgcactgaactggtgtcgttatgccgggaacatcatctcagcatcgccgaacttgtatgggccaacgaaaccgcttcacgctcgggcatccaggtccgatccgatattgatgccatctggcgtgttatgcgcgcctgtgtggaccacggatgcacctcggcggaacccacattgcccggtggccttgacgtaccccgccgcgcgccgaaaatgtatcggcgtctcgcctcgaattccgatgtgctgcgccgcgacagccggcgcaaagacgccgtgctcgagtcttccgacgccgcatgggtggatctcttcgccttggccgtctctgaggagaatgccggaggcgggcgcatcgtaaccgctccgaccaacggttccgccggcatcattcccgccgtgcttcactattactggcatttcgtggacaacgccaatgaacagggcgtggtcacgtttctgctgaccgccggtgccatcggatacctgttcaaacgcaacgcctcaatttccggtgcggaagtcggttgccagggcgaagtcggctcggcctgttcgatggcggcggccggacttgccgcagtcgtaggcggcacgccggaacaggtggaaaatgctgctgagatcggcatcgaacacaacttgggtctgacttgcgatccggtgggcggattggtgcagattccatgcatcgagcgcaatgccatggccgccaacaccgccatcaacgccgtgcgtatggccatgctcggcgacggctcacacatcgtgacccttgatcaggccatcgaaaccatgaagcagaccggtgaagacatgatggccaaatacaaggagacctccaagggtggacttgccgtcaatgtcgtcgaatgctga

SEQ ID NO: 104703 - protein, 739 aa, Bifidobacterium longum NCC2705
MWRCDDVPDETRNPHGFTLDRCRTSRTRRTAHHACPSRHCGHCTHRWCHRLLGILSVHDRQCGRTPAMGDYRDTDRRGVHLHRRLRPVVVCRSPDPACQRQTQAMAVRRRRINRLRRVGHVRDERDDEHAEPAAERRGVVERRCDGPDRQLRGVRLHRLPVGTGVRAQNRHQEGTDHRADGGADRIGHHRYHRTGHDVLRTVSLTDLSLAGMTRAAIIAQGESDSGRWAGIRYRDGMTPGNTGMPNQQGRRSQMFSVLDMFTIGVGPSSSHTVGPMVAAHAFASSLQADHLVDRTARVKITLYGSLALTGLGHGTDRAAMAGLEGNLPATVDTDHMMHIREICALDDTLNLAGLKRIHFDYDRDVVFEQWKRMAAHPNGMRFQAFDAAASLVDEQVWYSIGGGFVRKGAPEDPMIGIHERPPEGASFADADESSSTDFGVEAPYPFSSCTELVSLCREHHLSIAELVWANETASRSGIQVRSDIDAIWRVMRACVDHGCTSAEPTLPGGLDVPRRAPKMYRRLASNSDVLRRDSRRKDAVLESSDAAWVDLFALAVSEENAGGGRIVTAPTNGSAGIIPAVLHYYWHFVDNANEQGVVTFLLTAGAIGYLFKRNASISGAEVGCQGEVGSACSMAAAGLAAVVGGTPEQVENAAEIGIEHNLGLTCDPVGGLVQIPCIERNAMAANTAINAVRMAMLGDGSHIVTLDQAIETMKQTGEDMMAKYKETSKGGLAVNVVEC

SEQ ID NO: 104704 - DNA, 1368 bp, Shigella flexneri 2a str. 301; identical to SEQ ID NO: 8087
  CDS (1)..(1368): transl_table=11

SEQ ID NO: 104705 - protein, 455 aa, Shigella flexneri 2a str. 301; identical to SEQ ID NO: 8088

SEQ ID NO: 104706 - DNA, 1365 bp, Shigella flexneri 2a str. 301
  CDS (1)..(1365): transl_table=11
atgattagtgcattcgatattttcaaaattgggattggtccctccagttcgcataccgtggggccaatgaatgccggaaaaagttttattgatcggctggaaagtagcggcttattaaccgcgacgagccatattgtggtcgatctgtacgggtcgttgtcactgacgggcaaaggccatgccacggatgtcgccattatcatgggactggcaggaaacagtccgcaggatgttgtcattgatgagatccctgcatttatagagttagtaacgcgcagcgggcggctgccagtggcatctggtgcgcatattgttgattttcctgtagcaaagaacattatcttccatcccgaaatgttgcctcgccatgagaacggaatgcggatcactgcctggaagggacaggaagcgctattaagtaaaacctattactctgtcggcggcgggtttattgtcgaagaagaacacttcggcctgtcgcacgatgtcgaaacgtccgtaccttacgatttccactcagcaggtgaactgctgaaaatgtgtgattacaacggcctgtctatatctggcctgatgatgcacaacgagctggcgctgcgcagcaaagcggaaattgacgcagggtttgcccgtatctggcaagtgatgcatgacggtattgaacgcgggatgaacactgaaggcgtgctgcctggtccgctcaatgtgccgtgtcgtgccgtagcgctgcgtcgtcagctggtttctagcgataacatctctaacgatccgatgaatgtcatcgactggatcaacatgtacgcgctggcggttagtgaagaaaacgcagctggcgggcgcgtggtaacggcaccgactaacggtgcgtgcggcattattccggcagtgctggcttattacgataagttccgtcgtccggtaaacgagcggtcaattgcccgctattttctggcagcgggggctattggcgcgctgtataaaatgaacgcctccatctctggcgcggaggtcggctgtcagggggagattggcgtggcctgttcaatggcagcggcagggttaactgaactactgggcggcagtccggcgcaggtatgcaatgcggcggaaatcgcgatggagcataaccttgggctgacctgcgatccggttgccggacaggtacaaatcccgtgcattgaacgtaatgccattaatgccgtgaaagcagtaaacgccgcgcggatggcgatgcgccgcacctcggcaccgcgtgtttcactcgataaagtgatcgagacgatgtatgaaaccggcaaagatatgaacgataaataccgcgaaacatcacgcggaggactggccattaaagtggtctgcggctga

SEQ ID NO: 104707 - protein, 454 aa, Shigella flexneri 2a str. 301
MISAFDIFKIGIGPSSSHTVGPMNAGKSFIDRLESSGLLTATSHIVVDLYGSLSLTGKGHATDVAIIMGLAGNSPQDVVIDEIPAFIELVTRSGRLPVASGAHIVDFPVAKNIIFHPEMLPRHENGMRITAWKGQEALLSKTYYSVGGGFIVEEEHFGLSHDVETSVPYDFHSAGELLKMCDYNGLSISGLMMHNELALRSKAEIDAGFARIWQVMHDGIERGMNTEGVLPGPLNVPCRAVALRRQLVSSDNISNDPMNVIDWINMYALAVSEENAAGGRVVTAPTNGACGIIPAVLAYYDKFRRPVNERSIARYFLAAGAIGALYKMNASISGAEVGCQGEIGVACSMAAAGLTELLGGSPAQVCNAAEIAMEHNLGLTCDPVAGQVQIPCIERNAINAVKAVNAARMAMRRTSAPRVSLDKVIETMYETGKDMNDKYRETSRGGLAIKVVCG

SEQ ID NO: 104708 - DNA, 1377 bp, Shewanella oneidensis MR-1; identical to SEQ ID NO: 8089
  CDS (1)..(1377): transl_table=11

SEQ ID NO: 104709 - protein, 458 aa, Shewanella oneidensis MR-1; identical to SEQ ID NO: 8090

SEQ ID NO: 104710 - DNA, 1377 bp, Pseudomonas putida KT2440; identical to SEQ ID NO: 8091
  CDS (1)..(1377): transl_table=11

SEQ ID NO: 104711 - protein, 458 aa, Pseudomonas putida KT2440; identical to SEQ ID NO: 8092

SEQ ID NO: 104712 - DNA, 1377 bp, Pseudomonas putida KT2440; identical to SEQ ID NO: 8093
  CDS (1)..(1377): transl_table=11

SEQ ID NO: 104713 - protein, 458 aa, Pseudomonas putida KT2440; identical to SEQ ID NO: 8094

SEQ ID NO: 104714 - DNA, 1377 bp, Pseudomonas putida KT2440; identical to SEQ ID NO: 8095
  CDS (1)..(1377): transl_table=11

SEQ ID NO: 104715 - protein, 458 aa, Pseudomonas putida KT2440; identical to SEQ ID NO: 8096

SEQ ID NO: 104716 - DNA, 1362 bp, Vibrio parahaemolyticus RIMD 2210633; identical to SEQ ID NO: 8103
  CDS (1)..(1362): transl_table=11

SEQ ID NO: 104717 - protein, 453 aa, Vibrio parahaemolyticus RIMD 2210633; identical to SEQ ID NO: 8104

SEQ ID NO: 104718 - DNA, 1365 bp, Salmonella enterica subsp. enterica serovar Typhi Ty2; identical to SEQ ID NO: 8109
  CDS (1)..(1365): transl_table=11

SEQ ID NO: 104719 - protein, 454 aa, Salmonella enterica subsp. enterica serovar Typhi Ty2; identical to SEQ ID NO: 8110

SEQ ID NO: 104720 - DNA, 1368 bp, Salmonella enterica subsp. enterica serovar Typhi Ty2; identical to SEQ ID NO: 8111
  CDS (1)..(1368): transl_table=11

SEQ ID NO: 104721 - protein, 455 aa, Salmonella enterica subsp. enterica serovar Typhi Ty2; identical to SEQ ID NO: 8112

SEQ ID NO: 104722 - DNA, 1365 bp, Salmonella enterica subsp. enterica serovar Typhi Ty2; identical to SEQ ID NO: 8113
  CDS (1)..(1365): transl_table=11

SEQ ID NO: 104723 - protein, 454 aa, Salmonella enterica subsp. enterica serovar Typhi Ty2; identical to SEQ ID NO: 8114

SEQ ID NO: 104724 - DNA, 1368 bp, Coxiella burnetii RSA 493; identical to SEQ ID NO: 8117
  CDS (1)..(1368): transl_table=11

SEQ ID NO: 104725 - protein, 455 aa, Coxiella burnetii RSA 493; identical to SEQ ID NO: 8118

SEQ ID NO: 104726 - DNA, 1368 bp, Streptomyces avermitilis MA-4680; identical to SEQ ID NO: 8119
  CDS (1)..(1368): transl_table=11

SEQ ID NO: 104727 - protein, 455 aa, Streptomyces avermitilis MA-4680; identical to SEQ ID NO: 8120

SEQ ID NO: 104728 - DNA, 1386 bp, Nitrosomonas europaea ATCC 19718; identical to SEQ ID NO: 8121
  CDS (1)..(1386): transl_table=11

SEQ ID NO: 104729 - protein, 461 aa, Nitrosomonas europaea ATCC 19718; identical to SEQ ID NO: 8122

SEQ ID NO: 104730 - DNA, 1398 bp, Bordetella bronchiseptica RB50; identical to SEQ ID NO: 8131
  CDS (1)..(1398): transl_table=11

SEQ ID NO: 104731 - protein, 465 aa, Bordetella bronchiseptica RB50; identical to SEQ ID NO: 8132

SEQ ID NO: 104732 - DNA, 1401 bp, Chromobacterium violaceum ATCC 12472; identical to SEQ ID NO: 8133
  CDS (1)..(1401): transl_table=11

SEQ ID NO: 104733 - protein, 466 aa, Chromobacterium violaceum ATCC 12472; identical to SEQ ID NO: 8134

SEQ ID NO: 104734 - DNA, 1371 bp, Gloeobacter violaceus PCC 7421; identical to SEQ ID NO: 8139
  CDS (1)..(1371): transl_table=11

SEQ ID NO: 104735 - protein, 456 aa, Gloeobacter violaceus PCC 7421; identical to SEQ ID NO: 8140

SEQ ID NO: 104736 - DNA, 1365 bp, Photorhabdus luminescens subsp. laumondii TTO1; identical to SEQ ID NO: 8141
  CDS (1)..(1365): transl_table=11

SEQ ID NO: 104737 - protein, 454 aa, Photorhabdus luminescens subsp. laumondii TTO1; identical to SEQ ID NO: 8142

SEQ ID NO: 104738 - DNA, 1362 bp, Vibrio vulnificus YJ016; identical to SEQ ID NO: 8143
  CDS (1)..(1362): transl_table=11

SEQ ID NO: 104739 - protein, 453 aa, Vibrio vulnificus YJ016; identical to SEQ ID NO: 8144

SEQ ID NO: 104740 - DNA, 1377 bp, Corynebacterium diphtheriae NCTC 13129; identical to SEQ ID NO: 8147
  CDS (1)..(1377): transl_table=11

SEQ ID NO: 104741 - protein, 458 aa, Corynebacterium diphtheriae NCTC 13129; identical to SEQ ID NO: 8148

SEQ ID NO: 104742 - DNA, 2139 bp, Gibberella zeae PH-1; identical to SEQ ID NO: 8149
  CDS (1)..(2139)

SEQ ID NO: 104743 - protein, 712 aa, Gibberella zeae PH-1; identical to SEQ ID NO: 8150

SEQ ID NO: 104744 - DNA, 2250 bp, Ustilago maydis 521; identical to SEQ ID NO: 8151
  CDS (1)..(2250)

SEQ ID NO: 104745 - protein, 749 aa, Ustilago maydis 521; identical to SEQ ID NO: 8152

SEQ ID NO: 104746 - DNA, 1389 bp, Burkholderia vietnamiensis G4; identical to SEQ ID NO: 8159
  CDS (1)..(1389): transl_table=11

SEQ ID NO: 104747 - protein, 462 aa, Burkholderia vietnamiensis G4; identical to SEQ ID NO: 8160

SEQ ID NO: 104748 - DNA, 1371 bp, Dichelobacter nodosus VCS1703A; identical to SEQ ID NO: 8041
  CDS (1)..(1371): transl_table=11

SEQ ID NO: 104749 - protein, 456 aa, Dichelobacter nodosus VCS1703A; identical to SEQ ID NO: 8042

SEQ ID NO: 104750 - DNA, 1392 bp, Candidatus Protochlamydia amoebophila UWE25; identical to SEQ ID NO: 8161
  CDS (1)..(1392): transl_table=11

SEQ ID NO: 104751 - protein, 463 aa, Candidatus Protochlamydia amoebophila UWE25; identical to SEQ ID NO: 8162

SEQ ID NO: 104752 - DNA, 1398 bp, Bartonella henselae str. Houston-1; identical to SEQ ID NO: 8167
  CDS (1)..(1398): transl_table=11

SEQ ID NO: 104753 - protein, 465 aa, Bartonella henselae str. Houston-1; identical to SEQ ID NO: 8168

SEQ ID NO: 104754 - DNA, 1365 bp, Erwinia carotovora subsp. atroseptica SCRI1043; identical to SEQ ID NO: 8169
  CDS (1)..(1365): transl_table=11

SEQ ID NO: 104755 - protein, 454 aa, Erwinia carotovora subsp. atroseptica SCRI1043; identical to SEQ ID NO: 8170

SEQ ID NO: 104756 - DNA, 1368 bp, Erwinia carotovora subsp. atroseptica SCRI1043; identical to SEQ ID NO: 8171
  CDS (1)..(1368): transl_table=11

SEQ ID NO: 104757 - protein, 455 aa, Erwinia carotovora subsp. atroseptica SCRI1043; identical to SEQ ID NO: 8172

SEQ ID NO: 104758 - DNA, 1437 bp, Propionibacterium acnes KPA171202; identical to SEQ ID NO: 8173
  CDS (1)..(1437): transl_table=11

SEQ ID NO: 104759 - protein, 478 aa, Propionibacterium acnes KPA171202; identical to SEQ ID NO: 8174

SEQ ID NO: 104760 - DNA, 1365 bp, Yersinia pseudotuberculosis IP 32953; identical to SEQ ID NO: 8177
  CDS (1)..(1365): transl_table=11

SEQ ID NO: 104761 - protein, 454 aa, Yersinia pseudotuberculosis IP 32953; identical to SEQ ID NO: 8178

SEQ ID NO: 104762 - DNA, 1365 bp, Mannheimia succiniciproducens MBEL55E; identical to SEQ ID NO: 8179
  CDS (1)..(1365): transl_table=11

SEQ ID NO: 104763 - protein, 454 aa, Mannheimia succiniciproducens MBEL55E; identical to SEQ ID NO: 8180

SEQ ID NO: 104764 - DNA, 663 bp, Bacillus licheniformis ATCC 14580
  CDS (1)..(663): transl_table=11
atgaagtacagaagtgtgtttgatattatcgggcccgtcatgatcggaccgtcaagttctcatacggccggcgcggccagaatcggcagagtcgccagaagcgtgtttgggagggagccgaaacaaattattgtatcgctctacggttcttttgccgaaacgtataaaggacatggaacagatgttgcgatcatcggcggccttttggattttgatacatttgatgaaagaatcaaagattcgatccgtctagccgaagaaaagggaatcgccatcgagttccgggaagaagaagcggtaccgaagcatcccaatacagcccgcatcctcatctctgatgatgaaggctcccttgaactcgcaggcatctcaatcggcggagggaaaatcgagatcattgagctgaacggcttcgaactcagattatcgggtaatcaccccgctattttagtcgtccataacgaccgctacggaacgattgcaggcgtagccaatgtgcttgcgaagttcgcaatcaacatcggccatatggaagttgcccgcaaagacgtcggccaggaagcgctcatgacgattgaggtcgatcaaacgattgatccggctgtttttgatgaattgagagcgctgccgaacatcattgaggtgacccagatcgctgactaa

SEQ ID NO: 104765 - protein, 220 aa, Bacillus licheniformis ATCC 14580
MKYRSVFDIIGPVMIGPSSSHTAGAARIGRVARSVFGREPKQIIVSLYGSFAETYKGHGTDVAIIGGLLDFDTFDERIKDSIRLAEEKGIAIEFREEEAVPKHPNTARILISDDEGSLELAGISIGGGKIEIIELNGFELRLSGNHPAILVVHNDRYGTIAGVANVLAKFAINIGHMEVARKDVGQEALMTIEVDQTIDPAVFDELRALPNIIEVTQIAD

SEQ ID NO: 104766 - DNA, 1389 bp, Burkholderia pseudomallei K96243; identical to SEQ ID NO: 8181
  CDS (1)..(1389): transl_table=11

SEQ ID NO: 104767 - protein, 462 aa, Burkholderia pseudomallei K96243; identical to SEQ ID NO: 8182

SEQ ID NO: 104768 - DNA, 1365 bp, Campylobacter jejuni RM1221; identical to SEQ ID NO: 8187
  CDS (1)..(1365): transl_table=11

SEQ ID NO: 104769 - protein, 454 aa, Campylobacter jejuni RM1221; identical to SEQ ID NO: 8188

SEQ ID NO: 104770 - DNA, 1386 bp, Neisseria gonorrhoeae FA 1090; identical to SEQ ID NO: 8189
  CDS (1)..(1386): transl_table=11

SEQ ID NO: 104771 - protein, 461 aa, Neisseria gonorrhoeae FA 1090; identical to SEQ ID NO: 8190

SEQ ID NO: 104772 - DNA, 1377 bp, Pseudomonas syringae pv. syringae B728a; identical to SEQ ID NO: 8191
  CDS (1)..(1377): transl_table=11

SEQ ID NO: 104773 - protein, 458 aa, Pseudomonas syringae pv. syringae B728a; identical to SEQ ID NO: 8192

SEQ ID NO: 104774 - DNA, 1377 bp, Pseudomonas fluorescens Pf-5; identical to SEQ ID NO: 8193
  CDS (1)..(1377): transl_table=11

SEQ ID NO: 104775 - protein, 458 aa, Pseudomonas fluorescens Pf-5; identical to SEQ ID NO: 8194

SEQ ID NO: 104776 - DNA, 1434 bp, Psychrobacter arcticus 273-4; identical to SEQ ID NO: 8199
  CDS (1)..(1434): transl_table=11

SEQ ID NO: 104777 - protein, 477 aa, Psychrobacter arcticus 273-4; identical to SEQ ID NO: 8200

SEQ ID NO: 104778 - DNA, 1377 bp, Colwellia psychrerythraea 34H; identical to SEQ ID NO: 8201
  CDS (1)..(1377): transl_table=11

SEQ ID NO: 104779 - protein, 458 aa, Colwellia psychrerythraea 34H; identical to SEQ ID NO: 8202

SEQ ID NO: 104780 - DNA, 1389 bp, Ralstonia eutropha JMP134; identical to SEQ ID NO: 8205
  CDS (1)..(1389): transl_table=11

SEQ ID NO: 104781 - protein, 462 aa, Ralstonia eutropha JMP134; identical to SEQ ID NO: 8206

SEQ ID NO: 104782 - DNA, 1377 bp, Pseudomonas fluorescens PfO-1; identical to SEQ ID NO: 8211
  CDS (1)..(1377): transl_table=11

SEQ ID NO: 104783 - protein, 458 aa, Pseudomonas fluorescens PfO-1; identical to SEQ ID NO: 8212

SEQ ID NO: 104784 - DNA, 1380 bp, Rhodobacter sphaeroides 2.4.1; identical to SEQ ID NO: 8213
  CDS (1)..(1380): transl_table=11

SEQ ID NO: 104785 - protein, 459 aa, Rhodobacter sphaeroides 2.4.1; identical to SEQ ID NO: 8214

SEQ ID NO: 104786 - DNA, 1389 bp, Burkholderia sp. 383; identical to SEQ ID NO: 8215
  CDS (1)..(1389): transl_table=11

SEQ ID NO: 104787 - protein, 462 aa, Burkholderia sp. 383; identical to SEQ ID NO: 8216

SEQ ID NO: 104788 - DNA, 1389 bp, Burkholderia xenovorans LB400
  CDS (1)..(1389): transl_table=11
atggcagtcagcgtgttcgacctcttcaaaatcggcattggtccgtccagttcgcatacggtcgggccgatgcgcgcggcgctgatgttcgctcaagggctcgaacgcgatgggctgctcactgcgaccgcatcggtgaaggtggagctgtatggctcgctcggcgcgacgggcaaggggcacggtaccgatcgcggtgtgatgcttggcctgatgggcgacgcacccgacaccgtgaatccggacacgatcgccgagcggctggaaggcgtgcgcgtgtcccgcaagctggcgctgctcggcgcgcatgacgtgccattcgtgcagaaagatcagattgcgttctatcgtcaggcgctgcccgagcatccgaacggtctcaagctgcgcgcttacgacgcgcagggtgagacattgcgcgagtcgacctatctgtcggtgggcggcggtttcgtggtgacggcgggcgcgccgaacacgaaggtgctgagcgccgtcgatcaattgccgcactcgtttcgcagcggcaacgagttgcttgcgctgtgcgaatcgaccgacaagagcatcgcccagttgatgtgggaaaacgagcgcgtctggcacacggaagaagaaacgcgctccggcctgctgaaaatctgggacgtgatgcaatcgtgtgtcgcacgcggttgcggcatcaacaatccggacgccgacggcaacctgcccggcccgttccaggtgaagcgccgtgcgccgcagttgtatcgcgcgctgtcgggcaatcctgaactggcgctgcgcgatccgctttcaatggtcgactggatcaatctctacgcgatcgccgtcaacgaagaaaacgccgccggcggccgcgtggtcacggcgccgaccaacggcgcggccggcatcatcccggcagtgctgcattactacacgcgcttcatgccgggctcgaatcagcagggcgtgatcgacttcctgatgaccgctgcggccatcggcattctgtacaagctgaacgcgtcgatctccggtgccgaagtgggctgccagggtgaagtgggcgttgcctgttcgatggcggcgggcgcgctcgccgctgtcatgggcggcacgccgcggcaggtcgagaacgctgcggaaatcggcatggaacacaacctcggtctgacgtgcgacccggtcggcggcatggtgcagattccgtgcatcgagcgcaatgcgatggcgtcggtgaaggcggtcaatgcggcgcgcatggccttgcgcggcgatggcagccactacgtgtcgctcgattcggtgatcaagaccatgcgcgaaaccggcgcggatatgaagaccaagtacaaggaaacgtcgcgcggcgggttggcggtgaatatcgtggagtgttga

SEQ ID NO: 104789 - protein, 462 aa, Burkholderia xenovorans LB400
MAVSVFDLFKIGIGPSSSHTVGPMRAALMFAQGLERDGLLTATASVKVELYGSLGATGKGHGTDRGVMLGLMGDAPDTVNPDTIAERLEGVRVSRKLALLGAHDVPFVQKDQIAFYRQALPEHPNGLKLRAYDAQGETLRESTYLSVGGGFVVTAGAPNTKVLSAVDQLPHSFRSGNELLALCESTDKSIAQLMWENERVWHTEEETRSGLLKIWDVMQSCVARGCGINNPDADGNLPGPFQVKRRAPQLYRALSGNPELALRDPLSMVDWINLYAIAVNEENAAGGRVVTAPTNGAAGIIPAVLHYYTRFMPGSNQQGVIDFLMTAAAIGILYKLNASISGAEVGCQGEVGVACSMAAGALAAVMGGTPRQVENAAEIGMEHNLGLTCDPVGGMVQIPCIERNAMASVKAVNAARMALRGDGSHYVSLDSVIKTMRETGADMKTKYKETSRGGLAVNIVEC

SEQ ID NO: 104790 - DNA, 1377 bp, Ralstonia metallidurans CH34; identical to SEQ ID NO: 8231
  CDS (1)..(1377): transl_table=11

SEQ ID NO: 104791 - protein, 458 aa, Ralstonia metallidurans CH34; identical to SEQ ID NO: 8232

SEQ ID NO: 104792 - DNA, 1353 bp, Acidobacteria bacterium Ellin345; identical to SEQ ID NO: 8233
  CDS (1)..(1353): transl_table=11

SEQ ID NO: 104793 - protein, 450 aa, Acidobacteria bacterium Ellin345; identical to SEQ ID NO: 8234

SEQ ID NO: 104794 - DNA, 1374 bp, Silicibacter sp. TM1040; identical to SEQ ID NO: 8235
  CDS (1)..(1374): transl_table=11

SEQ ID NO: 104795 - protein, 457 aa, Silicibacter sp. TM1040; identical to SEQ ID NO: 8236

SEQ ID NO: 104796 - DNA, 1416 bp, Myxococcus xanthus DK 1622; identical to SEQ ID NO: 8237
  CDS (1)..(1416): transl_table=11

SEQ ID NO: 104797 - protein, 471 aa, Myxococcus xanthus DK 1622; identical to SEQ ID NO: 8238

SEQ ID NO: 104798 - DNA, 1383 bp, Mesorhizobium sp. BNC1; identical to SEQ ID NO: 8239
  CDS (1)..(1383): transl_table=11

SEQ ID NO: 104799 - protein, 460 aa, Mesorhizobium sp. BNC1; identical to SEQ ID NO: 8240

SEQ ID NO: 104800 - DNA, 1383 bp, Rhodococcus sp. RHA1; identical to SEQ ID NO: 8243
  CDS (1)..(1383): transl_table=11

SEQ ID NO: 104801 - protein, 460 aa, Rhodococcus sp. RHA1; identical to SEQ ID NO: 8244

SEQ ID NO: 104802 - DNA, 1410 bp, Rhodococcus sp. RHA1; identical to SEQ ID NO: 8247
  CDS (1)..(1410): transl_table=11

SEQ ID NO: 104803 - protein, 469 aa, Rhodococcus sp. RHA1; identical to SEQ ID NO: 8248

SEQ ID NO: 104804 - DNA, 1377 bp, Shewanella sp. MR-4
  CDS (1)..(1377): transl_table=11
atgattagcgtattcgatatgttcaagatcggcattggcccttcgagttcacacactgttggccccatgaaagcgggcaaaatttttatgcagcaccttgctgactcgggcaaaattgcccaagtagatgaattacgagccgaattgtttggttccctcggccaaacgggtaaaggtcacggcacgggtaaagcggtaattttaggcttaatgggtgaagatccagaaaccgtcgacaccgacagcatcgatggcattctagaacaagtgtctaaaaatgagaccctcaccctcagctgcggcaaagtagtcaagtttacccgtgaagacggcattacctaccacagacgcaaaacgctacccgcccatgccaacgccatgacactgtatgcctacagcaacggcgaatgtatttttgagcgcacttactactctgtaggcggcggatttatcttagacgaagatgaaatccatcagcgcaatgcctcaccagcatcacaaattgaatcagcaccttacgattttaatagcagtgcccaattactggatttatgtactgaacatggcctgagcatttcttccctaatgatggccaacgagcttagcctcgccagcgaagaagaagtcaaagctaaactgtggaatatctggcaaaccatgaaaacctgtatcgaacggggttatcagaaggaaggtattctgcctggcggcttaaaactgcgtcgccgcgcaccagcactctatcgtcgtctcaaagccgaaggccgtaacaacgtcgatccgttaaccgcaatggattgggtcgatttattcgccctctcggtaaacgagcaaaacgctgctggcgatcgcgttgtcaccgcaccaacaaacggcgccgcgggcattatccctgccgtgctgtgctactacgataccttcgtgcaagaagtcgatatcgatgtttgcgcccgttacctgttaaccgctgctgcgattggtattttatacaagaaaaatgcctcgatttcgggcgctgaagtcggctgtcagggcgaagttggtgtagcctgttcaatggccgctggcgcattgaccgagatcatgggcggcacagtcgaacatgttgaaaacgcggctgaaattggcatggagcataacctaggcctgacctgcgaccccgtaggcggcctagtacaagttccttgtattgaacgtaatgcgatgggtgcaatcaaagcgattaacgcatcacgcatggcgctgcgcggcgacggcaaccacaaggtatcactggataaagtgataaaaaccatgatggatacaggtaaagatatgcgcagtaaatacaaagaaaccgccaaaggcggcctcgctgtgaacattgtagagtgttaa

SEQ ID NO: 104805 - protein, 458 aa, Shewanella sp. MR-4
MISVFDMFKIGIGPSSSHTVGPMKAGKIFMQHLADSGKIAQVDELRAELFGSLGQTGKGHGTGKAVILGLMGEDPETVDTDSIDGILEQVSKNETLTLSCGKVVKFTREDGITYHRRKTLPAHANAMTLYAYSNGECIFERTYYSVGGGFILDEDEIHQRNASPASQIESAPYDFNSSAQLLDLCTEHGLSISSLMMANELSLASEEEVKAKLWNIWQTMKTCIERGYQKEGILPGGLKLRRRAPALYRRLKAEGRNNVDPLTAMDWVDLFALSVNEQNAAGDRVVTAPTNGAAGIIPAVLCYYDTFVQEVDIDVCARYLLTAAAIGILYKKNASISGAEVGCQGEVGVACSMAAGALTEIMGGTVEHVENAAEIGMEHNLGLTCDPVGGLVQVPCIERNAMGAIKAINASRMALRGDGNHKVSLDKVIKTMMDTGKDMRSKYKETAKGGLAVNIVEC

SEQ ID NO: 104806 - DNA, 1377 bp, Shewanella sp. MR-7; identical to SEQ ID NO: 8249
  CDS (1)..(1377): transl_table=11

SEQ ID NO: 104807 - protein, 458 aa, Shewanella sp. MR-7; identical to SEQ ID NO: 8250

SEQ ID NO: 104808 - DNA, 1377 bp, Hyphomonas neptunium ATCC 15444; identical to SEQ ID NO: 8251
  CDS (1)..(1377): transl_table=11

SEQ ID NO: 104809 - protein, 458 aa, Hyphomonas neptunium ATCC 15444; identical to SEQ ID NO: 8252

SEQ ID NO: 104810 - DNA, 1404 bp, Rhizobium leguminosarum bv. viciae 3841; identical to SEQ ID NO: 8253
  CDS (1)..(1404): transl_table=11

SEQ ID NO: 104811 - protein, 467 aa, Rhizobium leguminosarum bv. viciae 3841; identical to SEQ ID NO: 8254

SEQ ID NO: 104812 - DNA, 1377 bp, Pseudomonas aeruginosa UCBPP-PA14; identical to SEQ ID NO: 8255
  CDS (1)..(1377): transl_table=11

SEQ ID NO: 104813 - protein, 458 aa, Pseudomonas aeruginosa UCBPP-PA14; identical to SEQ ID NO: 8256

SEQ ID NO: 104814 - DNA, 1377 bp, Mycobacterium smegmatis str. MC2 155; identical to SEQ ID NO: 8261
  CDS (1)..(1377): transl_table=11

SEQ ID NO: 104815 - protein, 458 aa, Mycobacterium smegmatis str. MC2 155; identical to SEQ ID NO: 8262

SEQ ID NO: 104816 - DNA, 1389 bp, Acidovorax sp. JS42; identical to SEQ ID NO: 8263
  CDS (1)..(1389): transl_table=11

SEQ ID NO: 104817 - protein, 462 aa, Acidovorax sp. JS42; identical to SEQ ID NO: 8264

SEQ ID NO: 104818 - DNA, 1416 bp, Kineococcus radiotolerans SRS30216
  CDS (1)..(1416): transl_table=11
gtgggcggcccgctgtccgtcttcgacatgttctccgtcggcatcggcccctcgagctcgcacaccgtcggcccgatgcgcgccgccctcgccttcgccgagcacctcgccgccaccggggccctggaccgcgtccacgcggtgaccgtcgacctgtacggctcgctcggcgccaccggccgcgggcacggcagcgaccgcgccgtcgtcctcgggctgacgggggagcgccccgagctcatcgaccccgacaccgtcgaggaggtgctcgccgggatccgggcgggcggggagctgcgcctcctgggccggcaccccgtgcggttcgacctcgacgccgacgtccgcctgatcgggcagacctcgctgcccgcgcaccccaacgggatggtcttcaccgcccgcgacgccgcgggggacgtcctcgccgagcgcacctcgtactccgtcggcgggggtttcgtgcgcgaccaccccctcgacgtcgccgaacccgtcgtggggaccggcgccggtctgcccttcggcttccgcagcgcgggggagctgctggagcactgccgccggaccggcctcggggtggccgacctggtgcggcgcaacgaggagagccagcgcgagcccgccgaggtcgacgccgggctgctgcgcatcttcgccgccatggccgcctgcgtcgaccacggcctcgtcaccgacgggaccctgcccggcggtctcggcgtgcgccgccgcgcgccgcggctgcaccggcagctgctcgccgaggagggcagctccgccgccgacgccctgcacgccatggactgggtcagcctgttcgccctcgccgtcaacgaggagaacgccgccggcggtcgcgtcgtcaccgcccccaccaacggcgcggcggggatcgtgcccgccgtcctgcacttctaccgccgcttcgtccccggcgccgacgacgccggcaccgtgcgcttcctgctcgccgccggcggcatcggcatcgtcctgaaggagaccggctcgatctccggggccgaggtcggctgccagggcgaggtcggctccgccagcgccatggcggccgccggcctcgccgaggtcctcggcggcacccccgagcaggtcgagaacgccgccgagatcgccgtcgagcaccacctggggctcacctgcgaccccgtcggcggcctcgtccagatcccctgcatcgagcgcaacgccgtcggggccacgaccgcgatccacgccgcccgcaccgccatgcgcggcgacggcgaccacgtcgtcagcctcgacaccgccatcgccacgatgcgccagaccggcgcgcacatgcgctcggagtacaaggagacctccctcggcgggctcgccctcaccgtcgtcggccgccccgccgtgggggtcaacgtccccgagtgctga

SEQ ID NO: 104819 - protein, 471 aa, Kineococcus radiotolerans SRS30216
MGGPLSVFDMFSVGIGPSSSHTVGPMRAALAFAEHLAATGALDRVHAVTVDLYGSLGATGRGHGSDRAVVLGLTGERPELIDPDTVEEVLAGIRAGGELRLLGRHPVRFDLDADVRLIGQTSLPAHPNGMVFTARDAAGDVLAERTSYSVGGGFVRDHPLDVAEPVVGTGAGLPFGFRSAGELLEHCRRTGLGVADLVRRNEESQREPAEVDAGLLRIFAAMAACVDHGLVTDGTLPGGLGVRRRAPRLHRQLLAEEGSSAADALHAMDWVSLFALAVNEENAAGGRVVTAPTNGAAGIVPAVLHFYRRFVPGADDAGTVRFLLAAGGIGIVLKETGSISGAEVGCQGEVGSASAMAAAGLAEVLGGTPEQVENAAEIAVEHHLGLTCDPVGGLVQIPCIERNAVGATTAIHAARTAMRGDGDHVVSLDTAIATMRQTGAHMRSEYKETSLGGLALTVVGRPAVGVNVPEC

SEQ ID NO: 104820 - DNA, 1434 bp, Croceibacter atlanticus HTCC2559; identical to SEQ ID NO: 8265
  CDS (1)..(1434): transl_table=11

SEQ ID NO: 104821 - protein, 477 aa, Croceibacter atlanticus HTCC2559; identical to SEQ ID NO: 8266

SEQ ID NO: 104822 - DNA, 1374 bp, Sulfitobacter sp. EE-36; identical to SEQ ID NO: 8267
  CDS (1)..(1374): transl_table=11

SEQ ID NO: 104823 - protein, 457 aa, Sulfitobacter sp. EE-36; identical to SEQ ID NO: 8268

SEQ ID NO: 104824 - DNA, 1371 bp, Oceanicola batsensis HTCC2597; identical to SEQ ID NO: 8271
  CDS (1)..(1371): transl_table=11

SEQ ID NO: 104825 - protein, 456 aa, Oceanicola batsensis HTCC2597; identical to SEQ ID NO: 8272

SEQ ID NO: 104826 - DNA, 1377 bp, Pseudoalteromonas tunicata D2; identical to SEQ ID NO: 8273
  CDS (1)..(1377): transl_table=11

SEQ ID NO: 104827 - protein, 458 aa, Pseudoalteromonas tunicata D2; identical to SEQ ID NO: 8274

SEQ ID NO: 104828 - DNA, 1362 bp, Photobacterium sp. SKA34; identical to SEQ ID NO: 8275
  CDS (1)..(1362): transl_table=11

SEQ ID NO: 104829 - protein, 453 aa, Photobacterium sp. SKA34; identical to SEQ ID NO: 8276

SEQ ID NO: 104830 - DNA, 1347 bp, Xanthobacter autotrophicus Py2; identical to SEQ ID NO: 8277
  CDS (1)..(1347): transl_table=11

SEQ ID NO: 104831 - protein, 448 aa, Xanthobacter autotrophicus Py2; identical to SEQ ID NO: 8278

SEQ ID NO: 104832 - DNA, 1446 bp, Flavobacteria bacterium BBFL7; identical to SEQ ID NO: 8279
  CDS (1)..(1446): transl_table=11

SEQ ID NO: 104833 - protein, 481 aa, Flavobacteria bacterium BBFL7; identical to SEQ ID NO: 8280

SEQ ID NO: 104834 - DNA, 1413 bp, gamma proteobacterium HTCC2207; identical to SEQ ID NO: 8281
  CDS (1)..(1413): transl_table=11

SEQ ID NO: 104835 - protein, 470 aa, gamma proteobacterium HTCC2207; identical to SEQ ID NO: 8282

SEQ ID NO: 104836 - DNA, 1392 bp, Rickettsiella grylli; identical to SEQ ID NO: 8283
  CDS (1)..(1392): transl_table=11

SEQ ID NO: 104837 - protein, 463 aa, Rickettsiella grylli; identical to SEQ ID NO: 8284

SEQ ID NO: 104838 - DNA, 1362 bp, Vibrio sp. Ex25; identical to SEQ ID NO: 8285
  CDS (1)..(1362): transl_table=11

SEQ ID NO: 104839 - protein, 453 aa, Vibrio sp. Ex25; identical to SEQ ID NO: 8286

SEQ ID NO: 104840 - DNA, 1377 bp, Alteromonadales bacterium TW-7; identical to SEQ ID NO: 8287
  CDS (1)..(1377): transl_table=11

SEQ ID NO: 104841 - protein, 458 aa, Alteromonadales bacterium TW-7; identical to SEQ ID NO: 8288

SEQ ID NO: 104842 - DNA, 1407 bp, Pseudomonas putida GB-1; identical to SEQ ID NO: 8289
  CDS (1)..(1407): transl_table=11

SEQ ID NO: 104843 - protein, 468 aa, Pseudomonas putida GB-1; identical to SEQ ID NO: 8290

SEQ ID NO: 104844 - DNA, 1377 bp, Pseudomonas putida GB-1; identical to SEQ ID NO: 8291
  CDS (1)..(1377): transl_table=11

SEQ ID NO: 104845 - protein, 458 aa, Pseudomonas putida GB-1; identical to SEQ ID NO: 8292

SEQ ID NO: 104846 - DNA, 1377 bp, Pseudomonas putida GB-1; identical to SEQ ID NO: 8293
  CDS (1)..(1377): transl_table=11

SEQ ID NO: 104847 - protein, 458 aa, Pseudomonas putida GB-1; identical to SEQ ID NO: 8294

SEQ ID NO: 104848 - DNA, 1110 bp, Marinobacter sp. ELB17
  CDS (1)..(1110): transl_table=11
atgtccatcagcgtcttcgacctgttcagaatcgggatcggaccctccagctcgcataccgtcggccccatgcgtgccgcctatgattttgtccaggcgcttcgccgccagggaatgctggagcaggtaaggcgcatagaggttcacttgtttggttcgctgtcggctaccggcgtgggccacgggacggatcgtgccgccattatggggctaatggggaaacaaccgcagaccattgacccggtcgtcatcggaccggccatggaggcgcttcaagacacccagaccctgctacttgatgcccggtttccgattaatttcaacgcgaaccgcgacatgcattggcatccggagaatcttttgcatcatccgaatgcgatgcgggtgatcgcccatacggatagcggcgagctgtattgcaacacctactactcagtcggcggcggttttgtgatcgatgaggcccaggccgcgcagggtgatttcgacaccgacacgacgtctctgccctacgagttcaatacggcggctgaactgctcgccctgtgcaagacgcacggcctgagtatttccggggtgatgctggaaaacgaaaaagcgtggcgcgacgaggccactattcgtgcccagttgatagggctctgggaggccatgcaggcctgcgtgcaaaacggcttgcgtaatgagggcatgatccccggcggacttttcgtgaggcgccgggcagcggcctggcatctgcgcctgctggccaagaaaaacaacggcagcttgattgcttccacctcatccgcgatggactggctcaatctctttgccctggctgtcaacgaagagaatgccgccggcgggcggatggtgacggcgccgacgaacggcgcagctggaatcattccggcggtgttgcattactacatgcagttccagcctgacgcgaacgatcgcgatgtggtcaattatctgctcaccgccgccgccgtcggtattctctgcaaaaaaacgcatcaatttcagcgcagaagtggggtgtcagggcgaggtcggatcggcctgcgcgatggccgccgccgggcttgcagagatcctgggcgggaccccagcgcaggttga

SEQ ID NO: 104849 - protein, 369 aa, Marinobacter sp. ELB17
MSISVFDLFRIGIGPSSSHTVGPMRAAYDFVQALRRQGMLEQVRRIEVHLFGSLSATGVGHGTDRAAIMGLMGKQPQTIDPVVIGPAMEALQDTQTLLLDARFPINFNANRDMHWHPENLLHHPNAMRVIAHTDSGELYCNTYYSVGGGFVIDEAQAAQGDFDTDTTSLPYEFNTAAELLALCKTHGLSISGVMLENEKAWRDEATIRAQLIGLWEAMQACVQNGLRNEGMIPGGLFVRRRAAAWHLRLLAKKNNGSLIASTSSAMDWLNLFALAVNEENAAGGRMVTAPTNGAAGIIPAVLHYYMQFQPDANDRDVVNYLLTAAAVGILCKKTHQFQRRSGVSGRGRIGLRDGRRRACRDPGRDPSAG

SEQ ID NO: 104850 - DNA, 1365 bp, Escherichia coli
  CDS (1)..(1365): transl_table=11
gtgattagtctattcgacatgtttaaggtggggattggtccctcatcttcccataccgtagggcctatgaaggcaggtaaacagttcgtcgatgatctggtcgaaaaaggcttactggatagcgttactcgcgttgccgtggacgtttatggttcactgtcgctgacgggtaaaggccaccacaccgatatcgccattattatgggtcttgcaggtaacgaacctgccaccgtggatatcgacagtattcccggttttattcgcgacgtagaagagcgcgaacgtctgctgctggcacagggacggcatgaagtggatttcccgcgcgacaacgggatgcgttttcataacggcaacctgccgctgcatgaaaacggtatgcaaatccacgcctataacggcgatgaagtcgtctacagcaaaacttattattccatcggcggcggttttatcgtcgatgaagaacactttggtcaggatgctgccaacgaagtaagcgtgccgtatccgttcaaatctgccaccgaactgctcgcgtactgtaatgaaaccggctattcgctgtctggtctcgctatgcagaacgaactggcgctgcacagcaagaaagagatcgacgagtatttcgcgcatgtctggcaaaccatgcaggcatgtatcgatcgcgggatgaacaccgaaggtgtactgccaggcccgctgcgcgtgccacgtcgtgcgtctgccctgcgccggatgctggtttccagcgataaactgtctaacgatccgatgaatgtcattgactgggtaaacatgtttgcgctggcagttaacgaagaaaacgccgccggtggtcgtgtggtaactgcgccaaccaacggtgcctgcggtatcgttccggcagtgctggcttactatgaccactttattgaatcggtcagcccggacatctatacccgttactttatggcagcgggcgcgattggtgcattgtataaaatgaacgcctctatttccggtgcggaagttggttgccagggcgaagtgggtgttgcctgttcaatggctgctgcgggtcttgcagaactgctgggcggtagcccggaacaggtttgcgtggcggcggaaattggcatggaacacaaccttggtttaacctgcgacccggttgcagggcaggttcaggtgccgtgcattgagcgtaatgccattgcctctgtgaaggcgattaacgccgcgcggatggctctgcgccgcaccagtgcaccgcgcgtctcgctggataaggtcatcgaaacgatgtacgaaaccggtaaggacatgaacgccaaataccgcgaaacctcacgcggtggtctggcaatcaaagtccagtgtgactaa

SEQ ID NO: 104851 - protein, 454 aa, Escherichia coli; identical to SEQ ID NO: 8034

SEQ ID NO: 104852 - DNA, 1368 bp, Haemophilus influenzae; identical to SEQ ID NO: 8295
  CDS (1)..(1368): transl_table=11

SEQ ID NO: 104853 - protein, 455 aa, Haemophilus influenzae; identical to SEQ ID NO: 8296

SEQ ID NO: 104854 - DNA, 1368 bp, Helicobacter pylori J99; identical to SEQ ID NO: 8297
  CDS (1)..(1368): transl_table=11

SEQ ID NO: 104855 - protein, 455 aa, Helicobacter pylori J99; identical to SEQ ID NO: 8298

SEQ ID NO: 104856 - DNA, 1368 bp, Helicobacter pylori; identical to SEQ ID NO: 8299
  CDS (1)..(1368): transl_table=11

SEQ ID NO: 104857 - protein, 455 aa, Helicobacter pylori; identical to SEQ ID NO: 8300

SEQ ID NO: 104858 - DNA, 1386 bp, Mycobacterium bovis; identical to SEQ ID NO: 8035
  CDS (1)..(1386): transl_table=11

SEQ ID NO: 104859 - protein, 461 aa, Mycobacterium bovis; identical to SEQ ID NO: 8036

SEQ ID NO: 104860 - DNA, 1368 bp, Streptomyces coelicolor
  CDS (1)..(1368): transl_table=11
gtggccatctcggtcttcgacctgttctcgatcggcatcggcccgtcgagctcgcacacggtcggcccgatgcgcgcggcccgcatgttcgcccgccgcctgcgcaacgaggagctgctggactccgtcgcctcggtccgcgtcgagctgtacggctcgctcggcgccaccggccacggccacggcacccccaaggcggtgctgctcggcctggagggcgactcaccgcgcacggtggacgtggagagcgccgacgaccgcgtcgagacgatcaaatcctccggccggatcagcctcctcggcgatcacgagatcgccttcgcctacgacgacgacatggtcctgcaccgccgcaaggcccttccctaccacgccaacggcatgacgctgtgggcgtacgacgccgagggcgccgaggtgctgaccaagacctactactcggtcggcggcggcttcgtcgtcgacgaggacgcggtcggcgccgaccgcatagttctggacgacaccgtcctgaagtaccccttccgcaccggcgacgagctgctgcgcctggcccgcgagacgggcctgtccatctccgcgctgatgctggagaacgagcgggcctggcgcgacgaggacgagatccgcgagggcctgctggagatctggcgcgtgatgcgggcgtgtgtggaccgcggcatgacccgcgagggcatcctgccgggcggcctgaaggtccgccgccgcgccgcgaacaccgcgcgcaagctgcgctccgagggcgacccgcaggccctggccatggagtggatcacgctctacgcgatggccgtgaacgaggagaacgcggccggcggccgggtcgtcaccgccccgaccaacggcgcggccggcatcatccccgcggtcctgcactactacatgaacttcgtacccggcgccgacgaggacggcgtggtccgcttcctcctcgccgccggcgccatcggcatgctcttcaaggagaacgcctccatctccggcgccgaggtcggctgccagggcgaggtcggctccgcctgctcgatggcggccggcgccctcgccgaggtgctcggcggctccccggagcaggtggagaacgccgccgagatcggcatggagcacaacctcggcctcacctgcgaccccgtcggcggtctggtccagatcccctgcatcgagcgcaacggcatggccgcggtcaaggcggtcaccgcggcccggatggcgatgcgcggcgacggctcgcacaaggtctccctcgacaaggtcatcaagaccatgaaggagaccggcgccgacatgtcggtcaagtacaaggagacggcgcggggcgggctggcggtcaacatcatcgagtgttga

SEQ ID NO: 104861 - protein, 455 aa, Streptomyces coelicolor
MAISVFDLFSIGIGPSSSHTVGPMRAARMFARRLRNEELLDSVASVRVELYGSLGATGHGHGTPKAVLLGLEGDSPRTVDVESADDRVETIKSSGRISLLGDHEIAFAYDDDMVLHRRKALPYHANGMTLWAYDAEGAEVLTKTYYSVGGGFVVDEDAVGADRIVLDDTVLKYPFRTGDELLRLARETGLSISALMLENERAWRDEDEIREGLLEIWRVMRACVDRGMTREGILPGGLKVRRRAANTARKLRSEGDPQALAMEWITLYAMAVNEENAAGGRVVTAPTNGAAGIIPAVLHYYMNFVPGADEDGVVRFLLAAGAIGMLFKENASISGAEVGCQGEVGSACSMAAGALAEVLGGSPEQVENAAEIGMEHNLGLTCDPVGGLVQIPCIERNGMAAVKAVTAARMAMRGDGSHKVSLDKVIKTMKETGADMSVKYKETARGGLAVNIIEC

SEQ ID NO: 104862 - DNA, 1368 bp, Escherichia coli; identical to SEQ ID NO: 8301
  CDS (1)..(1368): transl_table=11

SEQ ID NO: 104863 - protein, 455 aa, Escherichia coli; identical to SEQ ID NO: 8302

SEQ ID NO: 104864 - DNA, 1365 bp, Escherichia coli; identical to SEQ ID NO: 8303
  CDS (1)..(1365): transl_table=11

SEQ ID NO: 104865 - protein, 454 aa, Escherichia coli; identical to SEQ ID NO: 8304

SEQ ID NO: 104866 - DNA, 27 bp, Artificial sequence
  primer
atggatatgattagtgcattcgatatt

SEQ ID NO: 104867 - DNA, 24 bp, Artificial sequence
  primer
ttaatagctcttcctgtccttcca

SEQ ID NO: 104868 - protein, 689 aa, Artificial sequence
  consensus sequence
  Variant (2)..(2): Xaa in position 2 is any amino acid
  Variant (5)..(5): Xaa in position 5 is any amino acid
  Variant (7)..(8): Xaa in position 7 to 8 is any amino acid
  Variant (9)..(9): Xaa in position 9 is any or no amino acid
  Variant (11)..(11): Xaa in position 11 is any amino acid
  Variant (19)..(19): Xaa in position 19 is any amino acid
  Variant (23)..(23): Xaa in position 23 is any amino acid
  Variant (25)..(27): Xaa in position 25 to 27 is any amino acid
  Variant (29)..(42): Xaa in position 29 to 42 is any amino acid
  Variant (43)..(54): Xaa in position 43 to 54 is any or no amino acid
  Variant (58)..(59): Xaa in position 58 to 59 is any amino acid
  Variant (62)..(62): Xaa in position 62 is any amino acid
  Variant (65)..(65): Xaa in position 65 is any amino acid
  Variant (67)..(68): Xaa in position 67 to 68 is any amino acid
  Variant (70)..(72): Xaa in position 70 to 72 is any amino acid
  Variant (75)..(75): Xaa in position 75 is any amino acid
  Variant (77)..(78): Xaa in position 77 to 78 is any amino acid
  Variant (80)..(91): Xaa in position 80 to 91 is any amino acid
  Variant (92)..(128): Xaa in position 92 to 128 is any or no amino acid
  Variant (130)..(137): Xaa in position 130 to 137 is any amino acid
  Variant (138)..(146): Xaa in position 138 to 146 is any or no amino acid
  Variant (148)..(149): Xaa in position 148 to 149 is any amino acid
  Variant (151)..(151): Xaa in position 151 is any amino acid
  Variant (153)..(153): Xaa in position 153 is any amino acid
  Variant (155)..(157): Xaa in position 155 to 157 is any amino acid
  Variant (159)..(163): Xaa in position 159 to 163 is any amino acid
  Variant (164)..(182): Xaa in position 164 to 182 is any or no amino acid
  Variant (184)..(184): Xaa in position 184 is any amino acid
  Variant (186)..(186): Xaa in position 186 is any amino acid
  Variant (191)..(197): Xaa in position 191 to 197 is any amino acid
  Variant (198)..(311): Xaa in position 198 to 311 is any or no amino acid
  Variant (313)..(319): Xaa in position 313 to 319 is any amino acid
  Variant (320)..(321): Xaa in position 320 to 321 is any or no amino acid
  Variant (323)..(334): Xaa in position 323 to 334 is any amino acid
  Variant (335)..(338): Xaa in position 335 to 338 is any or no amino acid
  Variant (341)..(354): Xaa in position 341 to 354 is any amino acid
  Variant (355)..(358): Xaa in position 355 to 358 is any or no amino acid
  Variant (360)..(361): Xaa in position 360 to 361 is any amino acid
  Variant (363)..(368): Xaa in position 363 to 368 is any amino acid
  Variant (370)..(373): Xaa in position 370 to 373 is any amino acid
  Variant (374)..(378): Xaa in position 374 to 378 is any or no amino acid
  Variant (380)..(380): Xaa in position 380 is any amino acid
  Variant (384)..(384): Xaa in position 384 is any amino acid
  Variant (386)..(386): Xaa in position 386 is any amino acid
  Variant (388)..(388): Xaa in position 388 is any amino acid
  Variant (392)..(396): Xaa in position 392 to 396 is any amino acid
  Variant (397)..(397): Xaa in position 397 is any or no amino acid
  Variant (399)..(409): Xaa in position 399 to 409 is any amino acid
  Variant (410)..(488): Xaa in position 410 to 488 is any or no amino acid
  Variant (490)..(491): Xaa in position 490 to 491 is any amino acid
  Variant (492)..(493): Xaa in position 492 to 493 is any or no amino acid
  Variant (495)..(495): Xaa in position 495 is any amino acid
  Variant (503)..(503): Xaa in position 503 is any amino acid
  Variant (507)..(507): Xaa in position 507 is any amino acid
  Variant (516)..(516): Xaa in position 516 is any amino acid
  Variant (518)..(519): Xaa in position 518 to 519 is any amino acid
  Variant (524)..(524): Xaa in position 524 is any amino acid
  Variant (526)..(541): Xaa in position 526 to 541 is any amino acid
  Variant (542)..(555): Xaa in position 542 to 555 is any or no amino acid
  Variant (557)..(557): Xaa in position 557 is any amino acid
  Variant (559)..(559): Xaa in position 559 is any amino acid
  Variant (563)..(563): Xaa in position 563 is any amino acid
  Variant (565)..(565): Xaa in position 565 is any amino acid
  Variant (567)..(567): Xaa in position 567 is any amino acid
  Variant (574)..(574): Xaa in position 574 is any amino acid
  Variant (585)..(585): Xaa in position 585 is any amino acid
  Variant (587)..(588): Xaa in position 587 to 588 is any amino acid
  Variant (592)..(593): Xaa in position 592 to 593 is any amino acid
  Variant (595)..(595): Xaa in position 595 is any amino acid
  Variant (596)..(598): Xaa in position 596 to 598 is any or no amino acid
  Variant (600)..(603): Xaa in position 600 to 603 is any amino acid
  Variant (605)..(607): Xaa in position 605 to 607 is any amino acid
  Variant (612)..(613): Xaa in position 612 to 613 is any amino acid
  Variant (616)..(616): Xaa in position 616 is any amino acid
  Variant (624)..(625): Xaa in position 624 to 625 is any amino acid
  Variant (627)..(627): Xaa in position 627 is any amino acid
  Variant (630)..(630): Xaa in position 630 is any amino acid
  Variant (637)..(640): Xaa in position 637 to 640 is any amino acid
  Variant (641)..(641): Xaa in position 641 is any or no amino acid
  Variant (644)..(645): Xaa in position 644 to 645 is any amino acid
  Variant (647)..(649): Xaa in position 647 to 649 is any amino acid
  Variant (651)..(652): Xaa in position 651 to 652 is any amino acid
  Variant (653)..(659): Xaa in position 653 to 659 is any or no amino acid
  Variant (661)..(661): Xaa in position 661 is any amino acid
  Variant (664)..(665): Xaa in position 664 to 665 is any amino acid
  Variant (667)..(667): Xaa in position 667 is any amino acid
  Variant (670)..(671): Xaa in position 670 to 671 is any amino acid
  Variant (674)..(674): Xaa in position 674 is any amino acid
  Variant (677)..(678): Xaa in position 677 to 678 is any amino acid
  Variant (681)..(681): Xaa in position 681 is any amino acid
  Variant (684)..(685): Xaa in position 684 to 685 is any amino acid
SXFDXFXXXGXGPSSSHTXGPMXAXXXFXXXXXXXXXXXXXXXXXXXXXXXXXXGSLXXTGXGHXTXXAXXXGLXGXXPXXXXXXXXXXXXXXXXXXXXXXXXXXXXXXXXXXXXXXXXXXXXXXXXXFXXXXXXXXXXXXXXXXXLXXHXNXMXXXAXXXXXXXXXXXXXXXXXXXXXXXXYXSXGGGFXXXXXXXXXXXXXXXXXXXXXXXXXXXXXXXXXXXXXXXXXXXXXXXXXXXXXXXXXXXXXXXXXXXXXXXXXXXXXXXXXXXXXXXXXXXXXXXXXXXXXXXXXXXXXXXXXXXXXXXXXPXXXXXXXXXLXXXXXXXXXXXXXXXXNEXXXXXXXXXXXXXXXXXXWXXMXXXXXXGXXXXXXXXXGXLPGXLXVXRRAXXXXXXLXXXXXXXXXXXXXXXXXXXXXXXXXXXXXXXXXXXXXXXXXXXXXXXXXXXXXXXXXXXXXXXXXXXXXXXXXXXXXXXXXXXXXXXXXXWXXXXAXAVNEENAXGGRXVTAPTNGAXGXXPAVLXYXXXXXXXXXXXXXXXXXXXXXXXXXXXXXXLXAXAIGXLXKXNASISGXAEVGCQGEVGXAXXMAAXXLXXXXGXXXXQXXXAAEIXXEHXLGLTCDPXXGXVQXPCIERNXXXXXKAXXAXXXAXXXXXXXXXVXLDXXIXTMXXTGXDMXXKYXETXXGGLA

SEQ ID NO: 104869 - protein, 20 aa, Artificial sequence
  protein pattern
  Variant (2)..(2): Xaa in position 2 is any amino acid
  Variant (5)..(5): Xaa in position 5 is Ile, Leu, Met or Val
  Variant (6)..(7): Xaa in position 6 to 7 is any amino acid
  Variant (8)..(8): Xaa in position 8 is Ile, Leu or Val
  Variant (10)..(10): Xaa in position 10 is Ile or Val
  Variant (18)..(18): Xaa in position 18 is any amino acid
SXFDXXXXGXGPSSSHTXGP

SEQ ID NO: 104870 - protein, 13 aa, Artificial sequence
  protein pattern
  Variant (4)..(4): Xaa in position 4 is Ala, Gly or Ser
  Variant (5)..(5): Xaa in position 5 is any amino acid
  Variant (8)..(8): Xaa in position 8 is any amino acid
  Variant (11)..(11): Xaa in position 11 is any amino acid
  Variant (12)..(12): Xaa in position 12 is Ser or Thr
  Variant (13)..(13): Xaa in position 13 is Asp or Gly
GSLXXTGXGHXXX

SEQ ID NO: 104871 - DNA, 990 bp, Escherichia coli
  CDS (1)..(990): transl_table=11
atgcatattacatacgatctgccggttgctattgatgacattattgaagcgaaacaacgactggctgggcgaatttataaaacaggcatgcctcgctccaactattttagtgaacgttgcaaaggtgaaatattcctgaagtttgaaaatatgcagcgtacgggttcatttaaaattcgtggcgcatttaataaattaagttcactgaccgatgcggaaaaacgcaaaggcgtggtggcctgttctgcgggcaaccatgcgcaaggggtttccctctcctgcgcgatgctgggtatcgacggtaaagtggtgatgccaaaaggtgcgccaaaatccaaagtagcggcaacgtgcgactactccgcagaagtcgttctgcatggtgataacttcaacgacactatcgctaaagtgagcgaaattgtcgaaatggaaggccgtatttttatcccaccttacgatgatccgaaagtgattgctggccagggaacgattggtctggaaattatggaagatctctatgatgtcgataacgtgattgtgccaattggtggtggcggtttaattgctggtattgcggtggcaattaaatctattaacccgaccattcgtgttattggcgtacagtctgaaaacgttcacggcatggcggcttctttccactccggagaaataaccacgcaccgaactaccggcaccctggcggatggttgtgatgtctcccgcccgggtaatttaacttacgaaatcgttcgtgaattagtcgatgacatcgtgctggtcagcgaagacgaaatcagaaacagtatgattgccttaattcagcgcaataaagtcgtcaccgaaggcgcaggcgctctggcatgtgctgcattattaagcggtaaattagaccaatatattcaaaacagaaaaaccgtcagtattatttccggcggcaatatcgatctttctcgcgtctctcaaatcaccggtttcgttgacgcttaa

SEQ ID NO: 104872 - protein, 329 aa, Escherichia coli
MHITYDLPVAIDDIIEAKQRLAGRIYKTGMPRSNYFSERCKGEIFLKFENMQRTGSFKIRGAFNKLSSLTDAEKRKGVVACSAGNHAQGVSLSCAMLGIDGKVVMPKGAPKSKVAATCDYSAEVVLHGDNFNDTIAKVSEIVEMEGRIFIPPYDDPKVIAGQGTIGLEIMEDLYDVDNVIVPIGGGGLIAGIAVAIKSINPTIRVIGVQSENVHGMAASFHSGEITTHRTTGTLADGCDVSRPGNLTYEIVRELVDDIVLVSEDEIRNSMIALIQRNKVVTEGAGALACAALLSGKLDQYIQNRKTVSIISGGNIDLSRVSQITGFVDA

SEQ ID NO: 104873 - DNA, 1239 bp, Bradyrhizobium sp. ORS278
  CDS (1)..(1239): transl_table=11
atgggtagacacatgaccacctatgacctcaacgatctgcccgttaccatcaacgatgtgcgcgccgctgctgacacgatcagcggcgcggtgctcaccacggcctgcaaccagagccggacgctcggcgagatctgcggctgcaacatctggctgaagttcgagaacctgcagttcacgtcctccttcaaggagcgcggcgcgctcaaccggttgaatgcgctgtcgtcagagcagagagagcgcggcgtgatcgcgatgtccgccggcaatcacgcgcagggcgtcgcctacaacgcgcgtcgcctcggcattcccgcaaccatcgtgatgcccgtgggcacgccgatggtgaaggtggagaacacccgccggcacggcgccgaggtcgtgatctccggcgccacgctggaggaagcaggcacgttcgcgcgggagcacggcgcggcccgcggcatgaccatgatccatccgtatgacgatccgctgatcattgccgggcaggggacggtcgcgctggagatgctggccgtcgttcccgagctcgacacgctggtggtgccgatcggcggcggcgggctgatctcgggcatcgcggtcgcggcgcgcgcgctcaagccatcgatgcggatcgtcggcgtgcaggccgagctctatccctcgatgtacaatgccatcagcgggcggtcactgccgatgcgcggcgatacgctggcggagggcatcgcggtgaaatcgccgggccggatcacgaccgagatcatccggcatctcgtcgacgagatcctgctcgtcaccgagccgcagatcgagcgtgcgctggccaccttgatctcgatcgagaagaccgtggtcgaaggcgccggcgccgtcggccttgccgcggttctcgcgcatcaggatcaatttgcgggccgcaatgtcggtctcgtgctgtgtggaggcaatatcgacacccggctgatcgcctcggtgctgacgcgcgaactcgcccgcgaaggccggctgacccagctgtcgatcgatatcgtcgatcgtccgggacagctcgccgcggtgtccgcgctgctggccgatgccggcgccaacattatcgaggtctcgcatcagcgcacgttttccgacttgcccgccaaggcgaccttgctggaactggtgatcgagacccgcgaccaggcgcatctcaacgaggtgatggacaggctggtcgcagccgatttcaaggcgcgctgcacctga

SEQ ID NO: 104874 - protein, 412 aa, Bradyrhizobium sp. ORS278
MGRHMTTYDLNDLPVTINDVRAAADTISGAVLTTACNQSRTLGEICGCNIWLKFENLQFTSSFKERGALNRLNALSSEQRERGVIAMSAGNHAQGVAYNARRLGIPATIVMPVGTPMVKVENTRRHGAEVVISGATLEEAGTFAREHGAARGMTMIHPYDDPLIIAGQGTVALEMLAVVPELDTLVVPIGGGGLISGIAVAARALKPSMRIVGVQAELYPSMYNAISGRSLPMRGDTLAEGIAVKSPGRITTEIIRHLVDEILLVTEPQIERALATLISIEKTVVEGAGAVGLAAVLAHQDQFAGRNVGLVLCGGNIDTRLIASVLTRELAREGRLTQLSIDIVDRPGQLAAVSALLADAGANIIEVSHQRTFSDLPAKATLLELVIETRDQAHLNEVMDRLVAADFKARCT

SEQ ID NO: 104875 - DNA, 1809 bp, Oryza sativa (japonica cultivar-group); identical to SEQ ID NO: 12343
  CDS (1)..(1809)

SEQ ID NO: 104876 - protein, 602 aa, Oryza sativa (japonica cultivar-group); identical to SEQ ID NO: 12344

SEQ ID NO: 104877 - DNA, 1020 bp, Oryza sativa (japonica cultivar-group)
  CDS (1)..(1020)
atggggagcagaggtggaagtggcggcgatggcgcagaaagccatggctatgccgcggacatccactccatcagggaggcgcaggctcgcatcgcaccatacgtgcacaagacgcccgttctgtcatcaacatcgatcgatgccatagtggggaagcagctgttcttcaagtgcgagtgcttccagaaggcaggggcgttcaagatccgaggcgcttccaattcgatatttgcgcttgatgatgatgaggcatccaagggcgttgtgacgcatagcagtgggaaccatgctgctgcagtggctcttgctgcaaagctacgcggaatacctgcttacattgtcattccaagaaatgcaccggcatgtaaggttgacaatgttaagcggtacggtggccatattatctggagtgatgtctccattgaatcaagagaatctgttgctaaaagagttcaggaggaaactggtgctattcttgttcacccattcaataataaaaacactatcagtggtcaaggtacagtgtctctcgaacttttggaggaagtccctgaaattgacacaataattgttccaatcagtggtggtggtttaatttctggtgtggcactggctgccaaggccataaacccttcaatacgtattctggcagcagaaccaaagggtgctgatgattctgcccagtccaaggctgctggaaagatcataacattgccttcaaccaacaccattgctgatggacttcgagcttttcttggtgacctgacatggccggtggtgcgcgacttggtggatgatatcattgttgtggatgacaatgccattgtggacgccatgaaaatgtgctacgagatgctgaaggtggctgttgagccgagtggagcaataggcctcgcagccgccctctctgacgagtttaagcaaagctctgcttggcatgagagcagtaagatagggatcattgtttctggaggcaatgttgacctcggtgtcctctgggagtctctctataaacgttga

SEQ ID NO: 104878 - protein, 339 aa, Oryza sativa (japonica cultivar-group) [sequence omitted]

SEQ ID NO: 104879 - DNA, 984 bp, Mesorhizobium loti MAFF303099
  CDS (1)..(984): transl_table=11
atgaccgccaccacccctcccggcatcgccgacatccgtgccgccgccgcccgcctctccggcctgatcgtcgaaacgccattgatcgaatcggccgagctgaacaagcgcttcggcggccgtatcctgttcaagccggagacgttgcagcgcaccggctcgttcaagttccgcggcgcctacaacaagctgtcgtcgctgagcgaggaagagcgcagccgtggcgtcgtcgccttctcctccggcaatcatgcgcaaggggttgccgcttcggccgccatgttcggcgtcaaggcggtcatcgccatgccggcggacgcgccggcgatgaagatcggcaatgtccgcaagatgggcgcggaggtggtgccgttcgaccgctttcgcgatgaccgcatgaccgtggttcgcccctatatcgacaagggcatggtgctggtgccgcccttcgacgatccggccatcattgccgggcaaggcacgatcggccttgaactgatgcggcagggcagggcgctcggcgtcagcctcgacaccgtcgtcatcccctgcgggggcggcggcctgtcgagcggcatttcggtggcggtcaaggatgcctcgccgggcacggcggtctgggcggtagagcccgagcatttcgacgacacgcgccgctcgctcgccgcaggcgcgcgggtttcgaacgagcccggccacagctcgatctgcgacgcgatcctgaccgccgagccgggcgccatcaccttcgaaatcaaccgcaggaacctcactggggccattgccgtctccgacaaggcgaccgcacaggcgatgcgcgatgccatggcctatctgaagctggtggtcgagccgggcggctgcgtggcgctggcggcgctgtcgtcgggcgagatcgaactgtccggcaaatgcgtcgccgtggtgctgtccggcggcaatgtcgatttcggcacctatgccgggatcatggcggccgcctga

SEQ ID NO: 104880 - protein, 327 aa, Mesorhizobium loti MAFF303099
MTATTPPGIADIRAAAARLSGLIVETPLIESAELNKRFGGRILFKPETLQRTGSFKFRGAYNKLSSLSEEERSRGVVAFSSGNHAQGVAASAAMFGVKAVIAMPADAPAMKIGNVRKMGAEVVPFDRFRDDRMTVVRPYIDKGMVLVPPFDDPAIIAGQGTIGLELMRQGRALGVSLDTVVIPCGGGGLSSGISVAVKDASPGTAVWAVEPEHFDDTRRSLAAGARVSNEPGHSSICDAILTAEPGAITFEINRRNLTGAIAVSDKATAQAMRDAMAYLKLVVEPGGCVALAALSSGEIELSGKCVAVVLSGGNVDFGTYAGIMAAA

SEQ ID NO: 104881 - DNA, 1221 bp, Thermoplasma volcanium GSS1; identical to SEQ ID NO: 12349
  CDS (1)..(1221): transl_table=11

SEQ ID NO: 104882 - protein, 406 aa, Thermoplasma volcanium GSS1; identical to SEQ ID NO: 12350

SEQ ID NO: 104883 - DNA, 1236 bp, Aeropyrum pernix K1
  CDS (1)..(1236): transl_table=11
ttgtcggaggaagtagaggctctcaggctggcggacgagatatttagactcagctctgaggccagaggctacgtagccaggggtgcccacgtaacacccctagacaagagcaccaccctctcgaggataactggggctgaggtttacctgaagctcgagaacctccagaagaccgggagcttcaaggtgagaggacctcttttcaagctgggcagggcgctggagaagggcagtgtggagggagtggtcgccgcctcagccgggaaccatgcccagggtgttgcgtacgccgctagcttctacgggctcaagagcgttatagtcatgcccgagctggccccgccagccaaggttaaggctaccaggtcgtacggggctgaggtagtgctgcacggccgggttgtggacgaggcgtttaagctcgccgagaagatagcggaggagaggggatacatgcttgtccaccccttcgacgatcccgagataatggctggaaacgggactatagcgtgggaggcctacgagcaggggggtaagttcgacacggtgatagtgcctgtaggcgggggcggtttgatctctggtgtagtctcggttgtgcggaagctgatgcccggcgtcaaggtcataggtgttgaggcggaggctgcgcccaagttcgtagagagcttcaaggaggggaagccgatagaggttgaagtcacccatagcctggccgacgggcttgtgaccaagaagccgggtaggctcacctaccccatagtgaagcatcttgtcgacaaggttgtggctgtggacgagcatgagatagcgagcgccatgtacctcctcctcgagaggtctaagattctggctgagggtgccggagccgcgggcgtggcagcccttcttgccagggtggtgaagcccaagggtaagacccttgtaatagttagcggggggaacgcggaccttacaagcatagagaaggttatactggttggcctcgccagggagggtaggatagctaggataacgggtgtgatacccgacatcccgggccagctatacaaggttctggaggtgatagcggagaagaggtgcaatgttgtagacattatacatgacaggctccaccccaggataagccctggtatggcgagggttacaatcgtgctcgaagtgccagagcgcatgctcctcttcgagcttctagaggacctcagagacatgggttacaagttcgtcatagactga

SEQ ID NO: 104884 - protein, 411 aa, Aeropyrum pernix K1
MSEEVEALRLADEIFRLSSEARGYVARGAHVTPLDKSTTLSRITGAEVYLKLENLQKTGSFKVRGPLFKLGRALEKGSVEGVVAASAGNHAQGVAYAASFYGLKSVIVMPELAPPAKVKATRSYGAEVVLHGRVVDEAFKLAEKIAEERGYMLVHPFDDPEIMAGNGTIAWEAYEQGGKFDTVIVPVGGGGLISGVVSVVRKLMPGVKVIGVEAEAAPKFVESFKEGKPIEVEVTHSLADGLVTKKPGRLTYPIVKHLVDKVVAVDEHEIASAMYLLLERSKILAEGAGAAGVAALLARVVKPKGKTLVIVSGGNADLTSIEKVILVGLAREGRIARITGVIPDIPGQLYKVLEVIAEKRCNVVDIIHDRLHPRISPGMARVTIVLEVPERMLLFELLEDLRDMGYKFVID

SEQ ID NO: 104885 - DNA, 996 bp, Arabidopsis thaliana
  CDS (1)..(996)
atggaagcaaatagagagaagtatgctgctgatatattgtccataaaagaagctcatgaccgtattaagccgtatatacatagaactccggtgttaacatctgaatcgttgaattcaatctccggaagaagcttgttctttaagtgtgagtgccttcagaaaggtggagctttcaaattccgtggagcttgcaatgctgttttgtctcttgatgctgaacaagcagccaaaggagttgtaacacacagcagtggaaaccatgctgctgcattgtctttggctgcaaagattcagggaataccggcatatattgttgtaccaaaaggtgctccaaagtgcaaagttgataatgtgatcaggtatggtggtaaggttatatggagtgaagcaacaatgtcttctagagaggaaatagcttcaaaagttttgcaggaaacaggttcagttctgatccatccatataatgatggacgcattataagtggtcagggtacaattgcattggaactgctggagcaaatccaagagattgatgctatagttgtgccgataagcgggggtggtttgatatctggtgtggcgcttgctgccaaatctattaagcctagtatccggattatagccgctgaaccaaaaggagctgatgatgcggctcagtctaaggtcgctggtaaaatcatcactttacctgtgactaatactatagctgatggccttcgagcttctcttggagatttaacctggccggtggtgagggacttggtagatgatgttgtcaccttggaagagtgtgaaataatcgaagccatgaaaatgtgctatgagatactgaaggtctctgtggaaccaagtggagctattggccttgcagcagttttatcaaacagtttccgcaacaatccttcttgtcgtgattgcaaaaacataggaattgtactctcaggaggtaatgttgatttgggctctctatgggattcatttaagagttcaaaataa

SEQ ID NO: 104886 - protein, 331 aa, Arabidopsis thaliana [sequence omitted]

SEQ ID NO: 104887 - DNA, 1206 bp, Thermotoga maritima MSB8
  CDS (1)..(1206): transl_table=11
gtgatcacactcgaggatataaaagaagcccaaagaacattgaagaatgtggtgcacaggacagctcttgcttacagctctgttctgagcgaggtaaccggtggagagatctacctgaagatggaaaatctccagaagaccggttcgttcaaaataaggggagcgtacaacaaaatagctcacctgagcgaagaagaaagaaagagaggagtcgttgccgcgtccgctggaaaccacgcgcagggagtggcacttgctgctcaaatcttcggtattcccgctaccattgtgatgccgaggtacgcccctctttctaaaatcaccaaaacgaggaatcttggagctcaggtgattcttgaggggaacattttcgacgaggcctacgaggcggctctcagaatacaggagaaaacaggtgcggtttttgtgcatcccttcaatgatcctcatgtcatcgccgggcagggaactatagggctggaaataatggaagatcttccggatgtggaagtggtggtggtgcccgttggtggaggtggtttgatttcgggagtatccgttgcgatcaaatcgatgaatcctgaggttaaagtaataggcgttcaaacggagaacatgccttccatgatcgcttcactgagaaggggcagggcagagcgggtcgaaggtaaacccacacttgccgatggaatagccgtgaaaaagcccggtgacctgaccttcgagctggtgaagaagtatgtcgatgagatggtcgcggtgaacgaagaagaaatagcggatgctatccttttccttcttgagcaggcaaaggtggttgctgaaggtgcaggagcggtgggtgtagccgctgttttgaacaaactggatgtgaagggaaagaaggtagcgatcgtgataagcggtggtaacatagatgtgaacatgatagacagaatcataaacaaagggctcgtgaagagcggaaggaaggtgttcatagaaacgttcgtgatggacagacccggtgccctgaaagagcttctcgggatagtggcggaactcggcgcaaacgttctttccgtttttcacaatcgctccgcaaaggaagttcccattggttttgccaaaatagagctcgagcttgaaacggtcgatgaaaaacacgtcgaagagatagagagggtgttgatcgcaaagggatacgaggtgaggatagtcgggtga

SEQ ID NO: 104888 - protein, 401 aa, Thermotoga maritima MSB8
MITLEDIKEAQRTLKNVVHRTALAYSSVLSEVTGGEIYLKMENLQKTGSFKIRGAYNKIAHLSEEERKRGVVAASAGNHAQGVALAAQIFGIPATIVMPRYAPLSKITKTRNLGAQVILEGNIFDEAYEAALRIQEKTGAVFVHPFNDPHVIAGQGTIGLEIMEDLPDVEVVVVPVGGGGLISGVSVAIKSMNPEVKVIGVQTENMPSMIASLRRGRAERVEGKPTLADGIAVKKPGDLTFELVKKYVDEMVAVNEEEIADAILFLLEQAKVVAEGAGAVGVAAVLNKLDVKGKKVAIVISGGNIDVNMIDRIINKGLVKSGRKVFIETFVMDRPGALKELLGIVAELGANVLSVFHNRSAKEVPIGFAKIELELETVDEKHVEEIERVLIAKGYEVRIVG

SEQ ID NO: 104889 - DNA, 1515 bp, Pseudomonas aeruginosa PAO1; identical to SEQ ID NO: 12353
  CDS (1)..(1515): transl_table=11

SEQ ID NO: 104890 - protein, 504 aa, Pseudomonas aeruginosa PAO1; identical to SEQ ID NO: 12354

SEQ ID NO: 104891 - DNA, 1527 bp, Neisseria meningitidis MC58; identical to SEQ ID NO: 12355
  CDS (1)..(1527): transl_table=11

SEQ ID NO: 104892 - protein, 508 aa, Neisseria meningitidis MC58; identical to SEQ ID NO: 12356

SEQ ID NO: 104893 - DNA, 1488 bp, Halobacterium sp. NRC-1
  CDS (1)..(1488): transl_table=11
atgctttctcggtgtcctgtgctgcgtagaccgatccctcacggcacgatcgaccacctgattcgcagtcgcgactgcggaactggcacacgcgtgccccgtctaaccaagcccccactcgcagtttcactttcactccgcttcgatcggttttatgttcgtgggcgtcctaccgatagttgtcacacgctccgttctcgcgttcttcggcgctcaccaccaacggttaaacccggaccacgcataccagcgagtatgctctcgctgtccgacattcgggacgcccgcgagcgcgtctccgaaaccgcccgccacacaccgcttgagtactcgcatacgttctccgatctcaccggcgcggacgtccgcccgaagctggagtgtttccagcgcaccggctcgttcaagatccgtggcgcgaccaaccgcatccgcacgctctccgccgaccagcaggacgccggcgtggtcactgcgtcggccggcaaccacgcccagggcgtcgcgctcgcggcctcccggtcgggcgtcgactcgaaggtggtgatgccggagtccgcgcccatctcgaagatcaaggccaccaagagctacggcgccgaagtcgtcctccacggcgccgactacgacgacgcacaggcccacgcccacgaactcgaagccgccgaaggccgcacgtacgtccacgccttcgacgacgagtacatcatggccggccagggcaccctgggcctcgaaatcgccgcggactgtccgacggttgacaccgtcgttgtccccatcggtggcggtggcctcatctccggcgtcgccaccgcgctcaagggggaactcgacgacgtgcgcgtcatcggcgtgcaggccgagggggcctcgacggtcgcgcggtccctcgacaagggccagccacaggccgtcgatcacgtcgacaccatcgccgacggtatcgccgtccgacaggtcggggcgcagacgttccccgtcatccaggagcacgtcgacgaggtcgtcaccgtctccgacgacgagatcgccaccgcgctcgtgttgctgctggagcgcgggaaaaccctcgttgagggtgccggcgccaccgcgctcgcggccgtcctggaggacaaattcgagtacgcggacggcgaaaccatcgtgcccgcgctctgcggtggcaacatcgacctcaacctcctcaccacggtgatcgttcgcgggctcgtcgaccagggccgctacgtcaagatccgcaccgtgctcaaggacagcccgggcagcctcaacgacctgctggcgaccgccgccgaggagcgcgcgaacatctacgccatccagcacgaccgcaccaaccgcgacatcgcgatgaacgccaccgaggtcgaactcgacctcgaaacgcgaggccccgaacacgtcgaccggctgctcacccggatccaggacgagggcttcgacgtcacggtgctcaacggcccccagatcgtcagcgagtga

SEQ ID NO: 104894 - protein, 495 aa, Halobacterium sp. NRC-1
MLSRCPVLRRPIPHGTIDHLIRSRDCGTGTRVPRLTKPPLAVSLSLRFDRFYVRGRPTDSCHTLRSRVLRRSPPTVKPGPRIPASMLSLSDIRDARERVSETARHTPLEYSHTFSDLTGADVRPKLECFQRTGSFKIRGATNRIRTLSADQQDAGVVTASAGNHAQGVALAASRSGVDSKVVMPESAPISKIKATKSYGAEVVLHGADYDDAQAHAHELEAAEGRTYVHAFDDEYIMAGQGTLGLEIAADCPTVDTVVVPIGGGGLISGVATALKGELDDVRVIGVQAEGASTVARSLDKGQPQAVDHVDTIADGIAVRQVGAQTFPVIQEHVDEVVTVSDDEIATALVLLLERGKTLVEGAGATALAAVLEDKFEYADGETIVPALCGGNIDLNLLTTVIVRGLVDQGRYVKIRTVLKDSPGSLNDLLATAAEERANIYAIQHDRTNRDIAMNATEVELDLETRGPEHVDRLLTRIQDEGFDVTVLNGPQIVSE

SEQ ID NO: 104895 - DNA, 1212 bp, Campylobacter jejuni subsp. jejuni NCTC 11168; identical to SEQ ID NO: 12357
  CDS (1)..(1212): transl_table=11

SEQ ID NO: 104896 - protein, 403 aa, Campylobacter jejuni subsp. jejuni NCTC 11168; identical to SEQ ID NO: 12358

SEQ ID NO: 104897 - DNA, 1548 bp, Escherichia coli O157:H7 EDL933; identical to SEQ ID NO: 12361
  CDS (1)..(1548): transl_table=11
  misc_feature (559)..(559): r is g or a

SEQ ID NO: 104898 - protein, 515 aa, Escherichia coli O157:H7 EDL933; identical to SEQ ID NO: 12362
  misc_feature (187)..(187): The Xaa at location 187 stands for Ile, or Val.

SEQ ID NO: 104899 - DNA, 1707 bp, Deinococcus radiodurans R1; identical to SEQ ID NO: 12363
  CDS (1)..(1707): transl_table=11

SEQ ID NO: 104900 - protein, 568 aa, Deinococcus radiodurans R1; identical to SEQ ID NO: 12364

SEQ ID NO: 104901 - DNA, 1143 bp, Xylella fastidiosa 9a5c
  CDS (1)..(1143): transl_table=11
gtgcaatactgccgctggattttcttagcaggcacgagtcagcatggcatgccatcaggatgtgtgcagatcatcaggacgtatagctctatggatatacctgatgtaggtcacaccgttgtcaagcaacccaatgcaagtaacgtcaacaccgtgagtgtggccgatgtgttggctgcacaagcccgcttacgtcgttatctaatgcctaccccaattcactatgccgagcgtttcggagtgatgctgaagttggaaaatctgcaacgcaccggatcctataaagtgcgtggcgcgctgaacgcaatgttagttgcgctggaacgcggcgataaccgcccagtcatttgcgcatcagccggtaaccacgcccaaggcgtagcttggtcagcttaccggctgggtatacaagcaatcactgtcatgcctcacggtgctccggtcacgaaggttgcaggtgtctcacattggggggcgacggtacgccaacacggccaaagctatgacgaggcctatgcgttcgcatgtgagttggctgagcaaaacgattaccactttctatcagcattcgatgatccggatgtgattgccggtcagggaactgttggcatagagatcaccgcgcatgaaccggatgtagtcatcgtgccgatcggcggcggcggccttgcttcaggcattgctttggtgctgcgctcgcagggagtacgtgtcattggcgctcaggtcgagggcgtggatgcgatggcgcgtgcaatccgtggcgacacacgcgagatcgctccagtttcgaccttagctgacggggtgaaagtcaagattcctggtttcattacccgccgtctgtgtgccaacttgttagacgatgtagtgatcgtgcgtgaggctgaactgcgcgaaacattggtgcgtttagtattggaagaacacctgatcgccgaaggggcaggcgcactggcattggccgctggccgccgcgttgcaggtaagcgcaagtgtgcagtggtctccggaggtaatattgacgctgcagtactggccaaactgttgtccgaagtaagaccacggccaccccgcaaaccacgtaggcgtagtgcagatcgccccaacaattgcggcaatttaccgctcccttttaactga

SEQ ID NO: 104902 - protein, 380 aa, Xylella fastidiosa 9a5c
MQYCRWIFLAGTSQHGMPSGCVQIIRTYSSMDIPDVGHTVVKQPNASNVNTVSVADVLAAQARLRRYLMPTPIHYAERFGVMLKLENLQRTGSYKVRGALNAMLVALERGDNRPVICASAGNHAQGVAWSAYRLGIQAITVMPHGAPVTKVAGVSHWGATVRQHGQSYDEAYAFACELAEQNDYHFLSAFDDPDVIAGQGTVGIEITAHEPDVVIVPIGGGGLASGIALVLRSQGVRVIGAQVEGVDAMARAIRGDTREIAPVSTLADGVKVKIPGFITRRLCANLLDDVVIVREAELRETLVRLVLEEHLIAEGAGALALAAGRRVAGKRKCAVVSGGNIDAAVLAKLLSEVRPRPPRKPRRRSADRPNNCGNLPLPFN

SEQ ID NO: 104903 - DNA, 1218 bp, Sulfolobus solfataricus P2
  CDS (1)..(1218): transl_table=11
atgaattacttagaatattttgatagaattagactagcaaaagagaaaatagaaaaatatgtgcatattactccaatagattattctacaacgttttccagaattataaacgcaaaagtttatcttaagttggaaaatctacagaaaactggatcattcaaagttagaggtgcctttaataagttattatctttaaaggaggaagaaaaaaagaatggcgttattgcagtttcagcaggtaatcatgctcaaggagttgcttatgcagcctccacgttaaatatcaaatcgactatagtgatgccagaaacagctccagcttccaagtatttagctacaaaatcctatggggcagaagtagttctttatggtaagtacttgcatgagagtatgaagaaagcggaagaattgattcaaaatactggtttaatatttgttcatccttatagtgatttagatgtgataacgggtcaaggtaccataggattagaattgtatgatatcgaaccagattacgtaattattccaatagggggtggaggattgatttctggtataagtatagctttaaagtatagattcccaaacgtcaagataataggcgttcagtcttcttcttctccttcaatgaaggtttctaaggatcttgggaggcttgtagaaatagagcctagttattccatagctgatggcatattggttaagtctccttctgaattaacctttagtataattaatgagttagtagatgatatagtattagtggatgatgaagaaatagctgaggcaatagttttactacttgaaagaagtaaaacgctagcagaaggagcaggagctgcagcattagcgtcactaatttcagggaaggttaaagtaaatggaatagacaaaaaagtaatttcattagtaagtgggggaaatattgacttatcattattgtctactctaacagagaagtttttatatagacaaaaaagggtagtcaaagtgagggtaatagttccagataagccaggacagttaaataaagtattaagctatgtagttaagatcagaggtaatataatagatattgttcatgataggcacagtagtgatgtattgcctggatacactaaaatatatataactttcgagcttcagtcttcagaggctattaccttacttctgacaaatctggcaaacgagggaatagacgtgaaaattgtagaatag

SEQ ID NO: 104904 - protein, 405 aa, Sulfolobus solfataricus P2
MNYLEYFDRIRLAKEKIEKYVHITPIDYSTTFSRIINAKVYLKLENLQKTGSFKVRGAFNKLLSLKEEEKKNGVIAVSAGNHAQGVAYAASTLNIKSTIVMPETAPASKYLATKSYGAEVVLYGKYLHESMKKAEELIQNTGLIFVHPYSDLDVITGQGTIGLELYDIEPDYVIIPIGGGGLISGISIALKYRFPNVKIIGVQSSSSPSMKVSKDLGRLVEIEPSYSIADGILVKSPSELTFSIINELVDDIVLVDDEEIAEAIVLLLERSKTLAEGAGAAALASLISGKVKVNGIDKKVISLVSGGNIDLSLLSTLTEKFLYRQKRVVKVRVIVPDKPGQLNKVLSYVVKIRGNIIDIVHDRHSSDVLPGYTKIYITFELQSSEAITLLLTNLANEGIDVKIVE

SEQ ID NO: 104905 - DNA, 975 bp, Agrobacterium tumefaciens str. C58
  CDS (1)..(975): transl_table=11
atgacagatatttcgatgatcgaggcggcgcgtgagcgcatcggcaaccatgcggtgcgaacaccgctgctcacctcgccttttctggacgagatcgccgggcgaaagctgttcgttaaggcggaatgcctgcaaaggacgggatccttcaagtttcgcggcggctggtcggcggtatccggcctgccggcggatgtgcgcgccaagggtgtgatcgctttttcctccggcaaccatgcgcagggcgtggcgctcgcggcccgcctgcatggcattcccgccgtcatcatcatgccttcggatgcgccgaagatcaaaatcgacaatacccgcgcctatggcgccgaggtggtgctttacgaccgggcgaatgaagaccgtgacgccattggcaaccggttgtcgagcgagcgcggtttgaccctgatcaggccttacgatgaaccgctggtgattgcggggcaggggaccgctgggctggaaatcgctgagcaaggcgccgaactcggtatcggtgctgccgaggttctggtgccttgcggtggcggcggcctcacctccggcatctctcttgcactcgatgcgaaagcgcgaaattataaggtcaggacggcagaaccggagcgtttcgatgacgtggcgcgctcccttgcggcgggcaagatcgagcggaatgcgacgacatcgggttcgatctgtgatgcaatcgtcacgccgcagcctggcaatatcacctttcccatcatggcagggctttgcgggaaaggtatcgccgtcagcgaggaggaagcgctgcgggccatggttctcgccttcaaccggctgaaggtcgttatcgagccgggtggtgctgttgcgcttgccgcagcgctttttcatggcaaggaactggaaagcgaaaccgtgattgcggttgcctccggcggcaatgtcgatcccgggatcatggccgacgctctgtcacgcttcggttga

SEQ ID NO: 104906 - protein, 324 aa, Agrobacterium tumefaciens str. C58
MTDISMIEAARERIGNHAVRTPLLTSPFLDEIAGRKLFVKAECLQRTGSFKFRGGWSAVSGLPADVRAKGVIAFSSGNHAQGVALAARLHGIPAVIIMPSDAPKIKIDNTRAYGAEVVLYDRANEDRDAIGNRLSSERGLTLIRPYDEPLVIAGQGTAGLEIAEQGAELGIGAAEVLVPCGGGGLTSGISLALDAKARNYKVRTAEPERFDDVARSLAAGKIERNATTSGSICDAIVTPQPGNITFPIMAGLCGKGIAVSEEEALRAMVLAFNRLKVVIEPGGAVALAAALFHGKELESETVIAVASGGNVDPGIMADALSRFG

SEQ ID NO: 104907 - DNA, 915 bp, Agrobacterium tumefaciens str. C58
  CDS (1)..(915): transl_table=11
gtggagcgcacgccgctggttcgctcggagtttctctccgaacgctgcggtcatcctgttcatctcaaacttgaaacccttcagcctatcggcgccttcaaactgcgcggcgcgatgaacgcgatcctctcgcttgacgatgcggtgcgacggcgtggcctagtcaccgcctcgacgggcaaccatggtcgggccgttgcttacgccgccgccaaactcggcattcccgccacgatctgcatgtcggcgctggtgccggcaaacaaggttgaggcgatccgcatgcttggcgcggaaatccggattgtcggcagatcacaggatgatgcgcaggaggaagtggagcgcctgacaaaaaaccgaggcctgaccgcgatcccacctttcgatcatgctgacgtcgtggccggccagggcactatcggcctcgaggtcgttgaagacatgcctgaactggcgacaattctcgttcctctatcgggcggtggccttgcgggcggtatcgccgttgcggtgaaggcgctgaagccaagggcgcgggttatcggcatttccatggaacgaggtgcggccatgcatgcgtcagtgaaagccggccgccccgtctcggtttgcgaggaagaaacgctggcggattcgcttggcggcgggattggactggcaaaccgcgtgacctttgcactttgcaagacacttctcgatgagatcgtgctggtctccgaagatgaaatcgcgaccggcatctgccatgcatcccgcgaggaagacctgagagtggaaggcgcgggcgccgttggcttcgcagcaatcctcgccggcaagatcgcggtgagcggccctgccgccatcatcgtatcgggcgggaatatcgatccggcggtccacaagacgatcatcgacgggggagtcgcatga

SEQ ID NO: 104908 - protein, 304 aa, Agrobacterium tumefaciens str. C58
MERTPLVRSEFLSERCGHPVHLKLETLQPIGAFKLRGAMNAILSLDDAVRRRGLVTASTGNHGRAVAYAAAKLGIPATICMSALVPANKVEAIRMLGAEIRIVGRSQDDAQEEVERLTKNRGLTAIPPFDHADVVAGQGTIGLEVVEDMPELATILVPLSGGGLAGGIAVAVKALKPRARVIGISMERGAAMHASVKAGRPVSVCEEETLADSLGGGIGLANRVTFALCKTLLDEIVLVSEDEIATGICHASREEDLRVEGAGAVGFAAILAGKIAVSGPAAIIVSGGNIDPAVHKTIIDGGVA

SEQ ID NO: 104909 - DNA, 1215 bp, Sulfolobus tokodaii str. 7; identical to SEQ ID NO: 12367
  CDS (1)..(1215): transl_table=11

SEQ ID NO: 104910 - protein, 404 aa, Sulfolobus tokodaii str. 7; identical to SEQ ID NO: 12368

SEQ ID NO: 104911 - DNA, 1221 bp, Thermoplasma acidophilum DSM 1728
  CDS (1)..(1221): transl_table=11
atggacagcgaagcgataccttcatacgaggatatcctttctgcaaaggcctatttggagggccgcataaacaggacgccgctgataaagtccacgacgttcggaaacgagtacggttccgagatgtacttcaagcttgagaatttccagaagacagggtcatttaagtccagaggcgctcttttcaagttctccaagctgagcgaagatgacagaaggagaggcgttttaacggccagcgcgggaaaccacgcgcagggtgtggcgtatgctgcaaaggtcaacggcataaacgcgaagatcgtaatgccggagtacaccatacctcagaaggtaaacgcggtcgccggctatggcgccgaggtgatacttcatggcttcgactacgatgaggcgcacaggtacgctgacgatctcgcaaggaaggaaaaccgggttttcatagaggcattcaatgacagatgggtgatatccggccagggaacgatagggctggagataatggaggacaggcctgacatcgacaccataattgttcctgttggcggcggtggcctcatctctggcatagcactggcggccaagcaccacaatccgcatgtgcgcataataggcatagagtcagaactgtccgattccatgaaggcctccttaagggaggggaagatcgtagcgcatacaagcggtgttagcatatgcgatggcatatctgtcaaatatcctggcgatctgaccttcaacatagcaaaagattacgtcgatgatatagtgacggtgaccgaagaatctgtttccaaagccatatacaggctcttcgagagaatgaagatagttgcggagccttctggagcagttggcctggctgcgataatggagggcaaagtcgatgtaaagggaaggaaggttgctatcgtcgtatcaggcggcaacataaacccgctgctgatgtcaaagataatatacaaggagctggagaaccttgggcagctggtgcgcatagaatgcataataccggacaggccaggaaatctttacaggattgcggaggccatagcaaagaacggtggaaatatataccatgcggaggtcgacaatctcaggaaggagacacctccaggcttccagagcgtgatattcagcgtcaacgttagggggcaggatcatctggacaggatactatcaacgctcagggagatgggttacatcttcaaagtaacatga

SEQ ID NO: 104912 - protein, 406 aa, Thermoplasma acidophilum DSM 1728
MDSEAIPSYEDILSAKAYLEGRINRTPLIKSTTFGNEYGSEMYFKLENFQKTGSFKSRGALFKFSKLSEDDRRRGVLTASAGNHAQGVAYAAKVNGINAKIVMPEYTIPQKVNAVAGYGAEVILHGFDYDEAHRYADDLARKENRVFIEAFNDRWVISGQGTIGLEIMEDRPDIDTIIVPVGGGGLISGIALAAKHHNPHVRIIGIESELSDSMKASLREGKIVAHTSGVSICDGISVKYPGDLTFNIAKDYVDDIVTVTEESVSKAIYRLFERMKIVAEPSGAVGLAAIMEGKVDVKGRKVAIVVSGGNINPLLMSKIIYKELENLGQLVRIECIIPDRPGNLYRIAEAIAKNGGNIYHAEVDNLRKETPPGFQSVIFSVNVRGQDHLDRILSTLREMGYIFKVT

SEQ ID NO: 104913 - DNA, 1203 bp, Caulobacter crescentus CB15; identical to SEQ ID NO: 12375
  CDS (1)..(1203): transl_table=11

SEQ ID NO: 104914 - protein, 400 aa, Caulobacter crescentus CB15; identical to SEQ ID NO: 12376

SEQ ID NO: 104915 - DNA, 972 bp, Sinorhizobium meliloti 1021
  CDS (1)..(972): transl_table=11
atgcgcaattaccccaccattcaggacatccgtgaagcccgggaacggctgaaaccgcacgtcaggcacacgccgctcttgcgtgcggagaaaatcgagaaggccgctggctgtcagctttatctcaaacccgaaaccctgcagatcactggcgccttcaagatccgcggcgccctgaacaaggctctctcgctctcgagagaagagatcgcaaacggcattatcgcgacgtcgtcgggcaaccatgcccaggggctttcttacgcggccaagatgctcggcgtaaaagtgatattggtacttccggtcaccacacccaaaatcaagattgaaaatacaaaagccctgggtgcggaagtcattctttttgatggtgataatgctgctagatggaaaaaggtctacgaaatcgctgaaggaaacaagtatgcggttattcacggcttcgaggaccccgttgtaatggctggccagggaacgatcgggtgcgagatactcgaagacctggacgatgtagatacggtcatcgttcccttaggcggcggaggcctgatctcgggaatcgctaccgccataaaagaaacgaaaccatcggtgcgcgttatcggggcagagcctgccttgacaccgaagtattttcacagccgggtaaacaaggagcgcacatcgcttcccttgaagaacaccattgcggatggcttgaggataagcgttccgggtcaaaacccgtatccgattatcgaaaagtatgtggacgagattgttcttgttgaagacgagcacatcatcgccgggatgcgtgctcttgccaaggatgcgaaattgatcgctgaaccagccgcctcgattggcgtcggagcactgttggcgggcatcatagacgtcaagctggatgaaaaagtctgtgcggtgttgtctggcgggaactgggatctacgcgaccttgccgcgatatacaatgtagcggggtaa

SEQ ID NO: 104916 - protein, 323 aa, Sinorhizobium meliloti 1021
MRNYPTIQDIREARERLKPHVRHTPLLRAEKIEKAAGCQLYLKPETLQITGAFKIRGALNKALSLSREEIANGIIATSSGNHAQGLSYAAKMLGVKVILVLPVTTPKIKIENTKALGAEVILFDGDNAARWKKVYEIAEGNKYAVIHGFEDPVVMAGQGTIGCEILEDLDDVDTVIVPLGGGGLISGIATAIKETKPSVRVIGAEPALTPKYFHSRVNKERTSLPLKNTIADGLRISVPGQNPYPIIEKYVDEIVLVEDEHIIAGMRALAKDAKLIAEPAASIGVGALLAGIIDVKLDEKVCAVLSGGNWDLRDLAAIYNVAG

SEQ ID NO: 104917 - DNA, 1527 bp, Synechocystis sp. PCC 6803; identical to SEQ ID NO: 12341
  CDS (1)..(1527): transl_table=11

SEQ ID NO: 104918 - protein, 508 aa, Synechocystis sp. PCC 6803; identical to SEQ ID NO: 12342

SEQ ID NO: 104919 - DNA, 1269 bp, Listeria monocytogenes EGD-e; identical to SEQ ID NO: 89401
  CDS (1)..(1269): transl_table=11

SEQ ID NO: 104920 - protein, 422 aa, Listeria monocytogenes EGD-e; identical to SEQ ID NO: 89402

SEQ ID NO: 104921 - DNA, 1512 bp, Nostoc sp. PCC 7120; identical to SEQ ID NO: 12377
  CDS (1)..(1512): transl_table=11

SEQ ID NO: 104922 - protein, 503 aa, Nostoc sp. PCC 7120; identical to SEQ ID NO: 12378

SEQ ID NO: 104923 - DNA, 972 bp, Ralstonia solanacearum GMI1000
  CDS (1)..(972): transl_table=11
atgaccacgctgcccatcacctacgacgatgtcgtcgccgcccacgcccgcctgcagggccaggtccaccggacgcccgtcctcacgtcgaccacggcgaatgcgctgaccggcgccgagctgttcttcaagtgcgagaacttccagcgcatgggcgccttcaagttccgcggcgcgtacaacgcgctgtcgcagttcacacccgagcagcgcaaggccggcgtcatcaccttctcgtcgggcaatcatgcgcaggcgatcgcgctgtcggcgcggctgctgggcatgcgcgcggtgatcgtgatgcccaaggacgcgccgacgatcaaggtcgaggccacgcgcggctacggcggcgaggtggtcttctacgaccgctataccgaagaccgcgaagccatcggccgccggctggccgagcagcacggcctgacactgatcccgccctacgatcatccgcacgtgatggccgggcagggcacggccgccaaggaactgatcgaagagaccggaccgctcgacctgctgctcgtctgcctgggcggcggcggtctgctgtcgggctgcgccacggcggcgcgcgcgctgagcccggcctgccggatcatcggcgtggagcccgaggccggcaacgacggccagcagagcctgcgcaagggcgagatcgtccacatcgacacgcccgccaccatcgccgacggggcgcagacgcagcacctgggccactacacttttgcggtgatccgtgcgctggtcgacgacatcgcgacggtgagcgatgccgatctggtcgacaccatgcgcttcttcgccggccgcatgaagatcgtggtggagccgaccggctgcctggccgcggcggccgccctgcggcagcgggtggaggtgcgcggcaagcgcgtcggcgtgatcatttcgggcggcaatgtggacctgcagcactttgcccggctcgtgcaggcggacgcatga

SEQ ID NO: 104924 - protein, 323 aa, Ralstonia solanacearum GMI1000
MTTLPITYDDVVAAHARLQGQVHRTPVLTSTTANALTGAELFFKCENFQRMGAFKFRGAYNALSQFTPEQRKAGVITFSSGNHAQAIALSARLLGMRAVIVMPKDAPTIKVEATRGYGGEVVFYDRYTEDREAIGRRLAEQHGLTLIPPYDHPHVMAGQGTAAKELIEETGPLDLLLVCLGGGGLLSGCATAARALSPACRIIGVEPEAGNDGQQSLRKGEIVHIDTPATIADGAQTQHLGHYTFAVIRALVDDIATVSDADLVDTMRFFAGRMKIVVEPTGCLAAAAALRQRVEVRGKRVGVIISGGNVDLQHFARLVQADA

SEQ ID NO: 104925 - DNA, 1275 bp, Agrobacterium tumefaciens str. C58
  CDS (1)..(1275): transl_table=11
atgaatttcaatggattgactatcgtggacaagcagcttgtggaagcagcgcggcgggaagtgcgggagatattcccggaaacgccgctgcagttgaatgaacatctcagccgtcgctatggcgcatcgatttggctgaagcgtgaggatctgtccccggttcgttcctacaagattagaggcgcattcaattttctccgcaaggcggtggccaaggctggcaaggacaaggttttcgtctgcgcgtccgccggcaaccacgcccagggctttgctttcgcctgccgccatttcggcgttcacggcgtcgttttcatgccggtgacgacaccgcagcagaagatcgaaaaaacccgcatctttggcggagagttcatcaagatccgtctggtgggcgatatcttcgaccagtgttacgccgctgcgcgtcagcatgtgcaggaccatgacggctacatggttccgccctttgaccatgaggatattatcgaaggccaggcgacggtcgccgccgagatcatggaccagctgcccgaaggcaccaaacctgacatcgtcgtgatgcctgtcggtggtggcggtctttcggccggcctgaccgggtttctggccggcacggtgaagaaggagaacttcgtgttctgcgagccggaaggcgcgcccagcctgaaaaagagcctggaacgtggcgaaccggtgacgctgaacaaggtcgacaattttgtcgatggtgccgccgttgcccgcatcggcgacctgaacttcaaggcgctgaaggattttccggccgagcaggtgatgctcatcccggaaaatgcgatctgcgtgacgatcatcgagatgctgaacctagaaggcgtggtgctggagcctgcgggcgccctgtccatcgccgcgctggaaaggctcggccgcgagaggctggaaggcaagacggtcatcgccgtggtctccggcggtaatttcgatttcgagcgcctgccggacgtcaaggaacgcgccatgcgttacaccggcgtgaagaagtacttcatcctgcgcctgccgcagcgccccggcgcgctgcgcgatttcctcaatctgctcggtccggacgacgatatcgcccgtttcgaatatctgaagaaatccgcccgcaatttcggctcgatcctgatcggcatcgagaccaatgcgcaggaaaacttcgccgggttgctggagcgcttcgaggcagccggtctcggctatgaggatattaccgaaaacgacatcttgtcgaacctgatcatctga

SEQ ID NO: 104926 - protein, 424 aa, Agrobacterium tumefaciens str. C58
MNFNGLTIVDKQLVEAARREVREIFPETPLQLNEHLSRRYGASIWLKREDLSPVRSYKIRGAFNFLRKAVAKAGKDKVFVCASAGNHAQGFAFACRHFGVHGVVFMPVTTPQQKIEKTRIFGGEFIKIRLVGDIFDQCYAAARQHVQDHDGYMVPPFDHEDIIEGQATVAAEIMDQLPEGTKPDIVVMPVGGGGLSAGLTGFLAGTVKKENFVFCEPEGAPSLKKSLERGEPVTLNKVDNFVDGAAVARIGDLNFKALKDFPAEQVMLIPENAICVTIIEMLNLEGVVLEPAGALSIAALERLGRERLEGKTVIAVVSGGNFDFERLPDVKERAMRYTGVKKYFILRLPQRPGALRDFLNLLGPDDDIARFEYLKKSARNFGSILIGIETNAQENFAGLLERFEAAGLGYEDITENDILSNLII

SEQ ID NO: 104927 - DNA, 1011 bp, Agrobacterium tumefaciens str. C58
  CDS (1)..(1011): transl_table=11
atgaagagcgaaaacctgtccatatccgccgataaaaaccagcttccggtctcgctggccgcgatagagcgggcggcaacgcggctttcgggacaggtggagcgcacgccgctggttcgctcggagtttctctccgaacgctgcggtcatcctgttcatctcaaacttgaaacccttcagcctatcggcgccttcaaactgcgcggcgcgatgaacgcgatcctctcgcttgacgatgcggtgcgacggcgtggcctagtcaccgcctcgacgggcaaccatggtcgggccgttgcttacgccgccgccaaactcggcattcccgccacgatctgcatgtcggcgctggtgccggcaaacaaggttgaggcgatccgcatgcttggcgcggaaatccggattgtcggcagatcacaggatgatgcgcaggaggaagtggagcgcctgacaaaaaaccgaggcctgaccgcgatcccacctttcgatcatgctgacgtcgtggccggccagggcactatcggcctcgaggtcgttgaagacatgcctgaactggcgacaattctcgttcctctatcgggcggtggccttgcgggcggtatcgccgttgcggtgaaggcgctgaagccaagggcgcgggttatcggcatttccatggaacgaggtgcggccatgcatgcgtcagtgaaagccggccgccccgtctcggtttgcgaggaagaaacgctggcggattcgcttggcggcgggattggactggcaaaccgcgtgacctttgcactttgcaagacacttctcgatgagatcgtgctggtctccgaagatgaaatcgcgaccggcatctgccatgcatcccgcgaggaagacctgagagtggaaggcgcgggcgccgttggcttcgcagcaatcctcgccggcaagatcgcggtgagcggccctgccgccatcatcgtatcgggcgggaatatcgatccggcggtccacaagacgatcatcgacgggggagtcgcatga

SEQ ID NO: 104928 - protein, 336 aa, Agrobacterium tumefaciens str. C58
MKSENLSISADKNQLPVSLAAIERAATRLSGQVERTPLVRSEFLSERCGHPVHLKLETLQPIGAFKLRGAMNAILSLDDAVRRRGLVTASTGNHGRAVAYAAAKLGIPATICMSALVPANKVEAIRMLGAEIRIVGRSQDDAQEEVERLTKNRGLTAIPPFDHADVVAGQGTIGLEVVEDMPELATILVPLSGGGLAGGIAVAVKALKPRARVIGISMERGAAMHASVKAGRPVSVCEEETLADSLGGGIGLANRVTFALCKTLLDEIVLVSEDEIATGICHASREEDLRVEGAGAVGFAAILAGKIAVSGPAAIIVSGGNIDPAVHKTIIDGGVA

SEQ ID NO: 104929 - DNA, 1212 bp, Pyrobaculum aerophilum str. IM2; identical to SEQ ID NO: 89403
  CDS (1)..(1212): transl_table=11

SEQ ID NO: 104930 - protein, 403 aa, Pyrobaculum aerophilum str. IM2; identical to SEQ ID NO: 89404

SEQ ID NO: 104931 - DNA, 1209 bp, Clostridium perfringens str. 13; identical to SEQ ID NO: 12381
  CDS (1)..(1209): transl_table=11

SEQ ID NO: 104932 - protein, 402 aa, Clostridium perfringens str. 13; identical to SEQ ID NO: 12382

SEQ ID NO: 104933 - DNA, 1803 bp, Schizosaccharomyces pombe 972h-; identical to SEQ ID NO: 12383
  CDS (1)..(1803)

SEQ ID NO: 104934 - protein, 600 aa, Schizosaccharomyces pombe 972h-; identical to SEQ ID NO: 12384

SEQ ID NO: 104935 - DNA, 933 bp, Corynebacterium glutamicum ATCC 13032; identical to SEQ ID NO: 89405
  CDS (1)..(933): transl_table=11

SEQ ID NO: 104936 - protein, 310 aa, Corynebacterium glutamicum ATCC 13032; identical to SEQ ID NO: 89406

SEQ ID NO: 104937 - DNA, 1215 bp, Fusobacterium nucleatum subsp. nucleatum ATCC 25586; identical to SEQ ID NO: 12385
  CDS (1)..(1215): transl_table=11

SEQ ID NO: 104938 - protein, 404 aa, Fusobacterium nucleatum subsp. nucleatum ATCC 25586; identical to SEQ ID NO: 12386

SEQ ID NO: 104939 - DNA, 978 bp, Streptomyces coelicolor A3(2); identical to SEQ ID NO: 12387
  CDS (1)..(978): transl_table=11

SEQ ID NO: 104940 - protein, 325 aa, Streptomyces coelicolor A3(2); identical to SEQ ID NO: 12388

SEQ ID NO: 104941 - DNA, 1230 bp, Streptomyces coelicolor A3(2)
  CDS (1)..(1230): transl_table=11
atgagctacagcacagcgtcctgcgtcgctcccgtcaccctcgacgacgtgcgcggagcccagaagatgctctcgggcgtggcgcgggtgacggccatggagggcagcaggcacctctcccagctggtcggctcgccggtgcacctcaagtgcgagaacctccagcggacgggctcgttcaagctgcgcggcgcctacgtgcggatcgccgggctgctccccgagcagcgggccgcgggcgtggtcgcggcgagcgcgggcaaccacgcgcagggcgtcgcgctggcctcgtcgctgctcggtgtgcgctcgacggtgttcatgccgcagggggcgccgctgcccaagatcagcgcgacccgggactacggcgccgaggtgcggctgcacggccaggtggtggacgagacgctggccgccgcgcaggagtacgcggagcggaccggcgcggtcttcatccaccccttcgaccaccccgacgtcatcgcgggccagggcacggtcgggctggagatcctggagcagtgccccgaggtgcggaccgtcgtcgtcggcatcggcgggggcggactggcggccgggatcgcggtcgcggtgaaggcgctgcggccggacgtgcggatcgtcggcgtgcaggcggagggcgcggccgcctacccgccctcgctggccgccggacgcccggtcgccgtgcagaacccggcgacgatggccgacgggatcaaggtggggcggcccggcgacgtgccgttcgggatcgtcggcgaactggtggacgaggtccgcacggtctccgaggacgcgctgtcgaccgcgctgctgctgtgtctggagcgggccaagctggtcgtggagccggccggagcgagcccggtggcggcgctgctgagcgagccggacgccttcgagggaccggtcgtcgcggtcctgtccggcggcaacgtggacccggtgctgatgcagggtgtgctgcggcacggcatggccgcgcagggccgctacctggcggtccggctgcggctgacggaccggcccggcgccctggccacgctgctcggggtgttgtcagtggtcgacgctaacgtcctcgatgtgagccacgtccgaacccatccgcggctcgggctcacggaggcggaggtcgagctgcacctggagacgaagggcccggagcactgcaccgaggtcggccgcgtgctgcgggaagcgggatacacggtcatcgcctga

SEQ ID NO: 104942 - protein, 409 aa, Streptomyces coelicolor A3(2)
MSYSTASCVAPVTLDDVRGAQKMLSGVARVTAMEGSRHLSQLVGSPVHLKCENLQRTGSFKLRGAYVRIAGLLPEQRAAGVVAASAGNHAQGVALASSLLGVRSTVFMPQGAPLPKISATRDYGAEVRLHGQVVDETLAAAQEYAERTGAVFIHPFDHPDVIAGQGTVGLEILEQCPEVRTVVVGIGGGGLAAGIAVAVKALRPDVRIVGVQAEGAAAYPPSLAAGRPVAVQNPATMADGIKVGRPGDVPFGIVGELVDEVRTVSEDALSTALLLCLERAKLVVEPAGASPVAALLSEPDAFEGPVVAVLSGGNVDPVLMQGVLRHGMAAQGRYLAVRLRLTDRPGALATLLGVLSVVDANVLDVSHVRTHPRLGLTEAEVELHLETKGPEHCTEVGRVLREAGYTVIA

SEQ ID NO: 104943 - DNA, 960 bp, Streptomyces coelicolor A3(2)
  CDS (1)..(960): transl_table=11
ttgatcgcgatcacggagatcgaagccgccgccgagcggatcgccggacatgtcgtacgcacgccgaccgtgccgagcccgggcctgtccgcgctgctcggcgtcccggtcaccgcgaagctggagctgctccagcgcaccggttcgttcaaggcgcgcggggccacggcgaaactgctgtccctgaccgaggccgagcgggccgcgggcgtcgtcgcggtcagcggcggcaaccacggcatcgcggtggcggtgatggccgccgccctggacgtgaaggccacggtggtcatgccgcgcacggcgccggcccgttccgtggagatcgccgaggaggcgggcgcgctggtgcggctcaccgacggcatggacagtgccttcgcgctggtcacccggctccgggaggaggggctgaccctggtccaccccttcgacgaccccgtggtggtcgcggggcagggcaccgtgggactggagttcgccgaggacgcctccgacctcaccgacgtgctggtcagcatcgggggcggggggctgatcgcgggcgtggcggcggcgctgcgggcgctgcggcccggggtacgggtctggggcgtggagaccgagggcgccgaggccatgtcgcgggcgctcgcggcgggcgggccgctcacggtgcccctgtcgtcggtcgtcaccacgctcagcgcgccgtccgtctcccggctgacgtacgaccatgtggcggagctggtcaccgaggtgctcgtggtgccggaccgggaggcggtgcggggttcactcgcgctcgccgagcacgccaaggtgtggaccgagccggccgccggctgtctgctcccggcggcccggcgggtggtggagcgggtgggggacggagcccgcatcgggctcgtggtgtgcgggggcaacgccacggtgggcgacatggcggtgtgggcggaccgtttcggcctgcgctga

SEQ ID NO: 104944 - protein, 319 aa, Streptomyces coelicolor A3(2)
MIAITEIEAAAERIAGHVVRTPTVPSPGLSALLGVPVTAKLELLQRTGSFKARGATAKLLSLTEAERAAGVVAVSGGNHGIAVAVMAAALDVKATVVMPRTAPARSVEIAEEAGALVRLTDGMDSAFALVTRLREEGLTLVHPFDDPVVVAGQGTVGLEFAEDASDLTDVLVSIGGGGLIAGVAAALRALRPGVRVWGVETEGAEAMSRALAAGGPLTVPLSSVVTTLSAPSVSRLTYDHVAELVTEVLVVPDREAVRGSLALAEHAKVWTEPAAGCLLPAARRVVERVGDGARIGLVVCGGNATVGDMAVWADRFGLR

SEQ ID NO: 104945 - DNA, 1119 bp, Xanthomonas campestris pv. campestris str. ATCC 33913
  CDS (1)..(1119): transl_table=11
atgcctgattccggccgcccgaccacgcaggagccagacgtaggcgaggtcgccgtcagcgtggccgacgtgctggccgcgcaggcacgcctgcgcaagtacctatcgcccacaccactgcattacgccgaacgcttcggcgtgtggctgaagctggaaaatctgcagcgcaccggctcctacaaggtacgtggcgcattgaatgcgctgctggccggactggagcgcggcgatgagcgcccggtcatctgcgcctcggccggcaaccatgctcagggcgtggcgtggtcggcgtatcggttgggcgtgcaggccatcacggtgatgccgcacggtgcgccgcagaccaagatcgccggcgtggcccactggggcgccacggtgcgccagcacggcaacagttacgacgaagccttcgcctttgcgcgcgagctggccgaccagaacggctatcgctttctgtctgcgttcgacgacccggatgtgatcgccggacaaggcacggtgggtatcgagttggccgcgcatgcaccggatgtggtgatcgtgccgatcggcggcggtggcctggcctccggcgtggcgttggcgctgaagtcgcagggcgtacgcatcgtcggcgcgcaggtggaaggcgtggactccatggcccgcgccgtgcgcggcgacctgcgcgaaatcaccccggtcgccaccctggccgatggcgtgaaggtcaagattcccggcttcctgacccgtcgtctgtgctcgagcctgctcgacgacgtggtgatcgtgcgcgaggccgaattgcgcgagacgctggtgcgtctggcactggaagagcacgtcattgccgaaggcgccggcgcactcgcgctggccgccggtcgccgtgtttccggcaaacgtaaatgtgcggtggtctctggcggtaatatcgacgcgactgtcctggccaccctgttatccgaggtgcggccgcgtccgccacgcaagccgcgccgtcgcaataccgagcggctccgcaacgaacgcagcaccaaagcatcaccgccatccattgctattccccgcccatccgcagtcgcatcaacgcctgtcaccgccatcgcagtagaggagtcttcctggtga

SEQ ID NO: 104946 - protein, 372 aa, Xanthomonas campestris pv. campestris str. ATCC 33913
MPDSGRPTTQEPDVGEVAVSVADVLAAQARLRKYLSPTPLHYAERFGVWLKLENLQRTGSYKVRGALNALLAGLERGDERPVICASAGNHAQGVAWSAYRLGVQAITVMPHGAPQTKIAGVAHWGATVRQHGNSYDEAFAFARELADQNGYRFLSAFDDPDVIAGQGTVGIELAAHAPDVVIVPIGGGGLASGVALALKSQGVRIVGAQVEGVDSMARAVRGDLREITPVATLADGVKVKIPGFLTRRLCSSLLDDVVIVREAELRETLVRLALEEHVIAEGAGALALAAGRRVSGKRKCAVVSGGNIDATVLATLLSEVRPRPPRKPRRRNTERLRNERSTKASPPSIAIPRPSAVASTPVTAIAVEESSW

SEQ ID NO: 104947 - DNA, 1119 bp, Xanthomonas axonopodis pv. citri str. 306
  CDS (1)..(1119): transl_table=11
atgcctgattccggccgcccttccgcacaggagccagaggtaggcgacgtggccgtgagcgtggccgacgtgctggccgcacaggcacgcctgcgcaagtacctgtcgcccacgccgctgcactacgccgaacgcttcggtgtgtggttgaagctggagaatttgcagcgcaccggctcctacaaggtgcgcggcgcattgaatgcgttgctggccgggctggaacgcggcgatgagcgcccggtgatctgcgcctcggccggcaaccacgcgcaaggtgtggcgtggtcggcgtaccggctgggtgtgcaggccatcacggtaatgccctatggcgcgccgcagaccaagattgccggtgtcgcgcattggggtgccacggtgcgccaacatggcaacagctacgacgaagcgttcgcgtttgcgcgcgagctggccgaccagaacggctatcgcttcctgtccgccttcgacgacccggacgtgatcgccggccagggcacggtgggcatcgagctggcggcgcatgcgccggacgtggtgatcgtgccgatcggcggcggtggcctggcctccggcgtggcgctggcattgaagtcgcaaggcgtgcgcgtggtcggggcgcaggtggaaggcgtggattcgatggcgcgcgccgtccgcggcgatctgcgcgaaatcgctccggtcccaacgctggccgatggcgtgaaggtcaagattccaggcctgctcacgcgccgcctgtgctcgagcctgctcgatgatgtcgtgatcgtgcgcgaggccgaattgcgcgaaacattggtgcgcctggcactggacgaacacgtcattgccgagggcgctggcgccctcgccctggccgccggtcgccgcgtttccggcaaacgcaaatgtgcggtggtctctggcggtaatatcgacgcaaccgtgctggccacactcttgtccgaggtgcggccgcgtccgccacgcaagccgcgccgccgcaataccgagcgactccgcaacgaacgcagcgccaatccgccacccgccacacacgttctttcccgcccatccgcagtcgcttcaacgcctgtcaccgccatcgccgtagaggagtcttcctggtga

SEQ ID NO: 104948 - protein, 372 aa, Xanthomonas axonopodis pv. citri str. 306
MPDSGRPSAQEPEVGDVAVSVADVLAAQARLRKYLSPTPLHYAERFGVWLKLENLQRTGSYKVRGALNALLAGLERGDERPVICASAGNHAQGVAWSAYRLGVQAITVMPYGAPQTKIAGVAHWGATVRQHGNSYDEAFAFARELADQNGYRFLSAFDDPDVIAGQGTVGIELAAHAPDVVIVPIGGGGLASGVALALKSQGVRVVGAQVEGVDSMARAVRGDLREIAPVPTLADGVKVKIPGLLTRRLCSSLLDDVVIVREAELRETLVRLALDEHVIAEGAGALALAAGRRVSGKRKCAVVSGGNIDATVLATLLSEVRPRPPRKPRRRNTERLRNERSANPPPATHVLSRPSAVASTPVTAIAVEESSW

SEQ ID NO: 104949 - DNA, 1410 bp, Drosophila melanogaster; identical to SEQ ID NO: 89407
  CDS (1)..(1410)

SEQ ID NO: 104950 - protein, 469 aa, Drosophila melanogaster; identical to SEQ ID NO: 89408

SEQ ID NO: 104951 - DNA, 1038 bp, Yersinia pestis KIM
  CDS (1)..(1038): transl_table=11
ttgcaggaagcagctagcgcgcagacaacttgctgtaccacggatatattgaaaataaaatttaaaggaatcgagatgaatacgttgtttgatgccatcagagaggcccaccagatattacgcccacaagtgagagtcacgccgttggagcatagcccactgctatctcaacacagcggttgtgagatctatcttaaatgtgagcacctgcagcacaccggttcttttaaatttcgtggggccagtaacaagttacgtttactcaatgaggcacaacgccagcaaggtgtgatcaccgcctccaccggtaaccatgggcaaggtgtggcgctggccgcaaaactggcggggattaaatccactatttacgccccagaacaggcggcagccatcaagctggatgtgatccgtgcactgggggggcaaattgaattagtctccggagatgccttaaatgctgaactggccgccggtatcgccgctgagcaacaaggtaaagtgtatatctcaccgtataacgacccgcaggtcattgccgggcaaggcacctgtggcatggagatggtcgaacagcagcccgatcttgatgcggtgtttgttgccgttggtggtggtggcctgatttcaggtattgcgaccgtattgaaaacattatcggataaaacgcaggtgattggttgctggccagccaatgccaccagcctgtatacctgtctggagaaaggacagattcaggaggtggcagagcaagaaacgctgtctgacggaaccgccggtggtatcgaaccgggagcgatcacctttgcactgtgccaacagttaatcgatcagaaggtgctggtgagtgagcaagaaatcaaagaggccatgggtttgattgcccgtactgaccgctggatgattgaaggtgccgccggtgtggcactggctgcggcactgaaattggctccgcaatggcaaggtaagaaagtggcggtggtgttgtgcggtaaaaatatcgtgctggagaaatatctgggagctgtcagcggatgctaa

SEQ ID NO: 104952 - protein, 345 aa, Yersinia pestis KIM
MQEAASAQTTCCTTDILKIKFKGIEMNTLFDAIREAHQILRPQVRVTPLEHSPLLSQHSGCEIYLKCEHLQHTGSFKFRGASNKLRLLNEAQRQQGVITASTGNHGQGVALAAKLAGIKSTIYAPEQAAAIKLDVIRALGGQIELVSGDALNAELAAGIAAEQQGKVYISPYNDPQVIAGQGTCGMEMVEQQPDLDAVFVAVGGGGLISGIATVLKTLSDKTQVIGCWPANATSLYTCLEKGQIQEVAEQETLSDGTAGGIEPGAITFALCQQLIDQKVLVSEQEIKEAMGLIARTDRWMIEGAAGVALAAALKLAPQWQGKKVAVVLCGKNIVLEKYLGAVSGC

SEQ ID NO: 104953 - DNA, 1017 bp, Oceanobacillus iheyensis HTE831
  CDS (1)..(1017): transl_table=11
gtgagttgtcttggggatcgcttaactggtgaaaaagtataccaagctatgaagaaattaacaccgattgttcatcgtacaccattagtaacatcacatacaacggatgatattgttggaaaacatgtttactgtaaaatggaaaatcaacaaaaaactggggcatttaaatttcgaggagcaagttataaattaatgcaactgtcaaaagaagaattacaacacggcgtaattacagcttcagctggtaatcatgcacaaggtgtagctcatgccgctgcaaaattaggagttaaggcaacgatttttatgtctgaaggaacgcctctagcgaaaattaatgcgacaagaaattatggggcaaccgtaaatcttgttggagaaagttttcaagaagcttatgaggcttcacttcaacatcaaaaagtaactggtgctacgtatatccacccatttgatgattatgatattatggctggtcaagggacaattgcaatggaattactccgccaagaagaccgtattgataccattattgtcccaattggtggaggtggattaattagtggcattgcagttgctgctaaacatgtaaatagaaacattaaaataatcggcgtacaggctgaaggtgctgcagcaatgcatcaaagttatcattcgagcaaagtacattctttatcaaatgtttcaacaattgcagaaggaatagcggtaaaacaaccaggagatttgaccttgccacttattcgatcctatgttgatgatattgttacggttaatgatgaacaaattgcttcagcaatcatttacatgttggaaagaaataagacgttaatggaaggtgctggtgccgctgcattagctgcactatttgcacataatgacacgatctcatccaggcattgtggtgttatagttagtggaggtaacttggacatcagtaatatgcaaaaaatacaacatctatccagtaatattaataaaaatccagaaagagcatatgtggcgctataa

SEQ ID NO: 104954 - protein, 338 aa, Oceanobacillus iheyensis HTE831
MSCLGDRLTGEKVYQAMKKLTPIVHRTPLVTSHTTDDIVGKHVYCKMENQQKTGAFKFRGASYKLMQLSKEELQHGVITASAGNHAQGVAHAAAKLGVKATIFMSEGTPLAKINATRNYGATVNLVGESFQEAYEASLQHQKVTGATYIHPFDDYDIMAGQGTIAMELLRQEDRIDTIIVPIGGGGLISGIAVAAKHVNRNIKIIGVQAEGAAAMHQSYHSSKVHSLSNVSTIAEGIAVKQPGDLTLPLIRSYVDDIVTVNDEQIASAIIYMLERNKTLMEGAGAAALAALFAHNDTISSRHCGVIVSGGNLDISNMQKIQHLSSNINKNPERAYVAL

SEQ ID NO: 104955 - DNA, 1248 bp, Bifidobacterium longum NCC2705
  CDS (1)..(1248): transl_table=11
ttgaaggcgctgcaacgtgatcatgcagccgaactgaagctggccgccgaacgactcaaaggcactgcccgccacacggagatcattccttctccggtgctgagcgagatgaccggccatgagattctcctgaagccggaaaacctgcaggtcaccggatccttcaagatccgcggtgcctataacaagattgcttcgctcaccgaagagcagatcgctcacggcatcgtcaccgcgtctgccggcaaccatgcccagggtgtggcctatgcggcccgcgagcgtggagccaaggccaccatctgcatgccgcagatcaccccgccgctgaaggtcgatgccaccaaggcctacggtgccgacgtggtgctgtacggcgatgtgttcgatgaatccgccgcccacgctgctgagctcgccgacaaggaaggcatgatttacgtgccgccattcgacgattacgaagtcatctgcggccaaggcaccatcggtctggagatccttgaagacgtgccgaacgtcactgacgtggtcgtgccgctcggtggtggtggcctgggtgccggcgtggcgctcgccatcaagacattcaagcctgaagtgcgcgtaatcggtgcgattccggagggctcaccggcctggaaggactcgctggccgcgggtcgtgtgtctccggctgaccatgtggttacctccgccgaaggtgttgcggtcaagcaccccggcgacctgcccttcgctctgattaacgagttcctggacgatctggtcaccgtcaccgagcgcgacatcaacgaaatgattctgctcatgctcgagaagcataagctggtggtcgaggcggccggcgccgtttcgctggctgcgctggaacacctgaacctgcgttcgcgcaagttcgccgccgccaccggcccgcacgtggtggttccgattatgtccggcggcaatatcgacaccgtgaccatgggtgcggtgattcagaaaggtatgatcgcccgcggccgcatcatgaacttcgaggtcgagctgccggatactccgggccagctcgtcaaggtggccaccctgcttgccgagcagcgcgccaacgtcattcagcttgatcacgaccagttcaaggcatccggccactacaccaacgcggtgtctctcggcgtcacggtcgagaccaacggccccgagcacatcgaccgcatcctcgcggcactcagggaagccggattccagcccaagcgcatctactga

SEQ ID NO: 104956 - protein, 415 aa, Bifidobacterium longum NCC2705
MKALQRDHAAELKLAAERLKGTARHTEIIPSPVLSEMTGHEILLKPENLQVTGSFKIRGAYNKIASLTEEQIAHGIVTASAGNHAQGVAYAARERGAKATICMPQITPPLKVDATKAYGADVVLYGDVFDESAAHAAELADKEGMIYVPPFDDYEVICGQGTIGLEILEDVPNVTDVVVPLGGGGLGAGVALAIKTFKPEVRVIGAIPEGSPAWKDSLAAGRVSPADHVVTSAEGVAVKHPGDLPFALINEFLDDLVTVTERDINEMILLMLEKHKLVVEAAGAVSLAALEHLNLRSRKFAAATGPHVVVPIMSGGNIDTVTMGAVIQKGMIARGRIMNFEVELPDTPGQLVKVATLLAEQRANVIQLDHDQFKASGHYTNAVSLGVTVETNGPEHIDRILAALREAGFQPKRIY

SEQ ID NO: 104957 - DNA, 1251 bp, Streptococcus mutans UA159; identical to SEQ ID NO: 12393
  CDS (1)..(1251): transl_table=11

SEQ ID NO: 104958 - protein, 416 aa, Streptococcus mutans UA159; identical to SEQ ID NO: 12394

SEQ ID NO: 104959 - DNA, 1053 bp, Pseudomonas putida KT2440
  CDS (1)..(1053): transl_table=11
ttgctgtttgtggaatattattctatggtggacaaattatccacgcgcctgcaaggacccgtcatgccagccaccccgtccgttgatgcccagttccttgatacattgcaccaaaacattcaggacgcccacgcggcgctccgcccggccgtcagcattaccccgctcttgcacagccctcgtttgtcggcactgaccggctgtgaagtgctgctcaaatgcgaacacctgcagcacaccggttcgttcaagtttcgcggtgccagcaacaagatgcgcctgttgccggccgaggcacgcaagcagggggtgatagccgcctcatccggtaaccatgggcaggccctggccctggccggcaagatggctggcgtgccagtgaaggtctacaccaccacgggcgcatcggcatacaaaacagaggcaatgcgcgcgctgggcgccgaagtggtctgcctgcccaccgacccgctgagtgcagagctggaagcagccaggcaagccaaggcccagggcgtacctttcgtgtcaccttacaacgacctgcaagtcattgccggccagggcaccataggcatggagttgctcgagcaggcgccagacctggacgcggtgttcgtcgccgtgggcggtggcgggatgatttccggcatcggcgccgccctgcgcgtactcaagccgggcactgagatcatcggctgctggccggcgaatgacccaaccctgcagcaatcactcaaggccggtgaaatcatcgaattggatgcctgcgaaacgctgtcggatggcacggccggcggcgtcgagccaggctccatcaccttcccgctttgccaggcgctgctcaccgataccgtgttggtcagcgaggatgaaatccgctgcgccatgcgcgacatcgccagcagtgagcgctggatcatcgaaggcgctgctgcggttgcggtcgccggcatgcagaggctcgccgaacgctatcagggcaagcgtgtcgccgtgatcctgtgtggccgtaacatcctgctggaaaagttcctcgaggccgttcaatga

SEQ ID NO: 104960 - protein, 350 aa, Pseudomonas putida KT2440
MLFVEYYSMVDKLSTRLQGPVMPATPSVDAQFLDTLHQNIQDAHAALRPAVSITPLLHSPRLSALTGCEVLLKCEHLQHTGSFKFRGASNKMRLLPAEARKQGVIAASSGNHGQALALAGKMAGVPVKVYTTTGASAYKTEAMRALGAEVVCLPTDPLSAELEAARQAKAQGVPFVSPYNDLQVIAGQGTIGMELLEQAPDLDAVFVAVGGGGMISGIGAALRVLKPGTEIIGCWPANDPTLQQSLKAGEIIELDACETLSDGTAGGVEPGSITFPLCQALLTDTVLVSEDEIRCAMRDIASSERWIIEGAAAVAVAGMQRLAERYQGKRVAVILCGRNILLEKFLEAVQ

SEQ ID NO: 104961 - DNA, 1593 bp, Pseudomonas putida KT2440; identical to SEQ ID NO: 12395
  CDS (1)..(1593): transl_table=11

SEQ ID NO: 104962 - protein, 530 aa, Pseudomonas putida KT2440; identical to SEQ ID NO: 12396
